United States Patent Application Publication US 2015/0240253 A1 - sequence listing, part 16

SEQ ID NO: 73139 - DNA, 719 bp, Zea Mays
caataggtcatgaatgccaatctttcaaaataaaacttgcttagaaaccagtattggattgtcaggactagaacgctagacctggtacgaaaggccttaagaatagtggggtagataggtggctatataagtaggccatataggccaacactatgatagaagggatgccctaggagcacccctatgattgatgataggacgtttcttcaagcatggatacattgtaataaatcagcactaaaaagggaaaaagtgattaattaaaagttgaagggaatatattgaatcatgacccctaacaacattagttaagaataagtagcaggaaggtgggttaaaaacagattaatccaaactaatcatcctcctttaacttaagcatgcttatccccttaccactaccgtagcacttacacttacccctccttcacatgtgacttcacctacccccaccgatggagaagacacctgcttcacctttgactacctttcccgagagggctttccctctatcttgtgggaggtgctctgctccgctgggtaccccacaccccctctatacatggtgcagttgtacgaggagcaccgggtgccacgctgtagggttcggctaaccctggagtatcaccccctgcggcctgggtggcgttcacttgattctgaaactatcggattcagggcaggacaccactgatgccatggcactaaaggccttgacg

SEQ ID NO: 73140 - DNA, 1792 bp, Zea Mays
attggcatatcatgtgtttgtcacacctagagtgcattcactagacaaaccctagaagtaccaaaaatcctcaatagacccttggaaaaccctggactgaaaccctagggggttatctgtaaaagtgtgcacattttggacctaagtgcaaaaatcatgcaaataaggtatcttaggtcatatggttcacatatttggagattttcaaatgaaaccctaagttttgggcttatttgcaaaaagccacatttgtgctccaatggctaagtctgcatttcagtggtatagggtcaactttgaagccctatatcttcaaaattatgaagatttttccctaggtcaacacatcaagtttgtatagctataaaaggacaacaactttgctatagggattatgccttggtgccatgaaatgttttgagataattaggctcaaagttgggttgtcaaactgccctaagtctgaattcagacagacagtaagattggatgaactttgggctcaattttaagtaggatgtagtgacattttgtgggtgcacaatgtagcaaagttagagctggtctattaggctataactttgctgcagagcattggtctagttgccatataaaattgagaggaaattcgccccaaagctggtttgtcagactgactgatgaagcgtctgatggtacagtgatctgaacttgatctctggttcagcccccctcatcgccggtggcctttgcgcccggattcacgccggccatcgcgattcgtgccttggacgagtggatttcgctcaccgtgaaaagatctcgtcgtggatgggttcgagttactgtggcctcggtgtccccgaccccttgcaccggcgacgtggctttacggccgtcaccggagttggcgtccttcaccgcgattgtgccactccccaagcatttaaccacatcgatactagccgcaccagctcgtcgataactgccgtagctcctcaaccggtgagtgccacggtaaaacgcgccggtgactcaccccttctttccggccgccgcgcgtcttcaccaaattctctggccaccgcttagcgccactataaattgacagcacggtctgctgcgttgggtcatcaccaagcccgagcacccgttcctgccgccgattagtcaccacaactctccaatttcacgtttcccccaattctgtttccgccgccgcggtagagccctcaccgtggtcagcgaatcccaggtttgttcatgctccttgctgtcttgtttcaacattcttgggttctcctgatgcttcccgaccctgccaattggactaggaccccttagatcgccgggaacgcgcttgattgcccgtagtacccgctgtcaccgtggacagagtgtgttagagcgccgttggtgaaattagttgaggagaaactcttgttagggtttgaatttggtctcagccatagtagagcaccggtcgttgcgttaatcggctagtacaagctcgccggagttcggttccctgccgttcgccgtcgtggactggggattgtgaagagaggaaagcgcaagggtgtttctgcatgtgtcagcgagacagaggaatagtgggagggactctttaaagaatttcataacgtcagggctctctgcgcaaaaccgacagcgtgggcacgctttcgctagtgaatgggccgacccaggctagtttcagcccaatcctgtagcatgttttcctttttctttttcttctggactttgagaattcccagaaaattatagaaaaatgctaaaaatactagaccaa

SEQ ID NO: 73141 - DNA, 551 bp, Zea Mays
ttgggagcagccagaatggctctgaagttgaaaaggcttgctaaggctttgcagtcttggagtcataaaaggatcggcaatgttaaatctcagcttagcttggccagggaaattttgcacagacttgagattgctcaagacaatagactgctgtgtggggaagagatatggctgaaaggaaggcttaagcaccactgcctggggcttgcttctctggaaaggacaatagctagacttagatcgcagatcaaatatctaaaagagggagatgcaaacacttccttttttcatctacaggcttgctatcagaaaaagtggaactttatctctgaactagtgcatggggaccagatcgccacctctcaagagcaaaagcaggaggtcttgtttgaatttttctccaatttgttgggcgtagcgaaacagcgtgagttcactctagatttggaggcttgccacagtgctgatgttgatcttggggcttggaccttttcattacagaggaggaggtccgggccactattgctagccttccctcggacaaagccctg

SEQ ID NO: 73142 - DNA, 502 bp, Zea Mays
taaaatatttcaaaatacgatctatacatccttttgatgcaaggtacaaaaaacgactactaattatgctctttactaaacactaaggcctggttttattaccaaaaaactaaggagatccatgagaagaaatctctttttatccccatagatcctcctccaactctctggtcactagataagcactaaatgcagtaacgatcgttttttaacgattttgagcacgagtgctcctcctaccatgcatatagcagtatctgaaacacccatatttccgtctggatttttgctcggcacaaatgctccccttttttccccggccaatggccagggcacacgtcccttttccacgaggcctttttacgagatttttgctggggtgccgctgtcgctggaagaagataagattctatatacggacgagggacgattcgataagctggctggcgtgaatctcttccttcacgtcgaggcggaaaagtacagaagaggagggacaaaa

SEQ ID NO: 73143 - DNA, 594 bp, Zea Mays
atgattggctaaagggaagagaaggacactccagagaagaacgtttctgatgccgaaggtaataccgatggagatgatgccgaagatgatgccgatatcttaagtccaagcagacccagtcacattgaattttgcagatccaccgtgaaatctgatgatttggttttaatgaagaagcttggttatgttggaaagaacgatgatgacttggtgagattcgcaggtgacgaaattattccagagccgaaggatgatgaggtagtggtgttcaagagcttcttccgtgcagggcttcgattcccattgtacgagatgattactgaagtataaaaaaggtttgaaatatatcttcatcagctgacgccaaatgcgatagagagacttagcatctacatttgcgctctctcaagccagggcatgagcgcaaatgttgaaggcttctactgagtccacgagctgcattatcaaacaaaggctagggcagatgggcttcacaaggactttggttgttacaactttgcataccggaaaggtaccaaggctcctttgatcgtatatcgtacaaaatggcatactggctggacgagcgaatgg

SEQ ID NO: 73144 - DNA, 675 bp, Zea Mays
ccccaatggcgcacatgaccgctcgcacagaaacattcttcctaggctttggaggccttggtgcaatggtggcgcacatgaccacttgtgcgcttcgaaggccttggcgcaccgatgccacattggacctcttacacataaagatgtttttcatgcattggaggcttggcgcaccagtggcacaccggacttgtcaaaaggcaatggctatttcctgacaagtcataacagctactaactgagaactctaacaggggctcggtgcaccaccgaaccgacactattcaaggttcgatgcgtcacctatgttgcggaattggcccacttctttcaatgctattttggtggttgtgggctataaatactcccaaccagcacattgaagacacgagagcaaccccaaccaaccgtacatcaattgcaactactcttacacattcaaagccacgcaagcgcgcatctaatcgatttgagtgaagagagacttggtgcttgtgttatcgagtgttgcaaactcttatgctcttgatttggcttttcattctcgctctcaccccattgtcacacgttgtaaatctaagaaagagactcggtttcttgttgtggaggcccttggaggattttgtaggactgatgaggcaaccggagggggtgaatgggagccactaaaaattc

SEQ ID NO: 73145 - DNA, 338 bp, Zea Mays
tatggtttggagaccgattggttgttcccaagaaccccgagctcagaaagaaaataatggatgaggctcacctttccaaattttccatgcacccaggcagtaacaagatgtatcatgatctcagatccttgtactagtggaccagaatgaagagggaaattgctaagtatatatcggaatgcgacacttgccagagagtcaaggccagtcatttgaaggtagcaggcaccttacaaccccttcccataccatcttggaaatgggaggatatttgcatggatttcattgtgggattgcccaatacctcccggcaccatgactctatctgggtcattgtg

SEQ ID NO: 73146 - DNA, 377 bp, Zea Mays
gagctgctcccatatgggcggcgaagaatgtggtcattcgttataggagttcatcagcatcccataaagtggttgggattgggcatgcctatttgcagtcgatgggtcctgaaggttttctttagtttagacatcgtgtgatggaaaactagtaatggtagatttatcaaacgcacgtgctagtctcctataatcatgttgtacaccaactaagatttgttgcatttgttcccgttgttcttctacgtaagaacgaaaagattggatgacgtcgggtttacttacaatgggtccgattatagcgggacgaaggttcgccaggttgtattctctcaaccggatgagcttctagtttcagtcaaccttgaaatcaacca

SEQ ID NO: 73147 - DNA, 649 bp, Zea Mays
gtaacagtgtcggacgggccccgggtgcagaggaggtccccgagcctgaaggcgatttgatagtttttgaggcttttttgttgccggtcttcacctcccgacacattgattcgtggtggaggtgttgcaaaggtttgaagtgcaagtccaccagttgacgccgaacgtcgtggtggcactaacgaagtatgtctgggcagttacttcctacggcgggcagctgtctgtggagatcttcaccaaaaattattgcctgcattggcagagaggaaaataggaaataagatagcacaattcggatcgtgcaccttcacaccgaggactgggaagacttcggctgaggttgtggagatagtcccctgcgctaggaacaaatggggtaactagtgggatttttggttctatgtggctcccggtgacgtcgaaggcctgccgagcttgcctccggccattctgtgctcacactgctatgtggcgtttcctcgattcgaggtggcagaggaagacgaagacgaaggggcccttcgacatgctgcccacctaagtagcgggcgtgacttggttgaggaatttattgcctatggagtgtggcccttggcgcacggctgggtattgggccaagtgacccccgttggatgccaaccctggg

SEQ ID NO: 73148 - DNA, 796 bp, Zea Mays
gggaagtaggggcagcactggaactcccagcctcatgatcatgtgagcgtggaggcacaggaggcggaggcgggatcccaaaatcatcatcatcatcatcgggaacggctgtgccctgagcctcaaactgatggaatgccgcatcctctgcctgagtgtctggcactggatcaggtactggcactgggtcctcaggggctggacgataggatccaaaataatggataactacatggaaacctcacatgagagagagagaatccaggcaggagaggagactggctcacgggtaggcgagatcactgaaatgacagaagaggtgagaatgtattagtcacatagtcataagtatatgaaatgtgaataaatacatacacagagaattatgacacagaaaatgagtgatttggcgatatagaggtcaaacgacgcgaaaacgacgtttgaacgaggaatagtgccataggaggtttgatattggaattgaggcatgaaatgacttggaattgagctgatacttcacgagtaggtttatattggtaaatatgagtgaagtgtgcgcttggtttgattttaggcgaagaaagtggaattgtggcactcggctcggaatcgatcgctagaaatggggatttgtggaaatttggactctaggatatcggattggcgtgaaatttggcgaagatgttactagaggtggcatgaaggtgctggaaaaatctaggactgatttgagcaaatttgactggtttgggcattttattgagcacctagcgtgcgagggtttatgtttcga

SEQ ID NO: 73149 - DNA, 686 bp, Zea Mays
tatgaatctgagagaaaaatcgatctcaagatggtctgtcagaccaactaaatgccatttgccatggtaccgtaccaggctggggatcagattgccagcgtagcagcttcaccgccgacgaccgatctccgccacgattcgtgtcgtcgtcgtttcaatttgtgctcggggcaagtggataacacccggagtacgtcaccggggataaactaggccagtaaacaactccggccgccgtaccaagttcaccgcggtggaatccgataagtatgtcgatgaccgccgtcttccggccttgcaccgcgtgtctaagcctcgccaccgcatcgccgtgactcactttagctccccgttgatcgccggagtgaatgccacggcaggggacactaattcacgcacgccagtgctcttctccacctccgactgccgcgcgtccccactcaaattcccggccaccgccctcccgtagtataaattccgccacgagctccgtgaggtagttaagcatccagccaccaagaattaacctcgctcgttcatcagagtgtgcgaattttgaactttccccaaatccgcgcaagaacactgtaagagagaccttgtcgcggtcagctcagctcaggtccgatctcgccctctatgttgttgttccaacaccctttcatgctcttgatgctcaccgaatc

SEQ ID NO: 73150 - DNA, 741 bp, Zea Mays
catcgttgaccattgggctcttctatggcgcattgtgtaatgcctaccgctggaccagcgtgatgcccaatttccctctctaaaacctctcttatgccatcgaatggagatagtatggcccgatgctgcattactggctcagtccaatgcatgctcctctatgaacaccaacagtgtatagttcgatgcctgtccttccggcggtctgatgctttttggacgcctttctactcttcggcggcctatggtctgatgtcggatccggttcgacgctcagtgtggtacctatttgacatgtttctttgcgatctttttgacctctgtttttcttttaggtcttcaacttagtttctaacatcttgcttgaggtgttgatcattcggattgccactttgtccaagtctaaatccacttcatgtcctattgaactacataaaaatactgctatcaaacaatgtttgttcaaattgttatgttgatcatgtctaaaactaaacttaagattatagggtccacttttttttacaatattaccggtgctggctcacggtttgaaccagcagtggtaactgttttgtaggaaaaaattcatattttttcatatgacattggattaagacaatctttacatcaataattctgtttcatagtttttttaaaattttagatggtttataagtgcaaacactcaaatataatttctcggaccaaagttggcatgatcaacaatgtcaaatgaag

SEQ ID NO: 73151 - DNA, 416 bp, Zea Mays
ttaaaaggtattaatggctagaaatttgtatcaagtcatgttatgacacctaaaagtcagcaaaaatgagttttaaagaattacccactgttaaataatagttgtagttcaaagcaccccttctgccctaaaatttggtaattttgtccagagaaaactattcactttctgatccccaaattttgagacagagcaacacacaccagtaacaagccactgtaatatttgcagaatttttggaattttataaaagcaacttgtagttcaaacctactccaaaacattaaaagaataaaagaaaaggaaaggagaaataaaccccacctcaataagtctaacttgagaacttatcatttatcactaagacttaaaaagagttcagtagaaccccaaaaatgaacctaccccttacctta

SEQ ID NO: 73152 - DNA, 805 bp, Zea Mays
cacgactgaaagggtacgctctaatttggaccgccagatcgattccaacggtcgggattagatccgccataatccgaaccggtacacgttggccgccatcggatcgatgatcaacggaccaaagccatccacaccagccctcggtcgtgaccgctagatctgatcctaacgcccaagatttcatctagccgaatgggtatgcatggcgaaatctcagccgttaacatagaaatcggtggacataatgcttgcccccaaccttcacctccaccggtcatcagcagaaggcagcaccaacatccctatggcggcgccacggtttccccacggtggaagtcgccggagttcttcgggacggtgccccattgctccccctacccctcaacaccgagattcgcaacgaggagaaagatttgaacacgtcggggatacttaccgccgtagaagggctacggagggagctggcctcatttgacaatggcaccaggcgcggaggtgagccataggtgagaactcccggccatgccccaccgccatcaagccagcagatgcgttgcctaggtgcagcgcagattggagtatccccagcttccctcgtaaagccattaccattgcttgactacgaccctgatgtgcactctctctcctttcccttccccggatccctggcaaccccaaggctgcagcccgacatggaggtcgaagacaaccgcaccaccgcaacgaaacgacgggataccctagatttattgtccgaacgcaaggccgaggaacagcaaatcccattgacccgcctaaaacctcg

SEQ ID NO: 73153 - DNA, 276 bp, Zea Mays
aacattgctcagtttcatgaagacgaagcttatgtggaggatgaactctctgatggcggtgaaaacttgtttggcagcaatcatgatagtgttacccctgcagtacatccatctcaaggcaaccctatgaatggtaccccagcaatgcagacaaccaatgctaccccagtagtgtagtcatctcaaggaaaccatgccaatgcgaccgtagcagtgcagccctgtcaaggcaacactattagagctaccccagcaattctgcctcttcacactgaa

SEQ ID NO: 73154 - DNA, 1031 bp, Zea Mays
tgtactacactaactacaaaatacctgtacgcattgaacctactactctaactagcacgttcgctccataacgatgtattttaatccgtatcaacttgtaatacttttagagtgttttgtctctgtgattacagctactacagtgcctcggtgcttcttttgcccataaggtgttcggtgaaatgcttgtgacagtttagcttgctcctttgggcccgctttcttcgatgcgtccgaccctcaacaaatataatatccctcttttcctaagcaaataggccagttgtgtgtgtgtgtgtgtgtctgtgtttttgttctctcaacaagcatggctagtttgcttttgtcacatggaatgaagtatatcaagaacgtgcctccttttggagactactacttgatcatcacatgaggtctcacgtagatgcatgatgtggtgaaaggcccaacaccaactgtgacgacgactttgcaactgttgatgatgactatggctaccctgaaggcgatggctgcattggaggcgtgatgacgatggcagcatacaccaaagagatgaacactctaatgacctcgacggtgcatgcatgaccatacaggccgatctacatattctatgccttaggatataatgggagtggcagagaagaaagactaaagccaccaattccatgttaactgcagggatggcatctaacttattttgggcccctttgatgacaggagactagccttttgctaaaatgtactggtacaatatagccccctgtggcatggtatatgtataggttgccaatatatatgaagaatggtgttgtaatgaacctatggatgctagactatatgatatactagctaggtcaatttgagcgtggctgttatcctctatatatgttttcttgactaatttcgaagctacacatgcattaacttggctgaaatctcagccaaggaaattgggggtaataaccgccaaggaaagatcaattaataacttgacagtttattactctcgtgaaaacataaatccg

SEQ ID NO: 73155 - DNA, 359 bp, Zea Mays
cgggttttatgtcgagatctagttgtgaagacaccgtatgtgtccagtgtagagagtgggtgtgcaccggacatgtctgatgcacctgactgggatgactagagggtaacgactagttcttttactttgggctatttataacctccaactcatgcatttgaggtctcttgtccatttcatcaacctaagaaatccattggagagaggaagatcctttgcctagcgagggacatgagagttgataatcgcttgattagcggtctcattggtgcatttagagtagcttatgtgtgttcatcaccctcattagacttggtctggtcaagtgagagttaatgcttgttatcttgatgatcaac

SEQ ID NO: 73156 - DNA, 297 bp, Zea Mays
atactaaactggttcagggatctcaagtgtgtaagccttaaactgtgatgtacgtaacgtaccctccattttgaatttgtagcgaaggaataacagtggaatgtgattcactcaccaaactagttctatccaggaccatggtcatgttccggcgttacagctccaaccaaggccagggcctgtgtcatgatggatgagcctgacaggagcttatagcaggcgaaaatgtgaaacatgactgtggtcctcgtttcggaaatgtcattccgagaacgtatgttgtatgcattcttcagt

SEQ ID NO: 73157 - DNA, 733 bp, Zea Mays
cctaggcatctcagctgaagaccagctcaagttacgagaacttcacattaaaaacaatcacctacaaaaacagaaggagatacttgaagccaagtgccagcgcatcaacatgcaagccaaagtcaggtagatgatcctagaagaagagaagaaagcagagagctggaacaggaaatcgcagaaacaaagggcgaggacgccccgacgccaccaacaacagcaggcccccgcactcaacataaaccctcgtcacccccatgccagtcttcgcactagctaccttccaagggttaaattaccttgatgaacgaagccttcttgcaccatagcttcaggcctccccttggctgcaaaacttcagagcaggcagttacccaaagtataatggcaatgcagacccaacttagtacatcatgagttaccatgttgcaatcgcattatctggggggacgacgccaccatggccaagtcattcatcatagcccttgagggcccagctttcacatgatactcaagactgccatcattatcaattgattcatcgaagacactctacgacaaattcctgttgacctttcaaggttacagacccgagacagacgccctggcagaattctcgctctataggcagcaagagaaagaaagtcttcgagaatattacaaaaagtttctcctgttgaaatcacaactaccttcatttgatgaccacatagccatccactatacaatcagc

SEQ ID NO: 73158 - DNA, 356 bp, Zea Mays
cgcgctctgggggcctgggggctggggcgacacgggcagtgcgaaagctgctggtcatcgcaggagacggcgatgcatctgcatacagtaagtacggcggggaaaccagtgcagctacagctcagtcgtgtccagtccaagtccagccacacatgtcgtgtccgaccatctgcgtcccagcatctgtgtatgtcgtttcaaaagcttgctgccactgcgcgacatcaatacatcgtcacgtcacacgcacacagttttagcttttgatttttcccccatccgtgacgctagctagttggctagttcactcgtagcatctctgctatttgcgccaatagttcctaatttattactcc

SEQ ID NO: 73159 - DNA, 1778 bp, Zea Mays
gcccctagttgtgatttcatgctaagtctgaatttcagattgatgagctcaactttggagccttgcaacttttaaagtatagggtttttgccctaggtcaccacatcaagtttgtagctcaaccataggagaacaactttgcttaaggttgtgagctcagttgttaagaaaaatccagagataattaagcctaaagtctggctgtcagactgataaaggactgaaatcaggctaacagtgaactaccaccaacttcaagcccaatttcagacatgattcaatggctttcagtggcaacaccatatggcaacattgtagatggtacattattctacaattttgctacagagcttgacatggactaccattaggaattgagagaaaattgggctccaaacttgactgtcaggctgtctgaaacgagctcgccatggtacagtgcctggggggaaataaaaatcagaatgccagctcagacgctcgtcgccggcgataagaacgccaccgcagcgtgggatggtcgtcggtggccgcggtaatatcctcggcgtcgtggcagaaggtcactgaggtggcaggccccggttaaacggcgacccccgtgccatcaccggaatccgccgcgcggaaagcttgccagcacatctgaaatccgcacttcttctccaactccggtcgacaacctataaattgagccctggcgctgcttcttcaccacatcgcaagcacgagtgcctgtgtaattgacttattttaactggaaagcttacacagtccgcaaattcctgttctctatgttcttaactccgtcgcgaagaacccctccgtggctagcattcctcgggttagtacttacccaattgcttcatgttcttgctttttgttagcctcctattgctctcagtgccaaccaatcgaaattcggccgaagcctttcaccggaacacacacctgctctgtaaagcgccgccgtgacaccctctccggagccccgcgtttctattcgtgcccagtccaaaatttagtatgtgtgtcacctctggtaggcctatgaagctttcccaagcttcaatttggtcgttcacgctgtcggttggtcggaacgcttccatccgtatgaccatccgccctgtcaccgtggaccggttgattcatagtcccaatggtgaaattggttgaggggaattgttcggtaggggttcaattgtgtccctgtcgcccgggagctccagccgtggcgtcgtccgaccggaatagggctcgccggagtacagcaaggtctgttctttgtcgtggattggccgatgtaaaagagtagaacccgggggacctttctgggaattgtcagcgactcatgcaatagtgattgaacccgcttcggaatgatcagtaagtcgaggccctttctgtaaagatgccagcgcgggcgcgcgcgcgattccgcgtgggcctgggccgcctggtttgatttcagcccagcactgttcagactttccccttttctttttctatccagctttagaaatatgcagaaaattatagaaaaatcctaaaattgtgaaaccaattttcctagacttattattttccctagaatttaataaaaatagttttatgatttttagaggaaataaggaattttaaggcattttaagtagtttaaagtagtagttctggatttttagaaaatagataataattccaaaattgcccaaactttttatgtgagctctacacattagttaggagccatgggtagagtttggtttgatttaaac

SEQ ID NO: 73160 - DNA, 426 bp, Zea Mays
aatcggattccgagtatgcccggttgaggctgcacatctcatcatcgagggcaccagcaggcatcgtgacaactaggttcattgggtgatcaagtgcaaggggcagattgaactaggataggatgaagcaacccaccacaacatagtagattcataccatgattagctattctttaagttctgtctccaaaacttgccaatatgccatgcatgcccagttgtctatcattgttgtctttagtttgaaagccaaagtgttggtagcagtcatgtcttgtgtctgctccctttgatagcaggcatgtcttatgtttgctccctttgatgtgatgttacatacctcacgcccagaaccctatcattatatggaagaaaattaattgttgataattttttgcatgtaattttatttggtaatccttgtga

SEQ ID NO: 73161 - DNA, 741 bp, Zea Mays
gttggccaaaccaacatatagttggtcacggcggcccggagttacctgaccattgaagaagtattgccacaacctctagtgggggtcaatccccaggaactcctcacacaaggtgatgaagcacaccttgtgcaggacggagttgggatgaaggttctgaatctatagctcgtagaagaaaagcagcccccgcacaaaggggtgcatggggaggtcgaacccgtgctcgtagaagggcgtgagcacgaccacctcgtcgtcctgggggcacgacacatcaccttccttctccaatctccaccgcgagatccccttgggggggaggaactctttcttctctggccgaggaggcgactatcctggatctagcaggctgggaacgacgccattcacacggaactggtgaggcaggtgcgagggtgcaaggagttgcaaactaacgggaagattccggcggaaggaagaaagcaagcactcgagtgcgaggaaacggtaaccacaaccaacccagagcatcctttttctatgattatgcgagggcgtaggaagcccaagcggtgcctggaaggtggtcccacgacgaacaagcatcggggaatttgtcgccccaattgcgagccacctcagtcatcgagcaaggaggaccgtgcgttttgtagggtctgcaccgcctaggacaaggcgccacaaggacgctccgcagagagtgcgcagttaaagggcgagacgattacccacgcc

SEQ ID NO: 73162 - DNA, 433 bp, Zea Mays
cgatctgaaacaatggacttaggcaccccgtgaagcctgattacttctttcatatacaagggaaccaactctgaagctgaatttgtggtctttatgggaataaagtgcgcagacttagttaagcgatccactacaacccatatagcatccctgcctcgaggagaacgaggtaagccaaccacaaaatccatagtgatatgctcccacttccactatggaatttccaacagcttcaataaacctgtaggcctcttatgttcggctttcacgcgctggcacacctcacaggctgccacatacttagaaacgtcaaccttcattctcttccaccagaagttttgcttcaaatccctgtacatttttgtttcgccagggtggacggtgtaaggcgttttatgagtttctatcaagatattcgtcttcacctctgatt

SEQ ID NO: 73163 - DNA, 347 bp, Zea Mays
cggtagacatgagccatgtcaatggcggcgttcccggtgacgacacaacgttccctaggctatggcgcggtatctgtaacaccccaggtgttactcagggtttctcctcagtacccatattgtgacctattatcacatgtgatttagttagagaaaaaggcaccaatcttggggagctaaaacttaatcaagtctttttcaccttaagaaccataccctgaccatatgaagcttaaggaagaagggaaatgccaaaaccctaaaaaccctttctgtagagcaatggaacactgaaaagaaactcaataaaagaccaagaaaatcacattgtcatgacttaggccaat

SEQ ID NO: 73164 - DNA, 1062 bp, Zea Mays
tgcaactgcaagtctcacctgccttccgcaccatcgtctccgacaattgccattcggaattggaggggcctctaaattcggaggggatttgagtttgtagactagtcataaagggaaataacgatgtgagacgactcctacacgaggctagtgaacatcctgatgctgatttgagcttgcgattaattcatctatggagccgcaatgaggagattggagcttctgtgacggtgctggttcgctttagtcacgaatctcatcgttcacctatgttttctcttcttcccttcgtggagcagaagttggggttccctgatccacgcttggaggagactctagacccttctctcaggttgttcaggctcctccgcagcccagcttgaatttggtgttccgaacaaagcagtgatttaacattgcatattacagcaaatattatatgccatcctttctcttgttagtgcaacattgtttgtttaatgaccacttgtgtagtgacattatgcccaaatgcttgcctcttgaaaaagtgtcttccacaaaaactgaatatattcttgtctagtgtacttgttaattcctatttaaatttaatctgcaaacttttttgaggaattgatttctctccagcattccaacagtttccatgtactaataagcataaagtcactggttgcatgcacctgctcttgatatgttgaatactattgtactaaggtataatcactggaagaggaagactgcatatctaggttgtaatgtattatttaagtacccaattttctagggcacctgttgaaaatcgcctgaccaaattctcactggatagttcgttcacagatatgttagagtatagcattcaagtactccatatcatgggcacctttttgaagtaaaatggcaggagcttttccttacaattaagacaggaaagagagttgtaagacacaacacaagtaacaatcctggctgcagcggcacagtaggccaggtgaagaacatgtaaggcctagacacaccaattgaaccaaaacaaggaactagagagagactagatatggt

SEQ ID NO: 73165 - DNA, 462 bp, Zea Mays
ctgaaacattcttggggtcattcaccgagttggagtaggcaggtacggatgtcttcaaccgaggacaattattcttgaagtgactggggtctccacagtgccaacaagcattggttggaggttggctgcttgcaacagatggggtgtggagggaactttgacccggttggttgaaacgtgacggtgcagaccttgttggcttgctgaagttcgaccctttggaagggaacccaaaagatcgaaccctctcgtgcctgtcctgctgctgagctcggagaacttgaaactttctcttgaggtggcctttttcttcttctcgtgctctttccacctggatggccttgttcaagaggtgcgagaaactgagtaagtcttggctggcgaggatggtcttgagttctggtctcaaccccttcaagaaacgggccatcttcttggcttccgtgctgacatcatcaggtg

SEQ ID NO: 73166 - DNA, 789 bp, Zea Mays
acacctggcatgatagtaggtatgtttccagtcgattcccatattgcaaaagtattatttgatactagagaaacgcattcttttattactgcatcatgggtagaagcgcataatcttctaataactaccatgtcaacacccattcaaattgattcagtcggtggtaaagttcgagccgatagtgtttgcttgaatgtaagtgtggaaataagggggatagagtttcccgctaacctcatagtaatgggtactcagggaatagatgtcatcctagggatgaattggctagataagtaccaagcaattatcagctgtgataagaggacaactaagttggtgtccccactaggagaagaagtggtggcggagttagtctcacctgagccaaggaaaggaggttgtcatcagatgaatattgatagcaaggatacagattcactcgagactatcaaggttttgtcagagttttcggatgtgttcccgaaagaattaccaggtatgccacctgagcggaaagttgagtttgccatagagcttcttcctggcaccgcccccatttctaaaagagcctacagagtatctggacccgagttggttgaactcaagaagcaaatagatgagctatcagagaaagtttacatcagaccaagcacctcaccttgggccacccctatcttattcgtgaagaaagatggcaccaggaggatgtgcatcgattatcgagatttgaatgagatcagaatcaagaacaagtaccccttgcccagaatagaagatctattcgaccag

SEQ ID NO: 73167 - DNA, 586 bp, Zea Mays
aaacaagacctaatttggtacattatggttttttctagagaaatcgtgcatgcaaatcacatgcccctcattttatatgagcgcaacttatgatgcatgctcaatggctcattgtctacttttcctccctttctttctatatatacacaattgcacataaggaccagaccaactaatcctagaaagatatccctactactatataagactctaatgtagacagtgcaccgtgttctgcctctcttctgcccacatccgatggtacgttccttcttccttcgcgtgcatcgttcgatcgataaccacttgcgatccatccgcccccattcgtgtcccacaccccaaagaccacatcgttcctccacagtcaccaccgccccaccgtgccattctgccccctcctgctcttcctggtgctcctcggctccgcatccctcgcaatcgacatagccatgtctctgtcgtcctccctctcctctctctctctgtctccctccaccgctcgtttgtgatgggcggcatggctccgagaatgggaaccacgggttcagtggggcgactcgccggtggccatgccctagttgca

SEQ ID NO: 73168 - DNA, 1539 bp, Zea Mays
gagtacagaaagcagaagcgagcaaaggccgagaagagtctagatgcgtatgtgcagatggcaaaggctgttacatttcaggttgcctgtgcgaaagtaataatcgagacggatgatgtagctgaaggacttgaggagctcatctctcttaataacgtaactgagtttgtcatgggagcagctgcagaccgacacttctctaggtacggatcagactaacaaaatcgctctacttccttaaattggatgcacatcttacttccatgattctgaatgattaaccagaacgtcaccatactctctcacacttgaggacctgggatacttaaacaagttttcttacaagctggttatgtggttgcagtaacagaatactctattttctcttctaacaagaaatggataggaagctatagcatactcagaccaagcaatttcttaagagcataccttgcaatcgcgcattctaacagatgctctcaaactgtagagaaatgaacacgccaaagtcgatgacagcgctcaagcttttcaagacagcagctccatcatgcaagatgtggtttacttgtaaaggtcatttgatatgtaccaggtaaagggcgaggtccagctgacaccagaaatttttagcacttccagacttctatatatctacgaatagtacattccatttcagctgggaacccaatctactgtgtcattaaacaagaactctccccctgattgtcccaaaatatagtcagtattatattcaggatagaggggttgcaaatgatgaaaaaatattaaccatgcatatcaacacttacagggaagcaaatgaaagccttcctgccatacttgcatcacctgaaaaaagcaacgcgccgctgtcaccggcgcacaacgtttcaagtcaaatgggatcaatggcaaccgagttagaatacaaagaatcaagccacaaaggatacatttcaagctcatcggctgcagcagaaatgacggaatgggattatctttttggaggtgactatcctaaatatacatacgagatgtaattcttgcaaaaaaaaagttatgtagttctttgcctcaaataatttagttaaaatattatgtactcacatataaaattttcatagaatgcctaagagattgaaatttagttgtgaagtcatctaacatgaattttaggcatcagtgactagtgatgcttacaaataaattcaagacattacaacttatgtatgtttgtaatcaattgtattatttacctatgctcaaagtaatatgataaatgaaacctagggtttgcacccaaaccaaccatttttagatagatgccaaaaatcaaagcaaccatttttagatcatggaaaagcacccactctcacatgcgatacatgtctacaaaaaggagaggtttcctatgtgagcaaagtgaagctgctttcagccatgcaaccattttgaaggtagtcacactgattttccactgcgatgataacacagattggagaatgatagtttacgggtcatcaggaactgacgatg

SEQ ID NO: 73169 - DNA, 734 bp, Zea Mays
cccccgccagtgcttctctctgtctctctggcgtctccatctcctccgccggcgacctcccccccccccaccggcgactctccggcgacctcgtgcccctctcttttcctctccggtgagcagcacttcgcccctctccttccctctatctctttctctcctgctctcagtctgtgaggcagtaaagcactaattctccaccctttgtccatttttcaaattcctgtcaaatccagtgaatccaaaaggtggaatgtgttcaattgtcctcattgagtatccctgcaggttactagctccctttgggagggtttcacaacctaatttgcctcaatctcccaaaacttaattcaccgcacgccaagtgttcggtgaaatgcccaaaccagccaaaaatgctccaattgaacccaaatttttcaggcaccttcacaacacttccagtaacattcttgccaaatttcacgccaatctgagattccaggcttaaatttcaccacattccccgtttcgagcgatcgtttccgagccgagtgtccaaatctctttttcttcgcctacattcaaaccaagcacacacttcactcatatacagctatacaaacctattcgttaagtatcggctcaattccatgtcgtttcgtgcctcaattcaaattccaaacctcctatgacactatttatcgttcaaacgtcgttttcacgccgtttgacctatcgatcgtctcgtctcg

SEQ ID NO: 73170 - DNA, 663 bp, Zea Mays
cggagcctctccttggacgcctacaccaccagaggcgaatatcaccatcaccggaccttccccgcccgcctgtacgtgaggaccatacgccaccgacctcctccgaccaatcaccgccatcatcaagctcgtcggaaccccacgagactccccgaactcttccccgacgcgctaccatcgccgataaggtataatcgctcaccggagttccgcggtttactgttccggcgagggtgggcgcgggttaaggatggggaaaacccagggggtttttcgcactgtcagtcacacaaatgaatagtgctctagggacctagatgtaataagaacggtaaaagaacccaggggcctcagagcaaatcagtttttccttttcatttcgaattaactttcatttaaataacaacagtcaacttcaaaaatgcaaaacttgagttttatccacccaaaattggtcaaaccaattttgctatactctgtgaaatatgaactatcaaataaaaataataaactccatgttcctgtactattttctagagctttgaattaaattagagaactgcccaaaacttaataatgaagagaaaaatagaaatacttctagattcagcttaagaaaatttatggagacactcacctagtagttgcactgtttaaaaataa

SEQ ID NO: 73171 - DNA, 616 bp, Zea Mays
ccgaggatgcataaatacacgacatcaccctaatggtgcaaagtctattacgatcccctcaaaggtgcgaagtctgtactatctgacacggttgaacaaaaaccacctaagggcgcagccaggtacgcgtcataagcgtccaacatcgccgtggaaagcgaggtccccatcccattctacgcacaacgattacaagtcaggacaacctcacaaaaagcgcagcatgcgatgtcattgtagtttacatacacacagtgaggggcccgccaaccatattgcacaaacaaaaaaatcacatcttgttgccctccctctctattgcgagccggggagggtagcgttttcactcactaccacaacacgagagtgagggcagcagacatgctacatcggctcagccttctgaataaggcctgcctctcaaaagttaaacaacatcatcttcaactcctcgccctcaaaaagattccaaagatccccctccccaatacacgtcccggatgtcgaggatagcaaatctcgttggccgcctcaatctagccgaagacgggatcgttccatccccatccgtcgacgcctcccacttcgcgatatcacgccaacattgtgcttcgac

SEQ ID NO: 73172 - DNA, 272 bp, Zea Mays
gttcatgtctgctcgtgcatatgtttgtacctttaaaagtagatgcttaagaatgttaagtcttggggatgtacagcatacacttcacagcactactttgtcttacggaccttcttcagccctcctgcatatttaccgaagaccttcctccacttaaactgcccagatttgcttctggacatttttaagaacactcccattctatgctcattcaattgataaggttgtcaccgttgatccataagattcaaagctttcatattcgagatgcc

SEQ ID NO: 73173 - DNA, 1087 bp, Zea Mays
ctaactgaaagagccctagaggggaaacctaaattttctctaaatctccccaacccgaattcaaaaacctatcatgttcacctagctcctcaactcaaatccaaatggaccaattgacaaaatggcgcctaattacttaagacatgccttggtaaagtttgacaccgaaccaagaccatttgacatgccttggcacgagtttttgtcgcgacctgggtgcagcgacagacccgacttgacactggcgtagctcctcgccctaagcatatcatagctagtgagaatggtttggagcagggaagagaacctacatgggacctttgccaagataggctcgctagggcagctaaacaggcgcttgtacatgggcagaagtgatcctccacgtgttcgacctcaactgagcgcgctctgaccgtgccgcacacgccacgagctccggtcggctcgaccacgcactcaaccccgcacccatgcctaagccctcgcttataagaagccccatccctcagccttgccctcccgcacgcactatacccttttactggcgactgaacgccggtaatcgccagaacaccgagcacgacgtcgtctgcaggcttgtcgacgtgtcgaccaccttagaccagccactccagcccaaccctatccaatctagctcaacggcaagcttccctagtggctagcaaagcttcccaactgctcggaccgaatgttacctcgccggacttgttccgtccgccggttccctcggtccaggtaatctaatcgtccattcttcgattcctcgcatgcgcacactccctgccactcagtgaacctccctgtgtcgtctgattgagctctaccatcgtggtatggctagtagagatatcgccggcgagctccaccgcctggcttcgtggccaaaccagctccgggcaccagagacgccgactcgtacctcgacgtgaccgccagaggctccccatcctcgttcgacccttcgagggaaccctaccaacgccgataagccgctccactatctttttcaccatgggtactatgtaacctagccagggactgcgggttagaggttaggaaaacc

SEQ ID NO: 73174 - DNA, 506 bp, Zea Mays
ctaggagcatttgtcaaaccaaatggcatcactaaccattcatacaacccaaattttgttcgaaatgcagttttccactcatctctagctttaatccttatttgatggtatccacttctcaaatcaattttagtaaaaattgtggaaccacttaatttatcaagcataccatctagcagtggaataggatggcgatagcgaatggtaatattatttatagctctacaatcaacacacatcctccaagatccatatttcttaggtactaaaatcacaggaacaacacaagggcttaaactttcatgaacaaaacctttatcaagaagttcttgcacttgcctttgtatctccttagtttctttaggattggttcgatatggtggacggttaggaagtgtagcccctggaatgagatcaatttgacgctcaatcccatgaattggaggtagtccagctggtgtttcttgtggaaacacatattcaaagtcctgcaaaagatcagccac

SEQ ID NO: 73175 - DNA, 3301 bp, Zea Mays
actcttgatatggcaacgtagagctgaccatgtgtaaaaattggttttttgagatatatgccaacctttgaaagcgtttgtccttggctcttgttgattgtcattgcataacacacttttatcgggtattggcgtctttgaaggacaaatggccacttcgtatttttcaatgtcaatgatacacgaggaatgagcacaatttttgacttgtgagtacctgtcattatttggccttcaataaccttgtcacctaaagaagttataagcaatcttgttccattacaaaggccttcagattggttcagatttcgaagtagcattactggtgtaccctttttcaagactattcgatgctgtggaaaattatttccattcaatgtattcaaaaattcgacggggtacaaaagatcataagagtcatgtgtattaggtgctttgattactttgtcacagcttaagtactcctttgtttgctcagggataagggaaacaatataatcatttatggaatcaacaacatcatttgtgggtgttaatatggcacgagcttttagatattgaaggtccatgtaattagtttgcaggtcttcatagaccttttcaacaatacatgcagttttgtcaccttgaggcattagaagaaattcttcgggtatttgtatccatgttggctcatcttcgccttctcgtgatgtagcatgtatctttccttctccaatgtcgagcatccatttgctaaactgagacaattcttctcgatcttcttgagacaatgatgttgacgaaagcctcatattatgggtaagacgtaggatatggacatgagaccaaagagaagagttgattattgctgaacttacaatctgtgaacgattacccccttcaattactggcaaaatttgtcgtaaatctcctccaagaacaacaacctttccaccaaagggtaaattggtagccataggagatgaagatgataagatatcccgtaaagatctgtctaatgcttcaaatgcaaatttatgtgtcatcaaagcttcatcccatattattaaagatgtagtttgaattagttcacacaacattgtgccacgtttgatgtcacatactgttccttcacatggtattttgaaacgagaatgcgctgttcggccacctggtaggagtaaagaagccacacctgaagaagcgacagataacactatgtgtttgcggctgcgtaagaatgttatgatggagttccatagatatgttttgcctgtaccaccgtaaccagagacaaagtagaagcctggtctttttgttagaacagtttctgtaatagttttgaaagcatgtagctgatcattgtttagccttgagataagcatttctgattcggattgcatagcattaatatcatatgtaagttcatcatcaataaggcgaattgtaggcacttgaaaagacgaatttgttctacatggtaagttgaaatcctgaattcgacttcctcttttgctaaataaagtttcaagttcctctatgagctgatttttaagtgtttcatcaggcatctggtactctgggtgattaagcgtttgtctagtgttatattgaatatcatcagctaataatctccaaactttctcaaagaaagacaattcatcacccacttcacagaaaagaagcatcgtgacaaagagttggtgaagctgatttgatgtggcccaagacgcagcctcatcgaaggcgttgtaccattcttggtcatcttctaggagtccatgtgctctacaagcttctttgaatgttggatgtaaaatatgatcgtatgttcgtaatgattcatagctctgagctccttttacaaccattagaagcattctgacataatatctttctcctgcagatggatgcacaaaatgtatgcggcctattttaccatggcgttgcctgtgctcccataatcttttcttttcatcccatctccactcggatgggaagtcagggtaagttagggatctagcgttctcatgtctttgattagcaacaaaccactcagttagcatggttcgacgtaagaattcttgtgataggatttgcgacatgttggcattagcatggtatgtaatgtaattttcattaggtaagtgaaccggcaatctctccacgggaggaaaatgccgatggatttcaaaaccaaaaatcctccaacatgaatcatatggacatataaatctagcatctaaatattccttgacctcattccttgtatttgtctcctcatcaataggagtgtcctgaccatctataatctgtttcaaatacaacttgctgcgatctggaccctttgtaacatatttgaaaaggtacttaatgaatatgcttttgttacaccattctacattgatgtgggcctgatattttttgagtaatgtcatgttgtagggaacaacccatctattgtctagcttaatgttagatttcatgacgaatctatcattatttgatcgtttgtaaactgcaaatccattcatatcaactacagtttcaatgttaaagagcttaggatagtgcttggagcattgatttcttttcatgcaaggcgaattttgattgtaatatccacatggtccatggaccatatgttctgcaagcaaggcatatcctaatggatcagtagccggatctggtatctcagcagttatgtaagagtctataaggttagcacttggctgtgaggtatcagttgacacccagaaaatgatatgtgcatgaggtaatccacgtttctggaattctactgtatataggactgcatcgtgtaaaaaaagagatgaaagtattaggaaagcgcatgaggtattctatgtttctggaattgtactgtatataggactgcatcacgtaaaaaaagagataaaatggttagaaaaacctatagtagttaagttttgacatttgttgtagtaatggtattaacagactcatcactattatgtatggattcgtgttactgataggtctaataagaaaagaacaaactaaacaaagaagcctgtatagtgcaactcatcatgttgacagccatgaaaaatattattcatgcaaatggcaaatggagcaaagagacaaggagcacaaaactttcgataaataagtttgattatgtataatattgcaagggtattagtaggcatggcaatattgtttataggattgcattgtacggaaggttgtatacggggaaagcacgaaaatagtaggaaaactcttggcaagtaattttgcgtttgtaataggtcaatgttattaatggtct

SEQ ID NO: 73176 - DNA, 578 bp, Zea Mays
cttccagccagcagccctaaccctaggacaacggcgcccaaacgtcgtggtccagagtctcgcccttctcctcaccactcataccttcgtagaagctgcaactccaacaatctggtatcagagatgccaggcaacgacgacaacaccagcgatgtcgcatctgctgccgcgaccaattccgccaacgcagcgctagagcaaaagatcgacaccatgacgatggcccttgtcgatctcaccaccgccatcactcaaatgatcagtaggccgccaacaccaccaccgccctcagcgtccaccagccctacttccatcccatatggcatgctaggttatggagggatacctcccttgtcaaaccccgccgcgccacccataccatcaccgccgatcaccaccaccatagccgctccactcccatccacctcaaccaaccttccaccgccaaccttagccttgctgccacccacatctaccatgcccatacccatccatcagatacccttcccacactccccatcaccaatcccaggcttttccgaaccccaccataccgcttacccatcgcagcaaaactc

SEQ ID NO: 73177 - DNA, 750 bp, Zea Mays
accataatttctaaagtttgtcgatgtgctcaagatatattgtacgaaacgaatgggggaaaaaaagaaactttgatgaccctgaccgatgtatccttttactccatctccatttatttcaagtttcagctctcgcggtctcgccattcttctgttcttgagcttcgattgcaacgtgcaaagctcaaaagtgcaaccaagtccttgcttgttgtcaaaaaaaatgctgctctaactgcatgttaatttaacttatcccccgtgacacacaggctttccatgaagttactcagctgtctgcctgatctgatgccaccaatgtggctctgaggaggtgaggcacactatcttttcctctgagcatcaaagctgttgcagccattaaaaaactccccccgcgaagcaattagtcgttggtgtgatccctccctacccaagtttttttctttcctttccttcaaaacttaaccttccaatcctaacagtaacctagcacttagcaccagtaattacactgcactagagtccacagagatggacagaggtgtatgcggtgtgcagcgcactgacattggatccggagattccgcaggcacaagcacaagcacagcctccattgctccatgacctcatcaaactctaaactctttaacctcctcctaccctctcaagcatagcctatttagaccctcacttttcttgttcttactgctatctttgtcctccctcttcccctgcaactacttcgag

SEQ ID NO: 73178 - DNA, 327 bp, Zea Mays
cgccagccaccaataattacgcacgaagcagtaaatgcaatgtgggagacggacagccagcacgacagctgagcagaggaggcaagcggcactagcgagcatcaatggtgtatggcagttactagcagcgcatgagtgcgggagagcagaggacaggacgaagcacactggcgtgctccacagaagcgaggagacgcgcacggagacgaggagacagctaacaggcgagctagcgcggtgtcgaggcagcagaacaggtggcggcgacgttcgaatgcaagaacgaacagccaagtgaacggataaaggtgatgtgctccgtaccca

SEQ ID NO: 73179 - DNA, 744 bp, Zea Mays
cacggatgataaagctacactcaattagagaaaaggaaacatatataaaacttagaaacacaaacctgaaattgacagatgaacaaccacacgcgtagttctctattttgtaaaccaagtctgtttgtgtttcagagaggtgtggtgttcagatttgagcgctcagagaggtgtccatcttatactcgagcatcgcaagatctgggcggggctggcgcgtagaatgggaagtacttgagcatcgcaagatccgggcagggctggcgcgtagaatgagaagaatgagatggcggggtggtcctgcacttacgatgggatgcaggccgatggtggtcctgtgcgctggatggtgacgaggggattggattgtgattcgttccatgacggcgagacgtggattgcgtttggggcgtggaggatataaaaggggcatgtgtggtgcatgggaagaacaattggacggagtacgaccgatttgtattatgaatgttgtagtcgccataaaataaattatattccaccgttccaaactataaattattttgacttttttaatattgattttgttacgtacctagatttatgttagttttagattctataaacataaatagatacgtattatttctgtcattgttttccatgaacattcgatagtttttcctcttgttgcaacgtaagtataaccatatttgctagtaaatttaaagaccaatcgcagccaggtagtagcgtatgcatgag

SEQ ID NO: 73180 - DNA, 722 bp, Zea Mays
tttgtttatgccgaagtgaaggttttatgagaacctttggcaaaagtagactcccaacattgtgatagctagattatataagaatccagattttcagaaaagtctttagaaaaaggtgtaccaaacatgcttactcatgtctgtaaataaaaaaactcttcaaaaaatctatttttgtagtagtgaaagctgcccaataggttttttttttctggtagccaaagtcttactcgactttgatcgattagaaaaatttgacaaaaatgtacttgggacaatttggaccatgatgtggtaatttgcttaccaacagaaaatcacgcgtatgttgtgctgctgcagcgatgattcattcgtttgtcctgttcctgttcaacctacagtctcacttcacacacgatagcacactcgatcggttggagaagatcttgcattgacagtgcatttatttggtgttactgtagatggtaacaaattttctacaaacttcgtttcaaacctagagatttttcactcacaataataaactaaaaaaagcaagaaatgtgtatgttccgagatagcataagcatgtttctagttagttttgcgaacagcataagcatcttaagatcgattttcttttaggccaaggagttgtcagggaaagcaacgggtaggacttcatattcaggcaacatatagtatacgttttcagaagttatgacatcattaaatttgga

SEQ ID NO: 73181 - DNA, 493 bp, Zea Mays
gtgaagccgtccgaggtctcagcggggcgaatcaagaatcggggcaagtggaatcgctcattggtgtgtcaccgacggtggaaactgcgccgtcctgtgtgcagcctctttctcgtctctatccccggtgagtacctcccctagggcttggtgtatagccgtgcatcgtgtagagggcaatagagggagttttgggctcgaatttggcagtttggttgtccgcggtcatggcgccgccgtggtcatcgggcgccgccgtcttggattgaacggagagagaaggagagagtggaagagtcgtgggcaccgttgatctgattaccgatggtggagattagacgatagataacgtttcgaccaagaggatttgagtcgtagatgcgtgatccattggtgaatattaaatcctagactcattaaatccttgccatcggatttagattgagtggatctgggcgcataccggttcagccgagatccgatctaatatgtg

SEQ ID NO: 73182 - DNA, 447 bp, Zea Mays
cggatctgcaggagtccatcagttctcgaacgtctccaacaccttagcctcgacgccgacgcccccaacatccacaagttgcgtcaacaaccgacatggcggagcgctgaaaaagcctacaccgatctgtacgacgatgcccttgatctccgtcatccaccattcatcgccactcgaagcacctcgtctcgatcggtgaggatttgtctttttgctctcccattgtacttgtttttccgattaattttggttgcagatctagggttacgaggtttggaaggttagggtttctcaatcttggttatgaggtatgtgattcaatgtgtcgtgtagggttagtgatgagaaaggaaaatgtgaatttgttagccttcatcgtttgtggatcccctggttttgggtattaatgaacatagtacttcatctccaggtagatgcagtttgtta

SEQ ID NO: 73183 - DNA, 410 bp, Zea Mays
gttctccatagcggatcctcttgcggagaggggataacgccatagcgaggacttgaactttcgggggattccttccatcaagttgagcttccagggctgcgatccttgcatgtgcatcctccagctccaagtgtatcctagagaggtccagggtagcactatccaggttggtgttaagatctaccaccacaccagctaaggtgttgaggcaatcttcatttgctccacctggaacaatgctggtctggttctctccacgaatacacagaggaagatgcctgtacttcgtgttgtgcaactgctgctgataggtgtggctgagagaccacatcattcgcctagcagcgtcgctgaccgaagcagcgtaggtggatagcggcgtcagagactcatgtgctgatagagtcctg

SEQ ID NO: 73184 - DNA, 432 bp, Zea Mays
aacggggggaaattaaggtgggtaatgatagcaacgtcagccctgatcagagaaactccaaagagttgacctgggctccaaacaataccaatccttggcgttgggagcgctcctcgcatcacatgacggagcaccccacttgactgggtatccttgtcatttggatcacaccaccgtgcgctacacacccttcaaattaatcgtccatcgccattgctgatacatcgtctcattgacttgtgaaaaccagatagctagcctctgtgtctctgacatgtgtgcccccgaaaaataaataaatatcgcttggtaggttgtgtatgcagccatgcatgtacccaagggcgagggctagctgtttgttgaataggaaatgacatgagataataggatggatgagagaggagtctccccttctcattgcctctttat

SEQ ID NO: 73185 - DNA, 486 bp, Zea Mays
gaaaagatcggtgagcatcactgccaccaggtgatcagggaacacgtacatagggaacgagggacaccttgaggtgtgctggccacagtgggatggagaggcggccggcgtggtcaccaaaaccagggagatggcgcgcgatgaactggaaccaagcacagacgtgactgaggagggtttgacaccaacgcgagcacgagaatcaccacgctcactggctagacccgaagatagaggtagggctttaccgaaccaagcttatggcaatatggaataagatcagatgctggccgagctcgatcagaccatggcaaggaaaggactctgagggcgttagtggctgcatggccatggttacgtggctttacttacaggccccacgccgattcacagcataggagatcagtgcacctggtcgacccaccccagccaaaatatcagacttgtccacgacactaacagaagaaggaacatataagaacttca

SEQ ID NO: 73186 - DNA, 597 bp, Zea Mays
tgcggatatatcggtcgtctagagagaactggtcgagcacaaattgaaggtctatcctcaaacaaggccgattcgacagaagctgcgtcgtttcacgcctgacaaaagagaagctattcgcaccgagttagcccgcttagtgtctgtagggttcattagggaagtactgcacgacgagtggctagcgaatcctgttcttgtactcaaaaagaataaagtggattggcacaagtgcatcgactatactgatcttaacaagcattgtccgaagcatcccttcgggctccctagaatagatcaggtaattgactcgactcctggctgttctatattgtccttcctagattgctactccgggtatcatcagaccagcttggcaaaagaagatgaggagaagactgctttcatcaccccatttggagctttctgctatacctccatgtcgttcggcctcaaaaacactggagcgacttaccagagagccatccaaacatgcatagccgatcactggggcaaccgggtggaagcctacgtcgattatgtggttatcaaaacagaaaactcagaaaacatcatcgaagatttgcagttggtctt

SEQ ID NO: 73187 - DNA, 697 bp, Zea Mays
aggactatgatttggaggtgcattaccatcctggcaaggccaatgttgtggcagatgccttgagcagaaaggcccagtgcaattgtatgagcatggatgcaagagttaccaccctgtgtgatgagttgtgcaagctgaacctggaagttgtttcttcaggtgatttaaattatatctcggtagagcccacattacaagagcaaatagttagggcacagattgaagacaagggtgtttaggttatcaaggaaatgatcaagcagaaagcagaaaaatacaagtgcttccgtcaggacagcaagggaattctatggtttggagatcgattggttgttcccaaggaccttgagctcagaaagaagatattggatgaagctcacctttcaaaattctccatgcaccccggcagcaacaagatgtatcatgatctcagatccttatactggtggaccagaatgaagagggagattgccaagtacatatccgagtgtgacacctgccagagaatcaaggccagtcatttgagggcagcaggtcctttgcaaccccttcccataccatcttggaaatgggaggacatctacatggactttatcgtgggattgcccaatacctcccggcaccatgattccatttgggtcattgtggacagattgaccaagtcagctcatttcttgccagtacacaccacccacag

SEQ ID NO: 73188 - DNA, 311 bp, Zea Mays
cagagtgtaacaaagatagagaggggaaaagagcaggggctgctcactaagagaaaggggagcatgagctcgggcaggagcagcactacgccggagaacctcaccggagatcgccgctggtgaggaggtgaaggcagatcgcagagagccagagacatagttgagagagaggaggaatgagtgcctagctcgggctcgagctcgggttggggaaaggtttcttaaaaacaggttatgggcactccggacggtctacagtgcatgttcggtgcacatcagacagcgcacagtagctgtccggtgaaccaccg

SEQ ID NO: 73189 - DNA, 456 bp, Zea Mays
tcttatacatattgggctatctccctcttcattctggtccaccaatataggggcttcagatcatggtacattttggtgctccctggatgcatggataatttggagagatgggcctcatccaagattttcttcttgagatccttattcttaggaaccaccaatctgctttcaaaccacaatataccctttccatcttggcggaaacatttatacttctcggtcttctgatggaggttttccttaataatttgcactcccttgtcactgagatggtccatgatgatctggtcttgcaaagctggctcaacggaaatgtgagacaaagcaccagaaatcacttcaatcttcattttgctcaactcatcacacaaggtgttaatgcgagaatccatcataacacagttgcattgcaatttccgactcaaggcatctgctaccacattggcttttcctggg

SEQ ID NO: 73190 - DNA, 1115 bp, Zea Mays
cgccgaagtattttctttcttttcttcccctcgacaggcgcgactggaaggctcattcgacacaatcatttgcagtgaacacttctaggactctgaactccttcatccttgccaaggccatgtctagttgcagcactcaccgactcagtacgggcagaatcagacgactcacccgccagcatactgagaacaacgttcacctcagcatcatcagtggtcgtctgcatctggaaatgggtctgtctttcctcttcaggcagagtttggtatggagcaatgaaggcctcaatatcctctggggagggtcgcactctatggcccggattgccatattgaataggagggttggaaacaaactcagaaaaggggctatgtggaggaagatttcaagcagaatacgataagggagcaccatcattcgaaatcttgcctctcagcatcaaatcaactcaattcaacacattttcttcagaaatccgtctgttggtaatttgggtgggatcattgaccctagtatacaggtaggcagggtagactctatccttcagaggttgaatattcttgaagacaaaatcaacaacaacaacaacttcaatagtcaagcctctgtcgttcaatgcacatatctctgcaagcagcactttggactcaacaagctctgaatttgtagggacttccatctagctgagcattcagacgttaggctgcctgcctgatcgggcaggaagggacttgttatggttctccattgtaaaccactcgaggcgccatcccttaatattgtctttcaaggggatgtcaagatactcaacttttctgcctcgacgaatctccaggctagcacctccaacaagttgatgctgtcctccagccatcccggggcgacagtggtaaaggtacttccaaagcccaaagtgaggaagaatcctaaggaagacctcacaaagatgaacatacatagcaatctaaagtacataattgggatttaaatgggtgagattcaaagaataaaaatcgagaaggccgcggaagaaaggagaaactgacagggccagtccccggatgagaaatgacacgaagataacagcctcatgagtatcctctatcgagatggt

SEQ ID NO: 73191 - DNA, 390 bp, Zea Mays
atagtaagtttgaagactgttgttcagtaaagaatctttattaatggagatcaccttgttcttaacacaaatcaagagaaaaggagggtgaaagggggtcggttcatagaagcgctgaagatcagaacaccgaaatatctaaaaagcgaggacaaagatcaggggcattgttgaatcggatgtgttcgagtgatttggggtaaggatcgaccacggggagatagcttcggacgtgtcgcgattccgcggacctagccagaacctagccagagataattcaccggcggtcaccgtgtctcggacatttccgccaccgtgtcactcatgcctcgctcctccctcactgtgtctcttctttacgtgataaccatgcgcgaacgatgtaatccg

SEQ ID NO: 73192 - DNA, 451 bp, Zea Mays
aacaaggttggttcatcggttgttcacaagaccttacaaacagatctacccactaaaagagactgatcactctctcggctcaactcttatgtctagcaacctgccactctcatcgcttgtttgaattaatttgtactttgagcttgtgaagacaatttcttctagattatcactggttgagttttgcttgaaggccttcttcgcgagccggtctagacgcttcttggggcattggcaaatgaagtgcccttcttctttgcagtagaaacaagcacctcttactttgacctctctgcgagtcaacttttcttgattgccagcagatgatggttgatcggttgcctgcatgctgaacaacttagcttgatttgattctcctgtttgggtattcacgagctttggttcttccacttgcggttgaggcggtttaatcttgtacccaaacattttt

SEQ ID NO: 73193 - DNA, 980 bp, Zea Mays
gcgaattgttcggcagtaccggtgctaccaaatttggtgttcaacatatgcctcctgcctttgagtggaggccatgaactaaaagcacctatactaccagcgtgtttcgagaaacaatggatttcataattcacattgttcctgaaataagaactctagctcgaggttagccactggtctttcaaccaaacagtatagtcatttaatagaactctaatgcataaagattgtttaggattacatattcttcatccataactatatgatcaatatgtcaaaaggaacaaaactatgatgccctcgacccaaataagcaaacatacttgttggaatactatacatgtgatacagattcatcgtcgtaatatcccacacatgaggaggacaaaacatcagtgatgggtatacatgtgaaaagcaccaggacatccctggagatagataagtagacaacatttgtcgcaccacttcttaggtcggtttagtcagtctttgcccatacatagatcacttatttcttgtagatggctttgattgttttgatgtacgattgtgcagaacgaccttcttatttatatattttgagagaagttgatcaaacataggactagatttagcaaacttactaaaagccttagtatagatttagcaaacttaccaaaatccttagtatgatcttgctttctggtcccgttcagctttgttacatgggtcgttgatctgttcttgacattattagactgtctgattctacgggtcggactttctaaagcaccagaatttttcatgataactactgaattatccagcgtgcgccagctatgagagctccattggtgtcttgttgtatctttccttggtgcctccggtgttattagtggtccttatagtctttctcttgcccaaagccttctgagtaaccactcctcgcgacaaatttggcgtgcgaggatcaccggtgactttgttcttgctatggc

SEQ ID NO: 73194 - DNA, 357 bp, Zea Mays
ctcccaatcggctgcgcccctttgccttcgtgctcctctgttccacgcccgcgtcgccgcacacgccatggcttcgctcggtcatcctgatcgctttcaggctgaggaagagctcaatctggtgcgtggcctgcttgggtggagtgcaccagggctcgccggaagtattcgtgtcggcgctgtcccccttggcgatctcgctgccggggagtttttgttgttcacctcatacatttcttgcgggttggcgctgccgatttcgcccttcttcctgctactgctggaggagttcgggctttagcttcaacacctcacgccccactccatcctccaggcagcaatcttcgtccacctctg

SEQ ID NO: 73195 - DNA, 569 bp, Zea Mays
ccctagtataggatacttagccctaaacagggatctgaagggtaaagcaagacccaaatagagtaaaccctgaagtttaagtgaaatggtcataaaatgttcctaagaatggacctacattacattgacacccctgagatactagaaaccctaattggaaccctgaaaaactctaaacctaaaccctaggggggttaagtgtaaaatcagtgcacttttggactaaagtgcaaaaactagtaaagtaaggtgttttaagttatgtggttcacaattatgaagatttgcaacttgaaccctgagttttgagcttaattgcaaaagagccacatttgaactcttttgactaagtctgaatttcagtgtaatgtgcttatcttcgtgactttgtaactttcaaattctaaggtttttgccctaggtcaccacatcaatattgtagagctattaaaggtgaacaactttgtttaaggggttaagcattgttgttatgaagaattgggagataattaaacccaaagttaggctgttagtcaggttactgactgaaaaatgaccaccagtgttat

SEQ ID NO: 73196 - DNA, 456 bp, Zea Mays
aacacccctggtgttaccaaaactaaaactttggcatgacatcatactcattggcatttaattatgtatgttacacctagagtgcatccactaggctaaaatttcaaaacaaacatgtgatgtaatgataggacttgatcaaaaaggtctttgaccctaggatagggtattttcctaaggattagaagcattgagatgtgtaagatgagaactagagtatgatcccaaaggttagtagaaatgtttaaggaagactaaacttagagagtttaagtgccacttaaaccctagaacattcaaaaccctaatagaaaccctcaaaaccctaattagtgctctatagggtgactccaatttctatgcacttttagaccaaagtgcatatatcaaagtggtagagtaacaaaatgtcacacctgggttttagggacccggggcgaacataatcaccaggtg

SEQ ID NO: 73197 - DNA, 638 bp, Zea Mays
cggtgcgccgccagcgctggtaagaacttccccctcggattcgcgacccttccttctacgttttagaattgtctggcgggtcgggggtggccgggttgctgttgcaaccggtcgccggcgtggggccgtcgcggctgttcttgctcgtgcgtggcctggtgccggatgaagatgacgactggtctaccgtcggatagccattggacggtgtgggttagaccgtgcatattggttggattccagcccttggatcgtgatcttgcgcgtaggattagatcgcaccttcattaaatagtggacgtcgatctttgatccgacggttcgtataatgtatcggttcatttaaaagttattctaatatgagccctaggttttggatccaacgacccacagtcacccatacccttccggccagggactgtttcttatgagcccctgaactccatagaaattaacccgccgtcctcaccagtggcgctcagagtcttaagaatacttacacgttggcccctgagttttccatgaaatgaaccccagtccagaaaaactcgaaaatcagataaaattaaaatagaaatagatttttaatgtatagaacttgtttaaattgtggaaaattcatatgaactccaatttgg

SEQ ID NO: 73198 - DNA, 297 bp, Zea Mays
atcgaattgactggttcagggtttctgcgagggttttgatattgtgctggtttcatatttcgttggttgaaccttagttcggattgctgcaagttgtcaatctcggtgctctcttcgcgagtctcaacttttttcaagcaatgaatattctgtggttggtggttacttggttcctgactcagatagtaccatttatggctatgggttggacattgctgttctgcaatttgcaaaggtccatccttttgtttttgttcattgcatgctagtatttgcacaaaacataagataaagaaa

SEQ ID NO: 73199 - DNA, 456 bp, Zea Mays
gtcaatatgtctgtgctactctaccttatattcgtgcgaacattcccattatcattgtatttcgagcattaggatttgttgctgacaagggtatactggagcatatatgttatgacttttctgatacacaaatgatggaactgctacgcccatccctggaggaagcttttgtcattcaaaatcaacaggtacttattcagctgctcgactggaggaacacatttttttactccaaccaatgtttgctttgagcatgctgttttattcagttgttgtggcacattttgagctgagctcaggcttatgtttcttcttttaaaagctttagtttgaatgctcataggttgctctagactacattcgaaaacatggcgcaacagttggtgtcactcgagaaaagagaattaagtatgtcaagcaaagagttgacataacatcactatgtttgtgttgttt

SEQ ID NO: 73200 - DNA, 465 bp, Zea Mays
gtgtgtgtgacaaccagccggcagcctatatatctacctacctttcccgatttcgaccctgttgctcttagatttggcccctacttttgtacgtatgacatatcttgccaaacttgaaaggcggggcgcgcgcgcgcgcgtacacacaagacattcttggattcacatggaataatgcacaccctgtttttctactttaacttgtacacagtacacaagacaatgcaacaggagagcaatcagctgcaggacacacagcgcgagaattgacgcacaaaagcacgagaaaagcaccgccgctgccatgcactgtactacgtagcaggccccagctgcacatggcgaaggcgaagagggccttgctgtagtgcatgaaatatagccatgcattcgttctatgggcgtggcgccaaggctagcccatagacctcctgtccatcaccagtactgcgtgctcaatcgacc

SEQ ID NO: 73201 - DNA, 749 bp, Zea Mays
cacgggaagtcctgctcgatgaagctcacaactcagcctactccatccacccaagaaccaccaagatgtacctaggcctcaaaaccagatattggtggagagggatgaagaaagagatagcacagtatgtggcccggtgtgacacttgccaacgaacaaaagccgagcaccagaaacctgcaggcctgttgcaacccctcctagtgcccgaatggaagtgggaggaaataggcatggattttgtaaccggactaccccagacacaaaaagggaacgactctatctgggtaataatagaccacctcaccaaggtagcccacttcatcctagtgaaaactacctttggaggagccacccttgcctgaatttatcttaaagagatagtcagactccatggcattccaaggaagatagtgtcggacaggggaacccagttcacctccaaattttggatgagccttcagcaagctatgggcaccaagttagacttcagcaccgcctatcacccccagacagatggtcagacagaaagggtcaacaaggtccttgaagatttattaagagcatgtgtgttaacattcgacagaaactgggagtccagtttgccttatgcagagttctcgtataacaatagccatcaagccagtatcaagatgtcaccgttcgaagcattgtatggacgaaattgccagacccctctcatgtggtccaacgtaggggaaaagacacttgaaggacttgcctttgtt

SEQ ID NO: 73202 - DNA, 308 bp, Zea Mays
ttcagctctttctgagtgaaaatgtacttgagactcttatgatcggtgtaaatgtcacaagactcaccataaagataatgcctccacgatttcagggcaaacacaacaacagccaactcgaggtcatgggtaggataattcctcttatgtttcttcaactgcctagagccataagcaatcactctgccttcctgcatcaacacacaaccaaggccaatacgagaagcatctgtataaactgtgaaatgcttaccactctcaggcaaggctaagataggagcattcaccaacttgtccttcaatgcctt

SEQ ID NO: 73203 - DNA, 965 bp, Zea Mays
tcgggatgaaggcgtgaatgtaaggtcatccatcacatttaatggggttacttgggagcctcatttttctccctatccagggtcattcctccctaaagtgatcatcatacgcgtcgtaggggcaggtttggtaagttacatttatgtatgtcgaggccccgaccacttggcctaatgtaattagtagccagtgtagcccattgcacttgattgcatgttatggtacacttcatgtgcaactggattgatgtccataaaatatagcgatcttcggtatcctgtagcctaagttgtgttgtagtgcatcgtatcaggcttacagtatcacccatcctacattaatgtatgctacttgagacttacccattaaactttcattgtggacttacccttaggagcttaaatgtgggtcccatattttagggtcgtattgtccctagtaggctcaaaacatcattctatcgtgagacagtattatacttaactttattaagcacttagctcctcatgggccctagacaacttagtgttatagtgctagaggggtcgaaaaccctgagcatccacaatcatcttattttcccgaggcatgaagggcccaaaaaactatacatacaagtggcatgggacgttaggagttctaggaacctatactcatgaatgtgtcgagcctagagggcccccaaagacttatgaatatcctcggacctaagaggcccctaaggggctcatcttatgaatgtttttgccttaaacactttaaatgatataatattttgttaggattgtaggtggaaaagagaaaaaacaccacggaaaacagatcaattatttggtgtatcgtacatgcatggtaaagggggcctatttatataggcaaaggagatagagatagagtcacataatcttatccaacacatctctccttgacactaaatctataaaattgtttccccaaacaccac

SEQ ID NO: 73204 - DNA, 362 bp, Zea Mays
gtagcactcattcttctcatgttagcaaaaatcatgcttatttatatgctcatgttaagaatgctcataatgttcatcatgcttctcattatgctcatgatgcttgtgttgatcatgttattcctactaggcgtcatgttgttcataatgatatttattctccacatggcatgattgcatcatctagtattgtatcatttgctcatggtaggagtagacttaggcacaatgttgctcatgctagatcttgtaatgtgccaaaggccaggaatgcatctcatggtccttctatctcataccgtacatctgatgcttcctatgtgttatactgcaaatttggtaaagtagttgctgctaatgtg

SEQ ID NO: 73205 - DNA, 834 bp, Zea Mays
agacaaagcaaacataataggtgaggagttaggggaagaaccacatctagagaccagggccatggtgggtgcaccatggttctcaatcttggccctgatctagtggtcaatctcggtggacttgagcttgatgaatatctcgaccatggtgagagtctcataattgggtgactcgatgatcgccgagaccttcacctcccaaaccctctgatccaaagcatgtagcaacttcagcgctttctcatgatcatcatagagaagttgtgccttattgacacgcatcttgttcacaatagactagaaccgagaaaacatagtgtctatggtgtctccaaccaactgcgcaaagttctcatactctcgctagtacgtctcaaacagtctggtctttatatgattgtttccttcatggaatctctcgagggtggaccagatctaggtgagtcatagacaaatgtccaactcgctcaaactcagcaagcgagagacatgagaacacaatgtttcgagctttgttgttcaaatcaatgaactccatttgaaccggagtgatctgatcactcgtagcattgaacgcatcatcgatatagatctcccagacacgatacccaatagtctaaagatatgcggacatgcggatcttcgagtatgggtaatttatcccatcgcagaacggaggtttgccaacacctcgttccatgtcgccttcgtggatttcagaccgattagggtaaggaaattattaattggctctgatataaattgaaggaccggtgaggtgactagagggggtgaatgagagccaatcaaattttgcttctaataactgaaatt

SEQ ID NO: 73206 - DNA, 443 bp, Zea Mays
gtcggtccggtggtagctcgaacggttcacaattagattgattcagcttagaattcttatcactagcttgcgcgattatcttaatagatctcacgggaaaactgttggagaccgtctaggaacaattccagacccccatatatatgaaagggtacgactaattgaaacacacaacaatcgatctatcaacccaaatctaccttatgcacaaggagtagaagtaatttagccttcatcatagttttccaatctcaatcttcatttctcttcaactcaatgtcgtctagaaacatcttgggtggtctgctgatcccaagacaaccctatcatcttttctccctgatgggtccccccgggaggcgagattcaggttctgcaagagattcacaaagccctttgtgccctcacaaacgacccaccgtctatacgcagacggtctgcac

SEQ ID NO: 73207 - DNA, 698 bp, Zea Mays
ttgtgtagtgcagaatctgggcacgccaacaaaattgttcctcatgacaaaattctcgttgcttgaagctacctcgtggcatatgtctatgaacatgcccttgcacattcgaaccctattgataagtaatgagttatagcataacaacgcatgattagaacttgtaattcaaagagcataatatagttacgtgacccaagtgataccttccgtgaaaaattgcttcgttataaactggctgatctacaatatagtctttcatcaatctatggtatccttgaagtcgatcgcgatgaatcgtctgctaaccaacgaccgagccatggtgttgcgaggttgtgtggtcgctttggctcatcgacagcaatgctgatacagttaggaattgttgattgaacaaataacgacgcatgtttctactgcatcttgtgttctcttcatcaaagaactctaccatgtaattaagctgcaatagggtgtccgaagatattcattcaacatttgaagcatctaaattatagacatctaagcaatccacctagtattgctttgataaaaaaaatgacaaatgctctatgggtattgatatatagtatttaatacatgttgctcaagggacaaagaacaagctgctggagcaacacaaaaaccgtggtaaatctaagaacaaaatggtaattgtcggtaccctgaaatag

SEQ ID NO: 73208 - DNA, 367 bp, Zea Mays
aaaatctctctctgttatctctgttttcgctgccatggatcctggcgcaagtgttcttctggtcgctcaacggggagaggcccgggtcatatagccacaagcgaagccgaatcccaacaaccctgcgaaagtagcactaatccccggccgatttccccccggatttgtggagcttcggttctgcgttcattacggaggataagatgttacaggcgttgaggataggagacatggctgatgatctgagtccaccgtcattgactcatgcggcaagagcatgcttgtggcgccagttgggccgcacagcttgggtggagtggggtggtgattgggccggccagggattcgacccaagcgtggttagaag

SEQ ID NO: 73209 - DNA, 665 bp, Zea Mays
caaggccaccctgttgtccctgaccgtggtccatcaccgccgaatggagcatcaccaccgtcctcgcttcacgcgaggtgaatttccacgcggaagttccctttctttgtccccgtcctccctgctccgttgaatagccgtcggcgatcaccggcaatggcaccgtgccatcgtgtcgaggctctcaggccaatcgccaccgccccatggccccccttgcccatgtgaagtcaccggctccggccatggcgctcatgcagtgcgcgcgactgaggttaatggcaatcccaaccagtgggccccgcctgacagcctccatgcgcctattctctccctctccctctttagggcgcagacctgtgggcctcatcagtcattctccatgcccattaccacgcgcccctcttctaatcgtgaccgcccgttcaagatccagtggccgagaagccttgattccccttcgtcgcgggcattttcttaaaacccctccaggttcccgggattagaacacgctgtccttagttctagcaatcgtgcccctgtgttcttgcagaaagaaccccgggcgtgtatttaattagagaaatgggtttaatttagggttttgaattccaaaacttgtaaatttcatatctttttcataagaactctgttggtcacttgtt

SEQ ID NO: 73210 - DNA, 637 bp, Zea Mays
tacattatatgaaggattagagccatgatccaaaccacgtgtctatagggaaaagtcctagctgccaagaaacaacaacgaattacataagatagtagccaccactataattacttgcattcatcaaagagcctcaaagcactacaaacaatttgaagaactactatggtatagtagcctcttcattgatgatttacaggttctaaatccttaacaaggggagataaatccgtcttaataattaccatgtccacatttgcatgtctattgtccaagaaaaccataattagatgtgcatccatttcactatcacaatgtactattgtccttctgaacaaaaaggcagcaattcatggcatatctcatgagcattccaatcaaacgcatcatgtgcggcatcgatatcaacatcgagaaacccatgcgctcaaggttcatgagtgtctccttgttcatgaatctcccaactgatgtgcaacacaaaccagtgcaagtattccatgccctcaaggttcatgagcatctcctagccaccaagaacaatccattcagatgatacgactactatgcagaagtacctcacaatggaagagatttcatctctgatggtgaggtcaatatccatggcggtggcgcc

SEQ ID NO: 73211 - DNA, 315 bp, Zea Mays
agtgcgggccgatacaagattgtttttgcgaattacaagggcgaaatcagccctgaggagtcaaacaaaaaatttttggaggttgttgatgttccaggagtgctccaggtcctcgccgcttggcgttgtgagcctgtaagcactgggggaagcttttgtcttgactataaaggggccctcccacctgggctccagcttgcccttggactccgtccgagctgtccggatgagtacgaggtccccctcgctgaactccctcgggatgactaagtggtcgcgccaagctttggtctgggcttggtacttgttcagggc

SEQ ID NO: 73212 - DNA, 735 bp, Zea Mays
tctgccagacaataaagagatctctgtctaccgagaaatgatgaaaaatatggggtacccgaagcttgaactcggcctatcggcaatgtcgaaggatgatcttgcagatagccttgcttataatagcctgaaggtgcatatacttttttcttgtaaaataaactatatttgtagcttttcttgctattgttatgttctcatatatatttttgttattagggcttgattctaagtaaggctttaaaggtccaaaaggaagcaggagacgagagatgtcaaatagctcttgggaatcttcggttagaagtcattacactaaggaacctctcgagaaagataagatattgttttccttagtggacaagctaaaaactagcgaagccaaacttagtgcacatgccgaagctcacaaagccaaagttgaagatttaaagaagaagcttgcagaaatgagcgaaaaatttgaagttgcaatggcgaagcacgagataagcgaaattgaaagattaagggtacaaaagaatgtcgaagagctccacgactccaaagagagatgctacgaaatatcgttggaatgcgccaaaactctaaagaacagttttgcaaaggtgggagcatactattctgagcagaagttcatccgcggtgaccctaatggtgtcgtccagtggatcagcggagaagtcaaagcctttgacgaaattttaagtgaccgaggagacttctgcgcattcg

SEQ ID NO: 73213 - DNA, 315 bp, Zea Mays
agtgactctcgatcaagattcaagccaccaagaaatagcctccattagcttcctttcttccctttatagcttagcatgggaggtccaaagccatgacgtgatagataattgtcgccgtgagcacgaactgaacctaaacaacctgaccaaccctagtggtaagatcaaccttccagccaggaaggaggtctgccaaccggttaattaggggaagtagttggtccttcgtgagcttcttgggcagatccaaataattgacaggaaactcaactggacggcagggtaggatagatggtctaaacaagaggcaagtct

SEQ ID NO: 73214 - DNA, 432 bp, Zea Mays
tgccgattaaatgtttgcagagtattatttgccgagtgtaacactcggcaaagaacgtgatttcggtagtgatatgagtatgaggaactaaccatgtcgtctcctagatcgaagcaaccccgatttggtcacccgaccgggtcagcctaacctcgcctccctggtcaggtcggcctaacatcgtcacctcatctaggtcattccccgaccatagtagccctggcctagtcaccccaaccaaatcgaccctcgaccatagcagccacaacctaatcaccccgatcaggttggcccctaaccatagcagccctgacctggtcacactgaccaggtcaacccccaagcatagcagccttgacttgatcaccccgaccatagcaaccctgacctaatcaagccaaccaggatggccaatacaatagcgactctgaa

SEQ ID NO: 73215 - DNA, 383 bp, Zea Mays
cgaagagctacaacatgatggtggagatgggggagaacagtggtaccaggatggaggtggtggagatgagggagagcagcagtacccaggtggatagatggtggagatgggggagagcaacaatactatgagggcggacaacaacggtactatgagggtgcacagacgaactatgaggacccaatgggtggatattctacacattgttcagaatatgtgtggaagcagattaggaagagccatcttgtcgcccctcctttggcgccctcaagtgtggatgtcaagatccttatcatgtccactagtgacaggtacacctatctcgttttattaattatatgcatgacactattatttttgttaattttataaatgaaattctg

SEQ ID NO: 73216 - DNA, 376 bp, Zea Mays
ggacaatgctacccttatcatgtttaataatctacatgtttaagcttcaaaacacaattttaattctaccaaagatgtatttcacacctataaataggtgaatagtgctccacacggggggacccttttttaggaggcgagatctcaacttggttacatccattatgtgaagtgtcttcgtgctactttatatcaaagggccaaaggtacttttgtaaacttgtttaaacaaggaaatggaagatggaataaaaatactgagtaacaagagaagagttttatttttatgttcaatgatccatttatgtttctattttaaatggtttcatttttatcttctcctagaacatttgtgttcaagttaacattccgaaga

SEQ ID NO: 73217 - DNA, 892 bp, Zea Mays
gccctcagccgtacgtctgcccgtcaccgcggaccaagatctgcaaaaatccaatcacgagtaagtcagcccccagcaagttctttgtgtccctatctctgtttttcttagggccacgaataggatagtacgccgtgtggagcgcaggccaccatagctgactggcgggagagagatggccgagagagagagagagagagtggaatcgccgccgcgcctgtgggtcacccgtgcctgctctcagcttttggcggaggtcttgggtgctgggtgtttccccgtcggggtaccgccctgggggagctaccggcgaggtgggagcagcaatgtctatggcgccgtcgtccctgcgctggcgccgccgtgttgacaaccaggggaggaaagagatggccctgtagccgttagatggggttgacggcagggattagatgtgggttgtccaccgctggatctttggtgaacggctcggacttgatttcgttgggttaaagtgtaggccgtagatttcgaatcgggcggtcatggttggtttgggtttcataaaatttggaccatcagatctcgatctagtggctcatagcgcataccgttttgagtagcagagatctaatccggggcgtagatttcttatcctacggctggggcattccgataacctttcagtcgtgtacttatgcaaaagaaaccctatgaaaactgtgaatcaacccgccgtcctcgactgcggcgctctgtgtcttagggattcttatgccaagccccctgcgtttcggtttattatatgcgcagtccaagagataaacaaaataaggaaaaggaatttagaaattgattttgggtttaaaaataattgcagaaactcatttaattcatagaaaattcatattaa

SEQ ID NO: 73218 - DNA, 732 bp, Zea Mays
cggtaacaaaacagcatagtaaggacattacacattacaaacgcaggaactcataggcaacaacgcttaccgcgggtgcaagattccatgaagaatacgaaaggggagcactagcattcgaaaccttgcctctcagcatcgaatcaacttgactcaacacgtcatcctcagatattcgcttgttggtaattcaagtggggtcattaacaccagtgtacaggtaagcaaggtagactctatctttcaaaggctgaatattcttgaaaacaaagtcgacaacaacagcttcagcggtcaagcccctgtccctcaacgcacatatctctgcatgtagcaccctggactcggcaagctctaaatctgtggggatctctatccagctaggcattcgaacgtcaggctgtctccctgatcgagtgggaagtgaattgttatgattttccatagtaaaccactcgaagcgccatcccttaatgctgtctttcaaaggaatgacgagatactcatctttcctgcctcggcgaagttctaagctggcacctccaacaagctgatgcagccctccagccatcccgggccgataatggtaaaggtatttccaaagcccaaagtgtggaagaattcaaaggaaagcttcacaaagatgaacagacacagcaatttgaagcacataattgggattcagatgagtgaggttaagagagtaaaaatcgagaagaccgcgaaagaagg

SEQ ID NO: 73219 - DNA, 440 bp, Zea Mays
ccggtgagcagcagtggcatcgccggaattgggctagccaacggtccagcgcgtgaatccgtaatctgccccgtatgacatggaaaaggagactaagcgatcacgtgggagtacagacttaccagaatatggcagcgcaggcttcggcccacgagacgcggtggcaccgcgacgatcggggaagtccgacgagcaattcgtcgacaacccggacaccacgcccactgcgcccacaactaacaggttccagggacgacgacggatcacccacaacggcccttgctggcacgggggcgctaccggtgtcaattgcctgcggcggcaatggaactatcctggcggcggtgaatagctacggaggggcactgacctagggttacagagggtcaaggcagtcgcgccaggatggggctttatgccgggtcgaccccatcactccg

SEQ ID NO: 73220 - DNA, 305 bp, Zea Mays
ctttacagagcttcacctctgaggtgcgggtctttctgactgctgaatcaagaatcttcactggcttctcacggtactgaagatctttctgaatctgcactgcctcttcatcgatgtgactttctagtgcttgcaggcatttgtggagctgggatacgtgaaacacattgtggatgtcagacatggactctagtagttcaagacggtatgctgcgggtcctactctgccaatgatgggataggggccgacaaatcgtggtgctagctttccttttgcttggaacctcctgacaccacgcatcaga

SEQ ID NO: 73221 - DNA, 650 bp, Zea Mays
ccagtagacagcatattgtgaggctggaatcatggttgattgggaacaagtatttcctgtctgaatgggagaccacattgttgttggaccttgagcaggattaggaaaattgaggtttcccatcatgttgcaatccataggttggtggtgcatgtagcccctaggccataatgggggtggagagggaaattgctaaccagttgaattgtttgacatcgcctgggaatttgtggcattgtttgctaggtccattctattatttgtgcacatgggagaaatgaagtgaaatggtgtacactgaatgcaatggacattataatgtacaatcatatgtcagataaaaaggtaaacatgagaacagacgaagcatttatataaggacaataatgatcaaaggttctcatgaactgtttcagaagcaacaccacaacttcatgacatcacagtcatcgtactacaaatactagggaataccttacatgaaactagcttatggtaagtacataccactacgacttaaacatagatgacaactgaaatgtcgtttcagagcacacaacctaacaattgttgcctgcagacgactacttagaagttcaaaaggatgtcatctctcttaaactggaatacatggttaataaatattccag

SEQ ID NO: 73222 - DNA, 879 bp, Zea Mays
ccccatctggcagcctcagtgaccattctccccgttgcgcgcattgcctctgtcgatggcacgtgggccctcatcgtcaggtacctcgtctccgctgagttggttcggctgtgaacagaacaccgagctggatctgcgcgaagcttaacaacccccctccggtgatcttggtgactattgcaaccgtctcatccgcctgctacgcaaccatgcgggctcctagagccataaaagccgagctcccagctatccgcagaacggacagggcaagcagtagtagacatccaggccgttacgcccacgctttgcctcctttgctgtgtagtgtccgcggtgtggttggggagattgcctagatacaaggattgtgtccagggcagattaaagctagacgagcaaccaaataccagtgaatttcttaccagaatttaccattgccgttaagccaccgtccgtggtcgatagggctcggcgcaacacaattcaaggtgtgtgatacctccatcatgtttgtatcagcctcctctccctaattcttatatcaatttgccgatttgggcactttggcacccgatttcttgccaccggtgtgtttcaaccatgtagtgggtggcggcgcggtcgtcgggctagttggggagagaagagagtgtgcgaccgtgggtattgagattaacggtcgggattaaacgatgatatagcggttcaagccaatgcaagctgggcgttgatctttgatcgagtggttgggggcccatgttggtcatgatctatttggtccgttggattggggtccaagatttgttcgggtaagatttgttctaatctgacccatggaaatgcaatcgggcggctctggttgctccttacctctttgtc

SEQ ID NO: 73223 - DNA, 668 bp, Zea Mays
ggcggacaagtcgaccaactctgacgagcagctctgcgaagtggaggagcgaaggcccataataggggcagaacacccgaggaccccaatgacataatcctgtcatgcgcacgcctatacctgcctgacatagagatgtggtcggcactctagccccacgccaaccatgatataggcacgtcaccaccaaacaccgtcttggcagatgcacgacatggtagaggagtgacgggggggggggtatccgtcaatggaaaagggtgtcatcgcatacaattcctaatgtcccctgactctacctcgtggggccaaccaagctctgccaccaggatcctcagcaccagagactctacaatgacccacatacatgataggacggggcaatctgccatatcgggtgtatgcctatgcatgtaccggaggacgatgttagggagattacatcagaagggctcccgtaaacaacgaaccacaccctgctttagataacaagtccccttgtaagagcctctcccttgaactataaaagggagacaaccaaaacaggtattggagagaggatttctttgactagagtcccctccttccttccatcctcacacttgcaccctttgtaacacattctcaggagcaatacaatgatcaacactacactagacgtagggcat

SEQ ID NO: 73224 - DNA, 336 bp, Zea Mays
ctcaatcaatttcacgattggcgatctacctagctctgcccacgaagacagcgggcagagtggacattcactcgcgttcccggtgatcagtgggttcctagttcaattgggtgggtcgatgatcatcacgggtacatgagaacactcaaatgagggagcagagggtatgagttgacctgaatcgagctggccgcggtgagggtgttcttgtggtgtttctgagcagatttgggggaagttcaaaattcgagctctcggttgtaagattggaggcaatactgggtggtgtggtgcgtgatcaacctacggagctcacggtggcttcaatttataggg

SEQ ID NO: 73225 - DNA, 965 bp, Zea Mays
tacgagtcttctacgcctctgtatggattgacccggatcatcactggatgaggttccgttttgagcgagaggatgtcaccattactgctagtcagatccgccagctttttggatttcccgagtcgacgactcgtcttcacagcctctgctacgacacttctgaccctcctcgtcgccctcacggtggtgtggctccgggtacagctcacgttacggctttgttccgcccgcccttcacagatgggtcgcgtcgttcaccggcagattttactatagcagcaaagtatttatatgagcttatcagacggactcttctgccgaggatgggatacagggaggctaccacacatatacagctctggctcctcggtgccctggtctctcactctgagtttgacgttgtggacttcctgatttgtgagatcgaggacaccgttttggatgggattcgtgctcgtcggcagttgccctatgctcactacttgtgccacatctttgcgcagctgattcagcctcctcggtttcagggcacccttgaggcctcacgcctagtttttggatcctaccgtcctgcgcctgagattcctgtgccagcttctgctcctgtttttgactctcaggccgaggatgcagctcttcgtcagttcgacactcagattacagcagctgatgatgatgatgatgatgatgatgattttggggttcctcctccgcctccgcctcctatgcctccacgctcacatgatcatgaggctgggagttctagtgctgcccctgctactcctcaggctatggaccctgctcttgctttgattctccagactctctctcagcagcaagctcacctggcagccgagcaggcccggttatccgagaggatgctctcgatgtttcagaacatgcaggacaggcaggatgcacttcagcagcagctacttcaggatcgggctgagagtagggccttc

SEQ ID NO: 73226 - DNA, 675 bp, Zea Mays
cgctgcgattcgtgctcaacggagtactgatagttgctcggggtagtaaatatcgccttgaggatgaacttaggccactgttcaacccagccaccgtgtccgcctgactcacggccgattcagataagatcgctggagttggccgccgatcgaccacacgccacgtgcctaggttccttaccatgtcgcagtaactcgtattacgcatgtctgttgattgccggtgagctcgccacggtgaaagccaccaattccttgcgacagtgctctcccctctctccggccgccaccgcgccatctccaattcacggtccaccaccctcgaaccctataaattgagcgtgccatcggctccgctatgtattcaagcatccagcgcacccgctcgtgtcttggatggttcaccagagagttccaatttgggatttcccccaaatcggccaagcacaccgcgtgtgtgagcccgtcgcggtcagcgttccacaggtccgatcatgttctcctcgctcttattctagcattcctgtgtgctcttgaagctcatcggcccaaccaattgcattgaaccaaagtagatcgacggggacactttgaattgtccccagattgcgcagtcaccgtgagtagagagattgggggctagaaccttgcaattgatcgaggggaaacaactgt

SEQ ID NO: 73227 - DNA, 361 bp, Zea Mays
acagaatcaatggcgaaagtcaaaccaataagcatatatgcatgccatcttgcaatgtaatcttgcattgcattgacctttaattttgagtgtctcagggtgcagcgtacagttaatcatttcgaccccgaattcatttgaaaatgaacagcagattctccaactcatagtctgtgtgcctgtcttcccccctgctacgggcatgtgtttcatggtcggccacgaacacctcttcgtttggcattggcaaagaagggaatttctctccatgttctgtgtctccgtgtatatatagtcctatcaccttttgcagcacacgcgatcccaaattaaagggccatatataccgacccgaacgccg

SEQ ID NO: 73228 - DNA, 520 bp, Zea Mays
ctggacccctgtacactcaacccggacctccttgggtggggaccgaacccctctgagtgaggtctggacgacctacagcaaggtcccaggacaggggataccctggcctatgtcaaggacaggtaagggtccggtactgacacatgtccagtctacgacctgtgcgcttccgctccctgcttaggcggaggcccaatgctgccatgtggcctatcgcccgtgacgtaagccagcggacagggcctgaagtaaggtctctgggccacgctgcctctgcatttattgcagagaagacgcgccgcctgtctatcccactgacagatgatgtgctccctcagcatttaatgtgtcatgtccactccgctggcaggcggcgcccaggccatcctacagacgacgtgcttgtccagtctgttgtcaaacagtatgaccgtgctgcgaggtgcattatgtccatcatcacttatacgttaccagggaagcttcccctacacgccgatactacgcagatctcggatgt

SEQ ID NO: 73229 - DNA, 521 bp, Zea Mays
cttaccagtcaggcccagtgctagggggcgcaggcactgataggcagggcccagggttagagcgtgcagacgcaaccgatatccgtagatccgaaccgtttgatttgggatggacggttgcgatggggtgcacggggttttacagctcggtgatcggcgttgttctctctgcggcgacgaagtcgccgaagacaaggcagatgccatcgccgaagcatctggggttgctagtgagggcttgaactgactatgaaggttcgacaaactcactagcgggactccggtcgcgagaacgggatcggagacgggggaagggtgaaggggaggtgctccaggcgggtcgggtactccggcaaggaatctcgaccacagagggggtttctggcgcgctaaggcctagattggctttgacagggttagaggaacactgctaaccaatgtaggggcacgacgtgaggctaaatcggccagtcaccgcacgggcgctgtgaaccaacatggccggactccggcgagggcca

SEQ ID NO: 73230 - DNA, 313 bp, Zea Mays
gtagaatatatattacagactttgatgtccttgagaggaatgtcaaggtactctactttcctcccccggcgaagctctagacttgcaccgccaacaagctgatgttgtcccccagccatcccaggccgacagtgatagagatacttccagagaccgaagtgggggagaatcccgagaaaggcctcacacaggtgaacgaaaatggagacttgcataatggaattaaggttcagatgcgtcaaattcagctcatagaaatcaaggagaccgcgaaaaaaggggagatgggaagagcaatcccatggatgagaaa

SEQ ID NO: 73231 - DNA, 485 bp, Zea Mays
caatagaaccatttaattcatcaagcatgtcatcctatctaggaataggatatcggtaccgaattatgatgttattaatggctctacaatcaacacacatgtgccaagtgccatctttcttaggaaccaaaagaacaggaacataataaggactaacgctctcacgaatgtacccgtggtccagaaggtcctagacctagcgctgaatctccttagtctcctcgggttggtcctgtaggcagcacggttgggcaagctcgccctggaattaaatcaatcttgtgctcaatgcctcgcacaggtggtaatccatggggtatctcagagggaaacacatccatatactcttgcaaaaggttagcaacagccggtggcaaagcaatagatgtatcatcaatggaataaaaagcatttttgcacactaaggcatagcaagtccaacagaggcatgtaactcatcaagatcagatttagtagctagcaaa

SEQ ID NO: 73232 - DNA, 362 bp, Zea Mays
gtgcatttgggaatcgttccttgagagccatcacatcttcccaggacaatgctgcgtcgaggccggaccaaatgaccttcgcctgtgcaaccatgttgcctccatgctgaaccaggcgtcgctacaggatacaaagagggacctgcaatggattagtaccagatggtagtgatgaaagtggctggtgattggttccaatagctgccttgagttgggacacatgaaatacgggatggatggaagatgtgtccggtaatttgagcttgtaagcgactggattgatctgcttgacgatctgaaaggatccgaagaattttgaatgaaagcttgtggttggctctggtggctacaaatgtttgcat

SEQ ID NO: 73233 - DNA, 671 bp, Zea Mays
tcagtttggaaaatcagacttagataaaaattcagtcctgctgatttttcagtctgaagcagatttgggatactccttaagggctgatccatgtaattctgggctatgagtgctgtaccaaagtggaagcccatacttcggtgtgcagatttgattaagggtaatgccactaaaaccagttggaacagacagtaacagtagctcaaagattcaatgtgctaaatctgaattcagacttagtcttatttctgcacacagacattgtgtgtttggctcaactttgaagctctccagtgtttgatccttggagtattaagccataccttttatagaaaagtttaagaacatatatttgtgtgcaagtttgcttaagggaggctggcttggttctacacaaaaaccgcagaaaaagggtgcctaaagatgggctgtcaggttcttggagttttcaggtaatgaatagtgaacagatttgattttcagtatttggctctattttggagctgtgtggtgttttttttaggcaattttgaactgagatctttataacaaaaatggaggtcatctataaatgaacaaatgtctttaagggtgagggacttgatcctatacaaaacctggagaaaaattggttccaagatcagctgtcgggttggctgtaattgaattat

SEQ ID NO: 73234 - DNA, 1446 bp, Zea Mays
ctaggagccagagctggatatgagtattggcctctctgtagcccatctgtggtagcaaggtcagtctcattagctcatataggaacttggccgctgtggtaaagtctataggagtgcgcctcgagtcgtctatgaaaggtggccttaatagagctgagatgtgagatgtgcctggagcaactccatcgtgagggcgacgaggtggtcgtgaagaaccataacacagactgtgaagccttgtcgttgacttaggaaatccaaacaactctttgatctgagtagtgtgtagagtgacatcctcgcgctcaaaacgaaacctcatccactgatagtcagggtcaatccatattgtagcatagaagactctaactcactcctcaatgtagcgaccaccaaacgtcagcagagagtatatgcctggtaggtaggtgatgtggccctcaaccttagaaccgactgatgtgcgaagagccgtcaaatccaaatgttggtgagccttcaaggctatctaagctatcaggtgggctctataaaatgactcctatgtctgagtgttgaacagtggccctgctgctggatcatgctgagcgggaagccaaatatccactggtacgtgcttgaagcgaagaactctagtggcaatggatatgtgaagatcgaacaatcttggatccgcagcaagtggctaaacctcaatctcatcacactcttggaagcgggctggaggcaacggtggagtgacagagggagcgagagcattggaagcaggtgtggtgcaggttgtggatgtagcgagagtggtggtaggcactagagtagcggaagctggcgtggtagtggtggctagggtagagggttcaaatctggctggagtggagagtgcccgagatgagaggtgattgatacaaaattctatctggttagagccaatcctcatttgatctccttgctctgctctcttagctactgttgttgctcgagtagctctatccaatttgcgcttcttctttcctccctactgctctaggtagacttcatttcccttgtcctacctgaatgggcgaggatgatcctaatcatcacctcctcctgctggtgtggcattcttcatcctcaccataatgacttctgaaactgcccacagactactggcacgctacacaagaattagagaagataaacaagagtagtaaagtagtaaacaataatatggaatggaagagctagctacttagggcatgtctcccacgaaaaggccaagcaggggaagagtcacgcgatcaggcacaccgtcacactgaaaatgacaaaagaggtgagcatgagttagtcacatcatcatatagacatgaaatgtgaactaagactcacacccacatgaggtacatggggtttggattgcatggtcaaggttttcgagctttgggctttttggagaggtttttg

SEQ ID NO: 73235 - DNA, 451 bp, Zea Mays
ggaaaatctatgtgaagctcttcttctctctcccaagtagcttcatcttctccgtggtgactccattgcactttgcacatctttatcaccttattctcgtgacacgagtcagtgtatcaagaatcttgatgggatactcagcataagccagatcatcttgaacactaaggtcctccattggtagctgctcttcaggtaccctgagacatttcttcagttgtgacacatgaaagacatcatgcacatccgccagatgatcaggtaattccaattgatatgtcacctctcccactcgctttaggattaagaagggtccaatgaagcgaggagacaacttccctttgactttgaatcttctcatacccggagtggtgacaccttcaaatatacatgatcaccctccttaaactctagcagtcttctccgggtatcagcatagcttttctgcctt

SEQ ID NO: 73236 - DNA, 450 bp, Zea Mays
cggtcggccgatattcttggtttcgttgactggctggtgttcatggcccccaccactttgtctccctcacctgtaccatcctgcagtgtgcttgctgacccgcattggtgttgcgctatggaggacgaatatgaggcccgattggacgaccacatgtgagacctagtgtcgtgtcccctggcaccaacgtggtcacctacaagtggatcttctagcataagctcaaggttgatgataccttggattagtataaggcttgttgggtccatcggtgctttactcaatgtctcgaagtggactacaactagacctctagcccccattatgaatcttgccactgtccagaccatcctcaccctcgctctcccaggactaggtggtctaccatctggacataaagaatgtctttcttcacggcactctgaccgagatggtgtactacagctagcc

SEQ ID NO: 73237 - DNA, 1654 bp, Zea Mays
ggtacacatctgtaaccttatggttaactactttataatctcaatatctagttaacattattatctgaattttcaatatcaaatcagattagttctgacctttgcatctgtttgggtctctgcctctccaggggaacttcggaaagcaacatctaatcgggctacagtatgctgctacccaggtaactaactaactaacctaccacagcttcaggtgcatgtgacatgagacgttaattttgttcagattaagatgttgctttcctgtcatgccatgtttcagttccagaccgacatgcagttgcctctaggactgcccggcgagtcaggcccttcgtcgtggttccaaaacggcggcgctgatgggcaacaagccatgatgctaacggacgagtccggcctgctccatcagaggtgaattcaagctccgagttgtgcattgctctgacgaacaaactgcccttcgtcgttaactgacgacgagcaaactgatcttggcgcagagacattgcgcagggctatccaagctacttcagcacggtcaagcaggatcccgacaccggtggtagcagcagtgatcacgggcaggtggtgcttcaccatccgcagccgcccgacttcagccagaccgagtgcctgacgtcgctgcacctgccgtcgcagcagttcccgtacccacccttcgaccaccacggcctttacagcgaccgaattttcaggccagacgcagttgagctgcacgccggcggcgtcgccagtatggactttctcagcggtcagtacgacttgccgaggcctggcgatgatgccagcttccataactgggcgtcagctgcagcatgtagtgcaaccatgttcgaccagcaacagcaacagcagcatcagcatcaccagcaaccacaatcttcacctgcacaagtgagtgcataattacaaaaccaatctttcgactgttcgttctgccgcatgtgaacttgcttatctatctatttgctgtcacaagtttatagctccgctgaaacattttccgatacatatttttttttctcatctcacattagttgacccatttttatccatgtttattaagacttaattcaatccacagtccatatcaaactgatttaagttctgagcaattctatgggcgatgagagctttccaatcattgtttaaattcatttattaaaatttaaaatcatgcagaaagaatgtgcagttatgatttttttttttttttttgcctttggcattatatgttttactgatttcggtatctcttgtggaccatgactgaatctctaaccatcagcttcctgcagcaacaactctagcaactgcctcgttcgatcacgccgtttatcacagttcatctcagcaccaacaagtcatgatcggttgatcctatatatggtaaaaaaatcggagataatattgccctccaaaaggtgctaccctaaactaatcatcaatgcaaaatgtgtataggcaacactgtcgatgtaaaatatatatttattgtagctaattctttcttgtaagtatctatctgtctcctgtatactactggtatagctttcataaaaggattgggcacttaactattagttcataggcattcatctttgcatgaatgaatatatttgaaattttg

SEQ ID NO: 73238 - DNA, 420 bp, Zea Mays
aaggtatggtcgagaggtgggaaaggtaaaggcaacactaaacagaagcacaacaaaggatggagttgaaaactcgcaagcgacgaggaagaagataccaccaagagaaaattggtaaagtacaactttaaaattgaaatggaagagagaaggttttagaggataggtataatataagcatcaaggtaagatatagaggtgacaagggtaaagatgataatcgtgaaaagcataaccaaggatagagttaaggcaagactcgcaaagtggcgaagtggagaaaataatcaagggtaagataagtatggttccaacagaagggttgaagtaaaaaattcattaccgagggaagttataaggaagcaacgagatcaccaatcatgtgtgagataaaatgatcgctcatggatcattaggaaa

SEQ ID NO: 73239 - DNA, 1194 bp, Zea Mays
atcacatttatacccctgggacactaaaaaccctaattggaaccctagaaaactctaaaactaaaccctaggggcctatgtgcaaaattagtccacttttgggctaaagtgcaaaaaccaagtaaaataagtgttttaagtcatttggttcacaaatatgtggacttgaaagccaaaccctaagttttggacttaaatgcaaaaaggacctcaattttgattcctatgctaagtctgaaaatagggttataggcccaactttggggctgtgtagctttcaaaatagtgagaattcatattaggtgaccacatcaaagttgaagaccaaacataggagaacaactttgtttaagggtttaagccatgttcttgtgaaaaactggaagataatcatgcacaaagttggactgtcaggctggtatagactgaacttctgttggacagtgatcttgatccaacattaagagacatttagactaatatccagtggaaatctacctatggttgccatagcaaggttgtagttggtataatactctacaagtttgctgcaaagattaacttgtgttaccacagaaatttgggagaaaattaagctccaacttggtctgtcagacaagctttgcactgaatcaaagcgcactgttcaccgatcttcagaaaaatcgcgccggcgataagaacgccaccgcagcgtggatggtcgtcggcgaccacggtaaaaggcttttgcaacgtggcgttaaaacggggaggtggcatggcctggttaatcggcggccaccgtgccatcaccgtggtcctatcgaagctaggctcgccgcacctcccttgcgcgtcgactgatcggataagacctcgccgccggccgattactgccgcgcgccacgtgcttaagcactagtcctcatcatggtgactcatggattgcatgcccggcgatcaccggagccattgccacggtgaaagccactttccccgtaccgagctcgcctctcctctccggccgccagcacccctcagccaaattcttcaccgtcgctcgacgcgcctataaattgagtgcgccactagctccatagggtagtcaagaaccccgccaccaagaattaccctcagtggatccccaacgagcgcgaatcttgcaattcccccaaatcggttcaaacaagccgctagaacacttcgccgtgg

SEQ ID NO: 73240 - DNA, 371 bp, Zea Mays
cggagcttgggagttgtgggcgggcccggccatggccgccgccgcgccagtactgtgtgctgccagggccgagtgccaggtgtgtggggaagaaagccctcgggtcgttggattcgcaagcgacgatcaagattagaagaagcaaatatcccttcggcactttgaatccgggccattgatcgtcgatccgatggtccggggtgatctcttttgtctgcacgtgtgtgtggtggtggggatcctgtgcggattggatcccgtgcgccttaccatttgcaccggggtgtggcacgatctcagccagtcgcaggacgccacgtgtccttgtgtaggaatccgagatcggttttgcaaagtggcccctgtccttg

SEQ ID NO: 73241 - DNA, 440 bp, Zea Mays
gtcatcttcttccacattcatcccattcgaccaacaactctcatccccttccattgatgctctcaaccacttgtgtctaaagttttgtgatcctttgaggtaattggcttctatagagatagaggaagaggaaaaactatataagatcaagatccacccatcttgagcacttggtgcgcgcatgccaccctagccgtatgtagtgtttgttactcttgtagcttaggcacctagatgactggggttttctgggagctcccaataggttgtggttgagcatcagaaagtttgcattgcctttgtaatttagtggaaactcctagctcaataactaccttgatggtgggttttagaagacgtgggagttgaaaggaactccataaccttaaggctccctcaacaacatagacataggcaagtcatgttggtgagctagacca

SEQ ID NO: 73242 - DNA, 714 bp, Zea Mays
gttgattcagtcagtgaaacttgttaactagatggcaattttacccacggtttttgcacctgatggatttgaataaagggtacaaaaaaagtcacccgtggttacgtgagggccggagattcgtagagacgtggattgggcgcgagtatcaaatttaatcacaggtaccgtaatttgataatatataatttatatatcacgtggaccataattatagcatatggaactacgaagatagtgttttttatggataactagcgtgccgtgggaaagtttgccgtaactgcaaccgctgatcacgtcttcacggacgaaaacaggccaggttccggatgccctgtgaagaacgttcaacgcgttaacaacctagccggtggtcaggtcaaatcaggcatgcttaggtgcaggtgcagggatgattaggcatctgttcccgtgtgactcctctatataccgacagggatgacgacgacgatggcgttcatcggtgcatggctgaaccgtacatgctccgatcctgcagctgcaggagtgcaggtggtctcgtgctgacgacggcgactcctctatatatcatgccccggcgatcgcaagcatacgcgtgcgcgttggtacggtggcgcgatatgcatgcgtgtcgaaccgcgacacgacaacagatgcatggcctgaccacatgcacgacttacatgcttcaactagaagcagaacgcg

SEQ ID NO: 73243 - DNA, 1260 bp, Zea Mays
gtgtcatggtgtatatgtgtgtttatcgacgatgactactatgcaatcaggccttatgtacagacatgcaagtgagtaatctggtccatcacatcatgattcaactgtggatataatcatgggtttgttagtaaatttcttataaatctaaaagaattggtggtggaagggtttaattattaaacatgacatgctattagatcatgatctaattaatcagaaggcacgcttatatgcttgcacataatatctaattgtataatagtcgttgccatgtttatttcttccatctgaaactgtatgtttccgcaacaaagtgtcattagttaattaattcaatgggctttgcgcagaagaagggatgatagttatggcagagattatagggtggtaagagaattggtaaggcggagagcttcgaagcatggcttgggaaaagataggcatggtcacaaattggcaatcaaggatgatgatattgatgctattttgtccaggataagcaaggagtccagcatttaagagtgcaattctactataatctatgttgagaagctcagtgacgagaaggctcttattttctttgattgaatgaaggttaatgggaagctaaagcctaaaggggaatgttcatgcatatcacccagctgttcaggccatttcctagaaggtggctcgaagatggttgagctgttgcttcatggaatggttgatgattcagattgtgcattagatgttcgggcatttagtggcctgatatatgtttgtgctaaaagggggcttgatggttgggcaacaaagtggtttgacatgatgcttgagggagaagtgtagccaaacttgtctacaatggtatgcttactggcctttgccagaatactgggaaagttatttgatgccgcctcatgctctatttttggttgtaaattattgtgggggtccctacaatatttttattgaataaatattatttacatgaagaccaattgttactagtagggaagtgggaaggagggggaatggattacaattggtctagccagagcctaacagagtttgctaatgacgatttcattcgatgtcagatgagcaacatctcatatatgactcatgctctattttagtaacatcatgtgttcaaaattctaacaggaagaagctttgtacattctgtgtgaaaagaagtggaaagattctgcttttgaagataacatatatcatatgttgatatgttcttgccaagatggtggcagttataat

SEQ ID NO: 73244 - DNA, 522 bp, Zea Mays
ggccggtatactaccactcatcatcgcccctatcatcgccaacatgaggctacatcatgtcctgatagacggtggggctgggctcaacatcattagtcatgctgcattcaagcagctgtagatctcaggatcccgactaggaccctctcgcccattcttcggagtggggccctcaaccggtgtatccccttgggagcatcgcacttcccggttacatttgcgaccgaggagaactttccgtacaaagaacgtcctgttcgacgtcgtggaggttaacctccctttcaatgccatcattcgtaggccggccctataccggttcatggccattgcccattatgggtacttggtcctcaagatgctatcccccgctggggtcctcaccgtgcgggcgaccatgccgctatgcttgtagctgtcgagaagttgcacaccttggcggcagaagctgctcgcccagatgacggggggggagggacccctcgacttcatgtaccaaggcgcctaccaaggtgccaaagg

SEQ ID NO: 73245 - DNA, 1355 bp, Zea Mays
cagagttcttcgacgaactcctccagctcaagcagcctccctcatccttcacctggtgagctcctccactgattttctcccttctctgatcctctgattgtgcagtgaagcccaaccattaccaccttttgaaatcccatccaaattctcttcaaatctatggaatcttgtgcaacctgtatgtgcccttgtgtcccttgaatccccctgcaggttttctactccctttgggaggtttcaaactctccaatagccatttcattcaaaacctaaatccccgcacgccacatgttcgacgaagtacaccaaccactcaaatttgctcaaatcgaccccagatttttccagcaccttcatgccacatctagtaacactttcgccaaatttcacaccaatctgatataccagacaccgattacaccactgtttcacatttatagcgattgtttctgagctaagtgccacaaattcattttctccgccaaatttcaaaccaagcacacacttcactcatatgcactcatatatacctactcgtgaagtgttggctcaattccaactcatttaattccccatctccaatttcaaacctcctatggcataattcttcgttcaaacgtcgttctcgcgttgtttgactcctggttctccaaatcactcagcttttgtgtcttcactctctgtatatgtatttattcacatttcatatacttatgactatgtgactaatacatgctcacctcttctatcattttagtgatctcacctgcccgtgtgcccatcacctgtcctgcctagatcttctctctgtctcatgagatttccaggtagcgatcatttatgatcttatcagctactatctactcctgcttaacttttcactcactcatgcagctctcaggtcaggatggtgtggacaaagaacgtctcagcgctagggggaggagacaacgaggaccctccttgccccttcaggcaggtcaaggggaagacggtttaccgtgagcagtaggagggccggaagaagtcatatggatagagtcgctcgtgcagcacttgcatcggcagcagcagccgagcaggcagagcgaggaggacagttgcagatttcctctgatcagatagcctacagaatttgtcgcctcgcatctcggccttgctccactgctccctccacaccttccgccacagtgtctactccacctccaacttcaccagctcctatcgctccagagccatccaccacttccgctacacccaccacctccaccactctggcttccattgttccccctcctgctcccattttcgctccgcccattccaccaccttgcttcagcgagcgtgacgagact

SEQ ID NO: 73246 - DNA, 784 bp, Zea Mays
ttttcagagcaggattatggtttccgcttcatgagatgattggagaagttttgaataattatgaaatctatcttcatcagctgacccctaacactatcgttgggctcatcatcttcatctgggcccttcgaagccaaggaatggacccaaatgctgaatctttctgccgagtgcatgaattgcattaccaaacgaaggccagagaagacgggctacatgaaaatttcggttgttataacttcgtgtatcgtaaggatgcgaaggctccggtgctcagctatcgtactaagtggccaaccggctggaagagtgaatgattttatttcaaggtcgatgagaagaagagagagaagctcatgcaaatggttttgtgtccgatgactctaagcttcggactgactaggcccctgtgcccgcatgatgtcgaggtcaccatgccaacaggccgtagcagaattcagggtggtggttgaatagatcagcactagagatctagtgcaagaatacctggccaacatggtatctccaacattgagcgaatggagtatgccgaagctaaaagtgttgacacggattttggccctaccaaaatatatgctatgcgggctaaataacttcgattaatggaccgcaattccatgatgggtgataaaaaataatacacccgtaaaacaaatatgtactctgtatacaaatacggcgccttcgcataaatatgcagttagggcgatactccataaataatggactacgtaataatacaaagcattttacttgagtaatc

SEQ ID NO: 73247 - DNA, 294 bp, Zea Mays
gtgggtaaggataatttctctaccaaagctgtacttgccaaattgttgcagctgccactatcgatgatgatgtgaatcgaccgttcttttacaacgcccttggtatggaatagtgtgtcgctgattttttcggcctgggcaagctgtgtgctgagaacacgctgcacaacgagactctcatacctatcaacgtcgatgggatcaatgtgtacttcctcattttctgcatagttagtggcaatcatagcatgactagtttcctcggaatcactagccaaagagtactcaccattg

SEQ ID NO: 73248 - DNA, 1180 bp, Zea Mays
agttattacctagggtatgtcctcattatcatgtgctatctctattgcttttatggtaccattcacttagctttagtctttcacttatctctatcatcgctccctacgcgcgtgttattcggtgcactaaattctatggttgacgactctcttgcgtcgcatcttggctttgctacttctagtgtagccacaggcgccatcaagatgattattgatctagaggttgtagttgtttctctccaataagttggttctaattgccttgccaagaaggaatgtgagcacatgacctaggactccataacgtcttcctctctcgtgttgctaaggttgagcgtgaggtcactcttgcctagattgagcatgatgttgtggatgcttgcatccatgttgctcttgatcgcattgctcgtacatgtgctatatccgagttgcctttgatcaacccaaccttgatggggaggaccttaaggacgacgactttgccatcgatgtgccacacatccatgatgacattcttgtcatgaggctgccactcgcaatctctacatctaggtggttgttgtgtagaacatttatgtgttcatgcctcacatcatcgatgtcacctcaacattctaagcttgttggcctgaggtgtcactcctccccgtcggtcgatcctcccttgagggccatgtcgtctctgatgtttctaacttgactcacctcactaggtccacatggattgtgtcatgtagatgtggatcatcaacatcatcttcgataagcttgttgaagccatcgttgtgtgtggcgccctcgcccgtgccacctagcttggccttgagccacagttccttgataaccataaaacatgacctcttctttgatgtcatcttctgcaccttcacccaaggggacctcactatcaccaactactgctataagctcaaaggcatgtccgatgccctccttaatcttatccgaccatggccttgtcctcaacgtccttcgtgagcttaatggtcatttcaaagatatctggcttcatcatcatcatggacgtcccttcccctctttcttataggcacgcaactacctccttattgaagagctcaccatggcagcagttcctctagccatcacacttcataatgcggctactaagcccagcagtgctcggcactatcccctgcgc

SEQ ID NO: 73249 - DNA, 456 bp, Zea Mays
cggtgacagtgttgtggagccacgagagcaccacattgtccattaggtgctaggacagagacggtggggtgatgatgtcattaaggacgtggtcggcgagggcgtaccgccgaagtgtgaggagaacctaacctcgccaacgagggtaggtggaggacgctgggtcctacatgatggacacacgtgaccagatgttgtggagtccggtggcttgtgcgtggacggtggtgatgtggtcgacgtcgagtccagaggcgaggggggcctcgggagtaggaggaggagcctcatggacgaccgaagtagatccgaggatgagacgttgcgcagtggccatctgggcggtcagagtgatgaccatggcacactcttgctccagggcgagggacgcgacatgctcgtgctcctgcgacgcagccagggcgacctagatggtggcgatggcagagaccagtg

SEQ ID NO: 73250 - DNA, 614 bp, Zea Mays
tgggaatgaagatatcgaagatgggccgtggaggctgagccatgttgtttttaggaagtcgactgtcaagcaagggcaagtcgaagcgatgaagggcaaatattttcatgatgtttctatagtgagggtcggggagcactgttccccttcccgaagctgatgaggtagtagtttttaagagctttatgaaagttgggcttcactttccactccacaagatgttggttgaggttctaaagacattcgaaatataccttcatcaacttacccccgaagctcttatcaaagtgggggttttatatgggccatgaggagtcagggactggagccagatgctaggtgcttctgcaatattcacgagctatcttaccagacaatggcaacagggaaagagcaatatcataacaacttcggctattacaacttcgtgccccactctaaggcaaattaccctatgcctacatttcagaagaagtggctgggctcctagatgaagcaatggttttacgtaaagaatgatctggatcaaagggaggatgtgaggggcatcattcaatgtcctatatggccgtgcttcagcatcaagaggcctcttgcaaatgaatgggaaatgc

SEQ ID NO: 73251 - DNA, 665 bp, Zea Mays
caaaaataaacttgaacaacaagaacgcaagagcaagcagaaatacattcagtcatttcaaagcagaagcgcaagcaatgggcatgtaaaaggtttagcgagacccggtattggattccaaatcccacactgacacacgatggcgagataagttacaagaggtgaacctcaagttccatgtttgaaactgcttactggctttcactagagggaacacatgtgtcaatgtgtggcaagacacaaatgacaaacctataaactagagcgtgcaataggaagctcaagttgaaacaccaagctcaaacatctacagtgaccatgggatcccagtgtccagtgacgtgatgatcactctttatctcgcaatattggtgcctcaagaagcttgcgaggtaactcttcaactttcgattcttagtttatgacaactgatagaaatacacaaataaggagttctatgaattcagcgtgtcagtaccaacctgggcaacaaatatatataggacacaagaatcaacaaacatatggtatcctgatggctttgagagtatcttgggagcaagccacattcccaggtccgctgcagtgcccactggccactgcccaccaccaggagccctcttctgcctccttcccttgagcttcgccgactacgcgattcagtg

SEQ ID NO: 73252 - DNA, 450 bp, Zea Mays
tggaacccttcatcatccacgatcatgttgtgcgagatgataaatgtggtcataatctctcccagacgttatcgatccctgccatatgcgggtccatgtagtactccccaacaagcttgcaatacaccgaaggcttgttcaacatctttcctacgactttcctgcatttggatgaagtaaaccttcttttcctcccaaggatgactgatagctttcacgaatgtaggtcaatcagggtatatatcgtctgctagaaagtaaccagtttcgtacgtgtggttgttgatggtgtagtgcacaggggacatagttccttgacgtaatggatcgaatatatgtggatgttgcaagaaatttatgtctttattgctccccggcattccgaagaatgcatgccaaatccacatgtcatatgaagctacttcctcatgtatcaaggagggcttcgag

SEQ ID NO: 73253 - DNA, 1723 bp, Zea Mays
gatcttggtgtgtgatacctgcctttgagttttcatatgttacctgctgctaacattacagtataacatatcaaatccataataaagataatatcatcatcatgacaaagaaaacatgttcccttatctggactagagtctatactggttggttatgatgcatagatgtagagctgtcataatatggctggaatatgtaaatgtggcagtgtcatatgggcatagattcgaatatgttttttggtagtgtacatggttggatctcttcgctgctgctgctatgctctgtactgcctaggtctgattaatatgactagcttatatgcagatatgttgtcaaggtgttaatacagtttgcactgtttcttcattaggtacttttagttgaagggtggttgatgtatattatgttctacacgggtagtgggacctgtctttattacattgaaggctcataaaccattttatcttgtctgaatagctattgagttttaaccactgtgttagattgagtgcaccattgtgttgtctgtacggccttaagcccataactacctcatcaccaatctgtgtctaatttagatggattttgttgaaagcatctttcatgaaccggttgcaagaaaatgtactagatttaataaagattcactaaactagattcctcagtgcaaccagcatgccattttgtgatttagccttgatttgttttttcatcgagtccgcgggaacatcgcctccacaacgaaggcacgtcacggcagcagtacctagcatgggcgtcggtgtggttctcatctagacagccataaggttagtaccgagctccccttttacctcctccctctcctctacctcctctccgcctagcgttccaagacatccgtctacggttcgtctttctttgtcttcctctttcctacagatccgatttcctcactcatgccgggtgctgtccgcagacgattagatctgttttattcactcgcgttgggtgtcttcctaggttcgttctcatgtcgtttgtgacctagatcgtgtggaggcgttggtgggtgcaagtttgtatgtgtggtgttgctacggtttcggaccccttcttgataggttgatttgtgtctctcatgcaaaattgaggagaatgatgtttcctaattatagataggtttagaacttttattttctagaaaagtagttaatgagattttcttatgtgtactttggttcataaatccaagagagcacttgactagaatatgatctggaatttcaggtaaaggtacaccctaccttctatcaggactagaatcttaggagaaaaggtaccagacatcaggatcgaagctctagaccacagtgctgacaattggtgaataaaaactgcataaccaaaggttaaaagagactggacaatcttgcagaggataaacacaatagaatgcattattgcaggttacagattagcagcatattctaccgccaatatacgcactacccttgagtccccaatccccagcacaagcttgattctgttccacttttatcaccaatagatgttatcagtacttgccgattaaattcacatcctttgatatctgaacgtttttgcatttctatcgtgcattcaaaggagcaaatatgtgtctggtcactgctatgtaaataactttatgggtgactgtatatgctgtacaatttttcataacgacatgatctgttcgag

SEQ ID NO: 73254 - DNA, 322 bp, Zea Mays
gggaaaggtacctcaaatccatcggcatgctgctggacagaccaagtccaattcacaggaataagacgtgccaattctgctttcaccaaatctgtggtaatgtttccttccattgcagtaataaaagtggttgcattatcctttttgggtgccatgcccttggctccacttgtggggatttggaagaaacccgaatcacctcctgcaaaaccacatagaagtgcgtgtggtttagggccattgaatgtcggacaaacctgtggagtgtgatccatttcacaaagttcgcagcacaacttttctttgcgtttatttccttgat

SEQ ID NO: 73255 - DNA, 418 bp, Zea Mays
actgtaatactttacatgaagaagtacatgtattgtatgctcgactgcacccggacgtgccttccgacgctgctgcaatgggagccggaccatcggggacaacaagtgaaggacctgatggggagttggacctttttaggccccctccttccatgacccttgctgatgaacggtctcctacagcaggaaatgaagcaacaaaggatgacgaagactagaatagtatagtttagatgttatacttatgtaaaataagtactgaagtcaagttgtacgctggagtctgtataattacattttggtaatgtaatatgatggtgtatgctgtcatgttatatttttcccaaatgtttctttgcctcagatgccatcacggactcgcacacatgatggtgcggggacttctcgcggtcgggaa

SEQ ID NO: 73256 - DNA, 1299 bp, Zea Mays
ggttgtactcgttgctgggccaacattccccactggccagcccgcccacatttcttctgccaggccgcccccactctccagccgaagcccgcacgctcatgggcaagcttgtgacgctgtcacccgggtcccacttgtcatcttcctcgtccatgcccgcatgcttgaacagactcgcgagaactgcgcgctgttacaaccgatcgcgccagccggcttccctgggtcacctcctacctcgcgatcggactcactactggcaatgagatccgcggaaaccgcgcgcgcggttggcctgggatcgatccggccgactcaacctcgtctctgggctataaaaggggacccttagatccttctcgcccaacaaactaagaaccgggccctagtgtcatcaccgtggggaaggaagctgacgaccgccgctgttggcccacgttctcgtctcggtgccgacctggggagctgcaggcgggcaaggatgtatgtcagcgcccagggaactcgtaccatggaggttgggcctctggtgatcgcgcatgggtggcaatttcccgccgtcgctgctgggtcaccatccgccgtggccagggggctccatgcgatgatttctggtgaggcttcctctcccaggatcgatttcttctcctctacattgaccatagttgaatcgagctcttgtgcctgggagtcgaggcaaggcagtgcgacaatggcgccatggcggtgcacgctcgccgtcgtggcgtgggatactggatgaaagggagtaacggcttgtccgttggattcgagacatagggatgtgattggatctgggaaatgatggctccgggtcgttggatctttgtatctgtggctccgattgggtgaaggatgctccctccgcgtaattaaatcatgaccgttggtctcttgatggacagatctgagtagttatcgagtgttgggggcactgaggtctaattacgaccgtatgattcagatcgggcggctcatagtgaacgataccccttcggctgtgtggattcgcataagaacccctgctctttttgtaaattaacccaccgtcctagaactatagcagagagtttaatataggtccctggtatttatagtttgaaccccagctttctcagtaatcacggccgcagtccaatccactggtaaattaatttaattagatgcagaattcatgtttagtataaaaataatgtcttaatcttggaaaattcataacttgatgaatttaaccccgatttgatccgtttcagttgcgttattttcatacaaatattt

SEQ ID NO: 73257 - DNA, 468 bp, Zea Mays
taggagttttgccatgggaaccttgaaaacacacttcttggggtttagcttgattcagaaccttgggaggttggtgaacgtctcctccagatcggtgatgaggtcgtcagactttttggtatttacaacgatgtcatcaacatagacctctaaggtacacctgacctagtcagtgaagcattagagcatgcacctctggtacgtagctctgacattcttcacaccgaacatcatggatatgtagcagaacgtgccaaagggggtaataaaggtggtggcatgctggtcgatctccttcatggcaatctggtgatagcccgagtatacattcggggaggaaaggagctcgcacccattggtagagtctacgacctgatcaattcgcgggagagggaaatgatccttggggcatgccttgctgagccctatgtagtcgacgcacatcctccaactctcgttcttcttatt

SEQ ID NO: 73258 - DNA, 1327 bp, Zea Mays
accaggaagatggcgcgttcaaccttcctctgttgtgtcatcgccaccacccgcacgggagaaaattggaaaccagcctcaattattgcctcctcttctttttttttcattcccagtccactatctgcagctctattaattactccgtggtgggcgatgtacaagtcgtgcgtgccgattcttgtgtcagcgtcggattgactaggagtctgaagtaggtggcggattaagggcacgagacacggccaagtttagtgagcaaagcttccaccatttttaatgtcggagctagcttctgcttttgcttgtaccgggagttactacaatgcttgcacctttcttcctatcaatgaggggacctggaaaattttgctgatgctgtcactgctttaccttgcacaaggttgtgcacaggtggttaagttagcttggataactagtttacgattatacatgcctgaaagtgaacatgaactagcagctagggaggaggtggttggttctaaggttcaggatgagctgtgaacatgaactagcagcgagggaggaggtggttggttctaaggttcaggatgagctgtgaacatgaactagcagcgagggaggaggtggttggtcttaaggttgaggatgagttgtgatcattggatttagattagatagatggtatatttattgcctgaaaataaagcaaaaaaacaagacacctgtgatttagcaattctcgtacaatactagggtagcaaaggtacgtgaagaaggattgttaaggggacatagagtgagtcctgacaccgtagagtacgtctacgaggtcatgagtcatgatatcacaagcctaatgcacaaggatttttatagaagtccgagccgcaatgtgtgtaatactctacgccctctactcctcttgttgatcatgtatctctgtgtggtgtgtccaagattacaaggaagggggaggaactacatgctttgagaattgtaggctaagataagctaaactaactcctctcggctctcgctggtttggacgggttgctttcaaggttgttgtcttgagtttggtcttgcgaatctaaattgaatgttgttctaccacctctttatagatcaaaggagtggtagtgttacaagtatatacttcttttggccttggcttgtcgtagagccaaccactcgtgtcatgtcatgagatcgtatgtcatattacggtaggtgttctccgatgtaatcatgttgttattcttttggcgcattaatgcccctcgtaccttttagtataagcacaacctttcatactgtaatgtgttggtaacaaggattctcc

SEQ ID NO: 73259 - DNA, 433 bp, Zea Mays
atttcttgtaactcgagtcaaagtgtccaggatcttgatagggtactcagcataagtcagatcatcttgaacactaaggccctccattaatagttgctcctcaggtaccctgaggcacttctgtaactgggacacatggaatacatcatgtacatctgacaggtgatcgggtagttctagttgatatgcaacttctcccactcgctttaagatcaagaaaggtccaatgaagcgaggggactactttcctttaactttaaatctcctcataccccggatcggtgacaccttcagatacacgtgatcaccctccttaaactccagtagtcttctcctattatcagcatagctcttttgcctggattgtgcaattcttaaattttctcttatcattcgaacttgttcttctgcctcttgtataagttcaggccca

SEQ ID NO: 73260 - DNA, 480 bp, Zea Mays
aaaaaactcgaaagaaagccgggtgtttagttatctgcgtgaactactggatcaggattggcccacctgttcagcatacctgtccagttcgacatgctagaatggcctgtatagactatagtattttaaaatacggaaccttgtggaccatggaatgagcagccatgtggaaggaggactagccagccaaagccagcatgcggttaagcaagctgacccgttgaagcaaattggactagatttccaccgtggcaactcacctttcaatatattttagtgtaacaaattgtgcttagaataagaagcttctcccttccaacacttggcagtcactgtcgataggtgttgagcacaaacaatgacgtgcggacggtcagcggtccggactatccgccatagcggcacggactgtccgcgcgtgcgcagaatcgtttatagttctagatttctatcaagatttgttagcaaaaactacgggat

SEQ ID NO: 73261 - DNA, 616 bp, Zea Mays
gaaatatggaaagctctagatagagcaatcactatctggtagattgtttttagatgaacaatagatggacgattaaaaaatgaatatctttctatatgacgtataaacctctttctcaaacctgatatcttgcgccatagccaaccaaacagaattaataaccatgggagctatcagcgtgcggagaatacagatcttattgactgacgaaggatcttgtacggtccaagtgtttgagatgctcctgtgcaaacgggtttgggtcctatttgctaaccgagttagaatttctatgtaccctcgctatttgccattcgaggtagactttctaagtgccctacaaagataacagggtttactattagagtaagggacttgaggatcaacagtaatcatgtataatcttcaatcatccatagctttttgacactccactacaaaaggtcattgtaatcgatcttaactgagtgttttattttaaaatgaaaaggtgtccctacctattctatgatatgccactccatacatcaacccacaaggttgttgtaagcttgcacgtgtttggtttaggggttaaagtgagatggaatttgttggatccattttgttgtggtcg

SEQ ID NO: 73262 - DNA, 445 bp, Zea Mays
tgttctactctcgaaggcggttgatggacaggccgtggttcagggggctgttggtgagatgttttccccatgtggtcctgcagtgcctgaatccagctcttcgatcgctagcttcatcgccaaattgtcaaaacctgttgacggcctgctgccacaacctgtaccttgccggaggcgttgtgccaccagactttgagccgcgtcgaagcattaggttgaagatgaaaaagggtgccgctgctccatcatccaacacaaggcagattcagattcagctcattcgtcgcctttgcatggcaggggaacatgaaatgctaggctaagagattcagattcaacacaaggcagaattttcaaaaattctgatatggaacgtgtcttaataacaagtctcgtcgtgattctgtttgtagtctggtggctgccttgcggcctgacatagttt

SEQ ID NO: 73263 - DNA, 2497 bp, Zea Mays
gtccgcgtgaaaaaactttttctgacaagtcatagtataaacatccagctagaaaggtagattgctcatttgaagtatcctgcaaaatacaatacaataattgagagagaataagagatcatggttaacaattttgatgtaatgcaaccaacagaacttactccagataccagagatgaggcaactttgctgacttcatcaacactcgtgacgaaactgaactgccttccaaagggatgcttacatgattgaggaataaataaggcactaggcagcgttctctgaagaaacatacagagagaaggatggtctcctttgaaacagtttatccaaaattcaatatcatggcaacatacaccaagatgctctttggcaatagaaagaaatcgctcatccagtgggagataacagcatgcatgactaaggcgcccactggtgaacagcaaggacaacaacttctcaatgggtaatttttcttgcttccatatcattatcataaccttgcacaacttaaactgaagctcaaaacagccctgagatggcagaacaaatactcatgattatgttgctaaaggaaagcaattgcatctcatccaacttaataaactgaagatatatcatggccctaccttcatagacaacaaatcaaccaggaaacaaataagtggtacaatagtttttgatggctgttgcaagaccatatcagaagaagaatggtcaaaagcctccatgtccaaccacaagttaagtgctttctcagcgctatcaaatattacctatggaaaataataataatgacactacacataattagataaagcataaccatgttacgctaaacatagacatcagagtgcggggatcgcttatatgaacattaagatgactaggatatgaagcagttacctccccaccaagtttgtcttcctgagcacactgcgcatacaaacagtacgcaatggccaactgattgtttgcagtagtgttggtacgagttgaatcatgtgagatcttttgctggttagatgaacaaacattaatctatatctcccttctttgtaaataacgaaaggcaatatgtgatccaaactcaccagtaaagatatggcatcacgtagagactcaaggcagttttttatgttttccactccagatgcacgaagtgcacctgcctttctaataagaacccttgatctctccaaaaaatgttctttcgtacagtaaattttatgaagcagaacatctatgatccttatctgcattttagagcagaattctatgcttcgggcttcagttaatccatatgctaataactcctgcagaatacaatgaattcccagagtagttagccccaacaacgaagaactacagatacaacaaatttaatcaaacagaataaaatatggtacctgctctactattaagcctatcagcttaattggccatggagaccgatatttcagaagaaagggatagagaagtggagcatcatccaccttagtatccctaaaatccttgtgtactgcctataatttaagaaacagaacataagttgcagtaacataataagttttaaaaaagcagaattgtttttagtcagcaccttaacccatgccttgatcagtataaaagaacatttgttatattcagaattgtcgccatcaggcaacattatagacaaactcttcgcaacaatcacaagtggtgtttctatctctgtgccacatctacagagagcatcaaccatctttgcaattcttgaaaatgcatccaaaatgatatccatatccttcagtgtatccatcgacagatctgtcataatgtcgtttccttttgttcttgaagatagtctatagtaaaaaaggctgatgtgtgcccatattgtttggcagcacagttctaaagcctttggtgcctaaagcagagacaacaatattcacttcaatggtagctcaaaggggttggcccagcaaaaagaagaaaagaaacttagaaggaatacctctttaacatgtccagtgttatgaagtgtcactccgatgttgccaagtgaaggtatcaagaatttgagctcctcaagtgtaaaccatttacttgaaatggcacagacgatgaaacccaagctcttctggactatgcaagcaaaaggtgttaattgacaataaggatggtgatacaaagctagtaacagcaagcaactcaatggccattttcaacaactagcatctggatataacaaagcaagtactgatcactacatcttaacaaaataataattctcacataaatattaacagcacgatataaccagggatcttgcaattgcactaggcacaatggcaatgtagcaatctagcataaacataggaaacacactagaatacctggatatctttcttggtaagaaaggaaaacttgatcgcggaaacaaggactgtcagtaaggttccatgttgttcatgctgtctctcgttgtccccttgagacatttgcctac

SEQ ID NO: 73264 - DNA, 1054 bp, Zea Mays
caatgtttcaggccgatttattcagccttatcttctgagataaagtatttttctttcgcctgtcttcccatggtaggcaaatgaaggcgctttgctggctagtcacgaagaacaacctttttgttgacgtgcttggatgataattgatcaaaagtgggggcttcagcagaccagtgcttttattgcattttgcatagccgaccggacagcaaggaagaaaatggtaaattaaaactgcatagcaattctaaaatagcatacccctcaattttgaaaattaagtgatttttagtcatcttaaggtaaacaattctatgtctgaccaagtttgtagaaaagagtaaaaaaaattacgataccagatgaactttgttaattaaatatacttccataggcaggagtattgcagaaatcagtgaagccctctcgtcacatccgtgttgtgtgtttctctcctgaggaggagaatagggatctttggtgcaacgcaaggcaccaggagccggaggaagcagctacggattggatcgagttggagccaaaaccgtacatatgatgatcagcatgcaggaggcttttgctagcgttaatgtaaaatgagcggaagctagccatggtgcttcgcaactttatcggcccagaaaagattattgcctaaccaagccgcctttctgaaccacgatttgtcagtgaccatcagaatctgaaggccagacgagagcaaaccacacaaaggtttgggagcttgccaccagctaggtatcctctcccatcccatatcgcacttcttcgtctagcttcttgctaaagctgaacaaccggtgcttcattcatcatgtgccagctgccttttactttctgcgatccattggcattgacgatgccctggcccttcgcggtcaaaagtctctgcagagtggagctgcaacgaacagaaaccgggtcttgcattggattgcgcaccccggccctttatgtgtttttgtctctgaaagggaggtcattaggatgcctcaaataaaaagagcggagctggcagctggaagtgaacaag

SEQ ID NO: 73265 - DNA, 327 bp, Zea Mays
gttcactgctagtctgaaaattcagacataacagcctgacaacccaactttaggcttggttttctctggatttttcttaacaactaagctcacatccttaagcaaagttgttctcctataatgggtcttcaactttgatgtggtgacctagggtaaaaaccctatactttgtaagttacaaagccctaaaatggagcctttaacactgattttcagacttagtgtataactcaaatgaggtccattttgcatttaagtccaaaactttgggttttgctttcaaatacacatttttgtgaaccaagggacttaagaaacctatttgac

SEQ ID NO: 73266 - DNA, 450 bp, Zea Mays
atgtcatatttgtaattgtgtacaatggattgctgaaagcataagtgaagaacattacatgctcaaatgtacccctgagctctatgaccacctagctctccccttttggttctggtgagagttctagactaactggtctctagatcacctctggctaccttctgaatcgagagctgaaaatcccttttgaatcctccttctacgttgctctatccctcccttttatagcccaagtgaggagagagatacatgtctgttgggcagtgggacctgcctagcagagcctcaactactcctatcttatctcagacgtggggtcgttcatggtgcacgtcttggtcgggccacaatgttgagcccaccatgcttcaggggttgatacgccctgtcgtagtggcaagtactaaatcctgcgccatctagtacgacgtagttgataaacgttgtagc

SEQ ID NO: 73267 - DNA, 606 bp, Zea Mays
gcttggttagtatttggaaggaacaaagggagtgagtgggtgaggaggcaatgctcatgcaccaggcctaggcacgggatgcgatcatggtgacaagagcaggcgacacgacataggtgggtggggaggaagcaaggagagaggagggcctatgtaggattcttatttctcatgccgccttggagtcgatggtgtggcaacgcctgtgctaggcgagattgaacgataacccttgtcatgtcaccatcctacgcgtgactagcctcccatggtgatagtctatccacaatagacaaagcagtgcaacggtgtggttagaatcaaatagtgagaataacagggcaaacgatttagttttgaaaaaaactattgtcatctttagaaatagttttaaaatatctctactccttcaaatcaccacttttgactgtcgtattgcgtcgtgcgtagcgcataaatgaaaccagtgtacgcctacctccgcatgagagatccgcaacgcctgcctctgcactagcctcaatcttgagctaacatccatgtgtctagcaccatttgacaccttagcaacctcctcgcatacacccacctctacactagccaaaa

SEQ ID NO: 73268 - DNA, 388 bp, Zea Mays
acgagaggagtgaggcgagagctcgactcattacttgactctcattagttgactgatgagccgaggttcgacttgttttccaccgcctacttctagtaatagaacctaaattggatccaacggtcccaaaagatgggagtgtcaggtgttgggtcacgatggctgcattatatagctgcatacagagttgcagataatggtagcaaaacatgcgtatagcgttggagattatcctcgactaacagaaattaaagtgttggagatacagctcccatctaatctacaagaaaatctcaacaaccaaatgtctgtttccgttacacctctgcctgcgtcggactccgaacgacatcgatattgaggcgtccatatatatatagacgccgcc

SEQ ID NO: 73269 - DNA, 549 bp, Zea Mays
ggcgagtttactacactcaagtggctaccaccccggaaggagagccggtgatgatgggtatgttttccgttgccaatcatctcgctgttattcttttcgattctggtgcatcacatactttcatgagcaagatttttgctgagaagcattgcatacctactgttgaatcaaaagagggttttgtcatccaatcacctgggggtcaaatttttactaagtaatcttccacgtacccatgagtttaactggacatgaattccctaccaatatgattgttataaaggggcaagacgtagatgtgattctgggtatgaattggttagcccaaaacaaggctattatcaatgctgatcagaggactattcagctaagttatggacaaaaagaagtcaagttgtccatccctgtatttgtctccgttaaagtatctggacaagtttttgaagccatagtgcaatagatacaagacatcccggttgtgtgtgagtttttggatgtattcctgaagatttgcccggactacctccggagagggatgtggagtttgtg

SEQ ID NO: 73270 - DNA, 679 bp, Zea Mays
gtaagaatttatgaccttcaaatacatgtacagaaactatatttagttaaaatacataaatttgtctgtgcccgcgtaccaaaaaatatatgacctcatccccaaaataagaatctgattaaaatatacattccataaatttcctgagagccaacacatacaagttctacatccattgtcgcaaaaggaatgtttttaattgattcgataagggccaaatcaccttgattacacatataatctagaaaccaatcatacatagaatggtcaaattttattagtttaaaacatacgaactgatcaaatagtaatagtagagataactaatacacaattgtaataccttctcgaacaattacacttgactgtccttttttggtttattgtgctgtaatgcaaatttgtattcatctattagcgctagacaatttatctttgttctagatatatcttcttcattgggatgtataagaagtctggtatgctcatctatttttgcatcgaggggtgattcattatcaacttttgaatgcttgtccaattagctataatcaacgggtatttcatttgtctcgtttgaagaatccatcaagatgcaacaatgctacatatattgcgaataaaataatctaaatatactgatccactggcacaaccgagatagaaggaaatatgttcc

SEQ ID NO: 73271 - DNA, 553 bp, Zea Mays
ggaagtgggaaattgggaggctctggtggataatccgaggcatgggcggttgcgctgggtgcttgattacttagcgcagcggagctcaatggggcggcaatttataggttccatcagcggtgctggctaatttttagaagacgcgcaacggccggagagagggaagagtcactggtggctcagtcttggcgcttgccggtgcaacagctcttgaaatggtaagtccaagcgcgccatgattactactacgtggtaaaagggctacgacttggcgtaattggggtcgttggagtaccacagcgacatcggcggtccggccacgtcacacggctacaggcgcagttgataagcttcactcctcgaccaaatctactccccttccaatctttttaccctcccagcactatccggcccgagtcctgcacgaatcactgcgattagcgcaaatccttgcgtggaggtcaccggcggcgagggggatgaacctaggatctttgtcagtctactgtaccatcagcacgccattcagagcacctgatagagcacatttggg

SEQ ID NO: 73272 - DNA, 372 bp, Zea Mays
tgtggaaagctgggatatgccgaaggagaccaccgtcgattctagtgaaggtggtctggtccgactgaagtataccttcagattcagggagaagtttgatgagccaaacgacgactggctgaagtgcatcaaagctaccagtgatgagctacttggagcatactccaaggccgaagataatgctctgtccgcagcttttggaggtcggggcaagaaaagattaaatagggtatttgatgctattggctttgtataccctgattatcgctaccctctgtgagggtaagagaaaaagaggaagattgctgcttcggtcaccccagctgagcctatgccgaagagcaaaaaggtgaaggttctgacccaccgacc

SEQ ID NO: 73273 - DNA, 944 bp, Zea Mays
tctaccggtactttttcagcaacaggagtagaagggccaacatcctggtccaagcacgacaatcaccgaagccgtctctttttcttcttcttttcttcaacaggcgcagccggacgactgacctggcgaagacgctttgggtgagtaccctcaggttttcggatgtccactattctgtcaatttcttgtataacagcaacaatcattgttttagcaggggtcgagtctgaagaatctccagccaacaggtcaagcacaacattcatttctgcatcatctggactcgctggcatctcaaaatgaacttgcttctcatcattgggaagatcacaaagagaagcaaccaagacctcaatatcttcgggagagggtcgcactctaagacccaggccactatcaccagcagaaggattggacacgaaactgaaaaaggacttaggaggtgacaagttccaagcagagtaggcaacatgagcaccaacatttgacactttgcctctcaagatcatgtctagtcggctcaccagatcctcagcaggaattctcctattggtaactcgggttgggtcggtaacaccgctatacaaaaaagctgggtatgctctgtaattcaagggctgaatattcttaaaaacaaagtcagcaaccacagcctcggcggtcagacctctctccttcagaatacagaatttagcaagcagaaccttggcttatgttacttccaaggcagtaggagactcaatccaacttggagtgcgcacatctggctgtctccccgaccgaggggggagggactggccgtggttttccacaataaaccactccaggcgccatcctttaatactgtccttaagcgggatgtcaagatattctgttttcctcccgcggcgcatctccagacttgcaccacccacgagttggtgctgacccccagccatcccagg

SEQ ID NO: 73274 - DNA, 373 bp, Zea Mays
ctcgtataagggatgagtacagtgcaccgcgcagcacgggcgcactgtttcggcaacggactggacaggtgcgccgtctgcagggtggccctggcgccgtctgccagtggaatggacaggacgcaataaatgccgtgggggcacatcgcccgtcagaagggtgacaggcggcgtgtcctctccgcaataaatgtgagggccgcgcggcccagagcccttacgtcatactccgcccgctggcctacgtcacggataataagccatgtgacagtattagaccctcgaccgagtggggagcggaggtgctccggatagagcccggacacacgtcaataccggacccatgcctaggtcacgacacttcctttcctgg

SEQ ID NO: 73275 - DNA, 477 bp, Zea Mays
gagcctcccacctcttcaattcgagcaatttcttcaaatctttgtgaaatgttgtgaatcctgctggtggaatgcattgcattatccccattgtgtatccctgcaaactcttagctccttcgggagggcattcacacctcaaatggccatattcctaaaaccctaaatccccgcccaccaagtgttcggtgaaatgcccaaaccagccaaacttgctccaattaaacccaaatttttcaggcaccttcaccacacttccagtaacctacttgccaaatttcacgccaatccgagatcccaggcttcaatttcaccaaaattcccgttttgcgcgatcgtttccgagccgagtgcccaaaaccctatttcttcgcctaaattcaaaccaagcacacacttcactcatattgacctatataaacctattcgtgaagtatcggctcaatcccatatcgtttcgtgcctcaattcaaattc

SEQ ID NO: 73276 - DNA, 621 bp, Zea Mays
gggtctgctgaccagccgacgccgcccctttttcttctccccttcctcctttcacttcttacccattcacttcttccagccgccgttgcctacactttctctctctctcctctcactcacaccacaaaccaaagcccatttgtgccatcaaatccttgggagttcgttggaagattcgttcctctcggcttcctccatcaactccctcactttcattggaatttctgtggttcaatcttcagatcgaggtattaccttatttcttcatgtttttactcgatctcactcgttcttgattatctagtgtatcgtttcaaggatacattttagtttaggtgcttacaacacttagactatcttcttttgtctcgaacattgtttgagtttagttgtttggtattgttcgttgtagttgaaccgctcgcatgaacggttgaagtgcatgctcaatatcatacgcgtctctactcaaacgtgtttgttaagatccttgtacatcgatctcctcactcatcataggttctaccttttattttaaggatggtgcgtcggaggaacccatcagttgttgaatctgactcttccgatgatcaagagattcatgaagaaactcccccgcgt

SEQ ID NO: 73277 - DNA, 970 bp, Zea Mays
tgaatcaccactgaggaggaggaggatcaaagaactgatgcaccaggtgagttgcaaagtgttcttccccagactgagctgggggaggatagctgcccgaaggatcctggggcggaggataagaagaggattgacctggatcccctggtggggaggcgaggcaaactgctcacgatcatcaaagaattcttcatcttctggagtcatgaaaggcaccccatatgcctgctggtgccactcattgatttctggtggaggaggatgtagaggcacatcagtcaaatggggagcaaatggcatacccatagaggaagcttgacgacgaagattgtcgtcaatctcccgctgccgccgagccagctcatgcacatctgaagatatatttctgcacatggaaaagaatgttgcaataccatgggccagactagcacccatcccgcgaccatgacctcgaccacgaccatgaccatgtagtgtgggagatccgcgaccaggagatggacacgagggtccggcagcagcaggtccacgagagctagagggggatttcctcagacgccctgctggattttttggatcaatccagaagggggtgtaagatagatgtcttgtgcctttctcatagcgaaactgagtcaccacttcaatcatcttcatgatgaagggggcgtgaagacatcccttgagagggaagcagacagcatggataacttcttgccaaatcatgtcaaaaacattgatgccttcagagctatttggcttcataaatgagagcaagactttgctctcttccacgatgttcatttgattaccccctttgggaatgagggtcattctgcagagagaattaatatatctataaaacttatgcagattggtggactcccaaaatttaccagtctcagatatatgaagatcccgggcttcatccttggtgggttgacgaaagtcatgaattttaatcttgtcc

SEQ ID NO: 73278 - DNA, 343 bp, Zea Mays
cttaaaggaccttcggcgacgaagcaggcccccaacaggccgccaggcaggttttctcctgggctgtcctataggacgggccaactaaatacagccaagccaagcgggctcgaccttcgggatgtgtagggatacagtgtggtacaaactaggagacaaacgagtagataactatcatcatctgtacgggatgactctccttgattgagtatataaggccgggaggtacccccaatcatttcatctcatcctagcccaccgcactcacagttcccaacttgtaaacctcatctcaatatcagcatcaccacaaaaagtagggtattacgcaactctacggggc

SEQ ID NO: 73279 - DNA, 563 bp, Zea Mays
ttcgcttcatcgagtaggtcaacaaagatttgcttgtctattgttgcttgctcgtcgttgtaggccttagtcctcggggagtcgtattccaactctatgggcagcacggcttctgtgccaaatgccaagaagaacggcgtgcaacccattgccctggacggtgtggtctgtaggctccagagcaccgcggatagctcggtcgcccatcgctcgacaaactttttagtttatcaaatattcgtggcttgaggccttgcaagattaggtcattcgcacgctcaacctggtcattcatccttgggtgggccactacggcctagtcgacgcggatgttgaagtcctcgcagaactgtaggaacggttctcttgtgagctgagtcccgttgttggtgatgatggagttgggtaccccgaaccgatacaagatgtcgtggaagaatgtggtggcctctgtcgacttgagtttggtgatgggtttggccttgatccatttggtgaatttgtcaacggcaacgatcaagtgggtgaagcccatgggcgtttttttgaagggcccaaccaag

SEQ ID NO: 73280 - DNA, 730 bp, Zea Mays
gcgtcattgttctaaacgacttataatttggacctggagagagtatatatatatctagggacaaaccctaacctaatgatctcttctaattggcaccaaatcatatggaggggtagcctaagaccagagaacaaccatattccaagctggactactctagctaggtagacaggagtgacactactttggaataatctccattcaagccatgccatgcaccccatgtacctgtgctatgaaggcgttgagtagtcccacatgctccccacttaaaccgaaaattgtctcaatgcacgcacacccagtgtccttagctcaccactttggtctagggctaatataataatcctcggcttgcccccaccaatactataaactaatcccctctcacacccacttgcgtgcataagcatcaaccgtatcatccttctctctcaaggaagttaaagcaggcgggcacgctcatgtatactttctcggttataaaataaatactagcaaattgtccgtacattattatggtttttatttatgtttaagtatagaatataaaacaaaaacatgtgtgttctattggctagatggctgtaaatatgagtttagagtcagcaaccaaattctaatcctagtttatgcataagtctatcattttttctatttaaatgtgaagggtgcaactacggtggaaaccgtggaaccagatatagtagacatactaggtatatgcccg

SEQ ID NO: 73281 - DNA, 558 bp, Zea Mays
cggggagtcccttcgcgagctccggattcgggtatggcctataccctaaacttgaatcgtttatgctgcgatgtagagcgaatctaggttgaattggagcatttaggccccgtagattgctcacgggagctctaaaccgcctcgaacccgcctagctgcgtggtcagctctgccctatacatccccgcctaaaaaatacctcggttgtgttcgccgttgttccctcctcccgtggagctaggatcgatgagttcagggaacgattttgctagatgctggactccgtccatgcgcgtcgccgtggctcggcggtgggaaggggatggatcttcggacccttggatcttgaccaacggtcacgattaggcagtaggcgtacctcttcacgtgatcgatccggaccattgatccagtggagaacggctgagaatagatgctttcggtgatttgatccgagccgttgagcggatcgaatggtccatattagatcgtgtcccgttagatactgaccgtagatctgggatcctgtggtcgcgagcgcgcaccggttcattatat

SEQ ID NO: 73282 - DNA, 745 bp, Zea Mays
gggcatgtcgcgtctattggagccgggtgtcggcggcacgtcgggttggcgcagaggcgacggggagggcagcgagtcaaggtctttgaagcaggcatagcaaaacgctgtggcacgagttgggtgatggtgagttcgcccggaggagcagcgacggctgggcaggaggtctgatgaggccacaacaaggaggagctagggttcggagttcggacgagatggggctcgggaccgcgagggatgcccaaatgaatctgcttggggtcgcagcgaggatcgcaggttggtttgcaaaaaaattggagggctttctgaggctacggagtagatgttttgggccggaaatgtgggcatgagcggggttgaagttttaataactttcatagaatactcgaacggagagattccagaagccactccaccctttctccgtgggtagccaaacacacacaaaatataatagaacgactatgatttcatccgctcactgattaaacacatctttatagacttttaatgagcctagcgcatattaattacgatggctaaatttatcggacataaattagtgtgatcgacattgatttggtttgttcttgtagtgattaattgttgtcacgtccttgttgatcaatacattccgctagcaacgcatattaagtgttgtcgcatcctatttaaacaacggatgctgctagcaacacataataagtgtttccacatcctagttaatgaacggatggtg

SEQ ID NO: 73283 - DNA, 275 bp, Zea Mays
aaattttgatgactatgattttcattccactaagaactactcggttgttcacccatcccagagtttctccaagttgagcacgcttaacttgaaggttctttcgaggcagacttccaaaaataaagccaaatcatatttgtatcactacaacacgttcgggccaggatatcacagtattccagctatctaggtctacctagctgttgtctcatatgagacaataggcatgaacagttgccactaacataaacctctgctcatgaccagtccataaa

SEQ ID NO: 73284 - DNA, 1027 bp, Zea Mays
gctgtttttaaggcattttccgacttaagccgatcacctgactggtatggcataatggtcgccctaagataagtagacgtgagcatgtcgcaccatcttaagtcattgtcgacttaagctgattgctccattagcagggtatagtgatcaccctaagtcgagtaagcgtgagcatgtcgcaatgtcttaagtcgtcgccgacttaagccgattgctctgttagtagggtatagtggtcaccctaagtcgagtaagcgtgagcatgtcgcactgtcttaagtcgccgccgacttaagtcgattgctccgttagcagggtatagtggtcaccctaagtcgactaagcgtgagcatgtcgcaccgacttaagtcatcactgacttaagccgattgctccgttagtagggtatagtggtcaccctaagtcgagtaagcgtgagcatgtcgcaccgacttaagacgtcgccgacttaagccgattgctccgttagtagggtatagtggtcaccctaagtcgagtaagcgtgagcatgtcgcaccgacttaagttgttgctgacttaagccgattgctccggtagcagggtatagtggtcaccctaagtcgagtaagcttgctgatttcaagtccggtcaaattaaagttggctgaaagtcaggagtctgaatgcctttgaaaacgaaaactttattgatgatgaattcccccaattacagagtataatgtttcttcgagaattctagaggcctcactagggatagaacgttctgagatgctctatgttccatgcgtgccccactttcgtgccatccatttgagtaatccgatatgatcctggccgagtgacctttgatacaatgaatggcccttcccatagtggtgacaactagtgccgtcccttcccccgttagaattcggcgaaggaccaagtctcccactgcaaaggaccagtgtcgcacgactttatcatgatagcgcctcaaggtctactggtacctagccgactgaattactgtgttcaatcgttc

SEQ ID NO: 73285 - DNA, 317 bp, Zea Mays
gaaggaggtgtcggagcatgtaatccccactgaggcttcgacgactgaaactgaggaaaaaaatgaatggttgctgttgtgtctgctctgaaaatcaagactgttgcaaatgcagtatattagttataggacaaatatatatgaccgtgttgagaataaataatacactcacgatcattgcatgttgttgcgcccgtgcatggtagggcactaccgtcgtcgaaaatagctgcgaccgctgaaaaaaatgctcattgttcctgttgtgcaatttgtagagcatgcaggcaaccctaaacccctatatcggtccaacc

SEQ ID NO: 73286 - DNA, 505 bp, Zea Mays
cgcgcataatctttttttaactcctctagcgtatatagccacactggtttgctgtaccaaaactaggtattgtttggttcaaacgttgttaagagaatgataatggaatcagtacccattacccatcagtagccacactcggtggtaatggttaatagttattattgaattgaatagtagtacatagtattactagaaagagctcaatcaaacaaaagtgtcagtatccattaccccatgtaatccatttatgttacattttggcaaatcaaacaccaccttaatcatgagcaactactgattattgtgtttatcaccgacagtttacctacgccggccaatcaataaatcaatcagcacaaccgttggtaacacaccacgtgccaggcgcccattggccatgtatatatataccaccactgatgctacagtaccacggatcttgctccagtgctggataaacccaagacgcagaaaaggtgagccgcatgcatcagcatagcac

SEQ ID NO: 73287 - DNA, 465 bp, Zea Mays
ttcattcttctgtgtaagagcaggtcctttggcttcaatagctgaagaggtctcaccaccaaattcgagcactgtggccggttcaatgaagcgcggtcggtgagtaaggaccttcacctttttcctctttggcgtgggctcgcttggagcagatgaagcatcacctttcccagaagttgcactttttctcttttgccctttcgacgggtagcggtagtcaggatacataaatccgatggcgtcaaaaaatctatttagcctcttctttttctggctcccgaaggccgcagataaagcattatcttccgttttggagtacggtccaagcagttcatcacttgtagcttcgatacatttcagccagtcatcatttggctcatcaaatttatctccatatttgaagctgtatttcagtcgaaccagctctccttcgccagttttagtgatagtctccttcggcatttc

SEQ ID NO: 73288 - DNA, 394 bp, Zea Mays
acattggtatccgctactgttgttgataaactaaatgggtggtcaacaaattcatgtgcctttaggttgtccacaacatatcatgtgaaatcggggatatgcactgtagtttacactatttatagagtgaagtttgaaatagaggatgatataggggatgggataggatagctgctagagatagccttatcatgctctcattagactaaccccactcttattcctaccattatacatccaccgacgatcctcacccataaccatccatcttgcataaattgctttggatgattgacgagaattaaacatctacatgcatgtaatgcaaatagttcagagaatgtgttaccttatcaacaataggagtggggaaaaaggcagggacgtagtgaca

SEQ ID NO: 73289 - DNA, 379 bp, Zea Mays
attgttgcattgtggtttggatgaatctgggaatagaaagaagcaacgagttttaaatggtcttaatgataaaattcatcatattgtcattgatatgaaatataactctcttaacgatttatttagtgttgcttgtgaggttgagagtaaaattaaatatgataagagaataacttgcaagaattgaaatggatgcataccttgctaaatttgaacatattgacacatatattgtggaggttccaattgctactaacttcttgcaggatgttgaacacgaagagaagagaaacgacaagtcgaaggagaatgagcataaattaacttcttcaccataattttcaccatgcaatgaaaatgtaaccaaaggtaataccat

SEQ ID NO: 73290 - DNA, 1228 bp, Zea Mays
acgcggtcgtggagctggagatgtcagcggagtgcttgcagaaggccgttccgtctttcgacatctggaccgtgcaatctatgatgtcggcggcatctttgatcgcctgctggtaggcaagatctgtgctgccgggaaacacgccgctcgcgccattgtgggtgatgatcagcggcctggtgtcctctaaatttgtgcaagggaataagcactcagcagcggcgatgatgataatgaacctacaaatggcatcgtgatggtacaaacaattcatagttgagcttacttccaggaggcggtagaggattgcccttggaatgagccaagcaagctggaaaaaaaatcatccacatgttttagaaaaaaaaaaacattcgggttttagctccttccaattccaacattgagcagtccttaccaacagctcctgatgcggtggacgggaagtccgtgagcacaccgtccacagagaagtctggattgtccatgaactgcaagtactcttcactgggatcgtagctgtagttgtagctcaagacgatatcattggcaaatccggatgcatacacctccagcccgagggcatgagcatctttgaccagactggtggatggcgccaggtactgatcctttttcagcggccagatgtatgtcttgggcacaagaatcccagccgcgaatgccttgatggatttcagatctttcaggagttccccatatgtcttcttggtcgaaggctcctcgacgttttcattgaggaaccggaagatgagctttgtcttggctttcttgagcttcccagccaagcttttcaggaattcaacctccggggaggagatgtaagagaggctatcttttggcagttctaatatataatcttcgctacttaatttgtgctccaaaaagaacgaattgtactgcaaaagtgaacacgttggggcaaaagaagaagaagagggaaggctcgtgaactgactggaatcacatttacctgtacattaagccatatttgaggggggtggagttcaacaacatcatcaagcgtgtacatccccaaggagtcatcaaatgtgcttgggcgcgagaagatgttttggatcactgaggggattaccaaccaaagcaaagcaaagcaaagcatgtcatcaagccagtgcaagttctgacaggaaactagtgcttcaaaatggtaggttccatcttaattaatcggactgctcacatgtga

SEQ ID NO: 73291 - DNA, 1009 bp, Zea Mays
agggacgcgcccgcgcgtgcgcccacgttggcggatttgcgtagagagccctgacgttttgaatttttttaaagagtccctcccactattcctctgtctcgctgacacgtgcagaaacacccttgcgcttttctctcttcacaacctccagtccacgatggcgaacggcggggaactgagctccggtgagcttgtaccagcccatttactcgatgactagcattctagtttggcagagaccgaattcaagtcctaatgagagtttcccctcaactaatttcaccaatggtgcactaacacgccctgtccacggtgacagcgggcactacgggcaatcgagcgcgttcccggcgatctaaggggtcctagtccaattggcagggtcggggagcattaggagaacccaaggatgttgaaacaagatagcagggggcatgaacagacctaggattcactgaccacgctgagggctcaacgcacggtgttcttggttgatttgggggaaatcccaaattggagagctctggtggacgatcagaggtgagagctggtttactggatgcacaattacatagcggagcaggtgggggcgacaatttataggttccaacagcggtggcgtccaatttcacgaagacgcgctggcggccggagatgaaaggggttactggcgctcgggattagtggaatttaccttggcaacctcaccggcgatgaccagacgtgctagagcgagtcactacgacgaagtactgcgtctaggcacgtgtcatccgagcggcagacggctaactccggtgaacttatccacagcggccgtggcacgctcgtgtacggtggccggagtagaatagtggccatagtttatctcccgcgtgatatttcttaccgaggagcgcttatctgagttcggtcgggtgtgaatcacgacgctggcgcggatctgagcgcaagatcaccggcggcgaggtctctgagttggcgtcctgatcaatacactgtaccatcg

SEQ ID NO: 73292 - DNA, 534 bp, Zea Mays
ggcagctaaggacttggctggactagaaatatccaggtttagaacattgtctaaaccgtcgaggacagtagctggcaagatgtgatctacagctttattgtcgtttgccaggtgggtgcctaaaaactcagtcggttggatagcaggggccttggctggaacaacattgttcagggccagaacactgtctaaactatttagaatcgaggcgaaaacattattaagatccacagtattagttaccttgcacttggaggcatcaggttccttggaggtttcctggttggcaccgtcaacagaccctggcgaggcacccacaccagcagcaagctccaggtcgcctacctgcggccagacagcagaaacagcagggtctgcaaaagaaacggtgctgccctttctcttgggcacccagcagcgagttggcgtggcacccacaccagcagcaagctcccggacgccaaccagtggccagacagcagaaacaacagggtctgcaaatgaaacggtcttgccctttctcctgggcaccca

SEQ ID NO: 73293 - DNA, 634 bp, Zea Mays
acctggtggggaaagtatgtggccattcagcctgccagacatcaagtcacatgggacgaatttaaattggcactgcatgagcactacattccagaaggagtgctccatatgaagcaagaagaattcatgaaactcaagcaaggaggagatattgttatgcagtatctcaacaaattcaatcatttgtccagtacgcaattgaccaggtcaatactgacctaagaaagaggaattgttttatgagaggcctcaatgaccggctacaacgaaagatggccacctgcctcgatctctcctacaacagggctgtcagcacagcactggcagttgaagctaagtatgcaggtccaggcaaatcaaagggaattggaggtgacaggtccaaccaagggcctgaaaagcgacaaaggttggtaatccgacctttcaatcaaaaccgttcttcacctcgtccaccctcctaccccttcaaacaacctatattcatccgccctaccacttcccccacttcaacaactcagccgagtgcccctggtactcgattccccgccctcccaagctcatcaactggctgcttcaattgtgggaagtctggacatttcatcaaagactgcccatatccgaagcagaacaa

SEQ ID NO: 73294 - DNA, 1483 bp, Zea Mays
ctcatggaatcctcaaaaaactaggaagaagacattaacaagcaaaaccaatatggcaggtggtcgttagcatgccatagagctattgttcccacgtggcgatgagactaccaagttctgctctggggtagcgaagtccccatgggcatttagaggagtggatcctatatacccccaagctagctatggaaggagtggaggaattatcaaactataccaaggtattgccacaccattttaaagctctccacatgcatggagcttgatgatacactgggtaactagcataggtgttttacaaagtgcttaatctacatagaccactgataatcatatttgctttaggcctagagttagtgaggtttgtatactcttgcttataaggtgcttgtgagcactattattgtactcaaaggggcttgttgtattgtgagaccacataaactatgtttttggtgtccgaccaccatttgcaaaagggaacgaggcctaccatggtttttgccagaagctcattaataaagatgatagggagcagtcaagtagagagtgggacatagtccctaagcacctcactaggaagtacgaatactttgtccaattaggattctccatatgtaatcctactaggactcctacattgtaccggactaaaagacttgcctcctagactatataaaggaaggctaaacatcctagatcggcaaccacaacaacccaaaccccaagcgtgaggtgcaatatactatccacccctaatagaatgttgggtactatgctactccggtggcccaaacatgtataaatttgtcttgtgtaacttgaattaactttcaagctctagactgatgatctcctcactaataagctactcaaggtacccccaaagtaaattaatagtcattggacaccaacaaatggcgtactatgtaggtgccatcgttgtgatcatctaacgagcttgatgaacaaattccttttgaaattagtttccttcgtgtgacaagattgattttgttctatgtttacaaatcagcaacttagcatgcatctgcatctaaattgaaagtggattcatgtacaaacttgtttggctcgacatgttattgctcatctattcttgtcaagatggagtttgaagtagagaaaagcaaccaacccctatcggtgattgaggcagaatttacattgattgatgagtacttgaagaattttgttacatatagctaaaatctaaataaaaattgacttactttatcaagtccaaagtagaataagcatgtcgatcttgtcgagttcttacttacaagttgcaccattgatcagtatattatttagctatctacaaccggagacaactccaactcacgccactgatgacattgactactttactatattttctctatagtatcgatgatcttgacaactagactcaactgcaaactactcgagaagggttccacataatctaaaactattc

SEQ ID NO: 73295 - DNA, 995 bp, Zea Mays
acactgtcgtattggatctagccaccggggtacgcgaggtatcttgcagaaatgaaggaaaaagaacgcagggtccaatccaaagtaatcgatgggccctaaagctgcgtggtaatccaaagtgatcggaccacaccttcaacttcaaataaaattaggaatagcgtttaagtcggaggaagaagccgccagcacattatacacacgcacagcttccaagacaaacaccatcgtaatgactaatcagcaattcactggcacttgagacgccaaatccgctcatagaagtacacatatcaagaggtgactacatcatcactctactgcttctcggcatagccctcatagtggagctagtgcatacggcattttatctggcatcggactgggcccaggtagcactagccaccatgtatgtcaagaaacaatggtacgaaatcagtacatccatctttggagcagtcaccactttccttagcagtcaccactacatccatcgttttcgccgttgtcggacgtctcgttcatctttccggtctttgtcctattcttcctccctaacctgcagcccccgaccacgatcgcagccatgagccgacggacgtacgaccgcctactaaatctcttggaggtgcttttcgagcacaaagcaattaataaactaccgtacgtccggccggttaacgagaagcagggaacgcccatgcatcgtgatatatagagactgatgatcataagccactcgatctgtagccatagccgcggaggtacgcaaggtatcttgcagaactgaatgaaggaagaagatgcttacttatgccgccggtttgccatcaattgcttatacgatcaccttcacgtacgttagggagcgtatcagtaagctacgcacaacgatttgtaggtccaatccaaagtaatcgaatgaaccctaattaaagctgcgtgatagtcgccatcctatatatcctaggagcactcatcgatcggacgac

SEQ ID NO: 73296 - DNA, 605 bp, Zea Mays
gctatcctgtacttctctatgttgtctgcacacttgtcatgatgtaagcgtttgtagcaatctttcttctccttgatagccttttggacatcttcgttccaccaccaagtgtctttaacttcccttctgtttccttgactcaacccaaactcttctgaagctatctttcggatgcatgtcgccatcttcctccacatgatatttgtgtctccctcttctgcccaagggccctcctcgataactctctccttgaaagtttgggccacatcccctttaagcttccaccactttgttctagtgaccttgttatgcttaatccgttgtaaacgaatcttaaaacggaagtcagctacgacaagcttatgtttagaaaaaaaaaacataaaacaacaaaaaagacactatcgtgatacagttcccatgtaatatgttgaaatatggttatctagcattgtagtcttatgttgtttgtcacgggcaaggttggttcccaagcaaacacagcctcacctcgctagtctaagcaagcttaccttgccagcacaggcaagacgaatttgctcgcctgcagaagcaagcaaaaagctcgctagctcagatcccaa

SEQ ID NO: 73297 - DNA, 1724 bp, Zea Mays
atttattagtgtataaatgttattatttttagataatatagatgtagttagttaattgttctttaccatctaaaaaatggtttatcctatttatcctatcacatagcaatatggattgttggaaatggaaatcctaaccctacttaggacggacacttgtatatatatagtgaactatacatggggttgggtcaaagaccattacattaataacacatattctacatcctctgcatttgtaattctagccattacaaatgttagattggaatgaaactttgagaatatcatggatggaaggcccttggtgaagatatcaacgaggtggtcgggatgtggaggatgcgaacatcacttatagtgacatgctcgcggacaaagtggaggttgatttctacgtgcttcatgtgctggtgctccatgagattggtgttgagggctatgaatctgtaagaaaagctgatgaagcgagaatgccttgaccacattgttggttacaacgtgatactcggcctcaactccacagcgagagacaagctgtagtttcgaggactaagagactaggttggtgcctaagaacacgacatatccgaaggtggacttgcgcatgtcttagcaactagcctaattagtgtcggtgtaaacgactagctcagaggttggatagggccgaagaagatggtcatgttcgaggatgtcgtagtgttagcgaagaatcctctttgcagcggtgaggtgtgactttcgcggggtatgcatgtaaaggcacgaacataggtgatgtcgggtgggtgaaggtgaggtactggatagccctagcgaggctttggtaggttgtcacgtcgtcggccaggacgccatcgtcgttgaagaccttcgcttgggtgtcatcatgcgtgaagcaaagcttgcaatcggatatgccagcccactctagaatgttgatgatgtactagctttggtgaaggaagaggccctagggcggtgctccacgatgacccctagaaagtggtggttagggcctaagtccttcatcgtgaactcgagctggagggaggcgattgtgagctggaggaggacactatacgtcgtgagcacgatgtaatcgacataggtaggaggtaaatagattgtgcgttggaggagggcgacacttgatgtcgtgagcacgatgttgtcaacgaagagcaggaggtagagtgtatcattgtcgcgtggaaggataagcagagacatgtccgacttgtcttcgacaaaggcaaggaagaccaagtaggaggcaaagcgattgtaccaagcccactacgtttgcttgaggccatacaaggatcggttaagcttgcacaccaaactttggtaagtggagtcgactaacccaacgtggtggctataatacactgtctcggttagggtgatgtgaaggaaggcattcttgacgtctagttggtggactagtctcatgagagcgcagggtagacgatggttcggatggtggcaggctttacgacgacgctgaaggtctcatcgtagtccactccacgacactaaatgaagcctcaaatgacctaacagacatcctggggtaccgtcggccttgagcttgtgtcgaaagatccatttgctagtgaaaattttggtgccatgaggacctggcacaaggtcatacatgtggttggtctgtagggcatctgttgttcacttgttctcgaaggctatggatcaag

SEQ ID NO: 73298 - DNA, 1407 bp, Zea Mays
cgcacgggtacgagtattggagaggggagtttttagtctaacgtggtcgggtctggggttgcaaacccggcgggtcttcaccagttgccatctctacctactaaggtgaacagggaggatgaagccattaccaatgacgatagatggagtagctaaattagaaggatgaaagagggagatgttatcggtggtggtggtggtgtggttggaggtgtcggtgtcgaccacccagtttgtgaccacaataggtgtatttagagccatagtgttaaacaagttagcaagagactattgatctcatctgtcggaccatcgagaccagcttggcgcaatgaacacatgtggtgaggatgtcggagcctgtaggggttcgaagccgaggatgttgggtggtccaagcagtctagacgtcgccatcatggcatggagcacttggcgttgttgctatcattggctgctaggaaccaggtcgggccacatgctgatgccgctcatccatgggttgtagaaggtcagccatggagtgttaccatgacaacaccttctctacttgccagatcctaaggtaggagtaagctgccttctggtcctggaggagcgtgccggagtagaaggagctagggcagtcggtgtggggacgaccgacagagtggcatgaaggctgtcagagcagcagcaaggctaatggtagtcatgtcgagcttctccagaacaagggcgtccttgaggaaggacgggaagggggagtagcgacagatgatggctgcgacgtgctcaaacttctttctcaagcctcgtagaatgttgaggacgaagattgttaacaagggcgttcaagtcagccagggagttcgccatccccttcaacttgcatcagtagtcaccgacgggaagattgccctgcatgaaggtgcaaaaggtagcatcgagctagatggtgcaggtttcacaattatcgagaaacttattcttaagagcgagccatgccattgtgctccctggcgatttagcgcaactcgggggagattgtacagaagattcagcagatgatgtcgttgtccatccaatcccagcattaatcgacgtttgatggagggtcaaacaagatgtggtcgacgagggcataccacttgtgagcaagcagcacttcatcacgccagcaattgtaataataggacatgaggacggccatcaccaatgaccgaatgtcgggaataacgactacctggacgtggcggttggcgatggtggtagcctcgtaagctgcatcgggatcaccttgtgggggcgccttggggtggtgggccagtggtcgtgggttgatgtaggcccaaaccctaacgggcggcggcaaccttctgttcgagggtagcagtggtggcctgctcctgtttgagaagggtggct

SEQ ID NO: 73299 - DNA, 400 bp, Zea Mays
gaagaaattcttagcgaccatggggatttttgtgccttcgcctgtgcccgaggggttgcaacagttttggagaaaactggttgtgaacatgttaaagctgtagcctaggcagaagtcatcttctccatagacgatacgaaggaaccttcagctgaagctaccctgatgggcaggaaactttatttcgatgtttggatgaagggcggtcgtgagatagctgacgaagcaataaagaaaaacaaaaaggaatcccatgatgctcgagtggcgataaaggaagctgacgaagcagctgaacgtgcattgattataggtatccctatctaatgcccttttgctttattattcgtttctagcttcgaacccttattatcatatactttgttgcagccgatctttc

SEQ ID NO: 73300 - DNA, 604 bp, Zea Mays
attctagggacctaaattctatttctcccaactcttctaggacgacgggtttaatatgaaagaacccagggtctttttataaatctaccacaacgaagggttatcaggtgatcctatccgcccgatccactatctacggccccgattagatcttctccccatcgaaccggtatgccatactgaccgcgtgatcacagatcaacggtcccgattttatcttagcccattctattattacccctctgatctgatattgatgactgggatcaacgaaccacacatcttctatccacaggattacttgcatctaatctcagccacacatccacctcactacggcaccggtctcgtccccttcctctagctatcgagcacggcggggcgcccttctgtggcgttgcacgccggccaagaaacgcgtgtccaagcccagtgaccaaaatccatctcccaagtacaccaaaacatagccgaggaaatgtattaacgtgaggtgcacattaccgggcttgaggcgatggaggagacttgtccctaaagtacggtggctctgcggcggactcccctatccggcgagaaatcgctgcccaatcatagctttcta

SEQ ID NO: 73301 - DNA, 1008 bp, Zea Mays
caagtgttgaaccaacatataattatcatgaatggaacaaccccttacaaaggtactttggttagaagccaccaatttatggagataaggggccaagcgattagctatgagtttggagacaaacttggcaaaataatgaatgagaattatgggtccataatccctagctttcatggcctcaaccttcatgggaatgagagttagaaaagctaaattcaaataccccaacttttttgcatttccttaatggagagcgataagtgtagccataaaatcaatcttgatcatgtgccaacacgtcttattgaacctttctgtgaatccatctggccatggcactttatcatgaggaatactagcaaaagtggtccgaatctcctcttttgagatggggaggtccaaagcaccaaggttgacttcaatcctatgacaagtctccagatctaaggtaaactcgtgatgcctagctatatctagcagactagagtaaaaaccatacaagacctcatctttatgtgcatgagaggttaaaacctgatccccatctatcaacttggatatgaagttttcttcttacagtagcatgcatgtagattgaaaaaaatgtattgacatcccttcctttgaaaatgtaacccttgatcagagccttgctatcgtcctttccacgggagcaagggtcaaacaatgttgtttaagtttccttttaaaccaaagctctacatcaaatagaggttttttatcttgtgccatctcaaatctgtgcaagatctctccagccaaacccagctgaaacttaacatttccatccttcttatgtccccaaggctataattcccttgctagccttttcaatttcaagggtgctgtctctaaaggacaggaggcttgcacaggttgcacccaataggtagaaattgtctccaaaaagcctggcaacttggtccaaaagctttcaaaacgaaacttgtgttgtcctttgaagtcttctctaagattcagagtgag

SEQ ID NO: 73302 - DNA, 662 bp, Zea Mays
tgataagccaaactgaagtttagcttgatatccatggactcatgtagtcttttccaaacgcgcgaggtaaattgggttcctcgatctgatacgatcttctttggtactccatgcagacaaacaatccttgacatgtataactctgctaactgggctcctgagtaggttgtcttcataggtataaagtgtgccactttagtcaacctgtccactataacccatattgaatcatagccatcccgagtacagggtagtccaactatgaaatccataccgatttcttcccatttctattccggtaccttgagaggttgtagcaatcgtgctggtctttggtgttcggctttaactctttgacacacatcacatagtgcaacatgagtagccacatctcttttcacaccgtaccaccaatacttttcctttaggtcctagtacatcttagtacttccagggtgaatagagtaagctgaatcgtgagcttctcgtaagataagttggcgtaggtgcttgatttctggtacacatattctctttttaaaccgtactgtgccttgttcatcttctatgaaatctggggttttacccaaactaatttgtgccttaatttccttgattttctcatcagattcctgtcctttacgaatctcttcttataaagt

SEQ ID NO: 73303 - DNA, 594 bp, Zea Mays
cgagcagcagcgcgtagagctcgcagctctgccgtgagtagtgcttgtcgccgaagtcgccaccgccggtacacgtcatgctttgctcgctcactaggttactagaagaagtggaggggtctcgccctttgacacgagagcagtcggtcggtcgatcaacgccctttgcagtcacgaggcttcgcacacgggctcatgaagtaggcgtcgcgactgcatcggggtgcggcagtttacgtcactagtgtcgatgaaggtgcccgagggtgggccggatgatgcagatgcagtccagtgcacagaagggctctatggcccgtgctgcctcctcctccttggaggagctaacatcctcctcctcggcaccatcgtcatcggcgtcatcccaattgcacaaatcatcctcatttagagggatgaaggaccgcagacgagggaggcgagcttgttgactacatcgccctcgttagactcctcatcggcattttgtctaggtgtaatcgaatgtctcaaagtcggtgtacaaaaggatgtcctagaggccttcatccttagggaggcaaggtgatgagggagggggatatggaggatcag

SEQ ID NO: 73304 - DNA, 374 bp, Zea Mays
gcaatgactatgctaagttttataagatttctatgcttgtggtcaactagctaatgtttcctgtgagatgaaggccatcaccaccttgatagagcagtaactactattccgttattttttgtaaaagtccatgttcatgtgatgtacacttaatcattatataataaagcacttattaggttatcattcattaattcgccatttatatgtggattttatcctaggtacacatgatttgtatccaattttggcattaaaattgggtacgacagataattgtcaaagattacacacacaaagagagagagagagggagctatctagactactcgcctagctcacccacacccacaaacatgggccttgcctcttgt

SEQ ID NO: 73305 - DNA, 802 bp, Zea Mays
agcctttctgcttgcagccggtgctgactctgaggcgcacctcacctatctgcctggccttcagacccttttgactaccagcggcaggtatgttgaggagtgggtacgagtcttctacgcctctgtttggattgacccggatcatcactggatgaggtttcgctttgagcgcgaggatgtcactattactgccagtcagatccgccagctttttggatttcccgagtcgtcgactcgtcttcacagcctttgctacggcacttctgaccctcctcgtcgccctcatggcggtgtggctccgggtacagctcacgtcgcggctctgttccgcccgcccttcatagatgggtcatgacgttcaccggcagattttacaacagcagcaaagttcttatatgagctcatcagacggactcttctgccgaggatgggatacagggaggctaccactcatattcagctttggctccttggtgccctggtctcccactctgagtttgacgttgtggacttcctgatttgtgagatcgaggacaccgttttggatgggattcgtgctcgtcggcagttgccctatgctcactacttgtgccacatctttgcgcagctgatttagccccctcgatttcagagcacccttgaggcctcacgcctcgtttttggatcctaccgtcctgcgcctgagattcctgtgccagcctctgctcatgtttttgactctcaggccgaggatgcagctcttcgacagtttgacactcagggtacagcagctgatgatgatgatgatgatgatgattttggg

SEQ ID NO: 73306 - DNA, 910 bp, Zea Mays
caaaggtgaatcatgtgcatgctgaagaagcagaggatgcaccaggagtgattctcggtgagttcctggtccaatcaactctagcctcagtgctttttgattctggagcatcacattccttcatatcctcacactttgtggaaaagcatgatatacctactatagcccttaagaggctgttattgacccgttctcctaggggtcatattccttgtcacataggtgtcatagatatccccataaacctaagtggggtagtattccttgctaacctagtggtcttgcttccaaaggaatagatgtcatacttggtatggattggctcaccaaacaccgaggaaccatagcttgtgccgagaaagtagtgacagtcaccaaccaccaagggataacagtcacctgcctaatccaacctagccttccagactccatggtaaactacatccgagacgaatcttctgaagattgccagtagtccaagagtttgtagatgtattcccagatgaattactcggcatgcctctagaaagagatgtagagttcaccattgacctagttcctggaactaagcccataacaaagaatgcatatcggttagcagccccagagcttgctgagttgaagaagcagcttgaagaacttcagtagaagggattcatcagacctgctgcttcaccctggggagccccaatgctcttcgtgaaaaagaaggatggaagtatgagactttgtgtggactaccgagacctgaatgcagtcaccatcaagaacaagtaccctctaccctggattgatgatctgtttgatcagctgaagggagccaagttcttctccaagattgatctgaggtcaggttatcatcagctcagagtttgtcaagaagacaccccgaagacagcttttagaaccc

SEQ ID NO: 73307 - DNA, 634 bp, Zea Mays
gatgacatatttcccattttacagagtacattgtcgtcccaatagcttttgaaatacagctagggataaaacttcctgaggtgttctatattccatgagttcccgatttccgtgccatccatctgagtgagacgatatgatcccgaccgagtgacttctgctactatgaatggtccttcccataggggtgacaacttgtgtcgtccctcccccgttagaattcggcggaggacgatatctcccactgcaaaggatcgacgtcgtatggccttatcgtggtaacgcctcagagtttgctggtaccgtgctgattgtattaccgtgttcagttgttcttcttcgagtacatcaacatcctctagcctagtagcctcggcttctactatgctttcaaagatcaaccttggcaccccaaacttgaggtcagcatgtagtactgcctctgacccatagaccatgaagaaaggagtatttccgtgcaaagctcgactgggttgagttcttaggctccaaacgacgtagggcaactcccttatccactttcctgcaaacttttcgtttttatcgaagactttcttcctgagtgcctccaatatcatcccgttagctcgttcaacctgcccgttggctcttg

SEQ ID NO: 73308 - DNA, 314 bp, Zea Mays
gtgttgcgggcttcaaacggtgtgcgcgatgggcgcaagatttatacttgttcaggtagaatgtccctacttccagtcatcagtggcttgcgctactggctccattgatgatcaaggctcacactaggggttataagcgggcgagagagggaggagaggctcccaagtctcttatcatggtggaggagtggaggtggagctaaggattacaaagttgagtcctaactaagtcttgggttggtggcggggctttggcctctagatcctcattggtgcgtcctcctcatgttcatcagtctgtcgtcttcgtgtct

SEQ ID NO: 73309 - DNA, 1044 bp, Zea Mays
ctaggctcaaaggtgacattgtagctggacagttatgctgaccacttggctattctagcgaaggcctcgagattgttgaacaaatcaatgagggctcgatctgtatggatccttatcttgtgcacctcgaagtagtgcctaaatttgtgtgatgtcataaggactgcatagatttttttctagttctgtcatgttacactttgaattggtgaggacctcggaaacaaagtagacatggtattgctatagtttgttgtcttcgtgtctttcctacaccagagctgcactgacctccctatatgatgctgcgatgcatagaagttgaggtgaagtggggtatgggttgatcagtgttgtgagctggaacaagtactccttcagccattcaaaggctgcagcctgctctgggccctaagcaaaatccttcactccatgtagtgttttgaggaatgggagacttcgctcaatatatcttgagatgaatctgttcaacgtggcgagccttcctgtcaacttttgcatgtctcgagctgactgcatgggtgtcatgtctagtattgcttttatcttggctgggtttacctctatgcctctatgtgatacaaggtagcccagtattctgccttgctgaacgccaaatatgcattttctaggtttaggcaaagtctagctttgcacatactagcgaatgtttttgtgaggtgggaaaggtggtcctctttgttcttgctcgcgatgactatgtcgtcgacgtaagtgaatacattgaggcccatttggttctctagaatggttttggtaagtcttgaaaatgtggagctgacatttttcaggccttcgggcatgcgcacaaagcaatatgttctgaagggtgtgatgaaacttgtttttgccttgtcttcctccacgtggatttgatggtaacctgagaagcagtcaagcaaagacaccacttcgcatcctgctgctgagtcaacaattttatctatccttggcagagggaagttgtcctttgggcaagctttgttgatactagtgaagtct

SEQ ID NO: 73310 - DNA, 655 bp, Zea Mays
aatctgtttatatagccttgtaagcggagaagatgaaccatcatgacactcacaccaactgattggtggaccgatggagcctgtaccttttattcgattttaataacaaggtcagagaatgtgtttttcggaccttcggcagacagaggcctttgaatatttcgtggatcaagctcgttattaaaaaacgatgtggcaccacgaagggctactgttgggggtgtctttctgccgaaggtcctcaaaataaactaactgttttaattcatttaacaagcgtactgcaggactaaattccaaaggtaaaatatcgaagtgagggacacaagggacgtgacaaaacttcgacaatcattatgatcgtagcttcgactcaagctaattccgaaggtctcgcaacaagccaattcaagaataggacaactttatcctcagtattagcattagagcgaatgtatagatattaagggcacaattgtaatttcgtctgagctgtgtcccaggcctataaatagatgaacaatgtcccatacttctgttcacgggctgaaaaaagggatcgtcaggggcaacataaggagcaatctcttttatacataaccaaaggtattaatgcattgtattgttcaatatataatcctataatacacacaca

SEQ ID NO: 73311 - DNA, 817 bp, Zea Mays
cttggcaccagataggctcgggctcggtcgcgaatgagtttcaccgtacccacttgctcgctgatcagccgggatagacctcgccgccgttggccgcttaccgctgtgcgccacgtgctcaagcgttgtaccacgtcgctgtgaatcgcgtcttgcatgtccggtggtcgtcggggagcttgccacggtgaaagccactaatcccgagcgccagtaaccttcttcctctccggccgtcagcgcatcttcgcgaaattggacgccaccgctatgggagcctataaattgccaaccccgcctgctccgctaagtaattgtgcacccagtagagcaacccgtgcctcgaatcatccactagagctccccaatttgggatttcccccaaaccacccaagaacaccgagcagtgtgacctcgccgtggccagctcgtctcaggtccgctcataccttctgccccttcgtttcagtgttcttgcgtgcccctgatgctccccaaccccgccaatttgactaggaccccttagaatgccgggaacgcgttggattggccgttgatcacacggttaccgtggacagtgcgtgttagagcgccgtttgtgaaattagttggggggaaactcttgttaggatttgaatttggtctcagccagagtagagcaccggtcgttgcgggatccggctggtacaagctcgtcggaactcggttccccgccgctccccgtcgtggacttcgggctgtgaaggattagaaacgtgggggtgttcttgcaaatgtcagtgagacatgagaatagtgccatgacttcttttccagt

SEQ ID NO: 73312 - DNA, 1782 bp, Zea Mays
gtgagggtgtcaggagggtttggggtcgaacgacgtcgcgtgtcgggaaggaggcagcggcaggcggcatcggggcagactggctcgaacgacatcaattttcagtgtgtatttgacagaggacaagttttatagccagaaattctactgttcatgatggagaatctgaacagaagcaaataggcacattgcttagtaggcacatagaatagaacataggctcaaacttgcttgtttgtaagcatacctcaaaaattgttggacgcttgatatatagcttctcctatcatttgttgtgctgaaaaatctggttatactcatcagctttcttagtgccatgaaagaaagcatgtcatgcaacagaaataagttcatagcaacttaggcattttctgaccaagtcaaccccatttccattaacaacaaaggcaacctaaccatttaacactatttcattttcataactatccaacagtaccatgttttccattattctaagtaactcatcacgacaatcatcaatgcgtgtgtggcattcatcgtctgcagaaaacacatgtaccattttctcaatctcaatccagctaagcccaggctccttttcaatcatgagccctctgatctttctcctaatttcagacacactatcccattttcctatagaagcataaaggtttgaaagcagtatatgtgttgagagatcatctggatccagctccagtgcttgttcagcagcatgaacaccaattgacagatttttaaatgtcacactagagcttagtagaattctccatagctcaggatatctcttggcagaaggggatttattaattaactcaactgcttcctccaataaacctgccctactcaacaaactcaccatgctagtgtagtgtttgaaccctggtacaatgccgtcatttatcatgcagaaccaataaagctttcctttctcaaccagtccacaatggctacaagtagaaaggagtgagatgtatgttacatggtcaggttgcagatcactacgaatcatgtcaccaaatagtttgaatgccatttcagaatccccgtggttgccatatcctcctatcatagcattccagcacttcaaatctggcttctgtatggtgcagaaaacagaataggcacgaagaagagtaccatttttcgcgtacatatcaacaaggcttccagagacacaaatatttccttcatagccactttttaccacttgagcatggagcatttccccttgcttaagacctgcaagatctgctgcggagttcaaagcactgctaagagagaaattatcagccttgtgcccaacctccagcatgccaataaaatatttcaatgacaattctccttcacctagtgcagaatggccagctaccatctcagtccacatgataacatctttcaccataacggaatcgaacaaaatgtgagcagactctggatcctcatttgtgaaatacatattgagaagtgtattcgcaacaaagacgctgctctccaacccagccttgatcacacaagcatgaagcggtttgccgctacacattgctggtaaagaagcagctgcagccaccactgccgcaaatgtgtactcatctggagccagccattcagaggacacagccttgagcttcacaaaggcctgcactgcggtccatccgtccgcaacgccagaaaatccagaaattatggtattccatgacaccaagtctggtgtttcgatcctccgaaacacaagtactgcagtgtctagatcaccacagc

SEQ ID NO: 73313 - DNA, 331 bp, Zea Mays
tggagctttgctagaaaagagcaagggtaatggttatagccactaaggttacctccattgtaaggtaaccaagtttcagtggatgccacagcccactgattttatactgagatggtagtgagacaagtaatagacaagtagtagagacttcgtcgttgctgtgcggtttctttggagtctataaaacaaataaacgaccacatgtaacacaaaacaaccgtagttgggttggttaagtgtgggttcctctagcgaatcggtcatggttcgattcccatttttgccgtgcgggagggaggcagtggcagaacggcaggctacccttacagcc

SEQ ID NO: 73314 - DNA, 587 bp, Zea Mays
gcccagtcaggcttgcgcgggctgcgtttcctggacaagacgtctgccggcaaggatggctggaagaccgtcgagaagcggttcgacgagatgagcacggacggccggctgcagagagagaacttcgccaagtgcatcggtgagtcttgctgagccttgtcacggcttgtcgtcacacactgatacatgcctgtaaatttgtagataaaaacttaacctattttgtgctgggttagatacaattatcataatttgaaatattgttcatgcacggaatcattaaactgctcgtttaatttaattcgaagatatatatcctgccaaatttatgagctcctcaaatgttgtcaactagtaattcgtaaggagcaaagcaaaatcgtggcaagatccatataatgttccgtcacaaatacctgatgctcgactatttgcgcgtacgacttaaaggtatggctgattcgaaggagtttgcaagcgaggtattcgtggcattggctaggagaagacacatcaatccggacgacggcgtaacaaaggaacaactgaaggagttttgggaggagatgacagatcagaacttcgat

SEQ ID NO: 73315 - DNA, 1062 bp, Zea Mays
tgaaattgtagttttctcgcatcttttaatgcacaggcttggcttgttagcctctcgatatttccatgaatttcttcaatactatcatatccagtttatgcactgtaaccccaactcaataatacacatttacatatttgttcatctatatatagcataccttggggatgacccttccctcgccctcttctagcatcttttctttctttgcgctcgcctaaaaaaagaacatccttcaatagtacggggtgttgggtttaactgagggagaattgccaatacttagtctgccctttgaagactacacacaaatcttggcatagacattagttctatatcaggaaccatgccctaaagttgcctgagttctttggctagtgtccaacccctcgcctagagaggatgggtgacataacattcgctcactctgagaccactctgagcgtgatgactaggattcaagagttgaaggatcttggtctcaatgttgtacatgtggtggggaattcaattgagtgtcgtgttctctcattttgtcagaaggaaacctacacttgggagcatgttgggatgattgatccgtcctagccctcaaatgaggcaattctgatgccgaaggtgaaggcctagcttcaccaactcttctctttgattagtgattggctaaaatggtgttagattgaggctttctccctgaccgagcctcgttgtgagttaagctatgcaacttggctattttacaaaaaaaagtctgatcttgttgattttgacctaaccattctagacctcaatgttggaattgcactgacttttgcataacatggcttgggtagtgaaggacagcgacaggccagaccgagttatttcccagtgctacttgccaaacaagcacccaaggagtatgtcccctcttggcctctaaacactccctatccactaaagaagcagaggtggaggatggcctgagttagcaacttagatgaagacgaagatgtgtctcctcatccatctcaaagtcccaggcgctccaaatgcccccaatccatcttgcgaatcaagact

SEQ ID NO: 73316 - DNA, 536 bp, Zea Mays
gttgcgtttgcgattgggtagagggggctgtccagaattttaggtggtgggtgaacagcagtagtctagcagtttctgtgtttttttcgtgaggaattaagggaaatcagtttggggatcatgtagaactttaccttacctttccaacgagtatttatgcgcccaatttggagttataaattgaaagttatcaccgtttgaatccgggtatgtggctgtccaaaaaaacagattttcaggggggatgaacagcagcagtattagcagtttctggggattttttcgggagtaattagtgttaatcagtatgagaatcatgtagggctttatgttatctttccaacaagtacttatgcgctcgattcggagttataattcaggagatatcgttgtttgaatccggttatgttgctgtccaaaaaaacagatttttcaggtgggtgaacagcagtggtattagcagtttctggggattttttcgggagtaattagtgttaataagtatgagaatcatatagggctttatgttatctttc

SEQ ID NO: 73317 - DNA, 835 bp, Zea Mays
ccgtaacaaactcctcgccgagtttgcaaccagccagggtggagctggtgcctcaaccatcctcatggacctcgttgggagataaaaactcgggtcacgatcgtctcctctcttccgccatcccattaaacccaagttaacctagccttcgagagccaccacaaccgtcaggaagagagaagggtgctatcacaggagaacttcgacttgtcgtcgaccacgccctcagaattgtacccaggggctcctttaggcctaggggaaggtggtcgtggccatgccactcgagagttgtcatcagtaccgtcgaaattgctcgtcggagcaacatcaccgccgccaacccgctctgcgtcgtggttggctctccaaactccatccccgtctctagtaagcacctagatagcttcgccatgactcgcatttccattgcaccagtttagagtagggcggaccgtggggtggccattttgattgttcgccggaggctcgccgccgtgaggcacacgactgtcatcgctggtgggggtcggagtggtggtgattagtgccgaccgtagattctcagacagatggttctgatgagatctaggaatacccccttcgcgtgattgaatcctatctatctgatccgatcggacgctgggcgatcatgctagcgtggggggtctcatgagccatccatctgtgattgtgtggccgatgtgggataccggttcacaatatctaggacctaatcgtggccgtctgttgatgatccaacgacctagctagccctgtaccctttcggccgagagaatatgttagaaagccccagtccattgacataattaac

SEQ ID NO: 73318 - DNA, 717 bp, Zea Mays
gttggagacgtcctgtatataggagaattgtattttaaaaaattagtaaaatataataaataatacaagttgaaggagaaatataggtgaatgactggagatgaccttaagactggagaaagaaaaatatccggtggcaaactggcaaagaaatgatagagtagagcaatgttcaaaaaagcgtgattaagtgcccgcctaatcacgattagacgctaagcggcatgttagcgctgcgcttaggccctgggcggtggtttccgcagtgggcgcgtgtaggcggcgcgtgatttacgctatgcgcgctgaggcggaaaggaggcgtgtggaagcggggttcggcgcgcgggaaaaagatgagcacggaagctgctgcgcgagaatagaaagtgaataggagggaaagaggcgggagctcttgttgcccgggagagagtgaaacatgttgggagttgtagctgttgttgcatggaagaggaggaaaacagggccgccgccagactggtcctcttccctagccgtccagagccgccaccgtcaatgtcctcttccccttctggtcaagtcgtccaggctgccggggtcagcgcctctctgctccttttccctagctatccaggcatgctctccttctccctcctttgcttttgctctgctcctccatctcttctgttctatacttttattgattattccaggtaagtaccctaattctta

SEQ ID NO: 73319 - DNA, 543 bp, Zea Mays
ttgtccaaggttcgttggacaaggacagatgacttgggaggttccatcacaggtacgtatactttaaattcaccaaaccacccttctccgccccttgcttggacgggctaccctcttgaatcttcggcatctcccactcattcacatggggccataccctgaaagctatgtgttcctggactagatacctagtaccgatgtagctacacacgatgttaaaacgccaccggacaagcttgagctttttcagtcattacaactgttagcgtctttgtaccaaaacgagacataatgggccttgtccaagaagccaaccatttgcttcggtacgccaagaacgggtactgagcatccgaccggtttgtgaagatgtagcaaccaaaatttttatgaagctgttcctttctagttgcttttgtttgatagtggagctcatgaatattgcagaaagaatcagcatttggctccatgccttggctcctcactgcccaaataaaaacccctaacctcatcaagtgtttggggttagcggatgaagataaa

SEQ ID NO: 73320 - DNA, 1645 bp, Zea Mays
agatattaatgtcttcttgatagcttcgggtttacttacctagccacttggggtctttagtatatatgctttgtctccgggaccatactatttacagtacgattttcggatccctcccttttgtccctttgctgcaaatcttgcattgggaacttgggttgaccagcaggcgcttggtcatagggaggtggtcctaggacgaaggaagcagatggtgaccatgcactcattactggattgcttgaggcgtttgaggctgaaggtaaacttagccttggctcctgtaactgaggctggacataatgtgggatataaagtgaatagtacgaagatgcataaacacctcttttgactgggactagctgcgtggttgatgaagcaagttccttctacttgttgatagtatgatgacatgttttgtggtgtggcctttgtcctcgtcacaaaacaagcagaatggtttccttagaggtgcattgaatctaccaccaaaactttggcctccccttccacctcttggagcaggtggacaaaatgtgtcgcgcgaaggttgcttctaagaaattgcttgctgttgggagcttgcatcggattgtgaatgcttcaaacatgcctagggtggaaccttccctcgaagcccatggctgcttcggtatatctgtgtagctcctcccttatctggcagaattcattgtcgacccttatgtattggtccatcttctacaataatctctcaagagagtgtggaggttttcttgcaaagtattgggctactggccctagtctaagccctttgaccatggcctcgatgacaatgtcgtcctagactgctggtgcctgggttaaaagacgaataaatctttggatgaatgaatggaggtactcatctatgtcctaggtacactagaacaaagcatgtgcagtgactagctttgaatggaagctggtgaggaacatctccttcaacttttggcatgaatttacagttcttggtcgaagcgacgagtgccaggtctgagccacattcctaactgccatgacgaaggacttcgccatgactactgaattaccaccatacgaagatatggtaccttcgtaattcataaggaattgctttggatcggttagtccatcatacattggcaatgtaggggtctatatagtggtggcccgggtgtcacctgtagctctggtgttagtggggatgcttcgtcatagaggaaatcttggaagttgactagtgcatgacgaagattctcttggttgaagtccttgtaattttggtccctgtagttgttctggtcctgcgcttcaatgttgtgcatttgtttagttgcttcgtcaatctttttctgaagctcataaagacgaagcaccttctctctgcgcttctccaattgttggtggattccttcaagattgttgatctcttggttaagcgcttggtcttgtggttctaggctgatggagagcttcatcttttggtttcttgcctccctgaggagatcttcgtcccattggttggtgtccaaggtccccaggacggagccagttgttattgccttcttcagtgccatggtgtgagctgtggtcgtgagatcacctaaggtgggcgccaatgttggtacttgattttaattcccct

SEQ ID NO: 73321 - DNA, 426 bp, Zea Mays
ggcttttcaccgaaaccctaaaacttcgcacaccacgtgttcggtgaaatgcccaaaccagccaaaaatgctccaattgaacccaaaattttcaggcatcttcacaatacctccagtaacatattcgccaaatttcacgcccatccgatattccaggctttaatttcaccaaatttcccgtttcgagcgatcgtttccgagccgagtgcccaaatttcattttcttcacctaaattcaaaccaagcacacacttcactcatattcactcatataaacatattcgtgaagtatcggctccattccatgtcatttcgtgcctcaattcgaattccaaacctcctatggcactttttatcgttcaaacgccattttcacgtcgtttgacctctcgatcgccatatctctcgttttctgtgccatatttc

SEQ ID NO: 73322 - DNA, 375 bp, Zea Mays
tataggtatgcttcctcattgaaagatgagattgagaagcaagtggagtctatgctgcagcaaggtataatcagaaccagttcatccccctttagttctcctgttcttttggttcgcaagaaagatggatcttatcgattttgtgtcgattatcgttacttaaatgccttaactgtcaaaagcaaattacctctaccagtttttgatcagttaattgatgaattatctggggctagttggttttctaccttggacctcatttttggttaccatcaagtacgattgaaagctggagaggagtttaaaactgcatttcagacacatgctgggcattttgagtttgttgttacgccctttggtcttttgggagctccg

SEQ ID NO: 73323 - DNA, 452 bp, Zea Mays
tgtccaggccccagcgctggagaggccatgtgtgggcgatcagctttgtaaattgcgaggggctacctgatcgaggagaaaacttctggtaggcttcgcaggaccttgtgacctgatttgcggcgcagatcattgcgggccagtagaaaccttggcggatcacctttgcggctagggcccttggccctgcgtgagagccgcaggtaccactgtggacttcgcgcaggatctggacgccttcggtttcggtgacgcatttaagcattggctgactgacccccttcttgtagagttggccctcaatcagtgcgaagtcccggcttcgatgtttgaggtgcttggcctcgttgatgtcggttgggtggtagtacccctgtaggaacagagttattggtgcccgccagtcttcggtcatgacaaggttgactatgtggtggccctcgctgtcattg

SEQ ID NO: 73324 - DNA, 470 bp, Zea Mays
ggaggatggtggagccactacgtcggagatgggagaggttggccaaggagtggggcatgcgaaaggcggagttggaaggaccggattagaaggtgcggcgcacatcgaccacctcatcctcgtcaccatcgagcctaggctctagactgagcacaagtatgtcaacctcatcgatggcttcttccccatccccttgtccttcccctctgcctacctcatccctttcaccgcatatgggcataccctttcctcttgccaggagccgaatccaccgccccatggaatccacacaggagccgctcaccggagggtgtggcctccagcgtcacccccacggcagctgcaagatgcgaaggtgggccatagaagtcgctatccatgtcgatgttgacctgtcgtcgcgatcgtgtcctaggatgcagaaggtggacattatcgtcgtgttttgctcgagtgcctctaattcctcc

SEQ ID NO: 73325 - DNA, 661 bp, Zea Mays
gccagctggcctctactattcctgaagacagtcaactcttcattggtctgcgtgagctcacctttttagaatgtgactgggagagcttgccccaaaatatggagcgctgcagacgttggaaatttggttctgcaataatattcagcttcttccgacgctgccccaccagtctcttaagaaaatcaatatctgtgggtgggaagtgctcagtcaaataaacttgcagagaagtgggacacacaaattggtctatgatccagcacattcccaagatatcgttcgagtgaggaaatatgaagccactgttctctgtaccagcggcaacgcagctgagatgcatggtaagtctcttttggctgccttcattttttttttaatccatcgagagcatgctgcatccgtaactaattttcagtaaagacacatgacataactgaccattcgatagtacgtttgtgaatcgatccatctgtcaaacagggatcgggagacacgcgtcaataatatagggaatgtgaagccaagaaaggcgtccagatcatcaacaaaactgcaggtcgctaggggtgtgtgtgttttgtcatccctgtctgctgatagattgtgtgtttgtgcttttcttccttcccattccatccttaattaattccttcgaaataag

SEQ ID NO: 73326 - DNA, 314 bp, Zea Mays
cgaaaaggtatccctggatcatgaccgttggatcccttacctacagccaggattagatagggtttccaagggcccatcattgcatttcaaccgctggatcaagtatccacggtccacggttcgcgacaccctattctccccatagccgctggacgaagaaactacggttcggatttaataccgcccacagtcgactctcatccgtcagattccaatcccatagtccccatctgtcttcgcgaaaaggcacgctctggctaatctcgaccatccgtcgagatccaaacggtcccagcttatccccttcaactcac

SEQ ID NO: 73327 - DNA, 501 bp, Zea Mays
tatgaaccacatggacaagaagagaagcggccacgaaaaggagaatcttttcctcttgttaacggtgggggatggcgacggggatggtctgggacttgggcaacccgggcgagccaatcttcaccatgcggcagctgtgcgttatttgtctgattggaaattttcttcagatcgagaattatattgacgtagtggggacgctttaatttctctatagattctgattggaactcgatcgtttgcttgcagcctcatgagttatgttctgattttttagtgcccgctccacgtgacaattattttcttcaaatgtttctgtcattctttgggctgcccaaagctgatcttgacactaggaactaaagctgcacacactgccacacatatgttcaaatatactattaaataaagctgatcctagacatgttctatttatgaggtttcgaaacacaacaccaaaattaataacttctggcggcctcgtaacttccgacagccaca

SEQ ID NO: 73328 - DNA, 539 bp, Zea Mays
cccggttttataatgggcgagctgagcggactcgacggaaatcccacgcgcgaagaacggcggatctgttcgcccaggcctacgatgcggactccgttcgaggaggcgcgcgaggaagacggaggacagggactgccacgtggtggaggaagggacaacgcacgatttatatcctgaacacaggagtccaagcgagatccgcccgcgaggtcaccgacaatggcggacgccattcgtttcgcccatcttgttgtgataacgcggaggagctgacggtgtggggcccgaccagcagtcacccaaaggcggacgccatcacagctttggcgaatatggcccaccagcgagagggagcaacgaagcaacaatacggcgcgcgacgctgagagttggacgccaacaacgggacccacaggaccagtgactccgataaaagaaaaggagaggggagatactgggccgcccgaggaccaaaaccaagagtgggccgacagagcttgatttggcccgtggtagggttttctgtttttcttttcttt

SEQ ID NO: 73329 - DNA, 322 bp, Zea Mays
gttaatgtataataggtaaggtggtactgttgtaaattcgagtctgtatcattaccttttaaagtaatgtaaaatggatggtttgctttggcatactatattttccaaatgttctttgcctcagatgtcgtccaggactcgtggataggatggtgcaggaacctcccgtgggagggagactactcctaacccgccaccagtacccccaaccttggctgaggctatcgctgccttagtcaatgcaacaaccgacaacacccgctttctgcaggaaatcgcgggatagcaaatgcacagcaaggcgagcgagcctatccgcaag

SEQ ID NO: 73330 - DNA, 914 bp, Zea Mays
cccgccaaatcatggccgaattgagcaaacgagtgccacagtaagcttcactagcatgcagagcaacaaaaacaacattcgagatggacagagccttacccgaacgggctggccacggtcgagctgttcacgatggcgtggcgacccaatttgggggaaaagggagattctccggctatggtggctaatcgagggtgggagcgggtgctttggcttcgcaatttagagacgaagagctgtgctcggttgatttgaacggagggggtgaggatgcgatgaatttataggcgcagtgagccacttccatggccatggtgataaccatcgccggccttagctggcgatcaacggcggcgtcgagcgctatcctttcctacgagcttgccatgtcccgccgtgacagtaacgcggtcaaatcagtgagggcatggatgaacggagaggagcggtgccgatgactggatatggccggagtgattactggccgcgtggcggccgaaatcatcacgctccaccgcggcgatcttacccggatcaagaagatcttttgcgaggagatgcacaccgcgcgcccatcccgaccctggcgcaaatcacggagcggatcggtcgtcggtggcgagggtcaagcttatcctcccaggcactgtaccatggcaatgttcttcagtgctcctgacagccaaagtttagggtagattttctctaaagttttcatggcaactcacccaaatctctgcagcaaagttgtagagttacaaaccaactacatttcgactataggaactgaactcagttgagcactagatcatacataatttcaattccaaagctcgaccaataacactggtggtcatttttcagtcagtaacccgactgacagcccaactttgggtttaattatctcccaattc

SEQ ID NO: 73331 - DNA, 484 bp, Zea Mays
caagaaggaagtggaatcaaataatgatgcataggatgcacatgagcttagtggcattggcaacatagcatgctgacttggagcgggatgatggagtggggagtttcctgaactcttaattgaacttgtgtcaatggtgttattgttgatgtgtgaaaccactttgcttgaagtgtgcttggtcaaacttatagtgatgatagctcttgaaacattacattgcccaaactgtagcagaaaagcaagaaaatcattcatccttccactacctctagttgagtgaagccctcagtgaagtgtttttcgagtccaactcacgcttgattccaagctcatcatcaacatcattgccaaaaaccacacattgaagtccttatctctgtcatatcgcccttttcccatgtcatggttgcaccatatctctttactcaccattgttgccgctccacaacaacaactcaacctcaagcatgccttcaccttg

SEQ ID NO: 73332 - DNA, 568 bp, Zea Mays
aaaagcacaacaaaggatgaggttacaaactcgcgagccaaagaagaggatacgaccaagagaaagaaggtatgagacagaagaggggcgattttaaagggtaggtatgagacaaacatcaatgtaggatatagaggtgtcaagggtgcatatgataataattaaaaagcataacaaaggatatagttaagacaagactcgcgaaacgacaaagtggagaaaacaatcaagggtaagatcggtaaggttccaacataagggttgaagtaaagattccttactgagtggagttacaaggaaacaacgagattaccacaggtgtgcaaaataaaatgatcactcatggatcataaagaaacaagggtggtcaagggcatgttaactgaaatatttcaaacagatattgagatataaaggtaagcatatatgaaaataagagtatgcaagattccaatggtacgagcataccaagaccaagaaagtacaaattgccaaaaagatagcgacttaacaatagaataggaaagggtctcaaaagatagtaagatcatggacatataaactgaaa

SEQ ID NO: 73333 - DNA, 843 bp, Zea Mays
gcaacaatatatgtgtcgggggaatgacccccggaccctaggacccaccgatcagtgagcacgctgaggaaagagcccctgatcaccggggcccattagtcagacggaagaggcagatacgtcaaccctgaaaggacctgcccccggtcgagccccatggcaccgtgcctggggtctagcgtggcggaacctaacaagggaggctaggcgtgtcggaagggaaccacttgagtggatcccgcgcccggccttggactcaccagccataaataaatgactacattaaccacacttgccaccgagccacagcgtgggcgccggtctgcttcccacccatgacctacggacccctcgggacgcatagcgctcataatctatgagcccctagactgtggtgcattaatggcccacacacccctcggtcttggcggacttatggcttattggactaggcctgagggtacagccctcccgtagggcactacataacaggccgcaccgagccctagtctacggaagctaaaggacgacatagcccgaatgatggtgccctggaccatcaccacccccacgtcatccaccacgataaatacgtgacagcgaggcatccccgggccccgcgactacgcatgatctcacccaaggtaaaacactggtttttaccccctggcttatggctgcttcccagagaagccaccgctagccgacccctctcccaacatataaatggggcacttggggacaaccaaacgccttcaaacggagacaaacccacaaggatgaacggaaggaggagcgccgacgaggaccaggaggctggagcttcgctaatccaagacttag

SEQ ID NO: 73334 - DNA, 600 bp, Zea Mays
gggacatgccgtaacgatcgcgttcgcgacgccgtacgcccgctgcggccgtgtcagtatttgaaatcttgaaacgcttccgggcggatcgcacggaacgggcgggaccgtaacggtcgccgtttctgtctcctccctcctctcctgttcgttttgtcagccacgggacacgcggcaggaccaggctccgcgcagacaacaagtcaagaatgttctaggccttgtattcttgtgcgcgccatgcaagtacggaatggtacgtgctacggtcgattataatttctcccgttttaaaacgttcgaccgtttaggacaggtgcattgttccaatttggactgatttggtttgtctaaaaacatcgtacgttttgaaagtgccggcaggacgaaactttattctgatcgctgagggagtcggaggacgtagcttcttgttctctctccctgtctctttaccatggagagcatctcgtccactacaaaggcaccaaatcttcgttagatcactggtgtctgtaggtcagcgtgagccactccaagctccaaccccagtgccatatcccatgcaactcgaagccacccatacgacacagcgcttcg

SEQ ID NO: 73335 - DNA, 631 bp, Zea Mays
gatgatttgaggcgaggagtggtgctctgcgcatgtaacaagaaggcagagcggggagggcactcaatttatagaggtcagcttcggttgctctgaatttgggacggggatgaactcatggtgatgtcgttcaatgtggcgttcgtctaacgtggcattcaatgtggtaaagtctcgcggcagtaaatgggctgtccactatgacctatggcgatgtggtaacctggtctatggcgtggcatgaccgagataatcgacggacaccacgacaacggccgcacgaccacgtcgccgacaagtgggtacgacaggcttgcttcaaggcccaagttcacctcctcggcgatcttttcaccctccccgtcgatattttcacgttacagcgcgcacatctcaaccatcgtgcggatcacggcgcatgatcatcggcgtcaaagtgctctaaatccttgatcttttccagttactgtaccatgccacggtcgattcagggtgtctcacaaagcgactttagggccttttttcttcgatttctatgtgatgagccactgatccgactacatcaaaattattctcctataaaccagcttcaactttgtcataagggccttgagcaattactagatcaagg

SEQ ID NO: 73336 - DNA, 598 bp, Zea Mays
ttcaatttttgggcataatgttgcgcttccaacatctcttcttgggatagtaccttccccgaagcatgacaaatgatgtagtctattcttttgttcgacgcttcgggaccaggagcttcgattttttcagttgcaatccgctatgttgatttttccttaggatcaacaagctccatctcggtgggcgctgaaggcccagcttcggtttcagcttgaatttttgtagcttcgatttctgcctgcttagaatcagcttcgggttgcgccttggaagcttcgacaacttttcttgtaggagcaggacttaaggtttttgttgtttctaatacaacatccaacacattcgccatccttctcctcttaggagttgtggcagaaaccttttgtaccttcggcgttgttgcctccgttggagggctcaaaatatctggcattttggttatttctccaatttttggcctttcagccttaccagccttcgtcttaactagcttgactgaaagtaacttcggcattacagccggctcttcagtgctctgcatagacggaacaatttcttttgtctcggcagctgaagaagccccttcgccaaattcag

SEQ ID NO: 73337 - DNA, 507 bp, Zea Mays
ctagtccccagcagttcgatccctattcagcattaagggggtccctaaactaagtgacaagctagttacataactcagatttcatgataacaatagaagcaagaatctcgagtgggggtagaaggaatgtcatgtgtaacttaaagacatggtaaagaaatcgatacataaggattgaactgagagcaaactcttcctttgttaatggatacatgagatctatgctgcaaacactaggaaccaggtttatcagggtggccctcaccaagcctgaccaggtttatgagggcgggcctcaccggactgcactatagatagatgatatcctattacaaagaaagagttcattatcatgctaccttatgggtataaggtacgaggccgacctaaccattcaagcgacgttgagcatcagactcgaaggttaaatagtggcccatactgcctccgtgagggtcgagggcggagcttgatagtgactgacgaaggcgaccccaaacgccatgg

SEQ ID NO: 73338 - DNA, 336 bp, Zea Mays
atgggctcgtggaggaaggttaatgatcaggtgcaaggcatcgctgaaaagggcttaaattcattaatcattcttggattctggacgctttggaatcacaggaatggtggtaccttcgatatgaccactccaagtgtggattttgccatcagaagagctgaggaagaaagagagctatgggagatggcaggagctaatagtctctctcctttcggcccccattcctggactgttggtttagggtggtttggtttcagttatggatacatttatgtgttttcatttttggccaccataaggtggtcttttccctccatgttttggtctatttcggac

SEQ ID NO: 73339 - DNA, 492 bp, Zea Mays
tccgtgggtagtggcagtgagcagtagtgagtgatagagtctatggcaggtagtgtttagtgagatggcatggaccaagaaaatgggcacgtgtagaagaggcagtggtccacttcctccaccacaactcgattagggcaaggttgtggttctagagcaaactcgaggcaagaaacgtcacttggatcatcatggtaaggcagcacttatggtagcagtagcagctgaaagagctgagcagggtggcagtgtaggctccatccagattggagtagacataattcccactcgagtacgtcattagtccacccaagtctgagtgccaccaatagttcttgacccctcgactccacctcctctagccctagttctaccactagcaatgacagagcctacctccaccacaaactctagatcccaccatggcatctctgttacaacaccttgtccagcaacaggcttagttggccatagagcaacagagcatgatcg

SEQ ID NO: 73340 - DNA, 929 bp, Zea Mays
gtcaacacatcaaacttgtagagccactgtaggagtacaactttgcttaagtgattaagcattgttgttatgcaaaaagtggagataattagccctaaagtctagctgtcagaccactctgagactgaacattgattgacagtaagttctaaggaactttgggctcaattcttgtgcaaggagttaagcaaatgggcaagatccctatagcaaaattgtagctggtatatagggctacaagtttgttacagatggattggcatgttcgtgcacaaaaatccaagatctaggcgttgcaattctgtctatcaggcgctctgaatcaagttttcaatggtacagtgttcggatcagatcgccgggttcagttcatctcgccgccggtgatcccgcgccgagatcctcgtcgacgttgcgattcgtgctctgtggggtgcagataactcctaagggtaagaaatatcacatcgtggatgaactcaggccactgttcactgtctggtgcgtaccacgtcagcacgcccgtggatgaactcagaccttatgaatttggcgccagcaactaagtgaacatctctgatctttagaagagggctgatttttgacttagagaaaatttgggttgctctatagtgctctccacttgggggctgaatttgggggttttgtgggacctttttgggataatttccttactctttcttgtagatatataaatgtacttcaactttggtataaggtttaagtcatgaaatggtcatttgcataggtttccactaatcccatgcttgggagcctaatggctcaacggggggtatagggtgttagcatctttttcctaggtgaagatacatgaaaggctagggtattccctctatcatgaccattacttaatagatccatggtttctaaggttttggtgccccttc

SEQ ID NO: 73341 - DNA, 417 bp, Zea Mays
tgtttggttaggattttaatgtgggtgctactgcttactgattttgggtagtattgtaattgcgtttacattaatcgtgtgatccttgccgaactgcggattggtggatggtgataagccttggtagaaactgacaatatatgacaaacgcttgtaagattagtcctattaccctttacccgcaatttatggttgtcttcgatttgtgagtgtctgaatttttcagttgaaatgttaatgttcttggtacaggaattaccattgacagttcgcaattggttttccctaaaaaccacttctgtattttatttagaacacaatgatttcttcattgcaaatttaccatccttttccaaattaacaactgagttatcgcaaaagggcttgtagcctagtagtcacagtacaacagtctca

SEQ ID NO: 73342 - DNA, 1276 bp, Zea Mays
ttaaaagatagggtgtgtttggttgcctggcccaaaataaaccatagaaacaggaagaaaaccaagagcaaggaaaacaaagcagtaagtcaacctcccatgagtggtcatcagtcaaacatatttcatcataggcaaaattcacaaaatgaacaaggaaaacaaagcagcaagtcatactcccttgattgatcatcattataaaacttatcatcacaggcaagtaaaggcaatagttcaatataaaatcatcacagactggtataaaattctcagaattattaattatcaccccagttctagattcaggcaaaagacaagttgtcatcatccacagtatcataggcatatagcaaagtattaggcatagagcaaggtattaggcatcatagacataagactggtctgcacaaatccttgcaaggtgttgccttagccgaagcacacggtatttaggctccatcttcacaaagccatcaccttgccttttgttgtccaatagataggtaaggcaagtcatcaagtcctcattagtgaaacttggaatactcatgcaaatttgatacagatcagggtggacattggtagtctagaccacaataagtgcttggacagcttcagccaatttgttcacagctacagtaagtcctatcataatccccaactcttcatcactgagtctcattttctttccagaggatccagaggaactgggagcaccataaccactatgagaaggactggcaccagcagaaccagaagcagcagtaccaacaagacatggttcttcagatgcacagcatctttagtgatgtccgagatggcgccaaggggctcatttgaggccatggcatacctgccagtagcctgcctagctctaaatataatttgcatctgcacatagttttcttttgacacattgaggaatacagcatcctttgggttgtcttttgtatggcccagcaggtgctcatcatcaaggatggttgtgaatgtattctcatcccaatgagcaccgcttaggtccttgagcctagaaaccctgatccattttttacgccacttcctcaaatgattgtagacctgggtgcttgtaacttcttggccactgaattcagtcagtgccttggcaacaaagttgacatggacctccttgaaccctttatccattttcactccttgcccaaccaagtccgcaaacatcctcaggataaaggctgacatcacaagggtccagcgcacggcagtccttgaggtactactagcagcaacttgc

SEQ ID NO: 73343 - DNA, 825 bp, Zea Mays
gagttccaattgttttctggtggtgtacaaagttaatgtctgtattgatcattgtttctttgcactattaacttctttatgtattgccctttattcagactgttacaggcctgtgtgcagaccttgctcggctttcaggtgcaaatattttggaaggtgtgatcttcatgacattataaatatataaatattttccttttgcattcccgagtgaatagtatggcatgtttgtaactatgaattcatgaccttctaggagatcacaatttaaagcttctgcgccaggactgctacataagtcatcagaagaaggtgccttatgagtttgacaattgcttgtagcaacccatctttttacctgataagtggtcacgtagacactctttatatcttgcagttcatcaaccatcttgtcaatcaacttgctgctcacctatttctaaagatagcctgccagctcgaagaacagataaaaatatcgagtgcctactcatttctgaaagctgtagaattggaattgcagggctacttctcagcttttgatggccgcctggtattgtagccgagttcatccgttaagacagcatattatttagcctcttatcatttccacttgtgttcttacaaattagagtgtctactacatggatatatagggccggtacaatttaattgatcaagcagcatctgaaatgtttgaagagggatcagttgacgacagtgattcttatcttcatgctgtgagggatatccttagcagtcactcgagtaagctggctccacctacaattcctatatccacatgtacttgggatgttcttttga

SEQ ID NO: 73344 - DNA, 440 bp, Zea Mays
gtcatggggtccgttggattcaggatgtagggatgggatttgatctggggaaggaatcactgtgggccgttgatcgactgatgatcggttcagattaaaccaggggataacgtttcggtccaaggaatcctgtacgctagatcgcgatcgtgcggtttacgtcgttcgcgggttcataatgcgcttagtctaatctaagccatcgggcgctgatccaacgactcatatgagcctatagcccttcgtcgaggcaaactttgctaaacagtccccgtgcttttacgaaatagaacccgccgtcctcgctagtaggcaaaacttacaataggatccctggactttttaaatatacccctggaaacctttacagagttaaaataaataattaggaaacctagaaaattgtttatggcataacttactcattttaaatccgtttt

SEQ ID NO: 73345 - DNA, 634 bp, Zea Mays
ttgtatggctcccagactgtttgagaagtggagaagggacgccgccagctgctcttttatcattgtgggaaggttcatggagataccggcggtggaattggcgagcacggtggaggtgggcagcgcggcggtagatgcaagcggcagcgtgcgtgactgggaggtgggcggcagggtgacagattgtgctagtggagaggagctcatggtggtcggaggatcgtaggcctacgatactaaattggtagttttctagtcctaccagggatctgctgaagggagtatgggtgaggggaggacagactacaacctggaggtagtggctacctcttgggcgccgtagtcgcaaaaaacggcacacagggatgtggattccagctcccgtgaggaagctggcagaagatatctgctattgcttgccttctcttgattacaatgtcctaattatataggcatatggccaaccgactacaccacagtactaggagacttattcaagtaaactactccataatattaggagataaacgacaccaaccgactactacacaatactaggagacttatccaactaaactactccataatattaggagataaactgctaagacttatctaattaaactgattactt

SEQ ID NO: 73346 - DNA, 1531 bp, Zea Mays
gaaaataacaaatggaacatgatagaattgtgtgacaccgtacaatagaaaaggaggatgtatatggcaatgcaacttttaaatgaagtgccaattgaactggacgaaagcggaggggccgactgggactgctgtagaggggcatggagaccatgagacgcgacaatggtcaaacctctagaaagagcatcaaaagaaatagcaagccaaaaattgacacatcatacaccaaggtaaatattgtgtccattccaatgccaggcacacaattgtaaagataaagagtaaaggaaccaaatatttagatgattcaaaaatacagcacaaccctgcctcgtagagtgcacacagcatgtctccactcaccacactacatgcgtattccaggcagcacttcaccacactctgtcatcctccttagcagatgtagtatcgctccagcaagcagcaacaacacaacccagtaagactgcaacgcaggcagcataaagctttcagtcggtttgtagttttttgtttacaaaaaatgaagcttagttccatgtccaatccaaatgttgctcctgtagctgtagatggtaaaccaccaattctcatttgcaagaacacccaaaatacgcctttccactgctgtgacagaacatgtgcactgaacaccaacaacatcaagggacaagacaaatatattttaaggaaaatattactgcaaataggaaattaggtaaaaagaaaaaaataaaagggcaagaggcaatcctcaccaagttataaacaagtacatcaggctccaatgaaggatcccaatccttgtgccacatcttcattactcattttgagggcttctgtctcatatcatatactcaataatcttgattaactcctttagaataccagctcagccaagagtaacaacaatacaatggtatgcaaacatgtcatggtatatttgagcatccccctaatgtaaaatatggaacaaaaataaaatgttaagccattagtttttctatattttttgtggaaacaagttgaattgttatttaattgtacagaaaaggtctacctgcatgatggtgaaaaagcaaagtgcttcagtcgcccttaatgatttcccaaggattgagagtaattttgtacacaaatctagatagaacatactttagtggctatgtcattatcctgtatcaatccaaccacaaatgttggagcccaaatatagattaaaccactaagcctagatgttgtgcggagagtaaactatgacatatatgattttctgaaatcatatcatattagagaaaacatacctcagaaatccattgttgcttgcatacagaacatcaactaaagcatattggggtgatgatttgaaaattcaatagatagagatccatggaacatgtagaaaatagagaaaaatataaaggaagcaatcatttagaacccactatgaccatcaattttccaataatgcttaatcaatatgctcaacacaggatgctagcacgcaaattgcaaacatgtaagaaca

SEQ ID NO: 73347 - DNA, 319 bp, Zea Mays
tctctcgtggttttgtggagaacctttgagttcttgtgacatgggtactgttggggattgatttgggtggagatagactctttggatcactgcatattccctcatggtgcagttcttggtcgtgatccgagttgattctcatttgagttcgttttgagaaaaccccatcaaaaccccatccttctcgggatttctaatctgcgacctgatttcttgtttgttcgggttcatacttcaccagagaacctcttacaccacgcgcaaactatctgcaaaattttaggagattctgtgaagttttgactgcgcggcactgccg

SEQ ID NO: 73348 - DNA, 1042 bp, Zea Mays
gcgagtgcacgggggctttgggtatagtagtaggaacaaagagggggaggatgtgttgaactttgcgttggcctacgacttgctgatagcgaatactctctttaggaagagggaatcccatctagtgaccttccatagtagacaatattcgagccaaattgactttatccttgcaaggagggaggatagacgtgcttgcttagattgtaaggtgattcctagggagtgtgttgtccctcaacacaagctggtagtggtggacttttggtttcgggtacgtgtccaccgggacatacgtgccaagatcgcgagaacgaagtggtggaagcttagaggggaagcagcgcaaacgtttaaggagaggatgctaggtgaggggcttgggaagaaggagaagatgcggacgacatgtggctaaagattgcagcatgtgttcggagggtggcttcagaagtgtttggagtgagtaagggggataaacaagaagcaaaggatacctggtggaggaatgacgaggtgcaaagggctattaaggagaagaaggagtgcttcaagcgcctccaccttgacaagagtgcaaccaacgccgagggctataaaatagcgaagagggatgcaaagcgagctgtgagtgtagcaaagggtcaggcgtttgatgacctctatcagcggctaggcacgaggaaaggagagaaggacatttacaggatggctaggatccacgagaggaagacaagggacatcaaccaaatcaaatgcatcaaggatgggacagatcggctcctggtgaaggatgaggagatcaagaacagatggcgggagtacttcgacaagttgtttaatggggagaatgtgggtcctacccttgagttggatgactcatttgatgatagcaatagacgctctgtgaggagatttcaggaagcagagatcgaggaggctttgaaaaggatgaagggaggcaaagcgatgggccccgatggtatccccattgaggtgtggagatgcctaggtgctagagcaattgtatggttaactaagc

SEQ ID NO: 73349 - DNA, 386 bp, Zea Mays
ggtaaaaatttgtagtgttcatgtgatgtctatgttaaaatgcaaattattgggtgaaaagcgcatcgatataaacacatataccaggttcgattattgtggtagatgcgtttgttaaacgtgtacgataattctagagcacgaaatgacttggatgaaatttgtaagtcaacttgttggtcctaatttgatggttttaactataataaatggtaaagtgttagagtaattccagtctatagaacatggcaattcttgaagtaaataggacctgaaatttattagttgctgttttgggctgcacgcactgttttctccatgctgtttgtttaatgaactaaatcatgttttctgtagaaaagctatatagaaaagttgtatataac

SEQ ID NO: 73350 - DNA, 431 bp, Zea Mays
gcatcgtccatctctgtgatgcatgattatcgctacaccacctgcaccaatagcgtatatcagtcaagtgattagagttccattgcacctatagttgccatacctttagtgttagggcctgtagatatagtagcacatgtggctaagaccacaaagacattaccttccttggtggcttcattagacccccccacacacatcccttctcttcctctagttagcctatcaacgtttgaggcataaacaactccttctagacatatgaatacttcatcagatttagatgaggatgctctagtgactcagttcaagttcacacctcaccctctatttattggcacaaatgtatcttctccaccttaggacccttaggtttttgacctattttgttgcttgatgtcaaaggggagagagaagagtgtatatgtgag

SEQ ID NO: 73351 - DNA, 588 bp, Zea Mays
gtttgtaggagattaattttgctgcagaccaattagagagttgccacataaaaatttgtgaaaatcacccctgaaaatgctttatcaggcgctatgaatggagttctgatggtatagtgacctgaagaagaatccaggttcagtgaactcgccaccggtcaccccatgcccggattcgcgccggtcggtgcgattcatgctcgacgcaatgtggataaccaaggggagtaaaagatcttggcgcccggataggttcggactaggtcactggatggttcaccgtacccacttgttctgcggccgaccaagatgatcctcgccggcgttggccgcttgccgcccatgcgccacgtgcctatgagcattaccacattgcagtgaactgaaatacggagttcatcctttgccgggagccttgcctcagtaaaagccacgttagcgcttcccggtgattacccctctctccggccgccagcgcgccttctccaaattagactccaccgccgagggattctataaattgatgccccagtgagttccgctaggtaattacgcatccaatgcaccagccctcgcctctgatagtcc

SEQ ID NO: 73352 - DNA, 532 bp, Zea Mays
cggggatgtgcacgtgctcggtgtcttagaaaaactgaagaacgaatgacaacccatgctcacgggcagcgacaccacgcaggcgacaggcgtgcatctactccagcttcctccttaggggaggggatggctaggggagacgacgcgccgaccacgctgcaatcggggtggagggagatgcagcagcattgtggcgcttcagccaccttcggtggtgccaggcaacacgagatgtgggaggagagcgtcgcctctgccatcaccgcgaggaggggatggctcggggaagaggtgggttttaggttaagggtttcatgagagtagaggaatgtggaccggggagcaagcaaatcgacagagggcaatgagccttacatgcttggcatatgtgatggactctgacaggtcgccgcgatggcgagatgacagagtctggcagtcgcggtggcagtgggagttggtccagccagggaacatgcaccgggagggagaaaagggaaggaagacgcaacacaactccctccgttgaatc

SEQ ID NO: 73353 - DNA, 747 bp, Zea Mays
ggtggtgaagggtagagcatggcccgtgcaagcggaggccggccgcgacatcgctcaacttggtggtgacttgtcatcatcgcaattccttgccggaatccagaatcggccgaggatccgcaccgcattggaccgacctttttcccatcgccattcgtcggtgagatacccctatctagtctgtcatgttctgttcactctaagacgcggggtcatgcaagatttagagaacggtggcaaggaatggaagaactcacggcgagctggttgccgtgaggcgcacgcgcaccgccgtgttgcggcgccaaggaagaagggggcattgtcgattagagtatgaacggtcgggattaattctgggcatatcccctcgctccatctaacgatagccgtggatccacatgggaaaagttggatacgacccgagatagatgtcgcccacatgtgatcggaaccatccaattggaatcgtgtggctggaattagaacactcatcgatagaatcatgactgtagatcctcaatcgagggcgatcgtcgcgtactgattcgaggagatcagatttagtctgggctatccgattttgatcggacgagtggaatcccctcgtaccccttcggccctagaaacttgctaatgagtccctgtatttgttataaaacaacccgccatccacgctaggtagaaaataattagatttgagtcctaatatttatgatttcacccctgggcttcctggtaactatg

SEQ ID NO: 73354 - DNA, 497 bp, Zea Mays
tgattatcttcgtctctgtcagaaccggggctggggttttctttaatcgttgccgccgtgagtcagtcaccggtaaccaaagccgaatctttgttccattttggctatgaacttttcttttgtctgtgttgtgtttagcaggcactttcgtttgtgttcatgtgcctcaagtaatattgctgtcaacatggtcaagggatccacaggccaccacagcaaccccatcgctccagtccgtaagtgatagtttcagcacctgcatctcttgtgccagcggacagaaacttaggatctatccgttgcttgcagcgtttgaggcgtttcataacggatcatggcatggagccaattctataatgatacgggatggtggtttgcttgtaaaatttgtctcctctggatacgcagtcgcagtccagcatgatattgatgggtcctatctgcgcgttcgttctagaaaggcaacttgctcggattgctcacatgttctcaagcca

SEQ ID NO: 73355 - DNA, 439 bp, Zea Mays
tcaaactaatgtacatgtcagaggtaaagatgtccttcttcttctctcactctgaaggttgtttgaatcatgctttgtctgaagcttgtacacgatagtcgtacgaagaattcttcttcgaacactcgcatgtaatgtttggaacctaccttcgacattaaccctgcagcatacatacaataaaacaaaaggaatagtaatcgggtgagtgttttgagtaccttcggaagaagatccccaacagtagtcctttccggtgctagatcgttttttataacgagtttggtccacgaaaaatacgaaggatttttatgccgaaggtccgaaaaacaccttccctgagcttgttattaaaaaacgggaagaaaatctgagcactatcggtccaccgatcagtcggtctgtgtaacatggtcgttcgtattcaccgtttgctggt

SEQ ID NO: 73356 - DNA, 1666 bp, Zea Mays
gggacgggagcaccgtaggatctcagttgggcagatacaccaccaagaacatcctatgatcacgaaaagataagcaaaaaaggtagtttgccagtaagaacagtaaaaagcaaaagttgactcacctgaagattggagaggaacagaggaagaccgaaagcaggaagagttgatatattacttgatgaagggagatcggcagcaacgatatcaaaggcgcgactcgaaggaacttgggccccatcagcaggtggcaggctcctagcgtgtggttcactagcctctaaagaggccagaccagcgagagacgtagaaagatgtgtcaccacagcctcctcagaccggactggtggcgatccaacgtggacgtccatagaagcagcagagggggagcctgctccaacacccttgggggctgggccctccacagcagccacctctagggctaaagattcctcagccacgtccataggagccgggtgactcggatcagtgttctcgcgaggaagaccgccctctaaggtcgacgaggcacggtaaactacccgggttatctcttgcccgacaaaatcatgcgacagaagaccatcatctaggacctctgaatagatagtgggattgtcagcttcaggaggctctgatagaatgtcttcagggatgacctcttccatcacttggtcaaaatcagatattgacaacccttgaaggctgacaagagctgacaaggcttgcgcgggaatatcgctgcccttgtggtgacaactattcttgcggatcagcggaatttcttcttcttcctcctcttcttcctcatcaagcacaccgccagcagcctgagcatcatcacaacctccagaattgtcctcggggaaggcgctcgccgggccatcgccaaggaataatgtggaagggctagcgtcttgttccaggcatgacaaccaacggattcgcattttcttctttgtctcctcgacaggtgcagatgggtggttcactcggcgtgaatgtttccgacgggcaccctcgggtttctggatttcctcgtcttcgctaaactcttgcccagtcgcaactgccatcggctcagtgcgggcagagtcagatgattctccggccagcatactaagtacaacatccatttaatcatcatcggtactagatggcatctcgaagtgagtttgcttctcagccttgggaagatctcgaaggggagcaatcaaggcctcaatatcctctgggagggccgcactctatggcccgggctaccatattgagcaggaggattggagacaaagtcagagaagggactatgcggaggcagattccatgcagagtaagataagggagcaccagcattcgaaaccctgcccctcagtatcatgtcaagttggcttagcatgtcttcattgggaatttgcctgttagtgactcgggtagaatcgttgatgctagtgtacaaataagtagggtagactctttccttcaaaggttgaatgttcttaaagacaaagtcgacaaccatgtcttcagcagtcaggcctctgtccttcagtgagcaaatttcagcaagcagcaccttagcttcggctgcctctgaataagtagggtactccacccaactgggcgtgcgaacatcgagctgccttcctgatcgagggggaggtat

SEQ ID NO: 73357 - DNA, 353 bp, Zea Mays
gttgctgcagacttatgttggctccgcccccgcccctatacccgctctctccttccgtctcgtcatctcctccagttgtagagtggtgcctcggttcttcctccgcttcgctcaccacatccccagacgacccctctctacccatcgccatgtcgctacgacgcccgtcggaaacccctgcctctcaggagacgagtgagcattgggcccaccgccaccggaccccatcccatcaaccttgatctgtacttcctctgcgaccgcctcgccgacctcttcgcctcctcctcggcgaccaccactatgcatgactcctcgacgaccatatcctcatatttctccggtggctcgtc

SEQ ID NO: 73358 - DNA, 505 bp, Zea Mays
gctagccgcagcacgcggcggaagtctgcgggtctatgacgacggtgagcaattcgttgctcggtgatcccaatcaacgcaccaactgtggcgggaaacgcgtgtcgagtcaaccacggcgaccggtcaccattgccctcaatgcccgcgacgaagggccagagggtggggtggttggcggcgcacgcgaaattgaggaggagagagaagagaggagattcttatagtgcctagggacgaggccgaggtgaggatttcggtcaatggctccgaggttcgcggcaagctccgccacggccgggattccgttgagggcgaatacaccgagcggatgggcagctgacctacgcggctgacaggtgggtccctgatgtcggtgctcctctcttagtggctgctagtggggccagcggatcagtaacaggcagccacgcgcgggcggagtgggtgaagggccgcgcggcgtggtttgctgatgggccaaattcgtagctgccggcccaaa

SEQ ID NO: 73359 - DNA, 593 bp, Zea Mays
gcgatcacagccattggattggatatgggcgcgccagattaaaacactactccagcgaaccggtactcagtgtgaccccttggattcaaatccgacgacctagattttaaacacacagatctcaccgcagccgcaggatatgagatctacgattcattttccctacgcgcgagaggttacggaagatctaatccaagccgtcgctacggagatcaacggcacgagggcaactttccccttcctagcagagccgcgaggtggcgctactctcccgcggcggcgccctcgccggagaagatggactccgagctctagtgcccgaaacccaaatccactaggtgcaacactatcacagggccgaagcgaatgcagtgcagggcgtactcaccagagacggactacggaagagagaacccgcggcgcgcggcggagacacggcggtgttgaggctccggtgagaaattgtctgtctcctgcaggagatccttgccagcggatggttcctacgtgtgtagcgggtgcgtgcggagcagtagcctactcttcgcggccgatagtccgactgaggcccgattcaaccacggcggcgctcc

SEQ ID NO: 73360 - DNA, 981 bp, Zea Mays
aaaaaaaagaaaatttccctgcgcttgggccagcatttgaccactttggcccatttccgattctcaccctgcgcggtccgctgcccagccttccccacggcgctgacgactgggccctctgggcagtctccatcgttgggcggtagttggcttgggccaatgacgtggggacctggttgtcatcactcacctcccgtgttcttcacgaatcttaacaaacctaagccaaccttgcgatttcgccggcagtgtgggggcaagctgtttgagatacttgtgggcacactgcatcagctggtcttatctaccccctggtcctataaagtgctgggtccgtgaccccctccttggatccccgcaagactgggaagtcatcgcttgagagagggagagcagtgcatgaggaggagggtcgccgcaccactacgcctccgttgctgctctgtggctgccgtgtggttgggtagactcgccttgacacaagaacgtgcccgtgcaggattgaggccgtgggtgcaaccggctgccggtaaatttctcaccggaattgcatgacaccaccataccaccacccgtcgcggtcagctcggttgctttcatcattttggggaaagcaacatgacacaacattctccatcattgctggtatgtatagcactatttgaagcgaagctataggcacgtgggcgggggtctggtgaactcctgcaatggcgcgccgtcgtgggccacggaggcggagagctacaccgccgtggccagctacggggtagaagatgaacacgaaccgtctgtttgttgatgagcgccttagattagatgaggggagagcgggttcggccgtcgatcgacgaatgcacggtctggattagatctgcaccgtactggttcaatggttgatcccagctcttggatcgagatcgtgcacaccagaacagatcacgacgttctaaaatcgggggccatcggatcatgatccag

SEQ ID NO: 73361 - DNA, 712 bp, Zea Mays
tggcttgatagggtgaagatagcaaggaaaaggctttgaggaactaagcgaaggtgaatgccaagcgacggcttgtggaccgaggttgcactaagtcgctccgtcacatagcagaaaaatccccaaccttccacacctcgtaagtgtcgtccatgatagagggcgcaatcatcgccacgacgacaacaatgtggttctgaaagagcctacgcgtcctctacgaagtcgagctctgtctcctccactacaacctccctgccctgccctcgaccgcgccccactcgcttgccatcccctgcgcatccgctcggccctgctactgcctttgcacttgtcgtcgttgaggccggtaactatgagtctacgttcgacgttgctgtgatgcatctcctcatgtacttcgtcttctctgggtctcctagctccaccacactgtaatgcgctagcccaagtgctaccgctcgccgctcatgcgttcctgctaggaggcagggatggtggagcagagggagtgaggttcgagtataggtgtgcgcatttgtgccctcagatgcagtgaccgcactgctcgtgttcacgcaacgcagtgtgactgagcctccaagttcattgttttttgcaaagcttttgggtgtgtttggtttggcttttgaatttttacttttgcctctaaaaatacaaaaatcaaaccaaagtgatggatttagaaaac

SEQ ID NO: 73362 - DNA, 724 bp, Zea Mays
ctagctgagcacgcctcgcacctctgcgcctattctcaggcatctgtagaaatgacacacatatatcaaatccgactctacagtctttcaacataagaaaagatgtatagaaaatcctcatagcactgaacaaataaccatcttcactgacagcttctcagataaagaggaaagcggaaatagatggattacccaactaaataattgactttattaataactacatcgagttgcaggggataccacaccttggtgacaatcataacaaagatccaacttcagtacatgtccatcataacaagcatccaacataagctaaacaaactaactctaactaagactcactagactaagacactgaactaagcattattacagactctgactctgtcgatctagggatccaaatctatccgggtcctgcagtctggggtaccatagtcgaagcgaccatggggcggtgaacagtaagggtgctgaatcccgacaggggcgggagaaccaccatccagatagtggcatgttgcgcactcaacacgcaattccgcaacctctgcccgaaccttgcccaacttgtcaagggcatggtccaactctgtgttgagcacgacagccagattgaccatactgttcagtctgggattgccctcaccaactggtgaggcaatcacacctccagcactaccggtcgaacggcgagggtaatacttcaggtcgagaccat

SEQ ID NO: 73363 - DNA, 534 bp, Zea Mays
aaagtgcttaaattagttagaccgttttattagtgtttgctctagatttatgcctactaattagaagtgaggtattaaacactaactactcgaaggaggggcttgtgaacgatggggttgtggctgttgatggtgtgggacaatggcagtgcctagaaaggggctaggcgcgggcgaagggagagggagtgggatggtgtcagctagagagagggagacattaatatcgagattgagaaggtacaaggactcagagttttcactctatttctacttattgaaaaggttaaattggactctcaattgggaggcgtaccgttcaagttaggccctattggttagtttgggtccaacatggcaccttggctgaggccttacccgattaggacccttctttgggcttcattgggcttagcaagggcccatatttaggcctatgacatcactcccccttttcgtataatgtcatctggtctaatggtagacatcaaactagtccgatggtaggcttcaaactatataggcatactcaat

SEQ ID NO: 73364 - DNA, 464 bp, Zea Mays
tggttgcaataaaccagccgggtggactcgctctcctttagccttttgacaaatttgacattgtttgacaaaatcctccacactagtcttcattcctttccaaaaaaacaacttcttcaatcgaatgtaagtcgcgtgcacccctgagtgaccacccatggcactatccaaatcaaaccgcccttcctaatgactcctttagagagagagtagccatgttcatccgggctgtggacacacaaccgagccagaagtgattgtgcagccgagtcagtcacataggaattcgtaacttcctggacccagagaggttgaacttcactgactgctgtcaatgccatcacacaacccacacgctacagagcatcagctactttgttctctttaccctgctagtagatgactttgaactacagccccataagctttgccatggctttacgttgcaactccgagtgaagctc

SEQ ID NO: 73365 - DNA, 469 bp, Zea Mays
atcagaatagtgtgtgaataccaagacatattttcggaagaattatcaggtatgccacctgatcgtgatatagagttttctattgaactattacccggaactgcaccaatttcaaaaagagcttaccgaatggatgtcaaagatttaattgaactgaagaaacaaatagaagaattactagaaaaagcttttattcgccccagttcgtctccatggggagtcccagtactatttgtgaacaagaaagatggttcaaggagaatgtgtgtggactatagaagcttgaacgaagtaacgattaagaacaaatacccgttacctcggattgaagatctgtttgatcagatgagaggaggtaaagtattctcaaaaatagatctaagatcaggctatcatcggttgaagatttggactgaagatatacctaaaacgaccttcactacaagatatggactatatgagttttttg

SEQ ID NO: 73366 - DNA, 280 bp, Zea Mays
tggttgtcgaaccagtttctggaaaaattactggattggtgatggtcctcttgctgtgaaatttcctgttctgtttgatttggctctggataaagatgtcacggttaataaagttttgtcatcagattttgaagcactttctttcagaagaagaatgacgggtagccttcaggtgttatatgatgaattagttgctttatgcactaattacactctgacagatcaagaagataaaatgaattggtgtttgggcaacaaaggtttcactgttaattctttg

SEQ ID NO: 73367 - DNA, 899 bp, Zea Mays
caacaatcgtggacaagaaatttcgcggatttggtaattgaacacaagcggtttgcagaggtgaggtttttaggttgcagctatcctactgacaagatggcttcttcatctaatccgtggcaccgacgtttgaaacgcatgtacgaggatgaacaagtgctacacatgcttcatgcatctaccgttgcagacggggaagaaaagccacatgtgcatagaggatcggttccaggtagacgtattattcatcgggataggtcttcaggttatgctaggcttgtggaagactactttgcagacatccctgtgtacaatgacgacattttcagacgacggtagtatcctggttaccattgtttcattttcgtggcaatatgatatgtaatgaagtgttctttttcagattccggatgacgaaatccatgttcgaacacataacagaagctctacaagtggtgaacccctacttcaggcaatcatacaatgcagcacatcaacccggatttcaccccatacaaaaggtaactgctgccattcgtatgttagcttatggtggaccagcagatagcctcgatgagtacttacggatgggggagagtactatcctagaaactgttgcccagttcacaaggtctatagtacacttatttggaccagaattccttaggaaaccaaacgcacatgacataacatctttgcttgacgttgcccaaaggagggggttttcgggaatgttagggagcatagattccatgcaggcagttgaattgctcgaagtgctggtactacgagccttctttgcacggtccctacccattggtcgcacaaaggtatcagacggtgaaccaaattcgtcttccccctgcttcgcctgggacccggtttcgttgacgttgaca

SEQ ID NO: 73368 - DNA, 550 bp, Zea Mays
ctgctaatattgaaaaaaatatcctcaacattttggtggtgagaatgaagattcattttatatgtgtatagtagaatttagaggaatgggatagggagaaccattgcgctaggtagtagaatggggggagagattgttaacatgtcgataaagtggagtataggggagaaatttaagagaaacgattgtggatagcctcatttttctatgtttgtttggattagctggggctgagacagatgaaataacatgacttattttgattattatgaacaaggtaactaatttagttagttcgggttattttgattttggtctagatgacttattttgattattatgaacaagctaactaatttagttagttcccgttattttgattttggtctagattattttggtttggtttcgagtcttgggtctattgttcttagctacaaaatactaagcgctccaaggctatcgcctgccaaagaaatctctactcctataatgcacattgcctgccaaaggaatctctactcctataatacacgagtttctccattcg

SEQ ID NO: 73369 - DNA, 447 bp, Zea Mays
gagcgcgatgcagcttttgaaatcaaggtgattccggctacgcagcctattcataaggcaccgtatcggatggccccaaaggagcaggttgaattgaagcggcaattagatgatctgctggctaagggtttcattaggcctagcaggtcaccatgggcttccccagtattgtttgttgagaagaaagataaaagaaagaggctatgtgtggattatcgtgctttgaatcaagtgacgatcaagaataaatatccgctaccccgtattgaggttctttttgagcagttgatgggtgcccaggtgttctccaaaattgatttgaactttggttatcatcagttgaggattcatgaggaggatattgagaagacaaccttttgcaccaggtatgggtattacgagttcatagtcatgtcttttggcttaactaatgcccctgctgctttt

SEQ ID NO: 73370 - DNA, 379 bp, Zea Mays
aggagcaccatatggatacctatatgagtatagaggagggtaacaataagaaaaagattgagaaggagtgtcgatggtaggtggtaggagaaggagcatcgatcataggaggttcaatgtaggttgaggagcatcgatgaatagtcgatatagatacagaggaggacatgatatgtaagtataggttatagacttagggaatggagatgggaaggaacatcctcatttcgatgatgaacgtgagaaagaccatcgaagaaaacttgctttatactagtaggggtctcagaacattatggagattgctcgttgagcaagtcgatgaatgtatcaaagttcatattccacattggatccataataaaacataaagtggaag

SEQ ID NO: 73371 - DNA, 470 bp, Zea Mays
cgagacgtgtattggggaggggatctgcggaatctttttagggtgaggagttgaagataatgttgtttaatttttgtgaggcgggccttatcccgtaggctgagccaatgtagcgtgtatgctgccctcactcttgtatcgtggtagtgagcgaagacgctgccctcccccggctcgcgattaagagggagggcagcaaaatgtggtaggtatttatttgtgcaatgtggtcggtggccctctgttgtgtgtatgtaaactatgacattgtttgttgtgaaatgagatggggacttcgcttgccgtggcaatgcgtgggcttttgcttcgatgacttgccgtaaagacttcgtatggcacactcgtaatgtatgttcggctgcacccttaggcggctttggcgcggattcgtcttttagtaaagacttcgtattttgcacttgttgtgcttgtccggctgcccccttagg

SEQ ID NO: 73372 - DNA, 356 bp, Zea Mays
catgtgtcgcaagcaaggggccacctagactttatatcctagagtcaaatttatgcccctataggtcatcctaaacaatcacaatggtcagagcactgagcactaaacatcggtggaaatgagtgagggatacattatgagtggtccctcttaagggatgtcttatagcttggtgatagggacctcagctgattcacaactgtagtgtgggaaatcctagccattggttcaagtatgtattcaagaccgtacctcaagctcccctaaagagaccatagaggggtaggccacctagccacccaatcataccaagtctagactaggtcaagtaaggaagagttatataataagacgcc

SEQ ID NO: 73373 - DNA, 653 bp, Zea Mays
tgagaatggaggtgccacgatcacagaaaaaggtgcagagtcttaccggatgcatggcagccctgagcagatttatatcgaggctaggcgagagaggcataccattctacaaattactcaagaaggtggacaaattccagtggaccacagaggcacaagaggctctagaggcactgaagaagttcctaactacgccaccattgctcaagccaccacggcgagtcaaccggaagaagatctgttgctatatatatcctgcacgactcacgtggtaagcaccacgttagtagtcgagcgggtggaagaaggacacacatacccggtgcagcatccagtctacttcatcagtgaagttctcgggccctcaaaaataaagtatccccaagtccagaaactgttgtacgcggtgcttctaatcgctcgcaagctctgtcactactttgatgaccacaaagtcatagtagttaccgggtttccaattggggatatccttcacaacaaagaagccatcggaagaatagccaagtgggcctgcgagctgggagctcatgacatagagtttcggcctcgcacagcagtaaagactcaaacgctagtggacttcgtatcagagtggactgagcaacaagttcctgacaacccggaggctactg

SEQ ID NO: 73374 - DNA, 316 bp, Zea Mays
cgcaacgtagttggtggccgaggccgagctcgggcgaggcgaagaattcactcgagagccgaacttagcgtcgggtgaggcggagaaattgcccgaaggctggacccggggtcgggcgagacggagaggttgtgcccgcaggctggatcctactttgggcgaggcgaaggaattgcgcctgaaggccagtccgctcgacttgttgtattaggcgtcccatcggagggtgtcaggcaatgtgcacacacaatagggtagacgtaatcatgatgttgcgccagacgtgatcgctatcttgtccgtcactgtgctctgc

SEQ ID NO: 73375 - DNA, 404 bp, Zea Mays
gttttagattccgttctacaaggttcaaagatgatcatcctctagtagccacgacaaattctagagttgtaactagagctgtcgatgatgaagggaaggtgactaattattatggagtcattaatgataaacttgagtacaagttttttggagataaacaactcaaagtggtgttcttcgattgtgattggttttcctccaaatacaatgcgagaaaaccaatatggcatggtggaagtcaaacacaacgatcgattaaaaggccacgacactataatccttgcccaccaatgcgagcagttgtattatatgacatatccatctaagaaaaagggtttggttgattggagggtagtgtacaaagttaatcctcgtgaacgactatatgctcctggtgatgctag

SEQ ID NO: 73376 - DNA, 418 bp, Zea Mays
ctgaatttcagactgacagtgcaactgcagtgactttgggcatgaattcaagcaggattgagcacaaaatcgggagtaaacagccctacaaatcactctgtcaggtgactgaatgggctttcccatggtacagtaacctaaaacggatcagatcaagcgctcagctcatcgccgacgatctccgccatgatttgtgtcgccggtgtctcgattcgtgctcggggtaagtggataacatctcgggtagaaagatcatcaccgccgttgagctggacaccaatctggctagccgtcgtacctcccccttgttcaccgatcgctcgggtagggtctcaccgccgcagatccctcactgccgtccgccgcgtgtccattcactttaccatgtcgtggctaaatgtgctacacacgtccggtg

SEQ ID NO: 73377 - DNA, 2290 bp, Zea Mays
acactgtatctgataacaaaatgtttgagattttttccttctttgaatggactatctttgccatttttcgagtttgtattaaatatttttcctattcatgctctatcagcaattcagcacacgtagtccaatgacagagtgctgaaaagaaaaatctaataacagccttcataaaaatacagttttgtataccatgacgattttactcacttcatagaaatacaattatgtgctatttaggtttctgttcctatattatagtcaacatctcacttgagaatacaatgcaagggtgtatttttgtgctaaacagtacattagctagcgcttctgaatgatccgctgacggcaaaaagggcactagctggtagtagattgtgattttgttcacacgttttattgtgattgtgtaacctatgatgaggactctacaggatgccttgcaaaacagtccgtaaatgagtattagcagtagatgtgaagttagttgattgttgaggtccttaggacacgctacacatttttgtttgaaaatcactagaatacccaatgagatttgttttccctttctaatgatctctagtgtttatcactgctaaagccatgtttagcagatttgcagtaccatctgtgcatgtgacttgcaatcgtcaatgaaaagttggctccagtcctgttacatatgaactggtagtgttaacaggccctagatttaggaagagattccacaaattcttgaacagatcccagatcaaactgatttggtctggatacaaccattattatttaaataatgcccaagttgcacatgagctggttagctaattctttttcggttgttttttcagtgctctcggtgcttgctgtctgggtgacttttggcgcagtgtggacgagaccactcaccagtttgcccttccgatcagcggttagtctgtgcatctatgcatgtcattctccttttaggtgcactacattttcttatggcgaaccaataggaaaaagttacccaacagattgcatcaaaatcacctagccaagcttggagttgtttgacggttgcatcaaaagcacttagccatttctactattgttcaaaagcacttttgtgttgtgtggtattgctgaagtttggattaaggagaatagttcgaccaaaaatctgtctgatatgtatcaatctgaatagtcatagtggtattatttgaatgttcacgtcatgttaattctcttgtttttacaaagttgtcttctaggagatgcgtaaatgtttttctctgcttcattccatgcataccagcctctaaaaaggcactagcctctacttatgtgcagagatatgtcgttgctggttcgctaattcttatggttttttttggcagtgaattgggtgcttgcgtgcttgctgtttgggggaattttatcacagcttggaggagacccctcgccattttgcgtttccaattgtcggttagtttgtgtgcctatgcgcctgccctgttttttatgtgttgtttgttacaaaccaaattttcaccggtgttaagtgacgttcttccatgctatgcgatatatagtgctatgcctgattctccatgcatgtgtgttgcgagatgccacgaaccgaagcgcctgaggcacggtgcaattgcgcagggttagtgctcatagtatcgcttctttgtttatgcgcgcaacggccggtacccatcataattttcgatgcttctcttgcgggccaaaaaacatgcagcctctttagattgcccggtctttgagacagctgatgcccatcgcattatggatggtgaagacgaaatagccccgtctaaccttccgggaccttctaaccagccgatacctacgctacaaggaacacgtgcgtacaactgtgtttatgcagccattactgcaacaaaaaaatggtgttagtgatacttatgtcgtcacaggtcgtagatctataatgtcattcccttcagcgcttgccacatccaataggctacaccgacgcagtagagtacgtcgcatggtaactgaccaaccattgtcaaccacgcttcctttggacaagtcatacgtagatgctctaaaaggtatgtattatgcccaacatttctggtaacattcttcctactttgttgatgtgctaccctttctcttcttcctatgtagatgcctaccctgagaggtcatactacggtggacctgaacacatatgcccatattgccacgctgttttctggttccaagagcgtgtcaaaaacgattccttgtccacccaaaggaa

SEQ ID NO: 73378 - DNA, 814 bp, Zea Mays
agctagagttcaatgcaccttttgcatcttgtttcaaatctagttaagaagtaaggcatcggtaattcattaagcttttcacctctcaacgttaagatgatatgacgacatggaattcctatcgactcaaataacatgcaggagcaatttccaaatgattctgaagcgctccaacgaaccaccctatctttcagagatccatcattaattactaccatcttcatgtcctcaaacacacaaatgtttacaaaagaacagtggtctctagcagcttgaatttctgtttggaactttgtgaacacattgcgcgtgtacagtacactagcttgcctctccataggccatggtgtaattaaaagtggactggtatgtaggctcatgtggtcttcctttaactcttcgtgacgctggcattccaacgccgtgtcaaatctaagccaaaactcgacaaaagataacttgcggtggataaagcgattgaaaaatgaatttgcgctttcagaccttgaggttgttctgaggagtcctgcaagaggtgtattcataaaatatgctggaatccatgactcacgaatttcatacctattagacatccacccgttcctctctagaccgtacttcattatgaaagcattccaccgtgtctcaaattcatctccagtttctgaaccccacacacaagcattcaatgtagtccaaaaattctcctcatttgtttttgcatggccaactttttcaggaactttctccaaaatatgccacatacaaaacctgtgtactgtttcagggaatatagaggcaatagcagctttca

SEQ ID NO: 73379 - DNA, 283 bp, Zea Mays
actgacttgtgggacccgtgctccagtcgctcaacctgggagctcctggttcctcgcccgacgttgcttacatgtggggtcccggccacctgcccctcttcctcctccgttcaccgcagctggtgctgttgggatcgaacgagatctccgctaccagattctacgaaatcctcggcctcctcactcagcgcgcatctggtcctctagttccgacctgtgggccgggcgcgtcagatgcgtctcgtccaccgcatcccaacacattccgccatctgtgcttctg

SEQ ID NO: 73380 - DNA, 502 bp, Zea Mays
tcttcgacaagaatgaaaagttcgtagggaagtggatcagagaattaccttatgtggtttggagcctaagaactcaacccagtcgagctctgcatggaaacacccccttcttcatggtctatggttcagaggcagtgctacctttcaacctcaggtttggggcactaaggttggtcttcgaaaacatagctgaagcggaagcaaccaggctagaagatattgacgtactggaagaagagcggttgaatacagtaattcagtcaactagatactagcagaccctgaggcgctatcatgataagactatacgacatcgatcctttgtagtgggagacgtggtccttcgccgaattctaactggagaaggacgacacaaattatcgccgctatgggaagggccattcatggtgtcggaggtcactcgaccaggatcatatcggcttactcaaatgaatggcacggaagtagggaattcatggaatatagagcacctcaagaagtt

SEQ ID NO: 73381 - DNA, 1122 bp, Zea Mays
ctcccatgcaacatacagcaccagaaattatataatgcacccatcatgaattatgtcagtttctccaacacactgcaggctgcatttttcaatctcttcttatttcttttggattaggttcagaatttcagtattcatgcattcattcatgttccaggcagttttatatcctgaatcctgaaaagaattaaaggcttacttttccttcctcctttttgcagtgtcattacagcttccagtgattatactgttaaggtgctgatcttattgtctcatatttacagtttaactgttcaagttgcaattgttcaacaattcacagacattttcatcaatattcatcaggactttacaaggacaggttatttgaattcacatcctagtttttatttggcctattttttctgcctccaaaatgcctagatcgaaatcctcagctgactaataaataaacaggccctctcatactccagaaattgttgtgaaatagaagatggccagtgactgaacaataagctgaacttctttgtgttgggcgtactcgttgattcgcacattcttctaaatgcctaggagtcatgtaacacgcaatggtttgcacattacaatgtttgatagtgacattgtaagaggaagttgttgaaggatatgaagttgttgatggataggaagttgttgatggagattagtttcctgaacatgagctggcgcatagtttactcatcttgtgtggttgaacaagcaggactcaaactaaaaggaaagcactaaagaagtttagagaaaagagatataagcaacaatactttcccttaagggtgttcgcttgcgctaaatggtagatccaaaaaagaaccatgaagagaagagggtgagagaaagaattgtgggcgggtgcaagtgaaacatacaaaaagcatgctaccagctaagcctcccaactatcatttgtttatctaagaattagcatcgacctctatataccggaagcatgctataaactttatacagtccaaagaataccccaaatacacacgagtctggtattttatttaatgtccttaattatcaaccatttactgattatgtcaaattacaatttagaggactcagaatttagca

SEQ ID NO: 73382 - DNA, 440 bp, Zea Mays
gaaagataaaattttgctttccttagtagacagagtcaaggctagcgaagccaaacttgccacgcagtccgaagctcatagagccgaaattgaaaacttgaagaaaaaacatgccgagaagaatgaagattttgaagtggctaaagcaaaacaggaaataagcgagtggactagcgcaagattgcaaaagaatgtagatgagcttcaggaaccgaaggagagatattacgaaaaatcattggattgttccaagaagctaaaagacagttttgcaaaggtaggtgcttactcatctgagcataattttattacaggcgatcccgaaggaatcattgaatggatcgatgaagaagccgaagcttttgaagagatccttagtgatcgtggtgatttctgcgcctttgccggtgccagaggggttgcagcaattttggaaaaat

SEQ ID NO: 73383 - DNA, 477 bp, Zea Mays
atgactcggttgtcttgcataaagacacaacccagtccagtgccagaggcatcacagtacacatcaaatgacttgctgttgtcgggttgcgctaacactggtgttgtggtcagatgttgcctcaatgcatgaaaggcatcttcgcacttctgaccccaaacaaacttggcttctttcttcaaaacagctcaattatgggcttcgtaatttgagagaaatctggaatgaatcttcggtaataaccagctaatcccagaaaactccgaatctgacggacagtcgttggtggcttccagttcatcacctcttgcaccttatcaggatcaacaactatacctgcctgagagatagtgtgacccaagaattttatctcctttagcaaaaaatcacattttgacaatttggcataaagatggtgctctcacagacgttgaagcactacatgcaaatgccggcatgttcttcttcgttcttcga

SEQ ID NO: 73384 - DNA, 680 bp, Zea Mays
gcgcagagacatcttctgctaccaaaagaaaagaaactacttcaactacacggagtactgaagagccggctataatgccgaaggtgcctacgaccaaggaagtgtaaatgaaggttgataaggttggtgaaccagaaattgaagaaataacaaaaatgccagatattttgagcgctgcaacaagggcgacagtattgaaggtacaaacgggttctatcgtgacgcctaaaaggagaaggatggtaaatgtattagatgtattggaaacaaccgactagataagttccgctcccacagggaaggttgccgaagctggcaaaatgcaacccaaagctgatactaagcaaatagaagttgaagctacaataacccaggctgaaaccgaggcagggcccacagtgcctgctgaaacgaagcctgccacaactaagcagggggtcgaaggaataactccagatgctaatatagcttttgagaaaagtgtggccaaagaagccgaatcccttactcccgaagcgttctccgaaggttttgattatatcgttagacatgcttcgagaaaaagactatccgaagaagaaatttctgaagccaaacattatgcccgggaattgcagtatccgaagggggccctagtgtttaatggtacaaccgaagatgactttttgtactgcctcccg

SEQ ID NO: 73385 - DNA, 423 bp, Zea Mays
ctagggttaggttgcagatgcttgggtcgtggacggtagaaaatttagaggtagagaatgagaatgactgccgttttgttttactgagtgaggaacaagacaagttgggtataaataaatttagcgcgcgaaaacacagcggcggcatggctggcgtgcgcaagggaacacagtgaggggtggcgaaacagaggctggcgcacacaggacttgcggacacgaactatccgatttcacatccgtattagaccaacgtaaattcggatatcagaatccacattcgttttcgctaaacggattcggatactttgactttgacttttatatgaaaaatgaattcagatacggatatttttcatgtgcatcttttactgggtacggatatcgtataatatgaataaccatttccatttttcatccctg

SEQ ID NO: 73386 - DNA, 899 bp, Zea Mays
ctgatcgctaggcctgttattcagttggaaggggcaagtgcgccaaccctagaaggacctgcccccggtcgaaccgcacggcactgagcctagggccgtgcatggcggagcctgataatggaggacggacgtgttgaaagggaaccactcgagtggatcccgccccatccctggactgacctgccataaatgactggctgcattaaccacgcctagcaccaagccacaacatgggcaccggtctgcttcctactcatgacctatggaccacttgggccgcattgctctcatgacctacgagcccccggactgcgacgtactaatggctctcacaccctcggactgcaacgcacttatgtcctatcggactaggcctaagtgacacaacaggctacatcgagccccaggctatggaagccaaaggtcagcatagccggaatgatggcgcctgggaccattgtcgcacctgcatcatccactacgataaatacgtgacagctaggcaaccccgggtcccgtgattatgcatggactcacccgaggtaaaacactggttttgcccttgccttacatctccttcccagggaagccaccactggtcgacctctgtcatggcctataaaagggagagactgacctctaggcaagggattgatagatggaccgatcgaggaacataaggacgaactaagggattactagacgccttcagacggagacgatcccataaggacgaacgggaggaggagtgccgactagtggcgggcctaagatttagaagacgggtattcaaaaaaattaggataaatttttttctagacctaaagcttgtttattagcatatatatagttaattatatgtaatctataattaaacatacacaatatagtcatacccg

SEQ ID NO: 73387 - DNA, 359 bp, Zea Mays
aacggtataaaccatcactattttacttgccttcaccggggaatttagacaagaccctaatacgatctgaagtccagcacctgtttttgacacacaacttagtgcaaaaatccacataaccaacgctcataaacaacgccacacctacgcacaattccaaacccgtcgtgagcgacctctcttcccatcacccaccaaaactgcagcggcgctgcttgacaatttcatatctttaaaattatgacagaagtggtaacaaacaaaaactcccgaaccatctacataaaattccccacaagttttgtattcaaacgataattaaattccaacatctaaatggccccaaacagcccacaaga

SEQ ID NO: 73388 - DNA, 714 bp, Zea Mays
ggcgccgccttgcgagccgacgccatggggttcaccttcctcggcatgccgccgccgtccagcggcaccctcgggatggcgctggtcagtgcttgctttgctcctgctctgcaaggggttcgatccaaacgcaagcgacgtgcacttatttgttcgtttcttggtatcatgcatttgtatgatgaccaatgcagatcctgaacatcctgcaagggtacagctcgctcgagttcttgaaggagctccttggcatccaccgcgtcatcgagtccatcaagcacatgctagccatccggatggacctcggcgaccccgacttcgtggacgtgaccagcgacgtcgccgagatgctgtccacgacattcgccgacaaagtccggcagaggatcgtggacaacacgacgttccctcccggctactacttccccaagtacgtatgcctaatttggcgttgcggattctatcggtcgcagccttgcagccagcgggcatcactcattcctgttctggttattggcggcaatggcatcaggtggagccagctggacgaccacggcaccagccacctgtgcgtggtggacggcgaccggaacgcggtggcgatgacgacgaccgtcaacgcatacttcggcgccaaggtgctgtctccgtcgacgggcatcgtgctgaacgacgagatggacgacttctccgtccccgcgaagcgcacgccgg

SEQ ID NO: 73389 - DNA, 456 bp, Zea Mays
gctcattagaaaaatagacaccgcgaaggggtatcgcgggatcagggccattggatcaattctggatggctccgattagatctaaccctctcctgaaccggtatgcactaatagtcgctggattaagatcgggcggcccagacattatgaacccctatccaccactcgttacgagatcagtggttcacaccacccggatccaatcccctgatcatcaccattgattagtcaatcaactgtcagattgctccctagcgaactgttacgcgcctacctcaacccaccgcttgattaagatccgacgccaaggagagctcccccaaactcccgacgacggaaagcggcagcccacaccgagcacggcggcgccattgccgaccaggcgttccccggtttatgcgcgctaagcatcaatccaaccggctctatacactacgacaatgaagacgaaagcgc

SEQ ID NO: 73390 - DNA, 656 bp, Zea Mays
gaaagatctcgcacaggggatgaagtcgggggcactgttactgcccagtcgtacccacttgcgcagcgacgtggccggatggtcatcaccgtggaggtcgccgttcaccgcgattgcgccacgccgtagtcctttcaccatgtacccgaaaccgtggcaagataagagttaccacccttgagtcatagtgtcgttgaacgccacaatgagctcaccagtgcaacattctgtcaccaccgtgatccaaatctccttcaaattcgggacaaccatggccagcttctataaattgagtgcactgctagctccgctaggttgttacgaagccagagcaccaatcctcgcccccgatcgttcaccgtagcgccctaatttggaatttctcccaaatccattctccgcgctgccgtgagcaccccctccgccgacccactgttctgtccctccacctgtcttcctagctgtcgttcttgagtcgtggtatgttgctaaagcttactgtgcccccaatttgtatgttactgcactgtgtcgtcgagaacacgtcgtgaatgtctcaacctccatgggtgtgcgtggaccgagctctagggcagtgttcaggttaaattagtgactcctagtggatcgctaaggtctgaattagccgtagacca

SEQ ID NO: 73391 - DNA, 564 bp, Zea Mays
gaccccactaccctcctttgagccagtcctccaagtgctccgtatctatggactcgccaccgccaccgggggagcgaggtaatgccgccaccatggtccggcatctctgcctccattcggtgtccatggtggggtctgggagaatcgccggtgcacgtggatggtgatagggcatgtgcttagccgcggtggccttcagagtccagtgaatcgctcgccggagaaccatccccgccgtgttgccgccttctaccgtggacaggtatctccgcggcgtaattggtggtatgagctaccccatcgcattcaccattctctggggatcgtgtagatgcacaccatttagctataggagccctggtgccgcaaaccgatgttcgccggtgggtgcgccaccgccgagctcgccgctgttgctcggctcgatcccggggaagtaggacaggtctcggccgttggatagcctgggtgcggccgtgatctgtgttgtaaataacccttcgaccgagggaaccctagccgtagatcgctgatcggtcggatgcgatcgaatcctgtcgcatt

SEQ ID NO: 73392 - DNA, 815 bp, Zea Mays
ccgccaactgatccatgctctccttcctagactgttacttgggatatcactagatcaatctagcaaaggaggactaggagaaaacaacgttctttacgcccttcggggccttctgctttacctctatgttgtttggcctcaaaaacactgaagcaacttatcaatgggctagccaaatgtgcttagccgaccactagggcaagcaagtggaggcttacgttgacgatgtggtgattaaaaccacaggcctagagaacttcattgacgagctccaacaggtcttcaacagactgaggcgctactactggaaacttaagccaaataagtgtgtgtttggggtaccagctaggaagctactcgagttcatctttagtcactagggaatcgaggccagcccgaagaaaatcgaaggcttcctaaggatggaaccaccacgatcgcaaaagaaggtccaaaagcttactcgctacatggcagtgctgagtcgttttatctcatgactcggcaagagaggtataccattctacaagctacttaggaaggtggatagtttccaatggactcccgatgctcaagaagcattggaggcactcaaaaaactcctaaccaccccactggttctcaaaccacccaaccgacctaccatcgaccgaccaactgaagatttgtcgttgtacatcttgtgcacaactcacgtggtaagcaccacgttagtagtcaagcagatggaagaagggcacacacatccaatccaacaccctgtatacttcatcagcgaagtcctcagaccctccaaggtcagataccctcaagtc

SEQ ID NO: 73393 - DNA, 677 bp, Zea Mays
tagggtgaccactataccctactaatagagcaatcgacttaagtcggcaatgacttaagacgatgcaacatgctcgcgctcactcagcatagggtgaccactataccctactaacaaagcaatcggcttaagtcggcaatgacttaagacggtgcaacatgctcgcgcttactcggcatagggtgaccactataccctactaacagagcaatcggcttaagtcggcaatgacttaagacggtgcaacatgctcgcgcttactcagcttagggtgaccactataccctactaacggagcaatcggcttaagtcggcagtgacttaaaacagtgcaacatgctcacgcttactcgacttagggtgaccactataccctactaacggagcaatcggcttaagtcagcaatgacttaagacggtgcaacatgcttacgcttactcgacttagggtgaccactataccctactaacggagcaatcggcttaagtcggcaataacttaagacggtgcaacatgttcaagcttactcaacttagtgtaacatgctcgcaaggcgatctctatgccttaccagccgatcaactagcgtaaattagaaaaagattccaaaaccagcgcactacacttacttctacaatcattcatgacaactgttgaattctaacgacagaaacaa

SEQ ID NO: 73394 - DNA, 421 bp, Zea Mays
gcttgagggagttaattcaattcttatcaactcaagctatcaatcttcaaatgatctacatattcaagattgatccaaggttacttaaatttattatattcaaaacccatatcatctcggggaagatgttaatgttgtagaaaataaagaatcatcatgtgtggaaaatcaaggcctacaacatggaggaatgtcaaaggatggtaacacttatgcttttaagtgcacacatcttaaattatcatttcttatgtgtcttgtgtagtcacatagaaaaaggaagcacttaagaagtttttaaaattatgtcaccattctttgaagaaattcctctcatatggtaaattgcataatcatcattctcatattatggcaatctacatactttaatttgttgcaaagttcccatggcatgttttta

SEQ ID NO: 73395 - DNA, 616 bp, Zea Mays
taaatggaaaaggaaatccactatgcacttgggtccctggtgtatttttcttgcgttccttacaggtggatccctgggctactatttatctgagtcactgacattgcagaaacccccaggcttgtgaactatctaacccgcgctcctaacctcaccggaatagtaaccacagtggaagaaacgacggtggggcttatcgacggtgatctagctctggtgaagtgtccacggaggtcggggaggtcctagcgaacacgtcgatgggctgatggcggtcgaagatggtcggagtcgctctggccgtgcacgagggcggaagaactcgtcgacgacgaggagtccagcctaaatacggtggtgaaatttaactggttggctcgggaagctttaccaggtgacgcagaggctgtgcacacgaggaatttgaaaatggtgtagtggcttacctggtccacactctccggtgagcggaggaagtccgacgagggtggtctggcatctccggtggggttgtgctcgatctgagggtttgggaagattcacgggtttctggtgaagctaaccgagcagctggcgtgggcgaggggaggctggggtgagctggccacggtggccg

SEQ ID NO: 73396 - DNA, 437 bp, Zea Mays
ccgaagccgagggcggggtcttttcgatggcttgcatcacgtccatcattcgtcgcttcttcggacccccgacattcccctagtagccgaagcactgtcctttccttccaagctttgttcaacacccttctcctttgactgcaataggctagtcagatccaatcccaagggacttagcattgcaaatgggaagggtttagtcattaccttcagtatctctgaaacatctacagagcaggatggagaagggcccgcaatctttcctggttcatcttgtaccttcatctccgcagtagccatcctaacaggtttttgttttttgggagccaaatccttccgttccgctacagttttctgcttcttaacaaccctctgatcttatttaacggatcggatggcttgcctgttcaaaatactcacaactctctttgttttcg

SEQ ID NO: 73397 - DNA, 489 bp, Zea Mays
gtctagcttcaactccatggggtggggagcgagctgagttgcggctccatctctttggctttgatggcttcggtgccgcctccaacggtgaccgctggcccgactgctgatactgaagatgccacccaggaggttgtacaagatgtcgtggagatggcggccgcgcgtttccagcgcgaccctactgatgtcgagtaggtcatacctgtagacataaggctagggcccgcttgaaggcagatgtaataactttgtttttgtaagatacttttgggaactatcaattaaataactcttatctgtatgacgcttgttcttgctgtgtgtggttttatcaactcctttcctgatacctggcccccctgggatgtaggcttgacgtgtcgaggctagataccaatatacctaagaaagagttagtgtcccggcccccagtaggtagcctcgactgggacctggacctgcacacaacttcggctaggaagtgtt

SEQ ID NO: 73398 - DNA, 290 bp, Zea Mays
ttctgaactgcattcccctagcaggattagatcttccttcagtgacatggttatgaaagtagttgttcacattttaccagctcctcaggccgtcagaccagggaatccaaactcttcagttgcacctcctcgccgtagtaggcacattgctgggattggagttgaattccagtctaccttcagtgacgatcagatcaaatttaagaaaaagataatgagagctctgcatgtgattgattaaagcaatgaaatcagtcaggaggccttggatagatatagcaggctttttg

SEQ ID NO: 73399 - DNA, 711 bp, Zea Mays
cttttatttcaggataaatcacgatcacgactggacttgcccaataatgcaattcacgagtgagaaaccttgcaaagcaaattccatgcgaaatcatggatgaaactaacacagcacatgaagccacgcaaacacaaatcagaggaaattgaaattgaatcaccaaactggaacaaatcataataaacaggcgctggctgtcagctgtcagactcagagctttagcacgagagccaccacagctagagcgagtgacactgccaacccaccggggacggcggctgcgttggacagctgggacgacgtcggcgggttgaccttggagcagacctgcctgatctctccattgtggtgcgtgagcgcgcccagcttgctcatggcgacgaaggacgtggcgaagtcggcgaagaactcggtcgccggcgcggtggcgttggcctggctcgcgacgtaggcgctagtggtggtgtcgaggaggagggcggcgtctgtggagagcaggcccttgttgccggcgacgagggtgtagtagtcggcgtcgaaggtggtgggcgtgggagggtcgaggtagacgagggtggcgttgtcgccgggcttgcactggccgcgaagggtggccgtgtagttggcgtccagcgtggggtcggacgcgccgttctgcccgccgaagttgtacagccgcggcgacaccgtggagcaccgcgccttccc

SEQ ID NO: 73400 - DNA, 276 bp, Zea Mays
gaggggagagaaaagggactaccgccgtgggctgatttcccatccacgctagcgccagggcttcaattgtggtcgggtagcctcgctagagcgcatggaagacacgacgaccatcaattcgagaaatacggtgtcaatgctggggcgattcctcgtcagacttgaaaatccaccgcctggccgcttccctccgacgactgcgtaccctggcacgccaaacctaggtaagaagcatactattgtgcccgccttcgtcttccccgcgcgtagctcaac

SEQ ID NO: 73401 - DNA, 514 bp, Zea Mays
gggcagtagcgtccgtctcatgacctgatagagatactttactgctggagtgaaatatgctggagagcgtcgcgacccatcagtgaaaggcggtcggaatagggctgtgacgtgagctgttgctggagcgactctgccatgagggcgtcgaggaggataagaagtaccatagcacaggctgtgaaggcgtgtcgacgactcgggaaatgcaaacagctggcatatctggctggcatgaatagtgacatcctctcgctcaaaatgaaacctcatccactggtggtcgggatctatccacactgaagcataaaacactcggacccactgctcaacatatctgccactggtagtcagtagagtgagaagtccagacagataggagaggtgcacctcggaatccgcacaagatgctagcagaaaagcagggatatccaatagccggtgcgctcgcagagcgatctgtactaacaactgagctcgaaagaacgattcctgaattctggtgctaaacaaa

SEQ ID NO: 73402 - DNA, 620 bp, Zea Mays
gaagatgctgaagatcggccatggagaccaagtcatgttgtcttcagaaaatcaactattaaacaagggcagatcgatgcaatgacgaggaggtattttcgtgatatctcaatcgtaagggccagaggagaaaacaatgttcctcttctcgaagctgacgaagtggtagtttacagaagcttcatgaaagcgggacttctgttccctctagataaattgctggtcaaagttctaaaaaccttcgaaatttaccttcatcaacttactcccgaagctatcatcgaagtggggatctttatatgggccatgaggagccaaggactagaaccagatgcaagatgcttttgtaacattcattagttgtcttatgagacgaaggctaccggaaaggagcaataccacaacaactttggttgttacggtttagtgcctcggtcttaagcgagctaaccagttcccacattttggaagaggtggccaggctcctggatgcaggaatggttttacgtgaagaatgacctaaatcaaagggaggatgtgagagggattatgcaacgtcctatatggtctcgctttggcaatagaaggccagccactgcccttgggaatgatttacaagt

SEQ ID NO: 73403 - DNA, 307 bp, Zea Mays
cgcctatctagtcatgtgtgtgtgaatcctgtgatggctgatgatgggattgaggtggggttggctgcctacgcctggctcctaggccctgggagcgtgaggagctagcggtccattggcccaaggctgcaagcctgcatggacagcccacgggtggggtggatgaaggtgcacacatggtgacttgggctaaaatgggattctaagttgatgggctaacaattcggttttctggtttaaacagaactaaaaatcgaaaaccaaactaattttcggtttctgaaaaatggtaaccaaagaatacttt

SEQ ID NO: 73404 - DNA, 775 bp, Zea Mays
caagatcggcatccacctcgtgctgatgctcgcgggcagataaaagactccgctgaaagcgcgccaccgacgtaacaaccctcccgaccactgtgcacctctcggggtataaagatgaggtcgtgcaccccccatcatccatggagcgcagaggatatcagagcgagaagagaagagaagctccaccgcccggaagagaagatggtcaccgcctgggaactgcacctgtgacgctgtgtccgggattgggccagcaatcttcgcaggggcacctggatggtatggacacacacattagacgagattagtgatgttgtcatcgggtagtgctcaacggacttgttcacctccaccgtgccaccatcctctgtggtctgcaagcgttggcatcccaattcttgataaggtaccccccatggagattgtcttactccctaattcatgtagagcacttcggacgagagtttggcgctcggttgtgcgggtagattaacctcggcaatggtgtgccgccgtcgtgccctgttcccggccgcgagttcgaccggaggtagaagacgccctctgcgccgtttatctcgtggtggatggctgtaactggatccatggttgggacatcctcagccgttgatgtgtggatgggcgaaccggatcagagctcgcataccgcttcggcgggatttaatctggggcgttggcgctcgatcggacgaccgggatttctcaataccccttcggcctggccatctttcaaaagaacccctgccgatttaga

SEQ ID NO: 73405 - DNA, 425 bp, Zea Mays
ggacgaataaagacggactgcttgaatggatatgaaggtgggcaaggcgaagaacgattttgattaaaaggtcgaatcaccaacctggttctctttttaggcccttgatttgacctttcacctccatacccctttgattttccatgtcccacattcttggcttccactgccagtgctgtactaacaactctgctataggtaaggtccagacatgttgccattttccgctgaagcctgtcattgagccccctcataaaacaattctttttcttcaagtcagtatccacctggtcaatggtatgctaagagaggtggttgaatttgttgagatactgcatcaccgtatctcctccttgcttcaatcggataaactcttctagtttcatctgaagcactccctccggaacataatgctcccggaatgc

SEQ ID NO: 73406 - DNA, 363 bp, Zea Mays
cacgaatgcaattatgagcaggcgtgcaattcagaggctggcggtacgcaatggactccaatgccaccattgttgtccgttggaggctggagcggctgaatgctgaggatgaagatgaactgtgtcctccgctccgcctagccattccaccgttgagtcccgatccctctgttcggtcgattccgtgaccgatgctgaggattcgaaactgcagacctgtttgaaacagcttcactaataaaatatcaacctgcatctagtagatcgattgacagtagaacaactttatcggcgatctaaaatccactataaaaaccacttgactaaaccgtatgtcaaaatctagaggaggataattttgat

SEQ ID NO: 73407 - DNA, 352 bp, Zea Mays
tcatttgattacaccaataggcgctttgtacggaggattcaagcagaggttagagaatctttaaaaaggacgaaagggggtgaagcgatgggccctgatggtgttccaatcaaggtgtggagaagtcttggcgatatagctatagtatgtctaaccaagatgttcaatgatatctatgatcgaacaacatgcttgagtagtggagaagaagcatattagtaccaatcacaagaacaagatacatccaaagttgtactaaatactaataatcagagaataaagttgatgagccaaactatgaagctatgagagagagtcatcgagcattgtctgcaaggtacaacgtggatac

SEQ ID NO: 73408 - DNA, 842 bp, Zea Mays
ggcgagctagaccggccgtatgacgctacggcaggagctccaaagctacagggaccaaatcagatgcctaccgcacctttccccccaatcaatttcgctagaggtggtctatcaagctctgtccacggtgacagtgcgggtgatcaagtgaactaaggtgttccggataaccgaaggcttggctggctaaattgaagctagggaaaggtttctgggttcaccagagatgacgcacacgctaagttttgggctaggcacgagcagaaaggtggggcgacggaaaggttgtcatggcggcgttttacagcgcacgggtgtgttccggtgatgggcttcggccaaacttcaatttgccgcatccaagagcaataagagatcaaatactaactgaaacagggagcaatttgataattactgacccgaggagcgctggccacgaaggagttcttcacgacggagcaagaacagaggagagagggatttgtgggttctttggtgaaattgagccgagtgctcgatcgcgaaggtgcaggatgtgataaagaagtggaacctgggcgcaatttataggccaacgaccggaattggatgaggaccgcggactttagattgcgcaggcgagctcaccgcgcggcagtacccagtgatggcacggtggccgccgtttaaccggagcctgccaccttagtgatttgctgccacgttgccgaggatatttaccgcggccgccagcccatcccgaccgccgtggcgttcttatcgccggcgagggctgacccttatccacggcgcgatttttctgaagactgatgaacagtgcgcctgactcagtgaagagctta

SEQ ID NO: 73409 - DNA, 565 bp, Zea Mays
gcgggttaaatctctaaaaactgaggggcgcataaataaaacgacccagcgaaggggtatcgcacgccctgggccattggatcccccacgaacgacccggattagattaattcctggtggagccagcgttcaatccacgccgatgagtccaagatcggcggtcccgatttaatgacccgaaggggtacgcccaagatcgatctaggccattccctacacgatcgacggttgagatccaactcccactagatctaatcctagccctccaacggtccgcgcgttttcttcctccaacgccgcctaccagacggacgacggcgtgtatggaagcggcggtgccatggccgaagccttcctccctccattctaagccttagaatccaattcggctggtgaaacgtgactagacaattacatagaatgagggcgggggtcgattaccagtgatcacgtcatgaagcgctctggccacggttgagtccgaaccacggcggaaacgaagctccaacgacgaattcaggccaccaccgcggtcgtttcctcctcagatggccgcgaaatcttc

SEQ ID NO: 73410 - DNA, 670 bp, Zea Mays
gagccccacctcgccattgccaagctgattcttcgctacttccgtggcactctcgactacgaccttcttcgggcctctctgactctgagctagtcgtctataccgatgctgattgagtcggctgccccgacacgcatcggtccacctttggttacgctgtgtttctgggagccaaccccatatcctggtcctcaaagcggtagcttgtcatctctcactccagcactgagaccgagtatcgcgttgtggccaacggtgtggccgaggcgtctcgtcagctgctctaggagctccatagcaccctagcacgccacactcgtctattgtgacatggtcaacacggtctacctctccaccacttccatacaacaccagcgcacgaagcacgtagagatcaacatccacttcatccgcgagtgtgtcaccgtcggcgatgtacatgtcctccataccaatcacttcacagcttgacgacatcttgaccaaggggctctcctctatgacgtcctcagaatttcagtcctgtttcaacatctataatgcctaaagttatgacatttgtaatgactagagttgcaactacggaagtattcgacatgtgtgttatataatgggtttaggcccaacccatatactatctcatctattaatatagcagcccaggtttgca

SEQ ID NO: 73411 - DNA, 823 bp, Zea Mays
cggattttttgataatatggtcgtatttattatgaaatagatggaagtagtttcatcgccatgagaccatatcaagtcattttcaaggcattggaaacatcattaagagcaatttattttatcttcattcatttcaaacatttctattagtcgtttagatgtaaaatttaattgacacggtagtctatgaaatcctgaagtaaaactttatactgaaagtgtgtatttccttctttatttcatcccctcttgatgatgtggcaacattaaaataatgaaatgaaactcttgttgaagtcacctttactatcttttatgggagagaagtttgacaagctcgacacatgcagtatgcgaacactagttccttcgttaatcccctcattataatggcaaaatattaaatttctcatacttcagtaaacatatataggtctagactagagagagagggcaaagcatgccgctgcagttgcttcgtatgtggatcatattacaaagccggttcaaaacggcagcgctggtggtgtccacgtcagcgcgaattctcatgctccctcgatcttcaatcaacggctcacgttcgtcgactggaaacgtctcgcctccttctctccttttcggctctcgaagtctccatgcttctgatcgacgctttctccctcctcgcctgtcctctgctcggtagcgtttcttcttcctcctcgctctctctgtctcttccctattcaaaatctggctggcagcggagatagacgtctacaaataagacgcaccaagatctttcaaggttgccccctccctagcttccctaatgtggttc

SEQ ID NO: 73412 - DNA, 665 bp, Zea Mays
cgggaagcaacatgctcagcacggcagtcggcatcgccttttgctccatgccccgacgcccaacctcacagtccccactccactctctagaaccctcctcccgactactggtctcttctccacctccatccccaaatctgaaaatctctctctatgtgtgtgtctctctctctctctcaccggctcgtcgttgacgccgacaggtaagcaccgcttggacatctatactcgacgacggttggtaagattcgacaatgctctaaccctaaccctaatcacctcgacgacgctctggtaagtctcatttctccaactgaggtactcgtcgttcgtcggcaagagaacgactactggctttaggttttcataaccctaatcctccctgaatcacggtttccctaaccctaaatctctaatcctccctgattcttggctcccctcctcgactgctacctcctacgctctggtgttcctcatcctcatcgtcatcggggacatcgatgctccggatgcgtgtggtagatccctagatatttgttctggtgttgtttctttagatcttcacttctggattctagtgaatctagtagtgatgtttgtgtttgatgttagtatggagttataagtctaaatcccagtgtcgcaaccatcgaggagtcggtgtt

SEQ ID NO: 73413 - DNA, 684 bp, Zea Mays
tcaaacaacagagttctgatttttcttagcttttattttgcgcaagagcaatcattctgaagtttggcatctttttgcttaagggaaggggtggtatgcatcaagtggattaaatggcttttcttataaagtttggagaataggtattattttacatcgcttatctcattatggacttagcagatttttggctgcccattattgcatcattatgggttattcatgatttatttggaaaatgcctcattatcatcttatatttattttccttactaaaaatgttgggctgaggtgttcattatttttgcagtggggttctggtggttataagtccactgaatttttattatcaattttgggtctagttttgtaattctaataattgatttccagttcaaataatgctaaataaaacattttattttaaaactgatctggactaaaggtctctttatttttcctaggttctttgttacttaagcaaactaggaaaaataattccacttactgttcattaatttctaatgcctttctgatttttcctaagttttgggtaaaatagctttaaatgaatatctacactatattcttcaatactggggttcctactatttttaaacagttcttaagtgaggtttgaacatctacaaattttcttaggttcagcacagaagcaaaactaat

SEQ ID NO: 73414 - DNA, 422 bp, Zea Mays
ggcacatacaaggatattgagccccgacatgtgggctcaggggcaaaatggaaggaagtaactaatgcctgtaacgcatgggcgatctccgagcgccataatgtttgtagtccatacagtattgatatgtcgcggctgcttcctcggtaacgcgcgagtcatgatggacgtagtacacacggcagcatgggcatgctgcctgccaggggaatggacagacacgccgcctgcggaatggactggtcgccgcctacccgcggaatggacagatctcattaaatgcggaggcgacacatcgcctgtcagtggaatggacagggctcaataaataccgaggcggcacatcgcctgccagtggaatggacagacggtgcgccctgtccgcaataaatgcagaggccgcgtagcctagaggccttacg

SEQ ID NO: 73415 - DNA, 488 bp, Zea Mays
ttccgtgatatctctattgtgagagctggaggggaatgtaatgtccctctgcccaaagttgatgaggtggtagtttatagaagcttcatgaaggcagggcttcggttccctttggataaattgctagtcgaagttttaaagactttcgaaatttaccttcattagcttacccccgaagctattatcaagatggggatctttatttgggccatgaggagccaggggctagaaccgaatgcaaaatgcttctgcaatatgcacgagttgtcctatgaggcgaaggctatcggaaagaagcaatatcataacaacttcgattgctacagcttcgtgcctcgctttgaggtgagctacctagttccaacatttcggaagagatggcctggagcctggatgcaggagtggttcgatgtgaagaacgacctggctgaaagggaagatattaaggggattattcaacgccctatctagtctcgtttcaacatcag

SEQ ID NO: 73416 - DNA, 808 bp, Zea Mays
tttaaagactggtataagataaacatcaaggtaagatatagatgtgataaggataaaggtgataatgatgaaaagcataaccatggacagagttaaggcaagactgacgaagtggagaaaacaagcaagggtaagataggtaagattccaacaaaatggttgaagtaatcaaaattattaccgagggaagttataaagaaatgatgatatcaccaaggatgtgcgaaatagaatggacgctcatggatcaccaagaaataagggtggtcaaaagcatgttaaccggaatgtcttaaacaagcattgagatataaaggtaagcatgtataaaaataatagtatgcaagattcaaatggtacgagcgtaccaagacctagagaatagaaaaaggcaaaaggtgacggcttcacgatggaataggaaggggtctcaaaagacgggaaggtcatgaaaatataaagtggaatgtttaaataggccacagagtttttagagttaagtatttgaattaagggatatggaagaatctaaaagatgcatcatgtcaataccaatggaatagagatggtcaaatggtagcaatttaataatggaaaaagaataccaaaagacaaggctatggtcagagtcatctacaaagatgtcgcaagcacaagggtgagatcaaatctaatagaatgaatgagtaaagaatagacaatactagaataaaaatacatttagcaaggtgatatatagaagcataacatagaattagtcgaggtgactaatattttgaagcagaatcaaggatgaggtgaagtaata

SEQ ID NO: 73417 - DNA, 840 bp, Zea Mays
ccttccgggacagaggcaccttgtgatctcaattgaccagccatcccgtcaaccaaagcctgatattacaaacaaatgagtacaaagatatcattttaccaggagtatagccagaacaggaaaaactaagttacctaaagattagagaagaacggcggaaatcccaagtcacgagaagctagatgatggctcgataaaggaacatcaccagggatcaattcgatgccaccaacaggcatcagagcttcagcatccagtgtgccgacctctaaggtgactccttcaattgaagcatgcactgctagtacacctccagaatgtggtggagaggatcggacgtggacatccatggaggtatgagaagagaagcccgctcggacaccctcgggggctgggttgcagcccgtactgcccatcggagccgaatcaccaccgacaacaccctcgggggctgggtcgcagcttgcgctacccacccgagccggatcattaccggcaacacccttaggggctgggcaaccgctgtcaccatccttgagaactaggttctctgcaacagccacctctaaggctgaaggactctcattcacctccatgggaattgaacaaccttgaccaacctcttggctccgaagaccgccctccaaggtcgacgatgcacgagacgctgcccgggatacctctaatcccacatctggaatgtcagagcagacgtccatcatatcaccatcagtggactcggatagcagatcttcagggacaacatcctcaagagcttgatcaaaattggctatggataattcttgcaaaccaacaagagcagatagagctagataagga

SEQ ID NO: 73418 - DNA, 567 bp, Zea Mays
gctagctccaactcatgagtggggtaattcttctcatgaacgttcaactgtcgagacgagtatgccactacttttccttcctacattaacacacatcctagttcggtgtacgaagcatcacaatatactgaaaagggcttgtgaacatctggcagaaccaatattggggttgttgtcaacttctgcttcaacatctcaaaggactcttggcatgctggggtacacttgaactcaaccttatttgccagcaaggctgtctttggcctggcaatcttggagaaaccttcaatgaaacactgatagtaaccaaccattctgatgaaactcttgattcctcggacatctttcagtgctttccagtccagaatcgctgctaccttctttggatccacagctagtccatctcggtttataatatgacccaagaacagaacttcgttgatccagaactcgcacttgctaagcttggcatacaactaacaatctcgtagcctctgaagtactttcctcaagtgttcttcatgctcttgctcattctgggaatatacaagaatatcatcaatgaac

SEQ ID NO: 73419 - DNA, 787 bp, Zea Mays
ggatttgtgatggtgtactcgatggaggtgtcatcgttgccaccacccgtctctccagtgttactactgtctgtgcccctgctgtcctaatgagcttgtttgtcaaacactacattgcacgtcacgtggacacacttagtaatggcccggtatgccttgattggagccacactcatagccgatgaacaccattttttgcccgtgatcatatatcaagcttctttaggttccgaacatacacaatacactcaaaggtcttaaagtttgagcctaaatagtgtcaaatatagcgtaaatattgtcacaatgattggcgcgatgtcacgtacaaccccgcataataggcatgcgcgaatctagatggttaccgtacatatcaagacaacatgagatacatgaatatctctcggatgtcatattcatgatcgtaaaattctaaagtttaatcgtaatgatgacaaatataacgtaaatattgttacaatggttgtaaacttcagcacgaggacaccttcgtctctctagtcactgaaggcgaggagccgattgatgtggggaacacatcgagctcccgacggaacacgcgactgaggtgttggctgctgtgttggaccttcacggcggcgagatcaaactaggcgggcaaggtaaatgttgatggatgtatccaccgcagcccctgcatgttggaatttggcctatttagtccacttgtaggtggaccaattcaaaaaaaaagtcaaggtggtgtgagggatggcatgagtgcctttagactatccgcaac

SEQ ID NO: 73420 - DNA, 642 bp, Zea Mays
atttcaggtcgacgcacaaagagcacgagctcacctgaagttccgcgggcggagagcacataggtgatagatgatgatccatatacacacaatctactgagtgacattatgcctgctgatcttgagttgtcacctactgacaagcatatctttattgaggaggtatttgacactaggttacacactcctctctctatttcagttcaagctttgaacttacccaaaatattttcaatgcagttgcttttgaatgcattgaataagcaagttaggcatggtctgagttgttttataataaggtagctattcaatatttagcttcaaagaaccttccttcagaataatgattatgtactgacatttttatttcttagataatgtcaaatttactgtattattatggcatgggtaatgtcgtgaaggatattttgttgcaacgctactttggaaaggtaactaaatatggcttaggttatggcatgcgacgtgatatttgcgtagatgcttaaaacttgtgtttgaactttatgatccttagggagtacgtggaggctcagttgaacctgaatcagatattgtgcaggcttgtagaagcgtatgcgctaagacatctcatcccttatcagttatggtgtatttgtt

SEQ ID NO: 73421 - DNA, 580 bp, Zea Mays
catgaccattatatagggtgctagagagcaggtgccatggcggcagacactcctgttttttctccccttccccttccactagcctcttccccttcctcttcccacccatcacaaacatcttcttcttctcccctccctctcctatattagagcacactctttctctctcatttttctcacgcattccttcctctctctctctctcactagtgctaaagtgttgttgatgctccatttcatttgctggttgcggttgactatagcctgtctttggccaaccacgattgtctagagtgttatatgaccaaaattatcgtttatgttttgtttgcaaaactataagtagagtcaacgaatgcgagcctatgttaggtttactagattttgcataaccttccttgcaaccgttattatctttttgttatgggtagaaatgcttaaccgtgctttatttcatataaagtttaatttgatcaattgactacttcaaataactattgtgaaatatgaaaagttggattcgggtgatatggtttggattgcgtctgaggttattagtaatccatggagggttgcgcct

SEQ ID NO: 73422 - DNA, 509 bp, Zea Mays
tcatgagtctggacctccatggtcggatcttggacctccacgtttgccatccaaacccctatgggtgggtcctagacctccctgtctggcatccgaatctctagcaggtgagacccaagtctttaggctagcatgcgcccttggtccccactttttgctcggacaagggtccagtgccgctcggacaggcatggcacaagccttcaactggaagcaagctcgtcgtctgcattcaatgcgagcgggtgagtcgtgccttgctatgcacaaggcatgggcaggcttttgtcaagccacacaaccatgaatgaccgctccgcgtattaccaatgagggaagtttcatgacagtaccactcatagggcttgcatagtgcgtcacctgaaaccatggcaggcggttgtctcttagcgacatgcatgaggatgacaccatcatgggcagtcattggcttaggtagcatgcacactcccatcacattaactctcgcacatgttagtgtgcccgac

SEQ ID NO: 73423 - DNA, 322 bp, Zea Mays
gagtactatttataaaaagtcgaattacattgagtgcctcgtgttaatgtttcagaatcaatttattttgagtgttgatctccagttaatatacttataaacaaaagtaaggctgcaagtaggcgagctgttattagaaatctagttaatctaaagaagaaatacatgttatggtgatctgatagtgatccacgtagttcacatgtaccatgccactgggaacatagagtagatgttggccagagcatcgttgatgtataacagggtaactacgcaataaggtcgtctgtaaagtttatgcagccaacagacatgccattgc

SEQ ID NO: 73424 - DNA, 390 bp, Zea Mays
tatcaccttatttcttgtaactcaagtcaatgtatcaagaatcttgaccgggtactccgtgtaagtcaaatcaccctgaacactgagctcttccattggtaactgttcctcagggacacggagacacttcttaagttgagatacgtggaacacattatgcacatcagatagagtagcaggtagctcgagttgataggccatctctccaacttgcctaaaactcagaatggtccaatataggaggggacaatttgcccttgactttgaatctcctcgttccacgaagtggtgacaccttgaggtacgcatgatttctttcctcaaattccagtggtcttcttctgttatcagcgtagctcttttgcctggtctgagctaccctcaagtcct

SEQ ID NO: 73425 - DNA, 910 bp, Zea Mays
gggcgatgcagttcaaaaaaaaagcagctaatgaagccaacataatttagataaccacatgggcaacaacccggtatttaacttcagtgctggactaggacgccatctgttgtcgcttggatgaccaatatagattaagttgccaccatagaaaacatagtacctcgcattggaataggcaacgatatcatggccagagagcgagagatgtgcagaccgtagagaactctacatgccacaaacatagcggagaattcgtttgatcatccgaagacaaggatctctaggaacatgcataaacaaccaagcatgttgaaccctccacctctcaaacccttccctctctcccgatgtcagacaccatatcctacatcgcgatttcatacgccgctggcctatcttccaccaccattagtttgcagaccgccagcaccatgtcctcctacatgattagctaccagactgttagcctcgtcagctcatccaacttcggcgttctcacagcctccctcgctagtgtggcataatccgtcagcatcactagcctcatcaacattaggctcgacatgctctccccaccatgtatcgctggtggtgtcgcctcttccacgtcgttcttggacgcttcaatatgcgtcaccacaccgatggcactcctatgttgtccacagatccgatctagattcggaggacctcaccgttctcatgtggctccatgccactctcatcgacgacctcctcaacatggtcatggatgacgagatcaccactcatggtgtctagactaagatcacaaaattcttcctcagtaacaaggacagtcgtgttgtctaactcgaacaagatctctataacctagagcaaggtgatatctttgccgccgcttactgtcattgtctcaagagtctct

SEQ ID NO: 73426 - DNA, 484 bp, Zea Mays
gcatccgaccgtggacttgggtgtgtcttaatgcaggagggccgagtcatagcatatgcttcaagacagttacgccggcatgaggagcattatccaactcatgacttggaattagctgctgtggttcatgcccttaaaatacggcatcattatctgctgggaaatatctgccacttgtatacagatcataaaagtttgaagtatatttttacccagttagaactaaacatgaggcagagaagatggcttgaggtgattaagtattatgatttagaaatccattatcacccaggaaaggccaatgtagtggcagaagcactaagtcgcaaggctttctgccattgtcctacagtaaagacctctgacatcacattatgtcaagaaatggagaagttaaatttgggaatgatacaacatggaaccttgacccaattaaagcttgagtcagttcttctgcaaaagattattgatgcccaaagaagtg

SEQ ID NO: 73427 - DNA, 826 bp, Zea Mays
ctttttcatgacatgaaacacacatttaattgcttcatagcaaaaaattgcaaccagataaattattaaatatactatttaatcaatttaatcaagaatatgtagtcttatgattcagggtaagggaacaatccttgatctatttgatcacatattatttattagtttatagaaccaatattggttctcaaattcaagaccatgcatcaaactcatacaatttcactttgtaaaatgttggaaccaccatcatattgaatgattggactagacacttctatgagttctaggattatagcttcaagtcaagatcaagttcttgtgggtcataattgaagttcttgctggtggactcctccaataggttcccatcgtccttccttttcatgtcaatatgatcatattcctataaatattagaagttagaacacacccattatcactaagcttgatagcctatgtatttgaataccatgcacatgttcactgtctaggactttcgagtaattcagtgttaaggggcattttttcttagtgttgtgcatatatcattgaacatatatttcataaagctacccatggtaggaaaaaatattgcacaaatatttcataataattctaccgaaaatgatggtttaaatttggtctagacaaataaggaccaagagcaaaatacataccatatgattaggtgcttcaaagagatgcagttgtgtaggaatcatgctgtttggattgacataagatgaccttatcataggaatcttgaaccgttcactcatctcttctcttcttgttccatacatcatctacaataaatagaaga

SEQ ID NO: 73428 - DNA, 1146 bp, Zea Mays
caagaccactcagtgctggtgtcggagtccagctccccgtcaacgaggaactggaggtcgtccccgtcggtgaggtcaccgtcggattctgatgcaactgcaaagtcccatccatctgcatcccagtgcaaaggtgcctgtttttcatatgccgctataggatcccactctggggttggttaacggctagaagaatgggagacaaaagaagcaaaggaatcactcggtgatgtcgacatgggtaaagctaagcgttgtggccatgaatggaaatgtgcctgttttttctgagttgcgatgaatggaaatgtggccggccgatgaccatttaaatacaatcaaatcaagaactgaatcatcgtttactcgaacttcgaggagcaaagaggagtcaaaagtcgccgcttcgtgttcggcgattgccgtttcaattctacagggacagggacagttgaaaagacacaactgttcaactccacacgcgactgagttaaggctacagggacagttgaaaagacacaactgttcaacatgaaacagtttccataggcggctcgtaagactaccacgagtgctatgtttttcactgacggtttcttaagcaagccaccagtggaaacaaggttttcactgacggttcgtaagactaccaccagtgctatgtttttcactgacggtttcttaagcaagcttccagtggaaagaaggttttcactgacggtttcttaagcaagccgcctgtgaaatttgtattataaatacccccacccccaacaggaatagctagctcgtagccaacttccattggaggtgattttggaggtccagattatataaaatacaagggtcgaggttttgatcttcatttttcggaggaaggttgctaagaaaggttggttttatgtttcattgtcaatttttgttcatattatttaccatgcttttataccgcgttcggcttatgttagatttgggcataagtgcacatgaaagctttgtgggcatggtgcacatattaaatcaccactatccatctcagatctaatgtctctagaactgaatcgacgtgcatcgtgcatcatgtgcactaaatcaatcatacatatgcgtcgttccttggtttgataggaaatgttagcttttttc

SEQ ID NO: 73429 - DNA, 334 bp, Zea Mays
ggctggggcatggttacgtaccgacttccttaggtagacaatcagggtagttcttgcgtagataatcctcagtctcccacgtagcctcttcttccgtatggttgctccattggatcttatacatcttgattgtcttcgcacgagtggatatttccttgcggtccaaaatcttggaggggtgttcttggtatgatagatctggttctatctctatgtctggctcggttataacttccgttggtaaccgaatacacttctttagttgggatacatggaacacattgtgtatggcagacattttcgaaggtaacttcaacttgtatgccacgggtcc

SEQ ID NO: 73430 - DNA, 1193 bp, Zea Mays
ttgtttcctactattaagggcacgatccgtagtagtgttgtctttgatagtcctgctgatgtagccttcctgacattgtctctgggatcatgagtagttgttcaccagtcatggcgtatcatcttatatgtcttgtacacgggtccctatagcaagtccaacgctgaggtccctgtagcgacgtctgtcggtccccacagggtagagtgagggcaagtctcggggtcatgtgtggcgtgtccctgccttttctcagaacaccctatgtcatcctcctagcgtgtgtaagcgtacagtaggtatggtgtattactctatcatatccagtatgtgggttactttggcgacgtcgatgcttaggttccctgcgactggggtcgtccggtcccaccgggcagagaccgtattcggtgacgtatcgtcacgttgatagggactttcctgtaccctttggtataccatgtcacctttccggacgtagtttggtgacaacgcgtcctatcatggctgacgtgggccaacaatactagattaggaccaccacctcgcatggttgctcgacagataattgattggcacatccaccttgcaggattgctcggcggcgacttggtcggcacctccgcctcacagggttgctcgacagggacttcgtcggtcgctccgtctcacagggtttctcaacagaggcttggtcagccgctctaccttgaagtgttgctcgacagagacttggtcgacaagtgggtcatcgagagtcttggacctactttgggcacctagttctaggtacccgatagagggatttgtactgattacactatttgcagagtcaagtttgaaataaaaacaagatatgggatgagataggatagatgctaaaaacatcttaaaatgatattgttcgtactgagtaacatgatgcggcggcgctaccgcccattattatggcatctagcgatggtatcattcacacgtgagttgataaggtgttaagtcagtgtcaagtggactagctatttaaaagtagtagttattttgctattggggcttagcaaatcgaaaaaattctaaaaatggcaaatttcattcccaattcatctataaatagaggagcctggttagagcgtatttctcacatctttgagcttatttcactcatcataagtttgtattctaactctcaaaagtat

SEQ ID NO: 73431 - DNA, 482 bp, Zea Mays
ctttttaaatcattttaagcctaatctcacatcatgcaaacaagaatcaatttaagcatgttatgcctgcccacatcttcatccaagcacattctatacattatatcaccccataaaagaactctctctcttttaattatactatacatatatatatctatccaataactcagacaaattgcatctcaacctagacttcacacgacgtaactatttcatacttacgcaatcacgccaatacaagaaaacgtggcttcacaacaatacgtactggcctattcaaacgttcctcgctatctctgtgtttcagcccacgctccacatatacctaaacaagataaccatcccaaccattacgtctattccctctcatcatacaacttaattaacatggattgcgaaagagctcaccacaactaaaccaaactcccatgaaaaaaaatccctagatagaaaattgacaatcaatagcgcaaatcatc

SEQ ID NO: 73432 - DNA, 323 bp, Zea Mays
tacagtgataggtatatggacctggccccattagggttgggtgtgcactgtagcgcactgtagccatatgtgtgtgcactgttgctaggttttgggacagcagacactctctcaacattgatgattgtagtcatgtttctcagggcaactattgttgtgcaaacaaaccttaggtgttgagtttaagtgctaaacatgcaactccgattggatcacgaatgcttgctcgcacaacggccaacacatttcaaaatagttattgatagggacactacaaatttgaaggacctcacgtaggatatagcaattaaacttgtttatgg

SEQ ID NO: 73433 - DNA, 664 bp, Zea Mays
tgcaatgtgtataaatgttctatgcaagtatgcaactatgtgagaacttgtgtacatattatccctcattatttttactgcttccattggttcagttgagcaggggttggcagttgaaacaagttatgtctgatccaagaaccagtgatctggagtcaattgagcaggggttggcaggggtcaaggggaggagggacagatcatgcctaaaccaaatgaactatttacctgcaaacctactgtgacgtgtcataaaagaaataaaatctaaccacgttgactacttacatgcaaatctacaaaaaaaatcaaaccctgcaggatctctgatgtgatgccatgccatgccaccaatgtgggtaggctggctgaaagacggaccagcagaagaggttgacttggaatttattgagcatgtgccgccgcccacgtggtttcatttcatcagcatggtttgtggttccgggtttgtcatcgctttgcttatacaaattttttttagtgcttcggtggtctgacttacttactgttcttgtcatatgaatagtctgtagaccaacctagcaaacctgtgagatgtttctgctcttttgctgcaggcttggcaccgtaaagaagaaaaaaaaaggagtttggtgaaatcactgccccaggaaaaccttcc

SEQ ID NO: 73434 - DNA, 677 bp, Zea Mays
tgcgcgctgtttctgctgattgaagaagagcataggaaatcccaccatccggatcttctgtggttgcgtccgctgcgactccggtatagcctcgttttcgtccaatagaaatgtgccatgtcgtttaaatctatgaatcgttggttattcaatgaattttgcgccatagacctgtctcgatgtgcttcactcgtgttaactttatattaatgttgattacatgttagtaacattattctttgtcgcaacacatgttcgagttaattatttgcttatctgttgggaattaaaataagtttttgattaagactaggttatagtattaagtgcgcttttataaatttacattaacatgattaatcacatgcttaaatgtttcgaattaatatttacttggtataatcacgacatctgttagggatccttgtgtgtcgacgcacgctatcgcgtccgccattcctcgcaccttgtttagcgggttgcgtgtcgtgtgcgcagcgcgtcgtcagggtcccaatgacatccgtctacccctagacgacgttcgtctacccctagacgactcccgtctacccccgtctacctcgtctagttccctgcgctaattaatttcctatgtaattgtcgatcagtaaactgactactcaattagattaaaattttgattttagttaggc

SEQ ID NO: 73435 - DNA, 294 bp, Zea Mays
gtgcaaagcctgccagtacttatcaaaacagcagcatctaccagcacagcaactgcaaaccatacctgtaacctggtcgttcgcgtgctggggactggatatgattggacctttcaagaaagctcaaggaggatacactcatgtactggttgctatcgacaaattcactaaatggatagagttcaaacccattgcttctctaactttagctaaggcagtggaattcatacaagacataatattcaggttcgggataccgaatagtatcataaccgacctaggatccaatttcac

SEQ ID NO: 73436 - DNA, 641 bp, Zea Mays
tgatggtaccaaaaggacctccacattcttcagcctcgagacatgcttcggtagtcaaggccactttggtattctttccggcactccctctcaccgtgattggaggggtctttagaacagactgcctaatcctcccaattctggatttttagggatttcttcggcaggtgattttgttgtttcctctatagggattctacttgtcccgccttcggcattcttgtccttcatcaatatgctagtaagatctgatcccagcggacttaacatacgaaaaggtaagggtcgaatcattacctctaggattcctgtcaccccaatagatgacgccaaaggagtttcggtaaccttctttgatagatccgaaggacctttgtcaactcgatcaaccttcaacgtgtttcgcttcttgggggcaggggatcatggtcctgagtgaaaagattcctcctcgtcatcattttttctctttcacttggttgtggcacctttcattttattcttttctttaacatatctctctgcttgtctcttcataatactaatagtttgtttcctctttcaccctagcagcttcttcctcagaaattcttgggtaatctggataatcgaattgcaaagcatccataaccctattcagc

SEQ ID NO: 73437 - DNA, 431 bp, Zea Mays
gccatattatcgtgtctcttaacagcaaaacaatataatgcacataaagtaacatgcgatgtgttcggaatataggtaatttatgcatgaaagggatctagtgagcttgccgttgctttaaccgatgaaaggatgagagctcgtggtactagcttctggctgcaccgtctggtgaaactcataggactagccttcttaggacaacacgaacactctgataactacgcagcaagaacaagcaaacatacaaactagcaagtatatcaacaaatattcattatagtggtcaggaatagtggtggatgggtgaatatagtttcgagtagagtttgtgttgatggagtagaggtgcttacgcttagggtatattggaggtgaactaacactagatgtgtattggcagagtggggtaccgagtgtgtgggggttgt

SEQ ID NO: 73438 - DNA, 622 bp, Zea Mays
gcgctctcgctgttatgtggccctccctgccagtagttgtttctcttaagtcgatcacatgtggtccctttacaacagctcattcttccacctcgacgcaggaagcggatcgtgggcaacaaccccccgagtcaacccttggcttccccgatttctcggcgtcgttggtcctctcactccagaggccataaatatcattttcgctccttctactcattgaccgagcaccacggaaccagatagtgttttcgtgaggataggtaatctgggtggtggtgcggaccgtggggaaggagatccttggtggtgggcataaatcccagggcttcaagccgaggaggtgtttgagtcgctgcgacctggcgaacgtgttcgcggcaccagcactggtagtggagcccctgtcgccaaggaattgctcgacggagttccacgaccgccatggaccgtgcatcatcgtgggcgggtgttcctgcctcgctactaccggtaatttacttctcatgctattcaccgttaaccacattacctgtaaaacagtttacgtgagggtcaggggggtgattggccgccgaatttacggtctccggcgagcggccgccaccgtggtgggtggctcgcc

SEQ ID NO: 73439 - DNA, 609 bp, Zea Mays
gttatgcagacaaatgacgccgactcttgttctttcaagtcaaagatcatgtgtacctgaaagtatcaccaatgaagggtgttaatcgattcggggtaaaaggaaagttggcaccctgatatattggcctgtttcccattattgaacaatgtggaccagtggcataccgacttcaactgccagaaacattatctgcagtacataatgtgttccatgtatctcaattgaagaagtgccttcgagttcctgatcgaaccatcgatgtggtggacgttgccttggaaccagacttaacttattcagaacatcctattagaattttggatcagaaggacaggagcacccgaaaaaggactcttaaattctataaggtacaatggaaccagcatactgaagatgaagctacctgggagacttaagacttcttggaaaagaattttcctaggtttttagcttcatgtaacctgtaagatatgtacatttgattgtaaaggtggaataaaccccataccacccctgctctgtaagacaagtaagggaataaagatgtgatgtgtttccttttccattacttaccctagaactttaaatctcgggacgagattcttt

SEQ ID NO: 73440 - DNA, 437 bp, Zea Mays
aaaaattgtatgctaaccttgagaagtgcaccttttgcaccgacaaggtagtgtttcttggatttgttgtatcaggacaaggtgtggaggtagatgaagaaaagatcaaagttgtacgcgactggatgcctccatagaatgtgagccaagtgagaagcttccttgggctcactgggttttaccggcggtttgtaaaagacgtcagtactattgctactcccattaatgaattgaccaaaaaagaagtacctttcaaatggggagaagcacaacagaaggcatttgaagaattgaagacaaagttaacaacaaccccagttcttgcactcctagacttcgataagacatttgaaatagaatgtgatgccaatggaattgggatcagaggcgtgctcatgcaagaacgaagaccaattgcctacttatgtgaaaagcta

SEQ ID NO: 73441 - DNA, 352 bp, Zea Mays
gaactttgtgtgtcacacgcatgcatgcatggaagtggtagctagcacgggacaaaccaacccatggccatgcgtggcctcctttggaacggtttcggttaccacgcaagctgatggagtgatgggcgaggagagggatgatggcaaaagggtttggctgcgcgcgcgtttgtttggaggggcagcagagcggaactgacacggaggcgcgcagtctctcggagaggcgaaggagcgcaagcaaaacccgcctgaagaaagcaaggatatcgcaagatatacatgtcttacgcagaaagcaatcgaagcaatagtaaaacaaatctaaccatctttctgtaccggctattag

SEQ ID NO: 73442 - DNA, 703 bp, Zea Mays
gttgcgccctcaaccgcgcctgctccgtcctgagccagcccagcactaggtgagaagcatcataatactttttaggatcaagatttctcctcctttctaggattaacggccgacgatatctgggaggcataatacttttgctgcagagcttgtccatcggtgagatctgagatcattaatactttctaggattaagcagcgcaatacttttgctgacaacggtccggtggagagcttgtccatcggttcacggttggtgagatctgagaggacgattcggccttggcctgcgcgtgtggccttggccggtaggaggagatttgatgggagctgtcgaagaataaagctcaaaagctagtctcccaagggggagatgaggagggggaaatggacgatgcttcttgtgggaagaacgatggcttttcttggcgtagggtggatgcaacttgctagttcctctatctgctacttgctttattcagcaaggaaagggaagaggagctaggccggacgcgcacgacatgtacagccatttccttaccctgcctcatctccgtgctttctttattggttgctgctaatcacccctccatgagggctttgtttattggctggtgctaattatccctaattaaatgatgcatatgtgctaatgatagctgagaaaatcaccgcaaccaccaaaggaaaggtgaccattcta

SEQ ID NO: 73443 - DNA, 395 bp, Zea Mays
ccctttcgttttagtgttcttgtgtgcccctgatactcctcgaccaactcgattaagctaagctaccttagatcgccaggaacgcgttagaatgtccgttgatcatacggtcacagtggacagagtgacttagaggtccaatagtgaaattagttgaggggaaacgattgttagggcttgaatttggtttcagccgaagtagagcacccgtcatcaagtaatccggccggtacaagctcaccggagctcgaccctgcgctgttcgccgtcgtggacttcgggccgtgaagaaatagaactaggggggtgtttttgtaacgtgtcagtgagacatgggaatagcgctgtgactcgtttctagttattcaaaccgataggggcgtttctgcaaaaac

SEQ ID NO: 73444 - DNA, 352 bp, Zea Mays
ctcaaattgaggcgctacggtggatgatcggagacgaggtttggtgtactgagttcgcaacaagtaggcggaacagggggagctttcaatttatagactccggccaagcttagcacgaattttggattgagatcaagggtactatgcccgggatattttaccgtggccgactcaccgtggcgcgctagtatgaattggtccagggatgataatcgctggcctgccacgacccttacaacgtggaggagtggtcattacatgtcacggcaggagaatggtgacctccggtaataccagcgcgactgaccgtggtgggacacgacggtcggtccggccagcgactggattcacc

SEQ ID NO: 73445 - DNA, 576 bp, Zea Mays
gcgatattaaattcctttgttgaatcaactggtctacatgttaactatcacaaatctaacatctaccccatcaatgtatcagaccagaagatggaaattctagcaaacatgtttcattgcaatattgggtcaatgcctttcacctacttggggctacctttggggataaaaaagcccaacctaggagctttccttccactcattcagaagataaagaagtgacttgcgacaacttccatttttctatctcaggctggcagactgcaaatggtcaacactgttttttcctccctaccaacgtattatatgtgcactctcaaactcccaaaatcggtgattaaacatattgacaaaatcagaaggcactgtctctggagaggagcacacatcaatgcaaagaaacctccacaatttgcatggaaatcagtttgtaaaccaaaagttcaagagggacttggagtaatctctaccacttattaagactgcaatagtagtctgccattctgtgttctgccaccattctctgttctgcccattccgtgttctgcctttccgattccctcctcctcacgcaca

SEQ ID NO: 73446 - DNA, 937 bp, Zea Mays
gttggatgtgtgggtagcaccccaaaattgttgtactaggatcgctggaaattcagcagtggaaagtgtatgcgagaagtttgaccgcttttgaccgagcgttgggccgtggacaaccaccctagaatttttgaagtggataggctagaaatttagatgcaagagatgttctcatgtggtaatcggtcctagatgaagtgatgtgtatcaggtttgagctatgacttttgcagccataatgaatgatttgcccaacactgttgtgtttctacaagaaggatgcaatggttgtttcataactcatgaggaactgcttttaggtcagaccgcccagcataaaaaggaagcagaagtagcttgtaagtgaccaaggggttgcttgtagatctcttgaaagtggatatgcactatcatatatgaaactaaaataacctttctcttattagccaatggtgcttgtgttgaggtatatgttatgctctacgtcttcttctcttcacatgcaataaagctcttttgaggcttcatatatttgtcttcgaacctgagcagccggaagtagcttatgcttttgtatctccatatgtctgatggcttctaagccccttagtttttgcattgatatcatcttgctcaaccaataacaggtatgtttctcttcttctgccttcgatgattagcttcaatctagttggtgtcttcaccgcaaacatgctcttcaacattgttagcacaatctgttatgctaacaatcctttccgttcatggaggtatggttgtggttgttgatgagttcacctgagataggcaccaaatgttgggacctatcaaaattctaaaagaataacgataggacatcatagttagattgttaggcccttctcctttctaaaggctgcaaaggaaagaaggtatgatataggtttcttgttattct

SEQ ID NO: 73447 - DNA, 475 bp, Zea Mays
aaatattccgcgcctcaagcggtccaccgctcagctagtgtaagcggtatggcggttcgccttcttcccgtgcagcactatataaacagatgggttggtgatgagttaccacaacattcattgacatcacactgttgtgctgttaaaaattttaaccatagccgaagctttctgcactgcgttttcaaacaagcacttcgtcacttgagatcagtttcatcttaaagagcgtgaatcactgaaatggctagagtacaatccactgctagggtttctcataaaggagacggggccaaagcgtccgaaacagctccaatatcagaggtgatgaggcgatcgggtcttgttgtgtcagaggaggctattgtcgaaggtacctccactgccgaagctgaacaaactgtggctgaagaaggaagtgagaacgaaagtgaggaggacaacactattctgagcccaatgaaacctagccaca

SEQ ID NO: 73448 - DNA, 273 bp, Zea Mays
tatatgcccgtgtgttgcgacggtacacaatcacaaataagatcactactggagatagcctccagacccactgaactaagtcatgtcacgcattttgctgaaggcagtagtaacgtagatttgcagtgtcctgaagtaaactaatgtcaatgaattgcagaggtagaacatacttcaacaactatgtcgttgtcttgcagcaatccaaccacaaatgttggagccccaatatagattaaaccactaagcctagatgttgtgcggagagtaaac

SEQ ID NO: 73449 - DNA, 503 bp, Zea Mays
atatttctaaggggtctggacccgttcctggacgagatctaacagattcctgtggataggttaggataaccatgcatgtgataagtactcccacccgagttaatctgatcacggaacgtccgagccacatggcaaaaccgtccagctgtgcccaggtgccaaatatggtgcccaatacatgctctctagcttttttgtggagcttggtgaaccaaaagaacctagtaataccagccactttcgggaaacaactgattccgcaacttcccctgttcccgaaatatgaactctagcccgatgcaagtcactgactcttgtgatcagacaatatacctatttgatagaactctaacacacaaaggtcatttaggattgcatcctcttcaataatggctacctgatcaacgtatcaaaaaggtaaaaattgtggtccccacaccccaaataagcaaacggattgggcaagcaatacaaattcatcgccatactattccgcacttgag

SEQ ID NO: 73450 - DNA, 1056 bp, Zea Mays
taccccttttcgtcttctaccctaccgttgcaatccagctcagaaggacgagattgaatggcaaatcaccgatttcctccagaatggattgatccaaccaagttgcaatccttttgcgtccccagtaatcctcactcgcaagaaaacacgtgattgccatctgtgagtggactataggcggttgaatggttacatggtcaaaaacaacaactcattgccggtgatcgatgagttgctagacgacctacagggggctgtttggttcaccagtttagacttaagcttcgggtatcatcaaatctgaatggatccacaagacatttcgaagactgctttccaaacacataatggacatttcgagtaccgtgttatgccctatggtgtgacaggcgcgccagctaccttccagctgatcatgaattcagttttagctcctttttctacgcaagcttgcagtcgttttcattgatgacattttgatcttcagtaagagctgggaagagcatatggatcacttgcgagctgtctttacacaactagatcaacaccaatttaaagttaaggtggccaagttctcttttgctccaactacccagcattatttgggatatgttatcagtcgagaaggagtagcaactgaccctacaaaagtgaaagcagtccaatattggccaactcctacattagtgaaagacatacgcagtttcttgggtctcgccggttactaccggaaatttgttgaggattttagtattctcagtcgaccactgtcctccttttaaaaaaaaggacagatctttgtttgggaagaggaacaagaaagagcatgtcaagaactcaaaaaggctttagtcacagccccagtgttggttcttccagacttttctaagccttttgaatttgagactgatgcgagcgacaaagggattggggcagtattacatcaacaaggacatccagtcgcttttgtgagtaaaactcttgggcctcaacatttgggcttgccaacgtatgaaaaagaatgtctcgccattttcatggcagtggaccactggt

SEQ ID NO: 73451 - DNA, 470 bp, Zea Mays
cacttatctctgcatcactaggatccaaaggcacctcaaagtggacctgccgttcatcatcaggaatttctccaagtgaagcaaccaaagcactaacttcttcggcagagggtcgcactctaaggcccaaaccgccatcagcagcaggaggattcgacacaaaattagtaaaggccttggaaggaggcaggttccagactgagtatgcgacaggggcgccaacatttgataccttgcctctaagtatcatttcaagccggttcaccaagtctacagcgggaatttttctgttggtgacccgggttgagtcagctagacctcggtacagataggccgggtatgccctgtccttcaaaggctgaatgttcttgaagacaaaatcaacaaccacagcctctgcagtcagacccctctccttcagtagtccaacttcagccagcaaagcccctgcctcagccacctcctggtcc

SEQ ID NO: 73452 - DNA, 601 bp, Zea Mays
atacacccaagtgaacttgttgaaatcgtctataaaagtgacaatattttttcgaccaacatactctggagtaggaccccaaacatcataaaacattatatctaaaggtttttttgaagcgcaatggcaggatctctgcctttcaattaagatagggaaagagtttatgtacatggttaaattaaaaaaacctccctcagaacagggcgtcaggcagcacaaaggtgcaataaaaccaaaataactcttaagaatctacacttcccaggttaaggctcttatctgttgctcgatgtcctctttcgctctagaggcaacttgtgttaccgtttcaaaagcgtcggtgaagatccttctattccattctttctagatgttccaaatagtgtaaatcactaccccattgaatcaccttctctcactttttggaatcttggcttgggattcctcccaccaccggatcaacttgctaggctcctctgacggaatgattaaattttcgtcgaaatgcacccaagccagggtgaggctccaaactgatttggtaaaagggcaaagcaatgccaaatggatacatgtttctagtcagggatgcaacagg

SEQ ID NO: 73453 - DNA, 675 bp, Zea Mays
ttctattagtattggagcccaacacttaatttagggtctaataagccaaagtggtgttgggataacattctgggaagaacaagacagtcccacaagaggacaatgagaaggatgaagaatgcgtccactcgaggtcaaagaagactcataagaagaagggctcaaggaggcccaaaaaaattgcgatctccaacgatgacgacacctccacatcaaactcaagtagcgaggatgaggtcatctaccacaagcgatgccatgagaagaaattgattaaatctaattattcttgcgtgttgtttaactacaattgcatcccttaaaacagcactacccctatactattagttttcagttggaaaaccacacaaatttgacgagacaaattattccaagtggaacaatagtatgagaggacacttttacacactccacccaagtttttggaatgttgttgaagtagatattgagatactggatagcgacaacgaagattaatcgcaagcgaaagtggagcaaatgatccacaacaacatccaagcctctatgatgcttccctcctccctcaaccgagatgagtacaagaagattgatgtattggagagtgccaaggagatttgggacatgctcaaggtggcccacgaaggaacaatggcgatctacaaggtgaggacc

SEQ ID NO: 73454 - DNA, 906 bp, Zea Mays
gggtattgggcctggtttgcaaagaggcgtgggctaaacgaatagatattttttttgggcttgtatttaatccagccatggataacacctgtggatccaatcatcatatagaccatttccagcccagccgaacaaggccttaggtgggttcgtcttcctagctggcgcgctccatgtagtgctccaacggatcagctgtgccgtcgccgggtatctcgaaccgatccgaccagcaacgcgcggactactcctaattggacaccgcatctcacgcctatatatgtgaccgcccacgctcaactccttcaatcggcaaaccctacaaatcgccattagcggtcagtgttgggagagacagagagagacgcccttcgtcgatgtcgggtccttgcgctgtctgatactccggtaagaccttccctagagttctcctttgtcctctcaacatgtagcatccgtaggttcgagtttgagcatctgagtgcgagataggggtccggccatgtgcgccgccgtgtgggcgctgtgccgtcgtgcctggtgaggaagatggtgccgtgccattgatttggtaataaccggcttggatcaattaaggagtaccagttcagtttggttgcacgatgagcgtagatcaggggatgatgggctctaggagcgtttttggctcggaacggttggagacatcaatcgagtaaatcgagtaaggagcgacgtacattagatcgtgggtttcccctgcgcgcattgaatcacaaccgctggatctaatctaagcagtcagaaacgaccaataccttcgaccatgacaatttcctaaaagaaccctcgattctgttttaatctacccgcagttcatccctatatatagatcattacataatggtccaaaaatttataaaaata

SEQ ID NO: 73455 - DNA, 429 bp, Zea Mays
ttttcatcaataaccgagatcaacggaccgcgagtataaaattctagaggatgggggttcattctgtaaattcctggacttggttgtgacgttttctgtataggctaggatggcgagtttatttctataaagttcaggggttcttacgtaaagctgcatccgcgaaggggtatgggctatttttggccgtccagatcagatctcacggccagggttaaatctcacataagcctaaccagtacgtaactgggatcattggatcccgatccaatggttcgatagaacccgaacccccatgcgctcccaaccctctgatttaagatctacggtcaccactgccccgcccaaaatggtacgccagatttaatcaccaccgcacatccagttttcgaccgcatccatgtgtcttctcatcccgaccgaactccg

SEQ ID NO: 73456 - DNA, 650 bp, Zea Mays
taattctaactttttctttagatttagccactagaccattccctaatatccttgttcttcttattccacccaatttaatggtgttctacatcttctcccatacaaagcttcaaatggagtcatctggatgctcccttgatagatgttgttgtaggaaaactcggctaatgggaaaacatctcgaaactcacataccactagtatctcttctagggaggtcacttgggtcgtgaaggatacactagccaactcaaggcggtggggtgcgtcacttggaatacatctacaccttgtggctctccaatagaaatggtttgggttccagcatttgggttaacatcccaaacgttcatccaatccatacggagtactatatccaaagacaatctcggcagcactatcaatgtgttcggaagttcctcccctcaatcctaagggttgccccacgaaccactcggtttgttataacgttagcccccactgaacttatttgatacttaaaaccctattctttagatttctgcttataccgatgtgcaaatgcagagctcatgaatgaatgagaagatcctaaattaaataagactatggtagggagacagttcacaaaaaacatatcggccataactggttctccttcagtaatccca

SEQ ID NO: 73457 - DNA, 474 bp, Zea Mays
tttaatttttgtacaacaaccagggaagatgactgtaccaaagttactcccctataaaccaactttaatcttgttacaaaggtcttagtcaattacccattaaatcgagctccacctgttcctgaagttggtcctttacaactggtttttctgaacatcacagtttctcagcctgatagccaaacttcaaaccaatttaactcctaattttgtacaataccaaggcttaagtgcttaagcaaagttgttctcctttcctagctctaccagcttgatgtgttgatcctaggcaaattccctgtatttttagaaatacagagctccaaagtcagccatgttcaactgtttttggacttaggcatataaggtacatggggtgtcctttttgcacataggtccaaacttcatcatttggcttgcaaatcctcaaatttgagaaacacatagtttgtgatgttttactaccttggtatt

SEQ ID NO: 73458 - DNA, 400 bp, Zea Mays
tcgttagtgtcgttaaacactaaagctcccttcagatatttcaattttcgcgcatagtgtctggcttccagaacttcttcttcggacaacttcttccccgaagcatgacgataaatataatcagcatcctcgatagcggcttagggggtaggagattttgccctttctgtcgcatcttgcccttctgccatgccagcatctgaagcccgttgatcagttttatctttaggcgcgccggcctttgtctcaataggcgttgcaggctcagcttcggcctcggcttagactttagcagcttcagcaattttcttaataggactagggctcaaggcctttgtggtatccaagacagcgtctagcacattggccatccttctcctcttgggagttgcagcaggag

SEQ ID NO: 73459 - DNA, 510 bp, Zea Mays
ccacgatggatctcgagcttcactgattcccccacaaatcctggagctcggtcgctacaccatgcttaatcgacatggttggccgcctccctggaaacactagccgcgcccaacactaaccctagcacgaaatcaaccctggcggggctatactctctcttctgctcttggcctcactctgctatccatctctcattttgctcgcgcattgtgacgattggattagcggctcccggttttatagaggtaagggcggagtccgccatggagttcggtcgaggggccccgcacttcgcgcggccgagaaacatggcgacaccggtggagaggttgtctgctggccagggtctgcgcggagtccgttccttcaaccaccagcgcacaaagcggagaggaaatagggagggggatagagctagcacagggtctgtcgtcacccatgagcgcgcccgatgtgggatccgtgattcccggcgaggagaagggctctgacaagccgggcccaccggg

SEQ ID NO: 73460 - DNA, 347 bp, Zea Mays
gtcggcaactctggatttggagttatcaagtaggtgaatcagtatgttgtacatgatagttgcctttcagaagatcatcttaaattcctactgcatgagaatgagtatagaaaggtttgaaagaatgaggctaggcttcctttaatgaatataactcatatttcggtaggtctctaaaggaacaggtcaaaactaaataataagtttgatgtatcatcttatgctgattcatcagggggaaaaatcacctcatctataaaagcatactcatgtaagtctcaattgaattaggcagccattgaattaacactcccaacgattaaaagaagtgtcatgttagatgttgt

SEQ ID NO: 73461 - DNA, 955 bp, Zea Mays
gggctcgtaggctatgagtaggaggcagaccgacgcctccgttgtggctcggcatcaagcgcagttaatgcgaccgatcacttatgaggggtcggtctcgggccaggcgagggatccactcgagtggtttcccatcggtacgtctgccccctgttagactctgccatgcccgaccccgggcttagtaccatggggcttgtccaggggcgggttcctctagggtagatgctacctgtctccttcggggcggtgcccggttgctagccacattccttgggcacgttcgctaattgatggaccctagggaccagggatcttatccccgatagtagccccgagcccctagagggagaatatttcccctcgagggatttttctaggtcggacgttgtctcgtcccttttgttgctcacaaccaatgggttggtgaggttcgcgaggcccactattggatttcgggatccagttgggcattataagtagagggtccgtccgcgctgccgcttaccccgtatcgactttggttgtcgctcccttgcttcccccaaaaatggcattctatcgggagggtaatgttgttcaaaaccctttgggatcctctcagctaaccatggatagtagcaagtgtccccctccggggtgtcctcactaaggtcggcccaagagtcgctcgccacgggaaatgtgggtggtttttgggaccttatccctttcttgctcctatatcttcatggtgacaagctttcttcataggggcgatgggctcaagtgctggaggagagatcatatcgctctcatcctcccccttgacctctccgaatgaagaatcaagggccgaccctcgctgcggtgagcccacgtcgtcgttcccggtggccgacgctaccagcgcaccgaccattgttggctgctccatggtagcaacaagatgtggttgcacggggtgtgtcaccat

SEQ ID NO: 73462 - DNA, 357 bp, Zea Mays
tctcatcatttttgtgcacaactatgcggttgttaaaccatacaacaccttgatcatctcttttgaagcagttggcttttctggcctccatcttctcatgaatgtgtttcattccctcatcatttctttgtgcgtcaattattctttgcaggatgactgactcaagcttcaagtgatttgaagttccatgctgaatcattcccaggttcaacttctccatttcttggcataacgtaatgtcagaagtcttcatggtaagataatgtcagaaagccttacgacttaacgcatctgccactacattagctttgcttgggtgatagtgaatctctaattcataatcctttattagctcga

SEQ ID NO: 73463 - DNA, 275 bp, Zea Mays
ggacattgcttcgaattctctaatccctcagtccaagcttcgacgtccatccttcactacttctagtccattagcacgggccctgcttgacctccatcttcgcaccgatccttttgagctccacatcttcgcatcacaagtcaagatcatagacatattgtaccacacaatggttaatctacaaactcaatcaaatccaaccatctcctttacaaccactcgtcacacttgaacaccatggacgtatatcaaccacgtgctcacatgactatcaa

SEQ ID NO: 73464 - DNA, 837 bp, Zea Mays
gtttcaaactattgtctttggctggccctgaggggccacctcttccttggggagcggttgcagtttcaatgtccctagggccgaggagatgcctttacgtcgactcccttttacatggggcgctacatccctctgctttataaacatgggagaaaggaggggtgtcggtcaccacaccgctccttctacttttcactttcccccttggatagatctatgtagttggtcagtcattgggcccttggtgaggaagaggttgtgtcgcgctgggtcggagtaagtcctttggggtttgcttctctttccctcacaaccttctgacttctggttccttgctctagcatgactttcagtgtttgtggaagtcggaacatgtctcctcgcgcgtggttcatcatggtcgggcccatgggcttcccctccatattccctcgaattcgaggagaacctcactgcttcctgtgtagccctagacgcgacccaagtcaagtcgggccttcttcgggaacaacttgctgagttcaacagccgcatggcaggtagttccccccctttttctttcactcccctcgctctttatcaagccaatccctttgtgtgtttttctttacagttctggaggttgagctagagaaggttctccactgggcaagccaagtcgtagagtacgtcaaggcccatggtttgtcacatgtggagtgcttagacaatgtcccatgttgtgtccgggatatggtagaagttagcattcatcaagggtggtcatagccttgatcgttggggggctctgctctagctgtagtcttcaaggaatcatctgtctccctctagatatcc

SEQ ID NO: 73465 - DNA, 347 bp, Zea Mays
ataactgttgggtgattggccacaaggaacgtacccatcattactggctctccttccggtgtactggccacttgagtataataaatttgtccagtcttcttgacatttttgcccgctgaattattagccatgttccctttgccttgattggagctcccagagttctgttgattgttgaacttattctgcttctgatatggacagtcctttataaaatgaccagactttccacagttgaagcagtcagtggaggaactagggagggcggggaaacgagcaccaggggcactcagctgatttgtagaagtgggtgcagtggcaggacgaatgaaaacaagctgtttgaa

SEQ ID NO: 73466 - DNA, 645 bp, Zea Mays
ctggtagtaaaaagaaaaggaaaaggaatgaatagtgttgagccaaatctggcccaaaccagcccacgaacagaggaaatacgcgcgcgcccgtgcccacgctggcgactttgcgcagagacccaaagccatttgaataaccggtaaagagtccctaagcactattcacatgtctctatgaccgttgcacttaagcccctgagtttctatttcttcaccgaacaagtcccaagcgacggcgcgtgcatccgttggccatccccttgctgggatttgcctcaaacggcaacgaccgccgaaaccgagcatcggatcatcatacctaatcccacgcgagcctagtccatgccttaattgaactaatctaacccggaatcccctctgcccacgacgacagcgaacaccgagggcagaccgagctattcccgacgactaggcgtggtagcgttcaaattctaagcatggggagcatcaccacacataaaggaagctagaacggacagtagttgggctggaaataccttaggcgaagctagccacggaaaagttctcctcggcgacgatggcgaccaaattgggggaaagtctaaattctccggctacgatggataatcgggagtaaggagcggtgctctagcttcgtaa

SEQ ID NO: 73467 - DNA, 425 bp, Zea Mays
ctcataaactcggtctggccctgtgaggtccgccctgataagcctagtccggcctggtgagggccaccctcataaacccggtctctggcatccatcagatctcatgtaaccagttataaaggaagaatttgctcttagttcaatccttatgtatcgatttcgttaccatgtctttaatccatgcatggtgttccttctacccccactcaagattctcactcttgttgttttcatgaaatttgagttgtgtaactagcttgtcgcttagtttgggactccgcttgatgtcgattagggaccgaactgctaggaactagatctaggagaaaagtccatgttatcgggggtagtccagagttgggtagtcgcttagcctagcttcgtgcagtaagcctacactctccaccaccctagaaaactgaccc

SEQ ID NO: 73468 - DNA, 596 bp, Zea Mays
aggatgttgaggaccacaaagttgaacaactgctcaacaaggaagatgcaaagcaaaatcaaagtctcaaggcaatgttataacctaagggatttcgtctcctgcacacaggatggcacgaaggtccttcatagctaggctaagcaacacgaagtgatggtccttccaaaggtatcttatgcagggcaatgttcacctgttcataggaaagatgaactgccttttttttttttttacaatcatgtccttcaaggttttacacacattgtttacaaatgacatcaaggcaataatgtatttctccattcttggatgcacgagtttaggcctccattgtttggaagcttctcctctggcttatgttcaaagttcttctttgttgccaaaagttatcgacttcggctagcatctttgccacttgcacgcacaggcgaagcttctttgtatgctgcctcgaccgaagatcagcttcgtccgccagtagaaatgtacctgaaatacacttgtttgtgccaaatgaggatcttcggcatagtaggcccccaacaagctatttttatttacgtttatttgaaaaactcttttctattctgcaa

SEQ ID NO: 73469 - DNA, 801 bp, Zea Mays
ccctacaaaagagatgatctcaccccgtcttcatcagcaacaactgagtagtcacaaagctcacttgtaaccttcataccctaagaactaatatacaaccataacaagaagtagggtgttacacattccaaagcgatccgaacctgtataagcccttgtgcatcatcgacgtgctcccgtacgtaccatcaagtcacaatcaacgtcgccgtcctacccaaaagcatcatgtgggtaacctcgtggtgcgcagtcaggtcacaaacaccgacagctggtgcgccaggtagggggtgcgatgttgatttacgacgactctatggtcatcatcttcaacatcccggtcaccttcagtgctggagagatctcccgcttcgaatccatctcatgcattgctgatcagaaaggcatcctgcactgcatcatggacccatctaggaagaaatcttctccggtggtggcagaagcggctgttggattgccacgcacattgttcgcaagaaccacgttgatgaactccaaagcgcaagaaccttggtgggtttccgcctcgcgtaagatcgtgcaacgtcgagtggccccagggtcgttttaacacctatggctcgatcgatcgaggctgcaccactgacgctacgaaccccttgtccatgtcacccactcgggcatggactcagatcacccgggaaagagaagtgtgtgcccctgagacttgcataaccgtgggggaacgaccaatgaccactccgccctgaaaggagatggtaggagcacaaagcatcacaccaagctacttcttcc

SEQ ID NO: 73470 - DNA, 488 bp, Zea Mays
aggaaatgcaggattcctctatattggatcagactaaaggaagacaaatctttagacctgaacttattcaagaggcagaagaacaagtccgaataattcgggagaatttgagggtagctcaaaccaggaaaaaaaagagctacgctgataatagaagaagaccactggaatttgaggaaggtgatcatgtgtacctcaaggtgtcaccactccggggtatgagaagatttaaagttaaaggaaagttgtcccctcgcttcatcggacccttcttgatcttaaagcgagtgggagaagttgcatatcaattggagttaccggatcatctcgcggatattcatgatgtattccatgtatctcagctaaagaagtgcctcagggtacctggggagcagctaccaatggaagaccttagtgttcaagatgatctaacttatgctgagtaccctatcaagattctggacactttgactcgagttacaagaaac

SEQ ID NO: 73471 - DNA, 628 bp, Zea Mays
caaattccacgctttcaggagaaaatgaggcatgcaacttgtctgccatgtgcccttgtacaaggacttgtttggtttgtcatccaaaaaacaaacaaacacacacaactgttctgctctgcgtacctcactcgaaaaactgttgcctgtccagtaggtgcttcagctttgctcttttgtgtctacgatgaggatgctcatctgtagtttggaatgtttatgtcatgcactctggggctgattggttgccggtatatcaggtgcctggctcgtgcgggtctgcttccccagcgattgtaatttttagcatctccacacatgcaggctggacaccgaaaaaatcactaaattgcatctgcgcatgtagtcttgagggcgtcgggtggggcaaccaaacaccttctcgcgtctagtcaacgcatgccgtgagcctgggcagttaggacgcggcaaccaatcacacgttctatgttctgtcatctcaaaacgctatgaaaataatagaaatggaaaatacactcgtcgaattttttttccgaaaaacagacactacttgagaacgatggatgttggtgatggaacacagacacacaaaaagtgtagtcctttccgctggttaggttttttt

SEQ ID NO: 73472 - DNA, 368 bp, Zea Mays
ggaggaggattgatcttttatatttctctctcttcttctttctctttttcattcttggcaccaaagggagagaaataagatgagaagggagggggtgaaaaatatttatgtcaccatagaccttatattagtttgtgttatgtgatatgagagtatatatgagttaagtacctagagcaagcgctatgattagtggtctaactaacctaaacacttcacaaaagcatttacactactcatccagtgattctttgagcacatgggtttctagatctagtaaatatgagcttccactctcttgatatgttcctcggctcccacacctcaaatggctggttgtggtggtatacatagactccaagtccaaa

SEQ ID NO: 73473 - DNA, 723 bp, Zea Mays
caagttctagcaattattgttgcactaaaaatctatttctaatttactttctctggttttctgttctctggactgggcgccaaatactgtgaagcgcaggagtctcggggtaaaaattcttaagactcagacaaatcagaactgaatcgcgggttcattatctaattccataaggttttttatgtaaaaacgccaggccgaaggggcatccttcattcagagccgtccgaacgactccgattagattctacacccgcgcgaactggtacgcaacgcggtccctcggatccaaatcctacgtccctgatttatgaagcccagagcgagtgactcacatccgatcccgatcgaacggttcctgttacccctatctgaaacgctacacactatcacatccgagccatcaaaaagagatctaacggcacctgatcgtcgtcttactccctgcgaacagcggcagcgccgccggaaatacggcgaggtgtcaccggggtacggccaacatggcaagctaacggaccaattcccacccgagacttcctacgcaacatatgcttaacagagaatgccatggagggacttacaacatgcacagaacggcggcggaagcaggctacggcgaagtgcggtccgcagcggcggtgtaacgacgacgaggaattctcccggccccgaggacccacgcacccggattcttccccgagaacgatccacgcccacacc

SEQ ID NO: 73474 - DNA, 859 bp, Zea Mays
cggtgtggtcgaatgccgaagaccgtcgatgcggtctttttcgacgtattgtcttagtttttgcgggggatttttgcgggtatattacatggctccgcctcattaaaaacctcaccccccgggaggaaaagagtgcgggccggaatgatactgtttggtgaattacaagggcgtgttagccctgatgattcaaacaaaaaaatttgcggagattctcgatattccaggaatgctctaggtcctcgctagatggcgttgttagcctgtacgcgctgggggacaccttcgtcttgacgatgaaaggaccctcccactttggctccagcttgccccgtgactctgtccgagttgtccggacgagtacgaggcccccttcgtcgaattctcttgggatgacggcgtggtcgtgccaggccttcgtttgagcttggtatttgttgagagcctgcagggcgaagacacggtctccgtcgatgagttctttggaggttggttcgtctacatcggggacggatgaagcgcttgtccgcggtgacccatgtttgatttcctgcggggtcatgcctccgatccgtatagcaggcgaaagggagtgaacccagtcgcccagcattcggtcgtgttcagcgcctagactgcttcaggtagcaggtcggcccatttgcccttcttgtcgtcgagaagcattttcttaatggcagtgaaaatcttgccgttggcgcgctccacaacgctgttagattgtgggtgatatactgaggcgaaggctagctttgtgccgatggagaagcaaaaatccctgaaatcttggctgtcgaactgtttgccattgtcaactgtgagctcaaacgggactccg

SEQ ID NO: 73475 - DNA, 694 bp, Zea Mays
ctcgcttggggagattcctgatgatgaacgacaggtccattttgaggtgcccctgaatcctagtgatgcagagataagcgctatgcttgatttgctggctgaggattcttctgatgctgctcctgctggggcactggtagtggcgcccctcctagaggctgatacaactttggatactcagaaacctgccagtactcgcccgaggcgcccttgccgagccaatcagcctgatccttctgctgatgagcagaagaagaaaagaagacgcctccggcgagtattcagtttggatcgggacgctggtacttcggttcctgctgccgaagaaatgcctgtgactgaatttactgatactgacaccaatgggtgtacccaatccgctgctgatcccaatgtgggtgctccatctgttgctgatcccaatgggggtgctccatctgttgctgatcccaatgggggtgctgcttgtgttgccaacgtggacgacgaggaggaggaagatgaagttcctttgactcgaaaaaacagtcggcagttcatcgccagcggtgaaagtagtggagttccctctcctgctttgtctgctctcattggtctgcaagaactgtccctggccaactttgatcagactcttgaggatatggttccagaggacttgttatcagacccagtggatgatggtgtgatggaggtt

SEQ ID NO: 73476 - DNA, 354 bp, Zea Mays
aaaacttacattgttcatggtcgcctagcaatcaaattgtttgcaatactatcatgaaaagcatcatgtcttgattgtcatctctcaaccgattgtttaaactactatgctgagatgaggctgactccgagtagaagttgctaagcttcctccactttgatttacactacacgcaatacacaagaatttaatgatacttacaattacaaagcaacagaaaaaatattttaatgtaaccttatctgcagagactacctttgtgtgctctttccaaaaagaatctggtgccacaactgtgtcgttagcgcatccaagtccggtctgcttattcagcatgaccaaaactgatacaat

SEQ ID NO: 73477 - DNA, 534 bp, Zea Mays
aaattatcttaaaagttgccgcatccatgtcctagtggcgtgagatcataaacctctgcttgtagcgcatggacaagtagcagtgggatctagagacgatgaatagggaatatgctacttggaggacgaaccgtttattttgactggcaacatttttttaatgcaccattatttgtggtttcggtctagctaatatttgtcatccgaaaataacatatctacaaaaaaccactaatatattattaaatcattgtacaaataagtgattgatacatttatgaaccactaaatggaattgtcgaccatgtattctattaaaataccaatacctctatccaaatcaggctcctatgcttcaattcacaaatttgtatcaatctaatataatttgatagtcatttatgtagtctttcaatacaaattatgcacattgaaattcaatgaatatttgatgaattcattatatgagaatgcggcaatggggcgctctatatatgcttttttcttatttcctttgtttttctctgtttttac

SEQ ID NO: 73478 - DNA, 486 bp, Zea Mays
caagaaccatatgctaccagaacaagaaagatgagagcggttggtggccaaggctcctgaaaaaggacctgtgttcttgaaggttgactggacaaatgataggatgaggatggcgaagatgttggatgttagtatttcacttttggttgattatgttttttcttatgcgcctgacaaatctagatttgcaaccagacatgctttattcttggtcctgttttgttttccttatgtatcagttccttaacttgtaatacacatgatgtttttcttatgtattaattccttaacttgcaatgcacatgatgtattccttatgtattaattccttaacttttaaagcacatgatgatggctggttgtcgggtaagttctcttaaactttggtaagcttacgtacttttgctatggatcttttgaatcaattacaaggtaattcatttaaaaatcgtagtaacacacgtgtacctaaatatcatatataaa

SEQ ID NO: 73479 - DNA, 807 bp, Zea Mays
cttatacaagcattcattatagacgtttttagcttcatcgcatcatggtacttcacatgagaaactaacgacaagcttaggatgcttcattgtgaatgaaaagaagggaaggtgttcttcgcatgtcggctcaaaaacaataaacgtggtttcgttcatagcaaagcaagcgatatcaaaagaaggtaaaattgcaaggtaacagtacacatttacaaggaatgtttacactatattgtttttttcatttaactacattttacaaaaaactacaagattgttatcaggaattcgctagaaatcttcagcgtctactctccagtctccgccaacgccatctttagcttcggctcttcattctccgccggcgtcagtctaaaaataacatcatatcaatacttagtagcaacaagcaggaaggaagcaaaagtaaagatgttttcatacttcgttaagaagtgctcgagcttcgtttccagcaacttatcagccgccttttgtccaaatctgggtaacgaatctgttacccacgcttcgggcttcaccaggaatattatcaaatttggttagagaaatgttgaaggtaggtttattgacgcttttcaaatggctgcatccgacttaagcgaagattgaaggagttcctcgggtagccactagagcataaaagtcgccatgccctaccataacttggtcaaaatcagtaatttccttctcaacccattcaagcgcttttggaatgttgttggtagaataattggcatcttctgaaactgctccgactgaattgaaaatttctcgcaatcg

SEQ ID NO: 73480 - DNA, 669 bp, Zea Mays
gtgggaggagtactatgtcataatcgtagcagagggacatgaactaaatactcccgaaccaaatcaccgtgctaagtggcaaagggcattcaagattggccatcccgaaccttgatgagaatgtgttgtcaacacacagcggccctacttggcgcaccaactatcggtgttttggaaatcaggggtcctaaccaacaagtaaatttgtgctgcgtgatcttgtcccagatggttgatgcaaggagacacaaaagatttatcctggtttgggcaagagaaggccctacgtccagcgggggagggaggcttgtattatcttgtactaggtgctcatagtaggggatacaagcgagtcgaaagagggagtgattcccaagtctctgaatatgattcaggcaagtgccaatatcgggagtgatgtgagttgtaagccctgaagttgtgtggtcgtgaagtcccccctagaaggccctcggttcctccttttatagtcgcaaggaggaggcccaggttagaggggtgtttgcactattgttgtgatcaaaggagatgtgtccgggccctatagcgtcatggccgatgagatggctctcgtccttgtgtctgagccctgtatcagcatggtcgatgggatgacccttgtccttgtttcgtcttttggtcaggagg

SEQ ID NO: 73481 - DNA, 533 bp, Zea Mays
gggcccaccaattcctttcttgcagggggagatagtatcgtgaattgataaggtggtacgagatatcttacacgagcgtagttgtgtgtctattgggcctcagtgtcatactcgtgtcatgtggatgtcgcctagcgcctaggttagatccgagtgtcatccattctcgaggtaggcatcatgtttggcccaggcttgttcaccaaggtcgacaacatgttagactagatacttgttgcttattgaggcatgccttcgatctgacgattgcatcttggtgggtcagtcactctcgatctatggtagaggcgctacaaacctttttctcccaattcatcctctagggtttcgcgtgtcttgcattccatcaccaccactccgtgctgccaccccctactttccatgagtccatgtcgctaccctcctatctcgggtgatcatgggattctagagccgctccttggtcgatcaaggtcacctggatgcgcttattttccgtgggctcctctgtgagggagactacctgctcctcg

SEQ ID NO: 73482 - DNA, 844 bp, Zea Mays
agccctcgcatttctgtttcttcacagacataggtccacgacgaggaacggcggcgtgcacgctccggttaacctacattggtcgaaatacacaacgactagggttgtaacttggttaatgctaatcctcccatcaattgcacgattctggcctaaaatccctctgtccacgacaacagcgaaaaccgaggacaacttgaggtgttcccggcgatttagcgtggtctagttcgattgggtgggccgacaagcatcccaagcgtgcaagggttctgaaacgagggtgaggaggacgagagcggacctggatacggtggtccacggcgcgatgactcacggtggcgcggagaaccgaattggaggaagaaagaaattagggcgctacggtggctaatcggaggcgagggctggtgcactgggcgcgtaacatcctaatggagcaggctggggcatcaatttatagtgatcatcagcggtggcgtccaatttggggaagatgcgctggcgaccggaaagagggggaggtcaccggcgagcgctaacgtggctttcactgaggcactgtcacaggcgatggataggctacttataacaatctactgcaacgtggtaacatcgttgattgcgtggcgttcgggcggccaagcggcaaactccagtgaggatcattttagccggccgcagagcaagtgggtacggtggccagtacacgatctcatccacggtgaagatattttcaccctgagtcattatccgcgcacccatgggcacgaatcgcatcgccgacgcgaatccaggcacggggatctccagcggcgaggttcactgcacttgggatcttttt

SEQ ID NO: 73483 - DNA, 390 bp, Zea Mays
ttcacgtctaccataccagcgagcctgttccatcatgataggctcatcggaatagatctgtctcagaacttgctgagtggcacactgccagttgatataattttgaagcaaatggacagaatggatctgtccgccaaccgcttagttggcagcctaccggattcacttggacagcttcagatgatgacctacctgaatctatcactcgattcgttccacggcccgatcccgccctcttttgagaagctgatcagcatgaaaactctagacctctcccataacaatatctccggagccatcccaaaatacctggctaatcttaccgtgctcactagtttgaacctgtccttcaacgagcttcgaggccagattccagaagcaggcgtcttc

SEQ ID NO: 73484 - DNA, 402 bp, Zea Mays
gttggcatggtgaccccgacgtcatgtggcacaggggcctagttagcccgaagcttaaactcagtgggctcatcaccagcgtcttcaacttctccctcttcttctcatcggccttgatatagaaccactcacttttccagccggttggccacttggtgcgatagctgagcaccggggtcttcatatccttgcgatacgcgaagttataacagccaaaatttttatgtagcccgtcttctctggccttcgtctggtaatgtagctcatgcactcgacagaaagcttcagcatttgggtccattccttggtttcgaagggcccagatgaagacgctgagcctaacgatagcgttaggggttagctaattaagatagatttcataattatccaaaacttccccaa

SEQ ID NO: 73485 - DNA, 311 bp, Zea Mays
attttgcatctccccctcacctatactcgccccagttggtgaggataacaactctcgtttaacagccccgtccacgcgaagacgaccactctccatctcactacgatgacgcctaccacttcgcggcaattcactcactctctgtttcgccaccgcccttcgctgcctatacccagtacttgtaccaggaagatccccagcaccctccacacgcggcgaagtctccgccgcagccacatccatcgcaacaaaataatctaagccctcatccgaagactcctccgtccatgcagtcgaactcccagaatcat

SEQ ID NO: 73486 - DNA, 278 bp, Zea Mays
cgggctcttgccttactgcatggaggtgggcctccacaccgtgctgttggtaagcattggcaaagttcgccacgaaccgcgcacagagttcttccgaggagtagactgatcccagggtgaggttcatgagccaggtccgggcaggtccagacaaggccacatgaaagtatgttgccatcacagtggtgtttccacctgctgccgtgatggcggtaacgtacacctgcaggaactctgacgggtttgatgttctgtcgtatttctccggtaggtgcggc

SEQ ID NO: 73487 - DNA, 493 bp, Zea Mays
ctactgctaagttagaggccttaaatgactcgaccactagagttgagtacctgagtgctcctccactactcctctgaataaaacctcaaagaagtctataaggtacaactgttgtgtagccataatttttattataagaacaattctgaatatgaatctcaaactattcagacattcgatggaaccgcttaaagttaaggcaagctccattccttcagagaagagctatgcaaccatcactcctgtcagtgttgtgtctgtcatagtactagaaccagcgccagctagagcaacaacgattgctaagtcctccaaaacacctaggactctaccctagatcgctcaactaagttgcccatccccatgaagtctattattgctcccataaagctaagggctcaagtgactgctattgctctcacttgcacctcttatgtcaagtcctccacgagtccttgagccccaataggtgatggaccctcataattatctt

SEQ ID NO: 73488 - DNA, 362 bp, Zea Mays
ccaagccgaaggctattaaggcattcaacaatgtcgagtgagtcgctcattgggggaatgggggcttccagggtcatgtccattggtccctctctattgatgacaaagttgagattcccaaaatggatggtcatcccaggggtctaaaccactccattgtcgttgctggccatccggagcttgacgaatttcatcaagaacgtgcaaggcccctacctagcatgccaattgtcagtgtttcaaacctcactccaacaagtaaatttatgtgtgcatttcgggctgcagacagtgtgcgcggtgggcacaagatttatactagtttgactagaacgaccctacatctagtcataggcgtcttg

SEQ ID NO: 73489 - DNA, 272 bp, Zea Mays
agcggcggcggcgcactcccttacggcggtgccattgccgcccaaggccatccttcggaccggcgcccaaacaccaccgtcgactagtcctactcgaagctgaggtcatcgcgaatatacaggaggggttcttaccgacagggacgatagatacggggcttcccacgacgttgggcggatccgcggttgtgcccgaccaccagcgagaaattccggccacccagaccaacggtgagctaagcgagagtaccgtgagtactggtgcgatccaa

SEQ ID NO: 73490 - DNA, 320 bp, Zea Mays
cgcaaaggcccttgacggttcaaaaatctaagaagaagtcctcgactggttttaatgagtcactgacatgttttccttagccccccaaacgtctatgtcttttaaagttaggtccttgaccccggacggcggcgaggacgaacaccccctcgtcgcgccacgaccatgggatatccgagcacccgttgctccctgccccaccaaatcctaccatcttgagctgttatgggcatcaatttggctggcacactccgagaatgctctacccacgcgcacggcggaaatcgcgacgtcgagcccgcgttcccactaaatcgcgc

SEQ ID NO: 73491 - DNA, 587 bp, Zea Mays
gcttctgctgattggacttgcagttcagtagctacatttggacttcctcccatcttagtcgatctcctccttttgtcgcgatacattcattgcgtatattttgtggatatgacttcttcagaaaatctttgaaaattcttggcgtcacacccaattggtgtgcgcaaggggtgtcttggtatgcacagtgtttagcacactgtccaggagtagtaacttgatgtgaccgcagggtgtaatcatattgccgaagcagttgaccttggtccaaacggtgtcgtattacgtgaagcggtgcctgttgcctaactcatttttaggtagcttgaattgcttattgaatacttgcgattgttcgccgagcgtggtaggaagtggacggtcacccctggcctctataaatagcctgcttgcccccgttgttctcttcactcatccttcgatcatctgcttttttcttcttcttcgctctgtccttctccaaccaaccatgggtggaggtaggaggggtcgtggttggcctcgccacgctgatggaaagcgcaagcatgtttcaagtccttccttggaggacttcggggactcgg

SEQ ID NO: 73492 - DNA, 347 bp, Zea Mays
cttaaatgcaggccaactatgttgtgggattcatttcctaaggaattgcagattactatcatggtagaagtagccgcacgcaccatctttgagttattggttttgcatttagctagtgatattaaattcatgataggtgccacctacattccaagaagaaaacaatgactagtagcctctccatgtatttcattttctttttagagttatattggtccctgagacccgtgtgtaacgtgttctagatttgtttcgcgcgctgcttgcattacttcattactgactcttggtattgtaatctccaacacactaaacaccatgctttttgtgctctttagagcatctcc

SEQ ID NO: 73493 - DNA, 551 bp, Zea Mays
cttgcccaaggctaacctcgggtgggagcatagaaacgctccatgggccaattgatgggcctcccgatgacttgcctagcaaggcatgcccttgggacgtaaccaggctagatgagctcgacccaaggagatgaatactaaacaacggagttatgcgtagaaagagcgcaaatacctcgggcatggaggttgagcatactcgaggagctagatacttggagctaactcaaatgaagggcacctaaaccccggataagcaggaatgcatgtcgtggacagattcagataaagttagatagtcatgacgacttgtaaagggataacactctggtcatctatataaggacaagggggtaccactacgaacgcatctcagatctcatctcatcacatcccatcaccacttcatagctcattagccttctcatagcaaccacaccaccactagatcaacaggagagctcaccctccaccaccgagagcctcgataggacatagggtgttacgcattctagaggcccgaacacttataaacccttgtgtgatccgac

SEQ ID NO: 73494 - DNA, 348 bp, Zea Mays
ctagtcaccggtgagatagcttccaactggctcgctttatccttacgaacgtgtaggaccttttaattagggtttagtgcagtagcgggcccgattggccatcaccggcgtcacgtgttcgtcggtggtgggggtgtcgtcgggggaggtgagtcgctgggagagggaagaagaagaacgactgtggaccgttgatctgcttatgtttggtcgcgattagatgttaggatacccgttcggcgggagcaatccggtccgtccgtctctaatcgggcgcataagattcaccgtgggcagtattagatccgggcggttgatttcggatccaacggccgcggcagcgtaccg

SEQ ID NO: 73495 - DNA, 461 bp, Zea Mays
ttgatcctcgtctcgatgctggcgaactgacctaggtcggccagggataccactactattgttccacaccagtcgcttcaccattaccgcatgtttgacttcacctcctactgcaccttgggcaccgtctcagcgtcgtcggttgtgcaaccttcctatccacggtcacaacacctcgccgtcgttccgcgcaccatcgatgtggtcacgctattcttttactcaacttaattccttgctcggtgtcgattattaatgatgggttatgtgaatgtatgtatttatgtgtgagatgtgaggaagagagaaacccagtgttggggcctatactgccaaaggtatttttattggttgtgctatataattgccttaaggatacaacagaaagccatgtcgatagtcacttgttgacgaagaaacaatcaactgcctaacacataacttcgaccatgagtaaatgg

SEQ ID NO: 73496 - DNA, 493 bp, Zea Mays
gatttaccatggattgtgcggcggcgatctccggccacgaatgatggcagaaggcgtggtacgacgagcaattcagagccgccccgcccacgatccggccgcggaaggttaccaccgctagcagcttgcaccgaagaaccccactacggcgacccgacagcgcagaccgctcgatcccgttgtggcgacgcacacccacctccctctaccgagctccgaggtgtccaatgtggcggtcactagaaaggcatatggaggaaggggggtcgtgggcgaggtccgcctttatcaaccgagcccacggattcggagatgtggctcagcatgcgcgaagaaagggggagagtccgcgcatggcgctcgggttgttgtcgtggcggcggaatgacacgtgggccctgttacccagtgaaacgagtgcgaagattcaggcagaggctgacccgggtggcccacagcgtagtctgaccgtgcggaagcgcagcgctcgcgg

SEQ ID NO: 73497 - DNA, 695 bp, Zea Mays
ccctcacctacaaacgccgagaaaatccaaattaattggaaaacaagtatagtgtacatctactagaagacaaatgtaattttagttctcaattaaaataaatgtttctagtgtacgaatttgcgcccatttgagaggtctattctattaaaattccaaagcaaagtgactgttagtttttaatcccacattgctagttcaaggtgtataaattaacttatatagctacgctcattcccatgtctaaatatataaagtaataggagagagaatatgactagtctcacacgcacgcgtgcgtgtgtccgcgtatttttcacgtgtaatgccgtatgacttgtgatgtcgtgtcatattattttggctatttgtatctttcattgatttaaatttttaacagttgagatttaatgcagattttattgtcataatcatggttaattggccagttgccaattaatgcagatttcactttcaccgatccttccggaagtggtaattcaacatttgttttttcagccattcaatcttcagattggtgggtcgatatgggtgccaatgttcatgtgtgttttgacttgtctatgttttcttcttaccaggggatgcgatgttcctccatctttatgggaaacggatcagccgcttctgttcttggtgttggtatggtcgatctgaagctcacttcaggaaag

SEQ ID NO: 73498 - DNA, 505 bp, Zea Mays
agatctgactagcttattactaacaatgaaggacaagaataccgaagaagaggcgaggaggagtccttcaaaggtggttgtagaggagatgaccaaaacatgtgatgagaaggctcctcaaaagaaacaacacattatggcagtgatgaaagctgtctgcaaaactcctccaacagaaacaaggaagaagattgtgactgtaaagaaaatccttgagttagataaaactcagggaactggaaactattgtggtgcctatgggactaccatggctgatatcgataggattattacagaggcatcatcaaagaaagaggttgatgttgcaacctttgctaaggtttcgaagcaaaaagatactacatccaaggctttggctttggaagcgaagaagactagggagtcttctcataaagagaagaccttcgatttgaggcatttgggtagtcctgagttaagtgaagaagacctatttgagttgagggagtttaccatagcaggcggg

SEQ ID NO: 73499 - DNA, 735 bp, Zea Mays
ggaacccattggcacagcaatgcctttgcgaggaatcatgatctaggtttttctttctttttggtgagcgttcaactaatatattctggtaaaaagaaattctagagagaactaatacacacaaaaaatacatttctttcacaccaataagtgagcctaatgattgtagccgtcgtctccagaatcgtcgactaaaaaagcaccagacatttatgtttgaatctaaccagaaaacgaactggcagccatttattgtttttctttttttttttggtccaactgagtaagtatgctgtacttggcaatgatgaggtattggtactagaaagtagaaatacggatacggcgtaccctacgtgtggtcggccgagcatccagcccggaccctttcaggaggaaagttgcaggctatcagcttgacagctgcaagccaacccactattcaacactgctccacatggcgcttgccaagaccacgctttctctcaaatcaaaactccaaaagagatcctccatgttcttctttcctgtgacgagaggaggccagggatacccccatgctttgccgaacataagaaaatggaaaagctggccaaagctacaaaagctagggcttgtcctatcccactaccaaccacttactacctgggtctgacgtgtcatggcctggatatgcacgccttttgtgttctctatgactattctaataaaccaataatccacccccaacccaac

SEQ ID NO: 73500 - DNA, 530 bp, Zea Mays
gcggttgatcccaggaatgttgcggctgtggtggagtggaagagaccttatagtgtctctgaaatccgaagtttcttggggctcgctggatattatcggcgctttgtaccaaatttttccagcattgctaagcctttgactagactcttggagaagggtattcccttcgtctggtccggcgattgtgagggcagttatcagtcattgaagagcaagttggtggacgcccctatcctagcgttgcctgagagcggtaagcgtatcacaatttatacagatgcttcgcgtattggtcttggttgtgtgttgatgcaggaaggcagagtgattgcttatggctcaaggcagttgaggaggcatgaggggaattacccaactcatgatctttgaattggccgcggtggttttgctctaaagtcgtggaggcattacctttatggcgaggcttgtgacatttacaccgaccataaaagtctcaagtatatttttactcagaaggagctgaatttgaggcagcgtcggtggctgga

SEQ ID NO: 73501 - DNA, 548 bp, Zea Mays
gtagtattagatttccctgatgtgtttcccaaggagttaccaggtatgccacctgaaaggaaggttgaatttgccatagagcttattccagccaccgcccctatttccaagagagcctatcgagtgtccggaccagagttggtggaactcaaaggcagattgatgagttgtcggagaaaggttacatcagaccgagttcctcgccttgggcagccccagtgctatttgtggagaagaaggatggaacaaagaggatgtgcattgattacatatctttgaatgaagttactatcaagaacaagtaccccctgcccagaattgaagatttattcgatcagttgagaggagccagtgtgttctcgaagatagatctgaggtcaggctaccatcagctcagaatccaaccctcagatataccgaagacagccttcatcactaagtatggactgtatgagttcacggtcatgtcattcggtttgacgaatgcgccagcctacttcatgtacttgatgaatagtgtgttcatggactacctcgacaagttcatg

SEQ ID NO: 73502 - DNA, 1375 bp, Zea Mays
taaaacatgggtcacacggacattcactttagctgtccccgacgtagacgagcctacttcgaaggacctcatcgacggagaccgcgtcttcgccctacaggccctaaacaaataccaagctcaaacaaaagcatgctgcgaccacacagtcatcccgagtgaattcaacgaaggagacctcgtactcgtccggacagctcggacagagtcccggggcaggctagagccaaagtgggagggccctttcatcgtcaagacgaaggcgtcccccagcgcgtacaggctagcaacgccatccggtgaggacttagagcattcttggaacattgacaatctccgcaaattttttgtttgactcctcagggccagctcgcccttgtaattagcaaaatagctttattccggcccgcactcttttcctcccgggggtgaggtttttaatgaggcggagccatgtaatatacacgcaaaaaatcccccgcaaaaattacaacgtcgaaaaagaccgcatcgacggtcttcggcattcgaccacaacgaagtcatcgcgagggggcagcgctggctaccctcgcgtgcgacactccgcgcaaaagtcgcctaagggtgcaaccggactagcacaagaagtgcgcaaaatcgaagtcttccccaaaagactatccgtgtaaaagtcgcccaagggtgcagccggactagcacaacaagtgcgcaaaatcgaagtcttccccaaaagactatccatgcaaaagtcgcccaagggtgcagccggactagcacaactagtgcgcaaaatcgaagtcttctccaaaagactatccatgcaaaagtcgcctaagggtgcagccggactagcacaacaagtgcgcaaaatcgaagtctccctcaaaagactatccgtgcaaaaaccgactacaggtgcagccggaccaacataataaacgtgctagatcaagtgcacaagtcccccacgggcacggccggatcagcgaatgcacacagcctcatcatacaaatcatcataccaattaaatttacacacatacagcgagggcatcacaccttacattggttcaaccttcgggatgatacccatctccctgtagttaaacaacattatcctcagctcctcaccctcaaagagacttcacaattccccctcatctacactcgccccaactggcgaggacaacaattcccgcttgccagccctatccacacgaagacgcccacactccacctcactcactctacgcttcgccaccgcccttcgccgcctgcgcccagcactcggaccaggaaaaacttcagcatccatcacacgcggagaagcctccgccgcagccacatccaaggctgcaaaataatccaagtc

SEQ ID NO: 73503 - DNA, 451 bp, Zea Mays
cacagatggaggacggcaatggcgcagcgagagctttgactcacgtccattagatagcgtgaaactggttgtggcggagcgactagaacgcgccgggatcgaggcatacacgagcagagcagtgaccacaactagcaatggggagcggcatggtgatcgacagggaaccccagcctaggcgttgcggttgcagggagccggagatcagggaagggggcgagcacgaggaaggtgtcatggggaagaggaaagcgcgctggcgagctagagaatcgcgggggccctgggcttgtgctcgtgcgcgatcctggcgttggaggtgggaaagctcttcgacgtcttgcgggagacgttggccggcacggaggaagggagcttggtgaccggcctggatctgagggagctcgtagggggagccggctagagaccgacgcagggagcgcggggattc

SEQ ID NO: 73504 - DNA, 624 bp, Zea Mays
gagatttaaggccctagggtaagtaatggaaaaggaaacgcgtcacaactttatttcctaatttatcttacagagcaaggggtgggtggagtttgttctaactttacaatagattacataaactctaaagattacaggaggctaagaacttatgaaaatgcttctccaagactccagtctcccaggtagcatcttcttcggtgtgttggttccactgtaccttataaaacttgagagtcctttttcgagtaattctgtccttttgatccagaactcgaatgggatattctgaataagtcaaatctggttccaaagtaacatccaccacatctatagttcgatcaggaatccaaagacatttctttaactaagatacatggaacacattatgcaccacagacaatgattctggtaattgaagtctgtacgccacttgcccacatcgctcaagaatagggaacaaaccaatatatcggggtgccaactttcctttaaccccgaatcgattaacacccttcattgctgatacttttaggtatacatggtcaccgtcttgaaaaaccaatggtcgacgtcgtttatccgcataatttttctgccgagcttgagcctctctcaagttat

SEQ ID NO: 73505 - DNA, 622 bp, Zea Mays
ggctgaggcaataaacaccgcttgtcattcatcaaatagactatattgtcacaagcttttgaagaaagctccctatgaattgctcattgatattaagccaaatatctcatattttagggtattcggttgcaaatgttatattttgagaaagtgaagccggctttctaaatttgagaagaaatgtgatgaagattttcttcttggatattcatcaaatagtaaggcttatagagtcttcaacaaaactcatggtattattgaagaagcatatgatgttgagtttgatgaaacaaatgggtctcaaggtgaaagtgacaatcttgatgatgttggtggaagttaattgaaaaatgtaatgaaaacaatggccattggtgaaataaagccaaatgaagatgatgatgaaaatagtgtgcttgtcattccttcatcttcaactctaaatgaaaaagatcaccaaagccaacaaaatgatgaaattatggatactcatgatcaaggtacttcaagacattcggttcctcctaatgcttcaactagcaattatcaaacggtatcaagaattcattattctattgtgaaggatcatccggttgatcaaattgtaggtgatattagtaag

SEQ ID NO: 73506 - DNA, 826 bp, Zea Mays
gctttagcgaaggagatgctggggagaggctcgacaccgatgatggctacagcacaggcacgggacggtggaaactcacgtgcgggcgagcggcgacgcatgcaatgagttgcgggctgcggcgaagcagcgagcaggaggtctagagcagtggtaggaaggtgggaaccggttcacgagagcgcggcaatgggatttataggcaaagataggaaggggagaggacaccgggcgccggtgggagagaagacaaggggctggccattaacggctaaaactagaaacgcttgacttagtggagaaggaatgaattgagcagtttgcggcgcggtaatggaggtagaagaggggccgattgtgctccactgcggagaccagtggtgcgaggcgaggacacgcagcaacttgcaagcagctcaagcggcatgggcggcggcggtgtcaacaactgcactaatgggttgcacaaggaggggttggaagctgatgcagagcagatcgcagggaacaagattgatgaagctgaagctggagcacatgacaacaagaagctgaggaggggtgatcggacaaggaagctaaatcccaagtactatggcgccaactggctgtaatagggctcacttagttttgattctcagtataaagagatacacttgctctattgtaaagtgacttttggctattggcaaacttgaacagaaagaaatagaaaatcacaaacctgctgccgagagaaatacagagagtgcttaacatttgtcccaagtatttttggatgatgtgcttgtctatagttcaagcctggaacttcacttgcagcatt

SEQ ID NO: 73507 - DNA, 602 bp, Zea Mays
cttagacagaaaaggtagataaagtgtggcaaattagtcagcaaaccagatagacccttactctttgctgcccaaagcgcatcatcgatcgatccaactatatatgaccactaacaacagtgtatggcttaattaggtcctagaagtcaaataaaggatcaactaacacaattattttcaatccaagttatcattgcctctccaccaccaccaccattttaccttttgatttatagaaagatggctctactcgatctagctcaacataacaaatagtcctgaatgatttacttttctttatttgcttatataattccaaaaggtgggggcctttcttatcttctccttagtaaagaagaaatttggacttgctcgtgcttggcttgctataaagagaatctctactaagtggcccgtcgctagtggtttaaacactgagtgagctgtgaccctttagctgacaccgttttttttttaattcctgaacaacgactcgtgagtcgtgactcatcacttgcgctggaaacaaagccggacggaccgacctttagtggtttttctaaagaaaggctaaagatatcataaataaagacaaaataaag

SEQ ID NO: 73508 - DNA, 466 bp, Zea Mays
gctaactgcaaacggtcaccaccaggtcctcgaccactattctctgagtctatgccattttacagaaaaacccctcggctttggcttatttgcgcgcgacatccgtctcctacctcggaacagagagagggagagacatgagcgcggctcgggtgacggcttaccagcggtgaagatgaactaggcgagggttagtgaggaacattggtagacgacgagctcgctggtgccctcagctttacgaacggtggacgacgatgctcggtccacgcacgtcgatgggaaccgatgaacggcagcgtcgatgggggtgtgctcgggtcttctccaagcttgatcaaggctctagatttttggctgaacggtgaagtgagggacggttcttggtttgggacaaatggcgacagtgggagcgcggccacgagctcagcttgcgttggccacggcggtttggtgtggtgatggc

SEQ ID NO: 73509 - DNA, 357 bp, Zea Mays
tggcagcttttttaggcagaatctgttctatagcttcttcttccgctgccttttctccggtttccaaggatttctccttggcgggctctgaaggcccagcttcggcgtcggcctggctcgttgtagcttcagcttcagtcagctttgtctcggtttcaatctgcgctttcgaagccttggcaattttccctggagtagagcttgaagcttttattgtctccagcacatctagtacactagccatcctttttctcttgggattgttgttagacctttttgtgtcttcggcacctccactcctaccgaagggcttaaaacttctaatgtttttgccccttcgattctcgattcttcaat

SEQ ID NO: 73510 - DNA, 442 bp, Zea Mays
tacttgcttagtgtgtcatccagacgatgatcttcgaggtgcagaggccttctcagagcactattctattactgagagggatactgccgaggcagccatgcaagatgcagcatgacgggcactttcttagtattgctcgttgtttagcggggtagctgatggcctcgacttgaagtactaccctcgatgttcgaccggcaatgctggaggtgtgattgtctcgccagttggtgagggcaatcccaagctgaatagcatggtcaatctggttgtcgtgctcaacacagagttggaccacgcccttgacgagctagtcaaggttcgggcggaggttgcggaattgcgtgctgagtgcacagcacaccactatctggatggtggttctcccgcccctgtcgggattcagcacccttaccattcaccgccccatggtcgcttcgac

SEQ ID NO: 73511 - DNA, 542 bp, Zea Mays
ctatccttcggcttaaaaatgatgccgaattcacctgggggcagaacaacaggaaacgtttgatctcatcaaaaagtatttgtcttcggcccctatgttagaagcaccacaggtagaagtaccgtttagattatacattgcagctaaagataaggttattggagttgttctgacgcaagaaaccggaggaaaggagcatgtggtaacctacataagtcggaggttggtggatgctaaaacaaggtacacttttatcgagaaattatgtttatgcctattttatacatgcaccaagtatagatgttatttactatctagtcattgcaccgttgctagtcaaaccgatgtgatcaaatacatgttgcaaaacccgattatgagtggtagggttggtaagtgggcttatgcactcatagaatatgacttggcctatgaaccattgaaatctatgaaaggccaggtcgtagcagattttattgtagaacatcggattgatgatactcataaactagacatatcattactcattgttactccctgga

SEQ ID NO: 73512 - DNA, 512 bp, Zea Mays
tgaagaatcggtaccccatgccagtatttgatgagattgttgatgagttggttggtgcatcggtattctctaaacttgatcaccgctcgggttaccatcagatcagactgagggaaggagatgaacccaaaactgcattccaaacccaccatgggcattttgaatatagggtcatgccctttgggttgacgggggccccagctacctttcaggattttatgaaccagctattagcaccattccttcagaagtgggtggtggtatttttagatgatgtgttggtgtatagtgctacgatggaggaacatgtagggcatttgaaacaagtgttagacctgatcagtcagcaacaactttacttgagggaatccaaatgtgtgttcggtcagaacaggttggaatttctgggtcatattgtaagtgcagcaggtatcactacagacccaaacaaaatcaaggtgatcagggaatggccacaaccggcttgtgtgaaggatgtccgcagctttttg

SEQ ID NO: 73513 - DNA, 1062 bp, Zea Mays
ggtgatacttgttggcttccctagagggatccctactccatctagatcaatgtctaggtatcgttgtagtggggctcattgagtcccctcaatatccttagaatggctatcaaaatgtgatgggagtaggggaaagttcaccatgcggtactagattcgtgtaggtggtactaccgcccttcccttgagaaaccccaactctacctgagtcgaatcatccaggtacttctagcattatggctagcgcctaatacccatcttcccgagtaagccataagccctctcttcttggccattgctttaggaatgagcgtataaagaaaagttcactatagccccgctctctaatcagaattccatgaatgcttgagaggtaaactgactcccattgtcggtaataatggatctcaagacgccgaatcgattaaagatgtcctacatgaattccatagctctgcacgtcgtagtcttcgccataggtttttcttcaattcagttggtgaatttgttgatggccacaaaaagaaaagctaccccacctttggccagttaaaaggtcctatgatatccaaacaccaagtggagaacgaccaggtgactaggatggtctggagctatgcagcatgaatatggccttgatgtgtaaaaaactgacagccctcacacgtttgtacgagtcgctaagcatcggttacaacagtcagccaaaagatgccttatcggtaggcttttccaactagtgtcttggctcctacatgatttccacacatgcctaagtggatgtcgccaagcaatgtccttccttatcgatggggacacacctcatcaagattcctaaagcattttttggtataactcgtcgttggttagcacataagccttatactttatttgtagctagatagcttgtgttttgtcttcgagaagaagtctatctagtacatacctaatgaacggggcccaataattcgattctacaaccattaccttggcttctacctcatcaaggaactctaagcctaactctttaaccaactcgaccagggcaactttgcccctttg

SEQ ID NO: 73514 - DNA, 843 bp, Zea Mays
aagaaaaagattaaaatagggaaaaccgcacttgggccgggaaggccatttcggcccattcttctactgatcacgcgcagcccagcttgccacagctcccacgcgccgactggtgggccagctttgccagtggctcacgcagtcagccgtttcctccgcgcgcgaactctgcgatagcgggcccacggggcagtcgctcaacggcgcgcgactccatcttcatcgcgcagcgacgacctccgtgcacgccgcgcgccgccgtaggcttcgggattcagttggggtccgctttgacccgggtataagcctcctctaggcgccctgcggtcctcccatctccttcctacacagaggcacggcaccgcgcaggcacaaaccgagtgaggagagagccgccgccgtggattgccgccagtagggcaattcgagccctaatcttaccacccgtggctagggctgctcacggggaagctgtacgcgggcataattggagtatggtgccctaggatcttggcaattccctcgccgaagctgggagcgccaccgtcgtccgcctccttccgtgggcagaccacaccataacgcttccaccggtgagttcttaaccattctatcctcctcgttctactcgacgtgttgaaccggtctcccatggggtttggtctccccggcgtctgtcacgtgagtcatcggagggcgccgccgcgcggggtactcgcgccgccgtgacctgtctggatgaagacgaagcgctcgggtccgttggatttgggcggaacggcgtagattagatgctgtgcataccgtttcggccgagcgcgcgcgaccgtagatccgggatct

SEQ ID NO: 73515 - DNA, 405 bp, Zea Mays
agcatatatctaccgaaaatacaatttagttcatcaaacatacagcacgacaaaaacagcgcgtgcagcccaaaacagcaatttttaaaattcagcttctatttacttcaaaaattgccgcgttctagggactcgacttattctaacttatagcaaggcacacttaagcatagtcacacaatagacgacgtgacggctatgtagtcatgccatcacttcaccccacaatcccaagtaacaaaataactctaaccgaacttggcatttagccgatcgattcctaacccatttttcatactaccactacacgacatgcctaatacgttaaatgaatcgttcacaattcacctacatctttaccaaaacattccgacctcgtttgaaactcaacctaagcttcactgc

SEQ ID NO: 73516 - DNA, 605 bp, Zea Mays
ccaactcgggcgcctgactctgcttgcaccacaaccgaagaaaccacaacatcgtgagcgccacacctataagtacccctgcgccctcagtctctctcggtgcacccattcgagccttcttcgctggagctcgcgaccgccggagtatgccccacccgcctcaccagccgcaggaccgaccaccgtggcccggccaacaccatcttccaccacaacaccaccaggaggttccctagcccctagtaaacctcctcaaccaccccatttcgccagtgcgccacgccaaagtagcgccaccgctcgccggatctcaaccaagcgctggtgcgcgtggaccctttcccacagccaatcttagccaaattcctttgaggaattatcttcccaccgcctgaggaacttgtccgccaaaggaatcgaggcctgccgacgccgactagccgaagcacctcaaccgccaaactccgaccgccgggggaggtagactagacgactccgaccatagctggtcgtcatctgaccgtcgacgtgttcgccagagctagatcatcgccggtaagccccgccacctcgttttccgtcgctggtaccattccagtgagttt

SEQ ID NO: 73517 - DNA, 292 bp, Zea Mays
cgcgcattcgcgctatctgccaacaatggtgctccccacccacaattcgacatctaacatcgcacaactcactattagacctctatcatcgatcaagcctacgttgtcgctcatcccacccacacccaccgttggtccttcctcgtcgaccacgaccatccgcgtactgccaacaatctttaatggtggcgcaagtttggtcactgaatagacgccaaagccgcagaaaaagaaaatacacctgtgaaacatatcaatgttgggcctaccctaatctagtttaaaatatttt

SEQ ID NO: 73518 - DNA, 818 bp, Zea Mays
gctctcaccacgaggacgtagaggaagatgcatgtacgtcgtgtcgtgcagctatagacgataagtatggctaagtgaccacaaaactctctgagcagcgttactgaccgaagcagcgtaggtggacaacggcgtcaaagactcgtgggatgagagagtcctgaacctctatctccttcacccatcactctgatatgtagacggttgatataataacaagcctaagggggcttagaaacccaccgtgtgtcataaagagaacggacataggttcccagctcgtgaagcacattctgtagtaagtttgggaagtggcccgtctcaaacattgaagtgtagtgctctgcgataggccacatcccaacaaaaccatcctcctggtcaggctcattgttgttgttattgttgttgttgttggcatcatcattgttgttgtcctagttatcctcttcatcatcatcattgcctccatcatcaccagaatcatcaggatcatcacctgcaggagtaggggcttgggctactagcacaggtggtgtcgaagaagaagctccagtagcaaaggcatgaggtgttggtggctgagtgggcgtcgccagaatctcctcagaactgttctccaaaatcacaccatttcctccaacaaggtgatacaactccttaggctcttcttccaccacaactgcgtagaaaggagcctactaagatggagggacacaggtggtgttcacatgggtggtctggagagtgcgcaccatctaaaacaagtaagtgttaccttagttgaattaaaagaggcaagattaataaaataaaat

SEQ ID NO: 73519 - DNA, 1054 bp, Zea Mays
ccattattaagtaaccaagctttggaaacaagagcaggaaagagaagaatgttaaggactttagttgtagatcttgtagagagccaagtgaaatacatggcctaagttacaaaaaggacaaggccctgaaagatattaaattcaataatgagaaaattatgaaatcaaaagtagaagctaggcagggtttaaagtatgaagcggaagctacacaacttcgaccagaagtcaaaaaattctaggaagggtttaaagtggaaaaaggtaagagagatactacttgatgaaaaggataaattatagaagacaataaaagagttttgaggtagtttttattattgctttggcatctcatcacgtattgtcgacgactaaaggaaatatttacatctgtcagtgcacacttgaatgagacaaaatttgtgcatggagatgctgctggagcactggggggattgaagatgagattagggcctttgacaaaatactggatactcgaggcaattattgtgctatgatcggatcacgaggcacaacttcaattcttgaaaaagtcaggtgctttcaggtgaaagtcattgcaaatcgaaacttttctataacgatggatgttgtgagagggtcattaggtgatggtttcaacgtggttaaacattccttcacacttatctagaataagggaggaagggagttggctagggatgaagctaaagctaacatgcaaaaggtttgttattagaccatatatttttttgacctgcaaggtgtttcattcgtgtttaactacattttccttgtaggtcgaagtcattgccaagaaggccaagactgttatagaatctcggaaagcaccagaagatgtgacacccttgagcaattgaaacattgtagcaaacgctaaaggtgacccatgctattgtggaagatgaggacggtcctcataacattgaagacgtagtagggagatgtgaatgtaaatttgtaaagaagtaagtggtcaagttatgaacgtagatccttgaagatatatgggatgcaacaaatattaatgtat

SEQ ID NO: 73520 - DNA, 520 bp, Zea Mays
gaggaaagcataagggttgcggggtagggctcgtgcgctaggcgtggtagggccaaggggcgcgcagggaaggggcgtgagggagctcggctatggcatggaggttactatgcatgcgagaggaaaaagaaaggtccagggagagagaaaagagagagaagagaaaaattggaggaatttggggtacgggaaaatccgaccccaagattgtgattagagtgtcgttcttatgatccggtgatccagcgagggagggacatgaattgagtcaccaattctacgctaccagacgagtagagacgatgcaccgatgaaatagagaaggccaagggagttttctcagtgagggaaaaggtaggagggttggtgaagcatggtcggtggtgatcgtcattgctggggacacctcctcgcctcgggttctactcgcctggggaagggaaatggcacaggtgtgagaaaatgtgtgtgaataaggaggggaaaagcggagatcgagcaacagacggggacacgcgat

SEQ ID NO: 73521 - DNA, 984 bp, Zea Mays
acaaacttgtagctggttctttggacgacaatattgacgcagacaagtgatcgagttgttacatgaaaagtagagaatgaagctctccaaaacgcactgtcagagtgtctgatgaagatcgtcgtgctacagtgaccataaagatctcccgtgccgtgagctcgacgccggtgatctgccgccacaattcgtgtccgcctgggagattcatgccgcggggagagtagataacgtcggggtggggtgaaaatatcaagtgtggggtgaatctggtagctgaccggaccggccgtcgtgtcccaccgcagtcaatcgcgctggcatcaccggagttcactgttatctggctaggctacgtgcctcaaagccttaccacatcgtagtagacctccttaggtagcttgttcatcacatgagacactaccccggtaaaagccacggtagcgcttgcgccagtgacttcccctctctccggccgccagcatgccttctcgaaattagacgccaccaccgtaggactctataaattgcagccatagtgagttccgctaggtatttacgcatccaacacaccagcccttgcctcggatcatccaccagagtctcccaatttcgtgtttcccccaaatacgttttccatgccaccgtgaacacttcatcatggccaaccctctgcaggtcagttcaagcttccttgattggtgttctagcctccctcaagccccgtgttgctcgtagacccatttgattaagctagaccgcaccaaatcgtcgtgaacacctcggattatcttggatttttgccgtcgtcgtgggcagagagattttggtcgggattcatgcaattagttgagggattagggattatctcagatttttgtcgtcgtcgtgggcagagagattttggtcgggattcatgcaattagttgagggattagggtcgccaggggtagaatttggtgccgaccgagtaagaagcgtagc

SEQ ID NO: 73522 - DNA, 1023 bp, Zea Mays
ctcctttggaaacgcgcctttgatttctactagtgctaaaaaatctgcgttatttatagaactgccattctgctggttatttaagtttttgtccaccattccttgttacctttaccttgttgtgcttcgataggacacgtcttagccagcaattgtgacttgtgctttggacacttattgaacttcgctaatctgcactcgatttttgctaatccttgatattaatttttggcctcccaagctccacatattttcttctgatcaatacagctgtgaccttgcaatcgcggtttcactacctcttggtaagtatcacgaaccagcctccgattgtaccatcctttgcttgtattttgttagacacttgtaagagcttggtaagatacattagagcgtgttcatgtgttccacttgagaggagcgtgtagtgagattattagggataaccttcaccgtttgtttcctgtttttgtgtttcaatggcaggcgacgtcgaagaagcaaggatccctacagacttcgatgaatgtgttagccaccaagatcttgaggcaaacaacaagctcctgaaggagcaaatgcaggagacggtccacaagtcagtgcatgatgccttcattgacatgaaccttggcaagacttacgagaggctggatcgacgattgtcccagatcgtcgatagacttgctgtgttggagacacaacaacaagcaccgccaccaccacctcctcatccacgtcttcccgatgatgtggtgtttgatgaagaaggtaattatgatgaagcggccaccagagatttgcgcctacgttgccgtcttcatcaaaacatagaaggtacgccacaccgccagcaaggtaataacaatcgtgctcctgacgacccttatgctaagattaaattttctataccatatttttcgggtcattatgatgctgagggatatcttgattgggagatgatgatagaacaaaaatttgctgcccaccttgtacctgaacgacatcaagttagacaagcca

SEQ ID NO: 73523 - DNA, 354 bp, Zea Mays
ggcctgagtgctctagatgcttaggcaataactcggttgtcttgcatcaaaacacaacctagtccagtgcctgaagcatcacaatacacatcaaatgatttggtgttgtcaggctgcgctagcacgggtgctgtcgtcagatgccgcctcagggtgtgaaaggcatcttcgcatttctgaccccaatcaaacttcactcctttcttcaacaactcagtcattgatttatcaaccctggagaaatccggaatgaatcgtcgatagtatcctgccaaacccaaaaaactctgaatctgtcgaacggtggtaggaggcttccaatccatcacttcttgtactttctcagggtcaacg

SEQ ID NO: 73524 - DNA, 716 bp, Zea Mays
gtcgccggaaccgtgtgggcgaacaagccgtcgtggaggagagagatgcaagaagagagaaaatagagcagggcttcggctacgcgattgctggtaagggcacctctagtgaactcatatcttcttccacttcgcgtaacacctttcggatttagggatgaatgcctgttgggcgggatggctgttcaccggcgtgtttgccgccggtcaggccaggactccgtcgtgcctagcgttaggtagaagaagggcgctcagccgtcgatcggatacttaacgaccaagattctgagaaacgtaccgctttgatggggtgggatccagaccgtagatctcgcggttggcggttgtgattataaacgttatacccttcgtgtgcggaccgtcgatcctggatcgttcggtcgtgcggctggcagcgttgtttaaaatctccaccatcgatcgcccatctcacgatcaccagtgagtaccggttcgcaagggtactcgatctaatctgggtcgtgcgagtttgatcggacggttcaggatgcttagtaccccttcgccgtgcacttctttcaaaagagtccctgcacttttgttaaaccaacccgccatcctcccaagtcaaaaccaatttacagccgagccctggatctttataaactagccactgcgctctgtagaatttgtaccagctgtccttagcccttgttttaagtaaatagaat

SEQ ID NO: 73525 - DNA, 682 bp, Zea Mays
taaaatttgttgcatacctcaattaactagagcacatcacacaacgagctcaatgagcagagcagcacatagttgagaagagatagagtatcacgcagctgaacaaagctaggtagagcagttgcagttgcaacgtgcgcttagggacgtggcgacatgcccgccctctcaccgtaggccacgcaatgatgctcgccaaagcaacggtaggatcaagtggtgtagaaatgccagacgctccgtggctgtgcaggcttagggaagacatgcgaggaagaggagcgtggggtggagtgttaggaaacgtgctaggcacatctaccacgttaggcgggaaacttgcaagtaagagatcatggatcgttaccactaaacgcgcagcgcagcggaagatgagttgaagcggcgatccaacgtatgcgtgtgtcgatggagaggaagtaggtgatcacgatcgtctcctcctccttcacagtctattagtgcagtagtcgcagctgcgcctccatgtagtccacatgtacggggaaggaacaccttgcgttagtgtgctagcaccgcatgcgtagcgagggtctcacgactaggtatgaggaaggcgacggctagggtttgcacgtgtggtggagcactctaaccttagcccattcccatatatttatagagcatgttaatgggttac

SEQ ID NO: 73526 - DNA, 363 bp, Zea Mays
aaatgatcctcaggggcaaagtgtcaaatgttggtgctccagtggcgtactcggcctagaacctgcctcctcccaaagccttcgccctttttgtgtcgaatccacccattactgatggcagtttgggccttagagtgcgaccctctgctgaagaagttggtgctttggttgcctcgcttggggagattcctgatgacgaacggcaggtccattttgaggtgcccctgaaccctagtgatgcagagataagcgctatgcttgatttgctagctgaggattcatccgacgctgctcctgctgggacgttggtagtggcacccctcccagaggctgatacgactttggatgttcagaagcctgtca

SEQ ID NO: 73527 - DNA, 577 bp, Zea Mays
gttgactgaagcgcgacgagacgcgcaacacaaaatcataaactaattttgactacattgctacgctaataaccaacggacagactgacaattaagtaaatagaacaaacatatgtcatgacaaaataacatgtttaacgtgtatacaccattattatgaagttaacgccacacaaatagatcaaaacagatacaaaatgcgaaagctaatgcttagttaataatttcagatttcatgcgatggcacaacgcggaggcgaggcgcgggagctggtagacgcctaggggtagatgacgatgggtagacaatgttctcaccttggcgtgacatgggctctacgcaggtaactttgggcccgacgatgtcgatgggcgcgacggtgatgatgaggcgtgacttcctgctcgacaatgggcctggggtaggcgaggactctggcgtgcgacggcgtcgaggcttcggctaggcgatggtgaggcatgcaggctacgcgacggcggctacgggatgcgctggacctcgcaccggggacagaccgcgcaccggggacgtgagccattgggctgatcgcgacga

SEQ ID NO: 73528 - DNA, 637 bp, Zea Mays
ggagccattgactcgcggtggagccacccctcgtcgtggacagtgcgactgcgcgcccgattctcggtaatagttgcttgcccgaactcgtgttcatcaccgcatggtgtaggatccactcgattgaagttttaggcatcagagctatggtgtagcctctctggcaatggcgccgccgcgcgccgtggctgatccgccgccttctggtgtatcgcgagggaaggatagatggtggccgttgatttgatcaccggtggctgagattaggtttgggagggttggatctcggctgttgatccggtaaccgatggtgaagattagacgacagtaacgtttcggcctacgagagtcgtgagccattgatcgtgcatcggacgtccctgattagaagttaggataacgtttcacgcgcgggatcggatccgttagacttagatcgtacggtcgagggtgagcgtggaatagttgcgcgcctagatctaatctggcgcgtccgttttggattgaacggctgaaattagaggataccccttcagccctggagttttattaaagagcctctgaaattttagaatatcaacccgccatcctttggcgctgtgtcctgtgtctgcggattattcccccgaagcccctg

SEQ ID NO: 73529 - DNA, 335 bp, Zea Mays
agggacttattctgtttcatcctcttatgtgtggatatcgtaaaatcattattgtggttgtggtggtagtgttgatcaacaacgaatttaaagagaacgagtgaacatactgctgctgctagtacgcgaggacgtacgactactttcactgcattttctcgttcttttttcactatgttgtgtgtctagtggtaacaaccttagtttttttactcacgtgtcattttggttgaacatggtaaatatactagtgggtagtgtacctatttcttaacaaagtctgaccttattataacgaaaacttgttaaactcaccagttccacgtgtatcaatt

SEQ ID NO: 73530 - DNA, 411 bp, Zea Mays
ttgaaaaatgtcggttccacgttttcaagactaaccaagaccatcctagagaaacaaatgggccgcaatattttcacatacgtcgattaaatagtcgtcgcaagaagaaacaaagaagatcatcggtcagacctcacagaaacgttcgccaacatgcgcgaagccagacttcacctaaaccttgaaaaatgcatattcagcgtccgacaaagcaaaatactaggttatttagtatctcatagaggcataaaagcgaactcagccaagatacaagctttactggacatgacaccaccacaatcatcctgagatgtccaaaggctaacaagaagactcaccacattgaacagattcatctcgcgatcaactgagcggagtctccccttcctcaaaacgctgcatggagcaaaa

SEQ ID NO: 73531 - DNA, 722 bp, Zea Mays
gcctaggctcctggtcggcggacgccgcctcaggctgaacaaccataactcagtttgccgtgcgtgaggaagtcggttggtggacgcatctggcacaagggcaatcgggccgccaataccgagatgaaatggtgcggctgctggggcgaatccctctgcgcaggcgttcgaggaaattgatgtcgccgtgaaacatctcctgggctcatagcacctgagcgtgaccttgccgaaggtgtttggtggccggggaccttgggatccttcgtcggagtttctgaatcgctgcggaacttcctctgtcgtgagctgagcacaagatcacacaatcgtgggtaatggccacctgaacctttttcgctttcgtcctttctgcgtataacttgtttggatccgagtaatgtggccacacaatcgcgggtaatggccacctgaacctttttcgctttcgtcctttctgcgtataactcgtttggatccgagtaatgtggctagggttcgaattttggggtgtctcgccatggcgcttccatggagggctggccgccgccgtcctggcctggggaatagaatagtcgccatagttcgtagaatcgtaggcggttgtcctcggtcatgctcgctgttgtccatattctgcttggcactgtgcggttgttggaatggggcactcgattatggtttgggcgggccgcccacaacagcactgtacatcactttcg

SEQ ID NO: 73532 - DNA, 598 bp, Zea Mays
gccctgtgggtggtatgtactggtaagaaatgagtcgtcttggttaacctgtccacaataacccatatggaatcatggtgttgggaggtattaggtaatcccataataaaatacatgttgatatcttcccatttctaggatggtatagggagtggctgcaaggtgcctacttcatcctagtccaccaatatagggatcgaaggtcatgatacatcttgttgcttctagggtgcatggaaaatttggagagatgagcctcgtccaagattctcttcctgagctcctgatccttagtaacaacaagtcggtcctcaaaccataatatgcccttgctgtcctagcaaaaacacttgtacttttccactttttgggtgagcatatccttgaagatttggactcccttatcaccaagttgtgtcatgataatctgatcttgcaaggttggctcaactgagatataatccagagttcccggagaaactacttccatgttcaacttgctcaactcatcgcatagagcagcgataaaagaatcaatggtcagacaattgcattgggatttgtgactcaatgcatctgctaccacatttgttttctc

SEQ ID NO: 73533 - DNA, 452 bp, Zea Mays
ggggaacagaggatcttcctaccagaccactcacttgcaatgaaaatgctttccaggaaaaccattgctccaaagatgaaaataaacatcaaaagaatagtcaataaagtgtttgagagcataaactatcatgccaaccttcttattagccctagagaatttgaaatgatttcgactcaagaaagtcacatgaaaactaggggttgatcccccaagacaagattgaagagccagactcacagattcatcattaagttggaaaataaagcaatagaaggtggccattaagaagaaagatccattgggagaagaaaaagaataatatacggctgaagcaaatcacatgcaaatgtcctattggaaatgaagacaaaaggaaaaatccatcaggcaccgaatatgatcctccgccaataagcaagggacctaaggatcttgatcttctccgttgt

SEQ ID NO: 73534 - DNA, 785 bp, Zea Mays
tataagcagctcctttccccacaaccaaattataaaacccctggtggagccactactctttcctccccaaatctcccaccccctgtagaaaaatgtgtatgaaatggaatatcactgttgaaactagtcaatgtagtggaatgcttgcccatttccccgtccttatattttattcccacatcaagcttgcttattcttcttcccctccctagtattattctcatcacgttcgtgtcttctttcctccaggttcctactcccaccacacacctcattccaatcctatgctggtggtgtagagacagacagagagagccgggagagaaaagagaagaggaccaaatctgagaggtggaagccatggcaaaggtgaaacagaaggtggcaacggaggatatccttgaaggagatgatgagagaacatcttcggagaacaactctgtaccacctgtgattctcgacctcaacgagggtttcggtgaggggaacgaggcaggggaagccagcgatgatggtgacgacaaccaggaggaggacggtgacgacggcggcagcacaagtgaagttgcaggcggcaggaattcaagcaacaacagcagcaccaaccacacttccatgagcaacaaggattatgacatgaatagcagcagtaatggtgagggccgcgaagagagagagctagcggtgaggcagtacaacagatccaagcttccccggctccggtggactccggacctgcatatggcatttgtccacgccgtggagaggctgggcgggcaagagag

SEQ ID NO: 73535 - DNA, 516 bp, Zea Mays
gattggccatcaaatagcgaagcgtacaggggctacggtgtaaatgtttctaagacttagagagcaatgccccctggacggcgggttctattttctagaactataaggtttcttatgcaaaagtctaggccgaagggggtacgtttcactgtgagccattggatcacgatctgcggtcaggattagatcatgaaagggtacgcgaccccaatcgcaggatttgatatcaagggttcatattctataacgcgaaggggtatgtgggtcaacatttctaccatccatctcaaatcctacggtcagatcactaccgctcgtccgtcgatcaatgaccacggtaagtcctagccccaatcgctacgccaggctagatctgagccacacatcgcgaatcgacggtcaataactcgtcttctttcttcccccggccaccagcggcgctgccagccggaacacggcggtccatggccgaactccctacggtcccgcgcacagagcgctaactttcaaaatcga

SEQ ID NO: 73536 - DNA, 512 bp, Zea Mays
cagaaacagggcaagggttccactggggtgcggcttgtaatattttctggttttgtaagatacttttgggaagtattaatctaacagtgacagaacttatctgtatgctatttgtctttgctgtgtgcgtcgttaccaccttctccctggtacttggcccccctgggatgtaggctcgacgtgtcgaggctggatgccagtatacttaagaaagaatttggtgacctggcccccaggaggtagtctcgactgggacccggacctgcacacagccttggctaggaagctttagtagtgcacccataagacccactaactggtaacttttatcctttgattcacacaacaggacctgcagggcttagaccgggaagccaatccgcgtgtccggatcccctggatcacagttccaaatactagggcacccgtcgccgagtggtggagcgtgtaggcttagggtacgggaccaggctaagcggctacacaactccggaccaccccaggggacgtga

SEQ ID NO: 73537 - DNA, 311 bp, Zea Mays
ttaacaccgccgaacagtgtagcccctggtttatatccgcaggctatagcacatttttaagctctgctttttcagcgtctgtcagtccttgcccaagtaaatcttgaaattcaaaatcttcttcctccaaaatgtcctcagcttgttctttccccttttcagtagctgtgcttgccgcagccacaacagattcttcctcagtcatttttaggagtatgttatcgataacttcaagtgtctcttctaggttcggatcttctgtggccccgatttcagccccggcagcttcggatgcgccggtatcagcttcg

SEQ ID NO: 73538 - DNA, 685 bp, Zea Mays
gggtcgatgggaggaatgatttacggagcagagctctggttctttcgcttcggcgccattgcaatctcgccgccggggcaaagaggagcggaatttcagggaagcaaaaagtggttcgaagcggaaatgcaaaattagggctcaaaaatcaaaagcacacgtcgacatgagtataaatggggttttttcgggttgggcaccatttctcaaaagggccaagtcatcactcgagaaaacaagacttctgacataactcggccgttacttctaaaatgacgacagtaccaagcatgactcgaccgttatctctaaaatgccaacagcgtcaaacataactcggtcgttacttctaaaatgccgatagtaccaagcatgactcggtcgttatctctaaaacgccgacaacgtcaaacataactcggtcgttacttctaaaacgccgatggtaccaagcatgactcagctgttacttctaaaacgccagtgtcatcagttatcgcttagtgattatttccaacaatgttggcaacgttagatacaaaagcaaactatcaaacacttataaaaagaggcaatatccattcagactggccaaggttcttcattacatagaggagggaagttttcacaaacttaaagactaactcattattgaaagggaaatagtctcaatatttcctttaaa

SEQ ID NO: 73539 - DNA, 928 bp, Zea Mays
ttcacgaacttgttttgccttgacgccaactctcaatggctcacgtgtcgcctcatatccattctatgaccatgccaccgatttttgagaacggacccatgaaaccattgctaggtgattttgaggaccaaccaccaaaccactgcagatagtgcattccatatgcgtctccataacctagacatgtgtcttgctagttcttaaccgcatcggtaacatgatctgctctaccatgtccttgcatctgctaatgtccctaggtgcaagccatcatagttgatcacccgacttctccagtccctctgtcaagacccaatgctcgtccctcacttctctcgatctattggcacaaacctagatggccttcacctttgttgttgaccactgcctttaaactccacacttgtgcatcataatctacaagacatgttacacatactcacaccctggttagtccacatgacttaagacactactccgttgataattagtcaaaacaaacttgaaccacaatggcacatatcaaccttatattcacacattggaagctacatagttcacgctattgagtacaacacaattggtaggctatatggttggacatcctttacagtgcttatggtatgcctacagtcctagtatggcgatagtggttcttgtacctgcacgcataacagtgttcatagatacagatggaacctcaaccattgagatagtctttgttttaatcataacgtcacccattgtaataaatgtgatggacacgagctttatattatttgtcttgcacacacacaccgccttgaccagaagagcatgtgatgttcggggccatgaaaaatattgaggaacctttgtagggctctaggacatggctaattctaggcttcgcctcgggggcagggtgccccacgagtgtgaggctgac

SEQ ID NO: 73540 - DNA, 545 bp, Zea Mays
tgccgtccatagggctgtgagtagtcgtactcctaatttggcgtatcgtcctacatgcctaccatacggggccctgtagcgagtccttcgttgatgtctttgtagaagtgcacagtgggtctcgtgggatagccttgtgactcgatcatgcacggcacaactccgcctatcatgatgagccctatatcaccagcttgcatacgtaggcatacgcttggcatggcgcattgttctgtcttccctgatatgcgaaccactgttggactcaagggttgatgtccccttgcagttgaggttgattgaccccacagggcagtgggggcacatctgaggtcgtacgtggaggcatctggttgtgtttgatagcaacctcctagcgctactttggtatgctgcatgtacctctagatgtgggttggtgacgacatgtcttgtcatagctgtcgtgggtcaacatcgtcgagtagggtcctctgcctcttagggttggctgattcggagttggtcgaccgccccacctcatagggttgtccgacgaggagttg

SEQ ID NO: 73541 - DNA, 396 bp, Zea Mays
gtcgatgctttggtggcagattcaacacaccccaaagaaagccattttatttgttcagtggtgaggataaaggccacacaacaagaacctgacaccacaccatcaacaagcaaaaagaaattgctacatcagctactttgtcttcccagccaccaaaggaggtgttgtgaatcatctaggcccctgatatttggtaattaatgacaatcatatgtggactaacaattcttggagaaataagaatgcaggttgtaccataggaaaaagggatttatcgaaagtcttggaacttaaagcattggttgtggatcgggtgaaggcaaatgtataacataggttttgtttttgccggccacccgatgtttatagaaggaattgaccgaattagtaggctag

SEQ ID NO: 73542 - DNA, 548 bp, Zea Mays
gctgttgttttgaagcctcagggaattgtcatgttttttgctagattgggccatattctggcttggtagggatgactttatgtgttaaggggtgggtcgtttgggtgtcagaattagaggtgtggacacttggctcatgggatagcactcgtttttgtttcgaggtgttgccttcaccctctggctcggtggtggcttttggatcattggacaacgacgagatttcatcaacgaaggcgacctttccctttttggtgctagggtgagggctgcatttgctgcctcgaattcgggtggggagctagcacgggtgctctttttgggagacatcgtgggattggtcttcgtcgcatgaacattggtcgtcaaatgttaggcctcgacatgtgaacctagacactcaggaacaggtgagaggcacgatgcacgacaagacttttggtggggaactgtagtgccttgttatgtgtgtctcatccagctacaggacgggggtatttatagagcaagctgtgagaaggtggccccgaagtatatttgtaccctta

SEQ ID NO: 73543 - DNA, 451 bp, Zea Mays
ccgcagtgtaccaaacgccgctgtctggcctgggctcaccaccggccggagtaaacaggggagaggggaagcgggtagggggcgcccctgatcgttgatctggtattcaacggctagggttagatggagcaatgagtgaaggtgttcgccgtaggatttttatttagcgatctggatcggaccttggtgtcgtacggatggatgcaatcggggccgtccgatctggatcctgtggcctctattccgtacatgttcgggatggccctttttaatctgggccgtcgatccggaatcatgcggccgacatcccatgataccccttcgcgggtacatcttactaaagagtccctgaacttcctaggaaccaacccgccatcccgtgccattataagaccattaccgtttagtcctggaatttatgcagaaccccctgggctttgttaaaattgtg

SEQ ID NO: 73544 - DNA, 807 bp, Zea Mays
cgctgataatacgcgcttcttgctcaaaatggcgggcaaccaattccaacaacacggaggaagaactcctcctcaaggactgtgtgatactacctatttggaattctctgagactcgacccccgctcttcatcaaagcagaagaacctttagaagccgatgaatgggtgagagttatggaacataagttttggttaattcgatgcacagagacacaaaagccactgtttgccgcacaacagctaagagggcctgccagcacctggtgggcaaatttttcagcaatccaacctattgggcatcagattacatgggaggaattcaagctagcgttccgggcgcattatgttccagagggagtgctccgtataaaacaagaagagtttatccggttaaagcaaggaggagatattgtgatgcagtatctcaacaaattcaaccatctctcccagtatgccattgaccacgtgaatacatatctgaaaaagaggaattgttttatgaggggactcaatgataggtttcagcagaaaatggcaacatgcttggaccttacctatagtaaggttgtcagtacggcactggcagtggaagccaaaaatgcgggacatggaaaatcaaaggggtttggaggtgaaaggtcaaatcaacggcctgaaaagagaaccaggttggtgatccgaccttttaatcaaaatcgttcttcgcctcgcccaccttcatatctattcaagcagcctgtctttattcgtcccactactaccctcgctcctaccaatcagtcgaatgcccctagtacttgtttccc

SEQ ID NO: 73545 - DNA, 306 bp, Zea Mays
ggaggacaaagcaaatagagcatgtgaagagatagaggaagaaccacctctagagagtagggttgtggtgggtgcaccagggttcttaatcttcgtctgagtctggtggtcaatcttgttgaacttgagcttgctaaaagctcaaccacagtgagggtcttatagttgtgtgattctatgatcgccaagacattcaccttccaaaccctccaatctggagcatgtattaacttgtgtgctctctcatggttgtgataaggcaactatgccttttttgcgcgcatcttgttgacaatcaactagaag

SEQ ID NO: 73546 - DNA, 834 bp, Zea Mays
ctaagaacccaacctagcagagctctgcatggaaacactcctttcttcatggtttatgggtcagaggcagtattacccgccgatctcaagtccggggcgtcaaggttggtcttcgaaagcatagcagaagccgaagctactaggctggaggacattgatgtactcgaagaagaacggttgaacgcagtaattcaatcagcatgataccagcagactctaagacgctatcacgacaaggccgtacgacgacgatccttttcagtgggagatctggtcctccgccgaattctaacgggggagggacggcacaagttgtcacccttatgggaaggaccattcatagtagcagaagtcactcggccgggatcatatcgtctcactcaaatggacggcatagaaattgggaactcctggaatatagaacacctcaggaagttttacccctagctgtatttcaaaagctatcgggacgataatgtactctgtaaggtgggaaatatgtcatcaataaaaaaggcttcaagaatatttagtttgctcatgattgaccggcattcttatttagctcggggagaccactatgccctgctaacggagcaatcggcttaagtcggcaacgacttaagacggtacaacatgctcgcgcttacttaactcagggtgaccactatgccctgctaacggagcaatcggcttaagtcgacaacgacttaagacggtgcaacatgctcgcgcttacttaactcggggtgaccactatgccctgccaacggagcaatcggcttaagtcggcaacgacttaagacggtgcaacatgctcgcgcttacttaact

SEQ ID NO: 73547 - DNA, 474 bp, Zea Mays
ccgccgaacagtgtagcccctggcttatatccgcaggctatagcgcattttttaagttctactttttcagcgtctgttagtccttgcccaagtaaatcttgaaattcaaaatcttcttcctctaaaatgtccttagcttgttctttccccttttcagtagctgtgcttgccacagtcacaacagattcctcctcagtcatttttaggagtatgttatcaataacttcaagtgtttcctctaggtttggatcttctgtgaccccgatttcagcctcggcagcttcggctgcgccagtatcagcttcgaaaatttctgctctggtggcttcggctgcggcgccttcagcttcggcagtttcggcagtttggtcaatggcaatttttgatgccggtgttggagacggtgtcccatgaattacatctgctatttgaataatccttcattttttcggcagtgcaggaccttcgtctgtc

SEQ ID NO: 73548 - DNA, 492 bp, Zea Mays
gttttgcaacatgtatttaatgacatcggtttgaccagaaaaaatgcaatgactagataataaataatacctacatttggtgcatgcataaaacatgcatatacgtaacttctcaatagaagtgtaccttgtttcagcgtccaccagcctccgacttaggtaggctaccacatgctcctttccttcggtctcttgtgtcaaaacagctccaataactttatcttcgactgtaatgtataatctgaatgacactcctacctgtgtcgcttttaatatgggagccgaagacaaatatcttctaataaggttaaatgcttcttgctgttcggccccaggtgaatccgtcatcatttttaagccaaaggataggagtgaaggcatcgatcttcctagctagattagaaataaaccttcataaataatttaccttacgagtaacttttgcacttcaagcttacaggttggaggtcccacattctaaatggatttgat

SEQ ID NO: 73549 - DNA, 818 bp, Zea Mays
ttttgagggtgtgttatgtgtgggtgcaatttgtttggcaggtttatgtgaggttgtgtgtgtggggatgatttggtgtggtggttttttgtaaagtttaaactggtgaattatatagaggtatagatatcttcaattcataattcaatgtcacacacgcatattcattcgatattcatcaaatatcattcatctatcacatttaaataaccaagtctatacacattatccattcaaccatcacagtaatataaccaaatctcattcataaaggtaacgacaaagcaagtccagcaaaaaaccaagtctcgcataaaccaagggtcattagagttatattcgctaccgccaaaagtaagtacataccaccatataattcatcagtttaaactttgcaaaacccaccgaaacaaatcacccccacactcataacctccactaaatccaccatacaaattccgcacagacttaacacaccatcaaaaccaacggttcagatcactggataaccccctcctccttactcactcaaatcgaatgtacaatattatttggatcatctatcatatgccatccctcccactctctcgtgaccccattgccccagcctccctctccccctatcatcgtcgtcgaccccttttctctcctttctagtatatagtagcgttagcacgaggtatatgctagtattgataaagttagcagtctaaccatcatgtaataaagaataaaatccatcattagataaaaatcatgagctatacttatagcattataagtaacaaaataaatgcagttatggagatctaacaaac

SEQ ID NO: 73550 - DNA, 440 bp, Zea Mays
ggccgggtagacaaatttcacaagaattggtttactaaaccagcctcgttgacctaaatcgttggagtttcaaatatgactgcatactagatacttcaatcatatctctttacagattatccacatggttaatgtttagggtttgtctaacttagaaagtcatcaacgataaatgagattggttgaatcgggagagacccatgaagtagaggatgattatgaggatagtatagagctgacgatcgatcttgatcccaaaattcttccagtggacacagaagatgggcaattaagtagtcacttcagtttactagaatcaattgataatcgatgaaacaatcatcacgcatcttcctttttacatgaatcgatggacatatgatctcagtcgcaggtagcgagagttaatgatggattcgaaatcctgcgcttcttgatcg

SEQ ID NO: 73551 - DNA, 583 bp, Zea Mays
attttaatagagtttggagagatcagggtgcgttttgtaaatagcaggactgatttgctatactctttctattagatgtgactgtgggttaattcgggaatatcacagggtgtcttttacaaaatgacacggccgaaggggtacgaagcgtttcaagccgctggatcaccaacgtagcgtccagattagatgtccatttacaacgaaccgatatttaacgccacccgtccgatcggagatctatgttgaggatcattagacaacgagatcaactcaggtccgctcattcaccgatcaacggcccaaatacgatggaatgaaaagttatctaggatctaattacagccatccattaagaggtcgacggccagagacccgtcttcctccccactacacaccagggcgcggcggcgctctacccccacggtggttcgcacaccggagcaagccatcctagtgttctagtgcacgaatcttccccggacaggtgctacataatcctaggatcaagtcacagctatttataggtcttaccagagagtgtatcagtggagggagggcttttcacggctaatggcggctt

SEQ ID NO: 73552 - DNA, 340 bp, Zea Mays
gatgctggcaacgacgaggggcgataacgcggtggaggaggaacgccgacgagaaattgcccaagcgtgaggcgatttcacacacctgaggctctcggtttgagtacagcgaccccaggcggaggtccaagacacttcgacggaactgatttggcgagggaccgcggttggactggtgctgatgtcgccctcccacacggcgatagctgtagtttacgcgacacagcctggcgaatggagctgttgggtctcgagaggttggccccagcgccctttatcccggtcagcggaggttggcacatgcccacatgcgccgcatgcaacagccacacccgagtct

SEQ ID NO: 73553 - DNA, 588 bp, Zea Mays
cccaaatatcttttaccatatccacaaaaccatcccgcagaaaccatcctaattctaacttgaacggaggaattgtttgggcggttacaactcctgtgctaagaagcagaggagtatgatcggatatatttctcgacaaggcatgtatcgaagctctagggaattttccctaccattatgtagctaccaaaatccgatccaacttctcataagtcggattatccctagtattagcccaggtgtaccttcgccccaacatatgcaattctctcagatcaagaccatcaattaccgcattgaataggaatgaccaatgatgatcaaatctatcattatttttctcagatggagatcgtaaaatattaaagtctcccccaatgagaataggtaaagtttctgtattgctcaaacggactagctcagaaaggaattcttgtttgaagcagtcctgggcagggccatccaccgagacaagagcccaattaaaaccatctgccttatcatgcaaattaaacttaataaagaaatccccttacatgatggcaccaacatcaaagacatcaacgtcaattcctaacaacatccccc

SEQ ID NO: 73554 - DNA, 838 bp, Zea Mays
caattccagagaattgggtctttgattccaaatctcaattctatgtgcaacaaaacactagaatgttagaaataacagcaatttagtgatgaacaaaatgattccgacaataataaaataaaaaataacatgtttcataaacgtataactcactggcagttcataatctaaagctagtgactgaaggaatacgagaatgaacgaaagagaaagtgtagacattctcacagtggagttgtctgcaccagaacaatgaaaagtaggggaagcagatcggcaataacaatgaagttgacatggtggaagaagacgaacagcgagaagtcacgacgacgatcccgaaaaacctgatacacccctatctcgtgcaggtacacaagagacgttggcttcgaagaaccttctctcccaaccccaataacacgttggtggcgggatggaaaagacgaaggcaacacaacgctctggtgtgaggaggagaaaatttgtatagatggaccacgtcttgccctcaatatatacacacgacgcgataaaaataaacaagtaattagtcacgtaatcacaacactaacgtgattgattcacaatcaatcaattagaccaatcacaattaatgcgagaataattgtttgcaaaaacagaccagtgtaattttctccatgaatgcaaaatattaagtggcaaaaggaagctgcgcacccgtaaggtaggaagcaagaaatcgccggaccattcacgcgcatgtcgcacacgcccattgctccgacctggcgaggcgagtgaacgggcatgtgggttctcccttttcctgtcggtgttttgggtccgaccgcac

SEQ ID NO: 73555 - DNA, 1117 bp, Zea Mays
ttccacttacgacaccaccaacgaggcgctcgtcctcgagcttagatgagggaagccaaagaccacctctaatctcgtcgacatagtgaccaagtttgttgacggggaggatgcgacggggcgctattttacgcaaagaaaagagctcgcgcggcaccagcgagccaagcggcgagaaaaggagcgttgggaacacctcgacaagcatcggaggaatcattgtccccgacgcgatgaggaagaagtcaccacggcggatctcgtccatcggcgaaaaacgatggtgaccatttcagaagctgatggactcatcatgccagaaccatggcttcctggtccgtcacaagctccgagcatgcgaacttctgaagcacttcatctccagactgcctagaaagaaggcaaagccaaagaagccctaccctgggagctcggcgctgcgctccaagagcgaggtctccgcctagacctttgcagctatggcgccatcatgggcaagcgagagcttccatgcctcgtcctctgccactgccttcgcctctttcgccaccttcttggcatcccgggcttgagaaaacatcttttggagctctacgaaagaaagggactaaagtaacctagagtgccagataacgaagatagaagggctgacctccagctgcgttgcctctcttaagagctctgagtttgcctcccccagacgagtgttaacctcactaagggtcaagtcaacctcctcggtccagagattcgcctcacggaggaccccttggagttgggcccgctcctcctaaagcaataagcaaagagagacaaccaaaaaggaacactcacctagccataggggatcaaatcccgtgtcatcgacgtgcaggcaattgaaaccacctcaccaaagttaccaagcattcgctctatggtctctaggctcatgtcgccccgagatgaggtcgatttgatctgctgccactccttcgcctccatcccctatccttccgagcccttgaggacgaagggaggaaggttcttatggccttctataggagtatgtagcgtagcccccatggaatgtggaagccacgacggtcgatggtggctgtgactgggacccggcgac

SEQ ID NO: 73556 - DNA, 522 bp, Zea Mays
cacaagagccgaattgttcttcttaaatctctgaaaaatattcagataaataaaagtaattatccatatgactcgtctatagcacgacacataccatctaaaaatcgacaagctgcacatacacaagaaacattgaagcagcaagcagtatactaatactggtaaacatgttccttgccatgcattcataagacaaaagtagtgtttcctttggcagaaatcatgctaataaataacctacttgatattgaaagttttaattgcatgatgaaaagaatacttcaaaaatgagaatccttctagcgattgatcccatttatattttgtagctgacagttcctttcacagtatttgtgactcaaataatcctgacctctttctctaccaaattgagtcttcatacttgacattggccagtcacctcaaggctttcgacttactttggattattgttcacagtcaggccatcaatgggctactgctatggcatttcatctacagcctgcaggttgccaatgcagc

SEQ ID NO: 73557 - DNA, 1026 bp, Zea Mays
ttacaagcatatggctactacaggctgtactacacgagagcgttccctgaggtactaccgaactctttctctaaagtatccccaaattccttgagaagatcatcaaggcttgctagggatatatcctcggcgttggaccaatcatctatccttgggggaggtggggctggaggggtcttcttcttcttcttctctgtttggcaccctcggttggtggtcttcttctggattttcttcttgggagcaagcttctttagcttcttgtcatagtccatctttaaggttcgataggcctcacgggtgttggcctcctcgccttctgctatgtcgagacactcctggagagatgccttctcttgcttaagctctttgacttgctgctctaggctttccacccgggagtttaggtgggtgcagtgggaggagagatcattgtagtggttgtcgagggtgtggaggtatctggccatgtagacgatggtggggtcatcttctgtggggtctcctcctgacagagcctggagtcttttcctccaggtgggggtatttttgttgctgggtggaaaatatcgaaggggggtctcagagatctctcgggtgtagttttggcacaactgtttaagggcttttcgggcaacactctggcaagtgtctgggaagcggtgcccgatgaaggtgacttggaagggagggtggtttgggtagttttggctttctcccaggtagactgccatagagcacttttctactccattttcacggtattccttccagacatattcgggcttcttgcggatccccatgcgtagcgcgcaacttcgtagaaggtgaggaaagccttcctcctctgagcagtaggatgtcctaataacctaggggccttccatctggtagaagaaaagaagggtctgttaatatcgaggaaagaagagagagtgtttcttggaggtaagaggcgttttcttgttaaggcaactttttaaggtcagggctgcggtctacgactagtcctataggctctgatac

SEQ ID NO: 73558 - DNA, 371 bp, Zea Mays
tctttagtttggctttgctacttgtggatccatggatgcattatctaaactttatcttaacctagaaattcttgacaatgtgggccgttgaaaatgatatctttgaaatggaaaattatcttctctcatagtgagtgcattgtatgcattgctcaatgatgtagcacaatggatttacggtgatgctgagtgccctaattcaacaataggttttcaatttctgggcactgtagtgaaatacttgtggctattttctgctgacaagtattgggaggattgatgttgtttcagattataaaatgaggctgaggcttcctgcttcttgtctctgccactgaatcaacaaagagcttcttcatgccttgagttgc

SEQ ID NO: 73559 - DNA, 518 bp, Zea Mays
caagggggtagaaggtgcgagaaggactggtgttgaataatagtggatgatggagcttcggtgaagcctgggtgccgtggcgaggtcgaatgacagacagagcaagctcggtgaaggtcagagaagtagcgacaagcttcagggatcatgtcagcgacctcggggcgaaaggggaggctccggaggtgcacaaccatgacgagacatgggcaaggtgcagaagagcacgagagcgggcactgaggcacggaattggtggcggggctaagggctgtacttatagactagaagaggggaagggaaggaagggaattggtggggattgatccgaccagatcttttcgaccatggtgatacgatggcattcacatgaaaggaaggagagcatgggaagaaggaaatggagcgcagggaaatggagctttgcccgagtgggaaggtgatctcatggccattcgtccacgcgcatgtggtagcgcgatgcggtagcgacgtcgaagcgagaaaggaaaggggag

SEQ ID NO: 73560 - DNA, 426 bp, Zea Mays
cctaagcaaccccaaaaccctaccctaatttctcctctataaatatgggcttccctcccttgcattctgaaattttacatctcctacccctagtcgccacaaccttcttcctcccctcccacgccacctcttctctctgtcccgtggcacacggtagccacagccaatgtcgtcttcctcccatggctgctccttgtgcttctctagctcggcgcgcagggagcactacactccccagccggccccctcctctagcttggcgaccctccctgctcccttccatggatgcgccatggctcctccactgctcccttcctctccccccatggagagttcccccctgcatcttcccatggcgctgctacctccatgatggagctcgggcaccctttcacctctggtcgcgcccccttcacagcgttctac

SEQ ID NO: 73561 - DNA, 425 bp, Zea Mays
gagcaatatctatcatgtttattgaagagatagaattaggaggttcgtacatgaagtgtcaaccattgtttcctcacttcaaatccaaaccttgcacagaggcattacttaggagcttcatacttgagagtttcagataccttttgctgtagaatccttttgtaacgtggtaatgaagtttttggagcaacaaaccaaagggcagtgtcagctattttgatactgtagtacataaccaaataactctagcaagaattggagatgagggcatgtctgtgagttgacatggtttctttttctatgtttttgctatcaatggatgcatttatgcattctctattaaaagtgtttcaaccaactaattgtagtcttcttcctgctaacttgaaatcaagtgaacatatgggggccttctgatcttgagt

SEQ ID NO: 73562 - DNA, 485 bp, Zea Mays
ttcacttatcatcaactcgaaccacaagggacaagtcaaccttatgttcgcaatctcccccttgacaagtgcattgtcaacaccaccatataagcatatgtaaacagaaagaggaagaaaaagagaaactcactcaaatgaccaaaagccagacaagtcatttagagtaagcaaacttggtccccaaagaaatgggcaacgactcaacacgaccaagtaagaaaaggctagccctcaataaaaggaaaaagcagggctcaacaccactagccagaagccaaatctcatcggagcacaaaaatctttatcagggcataagaaccaattcagagcataaaatcagcacaaaagctaaaatcaaagctagttcctccagaaaaaggcaaatggttgaacacaattagcaaaagctccaaaagactcaattttcctccccttgtcacaatactcccaaaaatctctcccagagaccaatagctccaaat

SEQ ID NO: 73563 - DNA, 472 bp, Zea Mays
gaaaaagagggatgaatctgattctacagtagactgaagaagttcatagcagtttagtgcagtccgaaaacagcagaagtatccccatccactagctcttctagggagttttggggtgtggtatgttaaaggggactagtgtgaagggggagtttatctgtcacagttttaccaaaccgtggataagtttgggggtgtaaatcctatctacattgtgactgagctgttaacttttgctctgctgtcatacatgcaatgaagatgtgttggactcttcccctgtgctttcaccttgcgtggtgaccatgcaatggatgtgtgaagtatgtgggctctcgtttagtgttgttaaatgtcccagtgaaacacaacaagttcattttgtgtgtgtcttaccatagtgtgttgaacccaacaaactatactccactatgtcatgtcgatcccatagcctctccctcgtggataaccc

SEQ ID NO: 73564 - DNA, 384 bp, Zea Mays
tgctaagtttacaccttccataagaaactccagtttctgctcatcaaagatattaagtcagttttcatattcacatattcatcatatactgtagcaatgttattacctttctagcttctagatccgtagcactactatcaaccagacgcataccaatgttatgttccaatgttaatatcggcatattacattgatcatcgttagcattgcattcatttgtattagaccccattaaaatttcctgtgaaataacgcaaactccagtgaagacacaaattttatagagcagcataaataatacattataaaattttgttccatacctcgttcccatcatctaatttgcgtaaattgtctataactatgtcttctatttcatacgct

SEQ ID NO: 73565 - DNA, 503 bp, Zea Mays
ctactcagccggagactcgaccggattcaaaaccggttgagctgggaaaattccggttgaaccggtttcacaaaaatatctgcaatgatttttctgacagctctggctgtcagacaggtcagagcaggggtggcagagaaacactccagaaaccggttgaaccggtttcaggtccggttaattcggtttcaaaggctgaagagcatgttttaaacattttgaagtgaacaaaggtggaactcttatgggaagtaaaagtggtttttcacaaaggcattcatgatctagaaaagtgttctctaagatgattttgaaggattttgaacttagctcattgcataacttacttaaccactgcggatccctcttaattgaacggcgattcctataactcaagaattataaaatgaacactgccgttgtttccaagcacttggagcacgccatatgatgtagaatttaaatccgatgtgctttacatttttatgctcataagatttgtg

SEQ ID NO: 73566 - DNA, 400 bp, Zea Mays
gtcgagacgtgtctctctcctcccaagtacgcaggcgatggcgccaccccgacgcacggtggagctttcgccggagaccagacgtttgccccccgtggcgccttaaaactaatccagaggaagctaatcgtagtacgcgaaatggtgaacatcataggagcattatttccggtgttaaggtcacgatgactcctactcgcgatgtgagatggacgactgcgcaccccctgcaccgatgagcaattcctccaatacaagatcgcaccgggtccggatgagtcacacgcgggcttcactgatctattgccgacgcaccacgctcatccactgagctccactaacgcccagcgctaacccaggctgtggcggatctcctagctacacgccctcgtcctcccgc

SEQ ID NO: 73567 - DNA, 400 bp, Zea Mays
ctccggcatccacaaggcgcagaagatcaaattctgaaattacagacatatggttacccacgaacgacaattgattgttggggtcgattggagggatgatagccacggtggagctctgcttcttccgcttgggcgccatcgaagtctcgccggtggatcgaacgggggcgaaatctcagggaaacagaagagtggttcgaggcggaaatgtgaagttagggctcagaaatcaaaagcgcacatcggcatgagtataaatggggttttcccaggttgggcgccatttctaaaaagggacaagtcatcactcgggaaagagagacttcagacataactcggttgttacctctaaaaactccaacagagtcaaacataactcgactgttacctctaaaacgcc

SEQ ID NO: 73568 - DNA, 619 bp, Zea Mays
accggggtctactttgattcctccatcggtgataatatgacctaggaaagcgacttccttcagccaaaaatcacacttcgaaaattttgcatacaactaattgtctcgaagtttctgtagaactaatctcagatgaccttcatgtgcttcttcactctgagagtatactagtatgtcgtcgatgaataccacaacgaactgatcgaggtattccatgaatactttattcatcaagttcataaagtaatatggtgcattagtcagtccaaaagacatgactaaaaatccatatagtccatatcttatagtgaaggccgttttaggtatatcttcagtccgaatcttcaactgatgatagcctgatcttagatcaatttttgagaatactttagctcctctcatctgatcaaacaaatattcaattcgaggtaatgggttcataattgttacttcgttcaagcttctatagtcgacacacattctccttgaaccatctttcttgttcacaaatagaactgggtctccccatggtgatgaactggggcgaataaaacctttttctagcaattcttctatttgtttcttcagttcaattaaatctttgacatccattcggtaa

SEQ ID NO: 73569 - DNA, 343 bp, Zea Mays
cagagggagacacaggggccgacggccatggggagaagtggtcggtgcagggagcgtatatatactgcgcacaagccaaggggtgcggaggcagggaaatcaaatcccaacaacccagagcgattccggcggaggcggacccgctggggctgctggtttggggaagaatctgaacaactctttccggtcgcggcggcatcggatccggcattcggtaggaagaggggaggaaagggatgacagcgcgggaccactatacagtcatcagagtcgagcgcacattttgtgagtccgaccagtggaccccaccgggcagacctgcgcacgcgtgcaattgggaccg

SEQ ID NO: 73570 - DNA, 682 bp, Zea Mays
ttttgacgctgttgcgatcgtcacgctggggcggtgtttgtgaaggaagtaattgggcaatcgtttgtagtctcctgattcattacctttcgtggcttctcgtgtgactcggtcattttgataatgtgtatggtttccgccccctgaccatgccttgtcttgagccctccttgggtctagggggtgtaatccgtgcaacttttgttcatctgcacactcgtgcagggtgagccccctagcctctactcgatgtagaggtccgtctagggggattctcccatctttttggttttactctcccctgcgcatccgcttagtgggaatgaggggagctaagcagtaccatgctttcctggatgggctagcaatgacgctctatgagcttcaaatatgtaattcgagtgaggccttggttcctttcgcaagatccaagcgtggggtccgctggggaccgtcctaatactcccgatcactaactcatatagttgttagttccatttgatcggaactgatagcttgctacctctctccgcgataaaccatgagttagactctcctaggactcgaacacgagttggtgacgccctcaacgtttcgtatgtcagggtcctgggcgctagtgtgcccgtcttcggctgcccctcactctattttcgctggagcggccatgagcccttcgcgg

SEQ ID NO: 73571 - DNA, 977 bp, Zea Mays
ctggccagggcatgtgcgagattaatgtgtcacagtccgaggggctcttaggccttgagtgacctgcgacccgaagggttcgtaggtcatgagtgggaggcagaccgacgcttttaccgtggctcgacgctaggcatagttaatacgatcggtcatttatgacagattagtctcaggccaggcacgagatccactcgagtggttccctttgacacacccggcccctcgatcaggttctgccacgcccgacccggcgaccctaggctcagtgtcgcggggtttgttcgggggacgagttattctagggtagacattacctatctcctccaactgaccagcgtgctctaattaccagaggcctttccctagcgctctcactgactgatgggccctagtggccagggatcttatccccgacaacacccagtcatccagtatgtgatcatggtctcccagttatcctataacaacatggaagatgaacattcccaccgaccacatttccaagtacatgtacagattgtacgagttgtacctgcagactccatgatctccaacctgggacgtgggactataggagtttgaagtgacgtcaaatagtgtaaaaactaattgtgagataggagaagttatagcttaaccccacctgtcaactgtaaccctctctcacttggtctataaaagggaaagtgtggtctctatgcaaggggacaaacaacattagggagacacttaaccaagcaatccatctcattgaaacaggatgttaggtattacgctctggcgatccaaacctcactaagtccttgactcaacttcagtttactcacattctccacatatatctaccccacaacctgaaagggatatgtgtccttaggccatttctatattgttttgatgattacatgctcaacacattatgttcagactaacatgacaaatgagcaaaggtacatgatgcaaattgagcttga

SEQ ID NO: 73572 - DNA, 1005 bp, Zea Mays
agcaatcccgtctttgattagattgggggtagccaacgcgatctactgtcctcgacggctgagacgtgtattggtgagggggacttgcagaatctatttgagggcgaagagttgaagatgatattgtttaatttccaggaggcgagtcttattctgaaggtggagccgatgtagcttttttgctgacctcgctctcgtgttgtgatagtgagtgaaaacgatgccctcccccgcttcgcaatagagagggagggcgacaatgtgatttgtattacttgtgcgatgtggccgatgggcccttcgttttatgtatgtaaactatgatggcatatcacgtgatgcgtttattgtaagattgtctcgatttgtaattgtgtctcgatttgtaatctcgcggacgatgtcgtgcgcttctggcgcgtgcccggctgcacccttaggcggctttttcttggacgtgtcttatagtaaagactttgcaccctgtggctgatgtcgtgcacttattgtgcatgcccggatgcacccttaggcggcttttgctcggacgtgtcttatggaaaagactttgcaccctgtgggtgatgtcgcgcacttattgtgcatgcccgactgcacccttaggcgacttttgctcggacatgtcgcacgcgagggcagcctaggctgccgcttgcggtgactgttttgttcgtcgaatgtcgaagaccgttgtcgcggtcttttttgacacccatgaccgtgatactggctggattgtttgtgtgggggcttttcggtattatattacatggctccgcctcgttaaaaacctcaccccttaggaggaaaagagtgcggggctgagcgacattgtttgaagaattacaaaggcacttgggccttggatcttaaataaagaatttacaaaggttatctatattccatgaatgctctaagtcttcgccaaatgatgtggctagcctgtaagcatttggcgatgcttttgttttgactatgtatggc

SEQ ID NO: 73573 - DNA, 348 bp, Zea Mays
gttcgagcgggtattctccttcagtcggcacaatgtcgaagaaaagcctaggagtgtccgagggaaggtgacgttgatgctgcttcccccgtccactaatactttctttaccctgctctcttggatcaccagattgacgaggagcgggtacttgctcggatgatcgaagttgagccattgatccgcccgggtaaaggtgatcgggtattctgaccatcgatagggggcgagggcactagtggttgccaccagtatctaccggtcgttgagcttctgttgtcttttgttctcctgcgacccgtgtccttcgaagatgacgttgacctccccatcgacgcgctggaatgc

SEQ ID NO: 73574 - DNA, 400 bp, Zea Mays
gggagataatgcttcgaaggacgaaggtctctaatcgttaataattctgttgctttgtttttgatgtatagtattcgagaacaaggaccaacacatgctaaagctgttgctcagccagaatttgttttctcagccgacgacattaaaaacccttcaaccgaagcttctgcattaggtgggaaattttactctgaggtatggatgaagggcggccgtgagatagctaatgaagctattaagaaaaatgagaaaggatatctcacgacgctcaagaagaagctaaaagagctgaagaagttgctgagcgcgctaggcttataggtacatctattatggtctagcttcgtaatctattttagcttcagaactaacaaacacatgctacgatgcagcttaacta

SEQ ID NO: 73575 - DNA, 752 bp, Zea Mays
ctgcctcggttgaagagttggtggcgcttgcgtcttcccccattcctaggtcctctctggcggtggtatatccttgtcgaacgcttcggatgctggtccgctgtccgcatttatgtcatgcacccaactagcttcttctgttcctgatggtggggcaagggatatttaagctggcttggctattaaatcttctttggcgccaacttctagagttgggtctgcttggttgattcctgctcatatggcggacagttggagtctggctcattgctggctagttctggtttgaggatgcttaaaactaggatatcctttgtgttgcttctgtgggggcagtatttggccttgaatttggctatggaagccggagatccgtggccaagatgccacctgaattgggatctaattccgccgcacacgtgtgtaggctcttgggttttttgtgatgaacatgaaaatatctctttccaggatgcaagaaagtacactaaactgtttgattcagccctttccaaggagcacattgctgctttggtggccttgtttggttgggaggtgcctccactcgggtagacttgataagtgtagttttgttcgagctggtagctggtctattttgtttccatggattctagcggttttctgatatggaatgtgaggggccttaatgatcgtgctaagagagactcggttaagtctctagtttttgacatcaaaccttctattgtttgtctgcaagaaaccaagttgtg

SEQ ID NO: 73576 - DNA, 598 bp, Zea Mays
gtgttacaaacataagtgtcggggaaatgatccttgggcccccctagggcccacttgttagtaggaggacgaagaaatggtccaccccggaaggacccgccacaggataaaccggaggcaccgagccaagtgttaggcgaggtggagccgcaagggggtcgagcgcatcgaggaaagcgactcgaatggattccacgcttgaccgagactgacccaccgtgccacattaactacgcctggccccaaagccgcagagggtgagtgggtccaccttccactcatgacctacaagattctaggcctatggcccactcatggcctatcgaacctaggccttagcataccgtccgcctacaatctccacaacactacaagctgtgtcaaggcctagtctatgacagctaggggcagcacagttccaggacaacaatgatggcaccaggactcctctccacccacgccgctcgtcataaatgagcacgatcagaaatgaccgaacaatcaagacgcatacggacaacacagcctcaccagggtgaaaagttcagtttatcccgagtgtagtagctcctcaagtaagctattggcggtcgacccc

SEQ ID NO: 73577 - DNA, 950 bp, Zea Mays
taagacacaacctattgagccggaaagcagcattactcacatcagcagcaacaaaaacagagaaaactatggagtttatatgtgaagaattagacaaactacaagaaaaggtttgccaaatgctatcatcagaagaagatgtaatagcaggacctaagacaggacaagagaaggaagacaatgctgcaaaacatacaggaccagtagttgaaaatctgcataaccctgaagcagttaaacagaaaggaaggccaaaaaaacctacaaggttaaagccactagtggaggaaatccgcatcaagatgaagaaggcagagcaaaagaaaaacaagaaaacaagcaatgcagcagcaagtatgtttatctaaaaaaacctgcttttgtttttttataattacattgacttataatctataatttgtgtttataggcccacaaggaaaggagaagaagatgaaaagaacagcaccttgaataattactactccccctcctaacagaaccacgaacactcacactgaaaaagatgcagaaaaaatagagagaaaaatgaagaacacttagtggagaaaggggaagggatggactgtgcaattatgatatattcatatagttggtgcaaacaacaaaaaaagtttgtttttctttcagttgagtcatgtaatcgcttgcaaaaacaaagtgttgaaaaacagatcatgcttgcctgattagatccatcgcatcagtccatccatgtatcgcatagctagcttatctggtattgggtcgtgctccattggctaggcctaccagcaataatttacacactttataccgcaaaaacattatttagctgccacggattccaatctacttgagtttatggagaagataaagaagttcctattatctaagtagagtcgtaaaggacaagatgataaaaaagttcctattataacatttttttt

SEQ ID NO: 73578 - DNA, 442 bp, Zea Mays
tatccaaagaggagtggcaacagacagagctgaacaggtggactcgtgtgtgggacggcgagatagagcatcagccacccggttgtccgagcctttcttgtacactatggagtactggagaccgagaagtttggtaaagactttttactgccagtgtgtatggagtcgttgctcatttaagtgaactaagctgtgttggtctgtatggatcacaaactcagcatgttagaggtaagagcgtcaatgttccactgctaggaggattgccaagtactcctttttgtaagtggagaggccacgagtttttggacccaacgccttactaacaaatgcaagggggtgaccggcttgcatcaggactgctcctatgcccactgcacatgcatctgtttccaatataaactgcttggagaagtctggaagagctagaactggagcttga

SEQ ID NO: 73579 - DNA, 670 bp, Zea Mays
ggatttgtgccgatctttagaaaatggtaaagagttgtgattctgttcataagagagaaagaaattatcaaaagattacttgatagatgttgcacataagatatctttgcctttctccaagatcatggtgtagaaatcctgataatttaattgtgcgtatttggatctggttagtgcaaagagttttgtgcatcagtggagtcaaacttttttcaaacgtttggaagaggttgaataaaaaacaattggcaaaaaatgctatattacctagacatccaaataggagagttgaaatgcagtgcatcaaatcgaactgcttagatgtttttagaattgaatgtgcccagcagtagcagcgaggatgagggagacggcatgaggagtttgactcacctgctcgttgtggccctacgggaagtacacgacacatgtgccgatggtggggaggcagacaagagacaagcgggccggcacacgcgtgtcatagctccgagttgaggcacttcttctctgcagaccacagtgcaccatcgtaagcaaaaaaacaaattgatcctaaaaccaacagcacatcatagggaagcgaaacctatccagtagtcactgacacacttcgcatgtggagtcgtccattgccgcggcgagggaaagcacctaggtctgcttggtc

SEQ ID NO: 73580 - DNA, 580 bp, Zea Mays
cactggagactccgactccggtgacgacaactaccgccgcaagaagctgtacatgatgtacggtgggagctgggagctgacctcccgcaggaacgtgaagtccctgcgccgagaggtcctttcggcgactccaggggtcccgaaggctgctccacatcagcgttggcagagcaccactatctccttcgggacatccgactgccccaaaaacatggcaggggccggcatactaccactcgtcactgcccctatcatcgccaacatgaagctgcatcatgtcctgattgacggtggggttgggctcaacgtcatcagccacgctgcgttcaagcagctgcggatcctgggatctcaactggggccctctcgtccattctcgggagtgggcccacaaccgttgtatccccttgggagcatcacactctcggttacattcgggactgaggagaacttctgcactgagaacgtccagttcgacgttgcggaggttaacctcccttttaatgtcatcattagcaggtcggccttgtactggttcatggccattgcccattgcgagtacttggtcctcaagatgtca

SEQ ID NO: 73581 - DNA, 295 bp, Zea Mays
caataattttggttgttacatcttcgtgcctcgttctgaggcaaattaccctgtgcccacgtttcagaagaagtggccaggttcttggatgaaagaatggttttacgtgaagaatgacttgagtcagaggaaatatatgaaaggaattgtccaacatccaatatggtctcgcttcaacattagaaggtcatccactgcacttgggaatgatgtgcaagcgtgccaagctgctttcaacaccgtgtgcacctatattggcacaagagacttagttcaagagcatattgcttacaaa

SEQ ID NO: 73582 - DNA, 761 bp, Zea Mays
aataccctaaaatttggaaggaataaaggagtgttttaactatgtgattaggagaaattcttgtttatttaattccatatgtatgagttatttgtttaatcaaattaataaattaaaaataagactttcatcatgctagattcaatgtctgctgcatttatttttgaattcatgaatcataaccagatttaattttataaattcaaaataagaatttaaaaaggaattagaaatggaaaacagaaaagaaaaaggaaaaaagagaaacagcttgaccgttgttgggccaaaaccctcagccgaacccaatcgtgggctcgtgtgctgacaagtgggccccgctgggcaaacgtcgtcgcaggggtattggagggcacccaaggggttgctagagcacctcaaacgcgttcccgacacattggagcatggggaaggaccagagcgatcgaaattacctcggggccaacgatccgggtaaggagtgcatcagatagttcacggttgtcttggctacattcgttaccggtcgttgtacattcgttaccgagcagagccagagcagcaggatcgagggcccatctgtgccgcccgtttgaacattattcgtcagctctagtgtagcgtcaagatcagaacgaatttagacaagtggtctaaaattaatcatcttcaggcaacggacctgaagaatgtttgatgcttaatactagatgtaatgtagcagtagttcgttggagtcacaagctcgtccaactttgacg

SEQ ID NO: 73583 - DNA, 418 bp, Zea Mays
cggagatcccgaaatcgcctgcgtcgatctcgctcgcccaaccgaaccctcacccgccgccgtgaaccgcagacttggcccatcgcgatcttggagctcttggctatataagtgcagggcgccgcaaacaccagctcgagcagggaggcaaacgaagagggagaaacccgccgtcagattagtgcacaccaaatcaacaacttgaccgtcgtggggcataggggcaatcccgggtgactaccgaagctaaccatggccttccagggcagagcaaaccaccaggccatcgtgaattcgtcgccggagtcatctcgccgttgtgaatccgccctgggccgtggttggggaattccgtgctgtaattgccggtccgcttctctctcacagattcacattctcgtatggtacgcgtagcatc

SEQ ID NO: 73584 - DNA, 527 bp, Zea Mays
cccacccgagccggatcattaccagcaacaccctcgagcactgggcaaccgctggcaccatccttgaggactgggttctccacaatagccacctctaaggctaaaggactctcagtcacctccatgggaattgaacaaccttgaccaacctcttgactccgaagaccgctttccaaggtcgacaaggcacgagacgctactcgggataactctaaccccacctctgggatgtcagaacaaacgtccatcatatcaccatcagctagctcggacaacatatcttcaggaacgacatcttcgagagcctgatcaaaatttgctatggataattcttgcagaccaacaagagcagacaaagctggagaaggaatatcgctagtcccccccactgactctgtaacgccgactgttcttttgaactaaggggacttcctcttcttcttcctcgtcctcgtcaacaatacggacaatatacggcatagggtcacacccattaggatcagctctggcagggtcacacccattgg

SEQ ID NO: 73585 - DNA, 952 bp, Zea Mays
gaaaaggagaaacttgtgaatagtattgggctaatttcagcccagacggcccagcaacatagagaaacggggcgcgctcacgcccgcgagggggactttgcagaagggtccttgtcttcttgaatatcccgacagagtccaaggcactatttaacacagtcgctgatagttacaaagacaccctcgcacttctatccattctcggttttcagtccatgatggcgatccgcgctgggagctgagctccggcgagctagaccggccggatgacgccacggcaggagctcccgagcgacagggacacaattgaacctttaccgaacacttcccctccatcaatttcaccaagggggcactaaatcgatcagttcacggtgaccgggcggatgggcaaggggatgaatgtgttctgaccaaacaacggcgtggataaccaaattgaggctggggaaaggttcacggattcgctagaggttaggtacacacttggatttgggcgaaataggaatcaaagagtgggtcgacagaggggtagtcatggcggcgttttacagagcaagggtgcgttccggtgatgggcttcggccgaccttcaattcgccgctttcgagagcaataagagatcaaagactaactaaaacagggaacaatttgataaatactaacccgaggagcgctggccacgggtgttgcttcacggcggagcaagaacagaggagagagggatttgtggtttcttcggtgaaattgagccgagtgctcgatcgcggaggtgcgggatgtgataaagaagtagaacccgggcgcaatttataggccaacgactggaattggatgaggaccgcggactttagattgcgcaggcgagctcaccgcgtggcggaacccggtgatggcacggtggccgccgtttaaccggggcttgccacctcagtaactttctgccacgtcg

SEQ ID NO: 73586 - DNA, 387 bp, Zea Mays
tttagccaaatcgaattacacttttagatgaaggcaattagtggccttcataacaacttcggctgctataacttcgcttatcaaagaggtgcaatgtttccagctctagcataccgaagcaagtggtcgaatgagtgggcaagagagtgattttacatgaagaatggcttgaatgagcaggctgatataaagggaatcatccagactcctattgttacatgcttcaggtataaaaaccaacatgttatatcaaattcgaagctcaggctgctatagttgctttcaatgctgtttgtacacacattgggacaagggatcttgttcaagagtttttagcatttaaaacatggccactaggggctgaatgggagatgtcgaagatgtctg

SEQ ID NO: 73587 - DNA, 687 bp, Zea Mays
accgtgggttcaaacgctcattggcaaaaaacgagccacaaagagggccacagagtttgtagccacagaggaccgacgtggggtgatgcgtgtgcaggggaaacattcagcggggtccacatgttgattttcttccggacgtgagggcgtgaggcaaaggaatcccgcatgcaacatgcaggtgtggcccatgggtggttttcattttctatttgcatgtggccaagagatttgtgcgttttgtctgtgtgcatgtgggtggggtccatgcatggtttcctcttctcggttgcatattcgcatgacgctgagaaaaatggaaaagtgaatcgtgcgtgggtgttgcatgccgcatgcgggtgaagtccacacgacggttctcttccctctccgcaagtctgcatctttctcctaccgcggaacgcctaggtctgcggcgccttcttctacccccggtcctctctctctcctatttctttcctctgctaatccgccacggcagaacgccatgcacacggcagtgagcggtttcgagcttgcaattagagccctaactatcgtatggacagttctgctcctatcccaaacagttaccatcagcaggtagggaaaagctcacacctggtaaagcggtagaccgagcagacctcaaccactgctcgtcgaggaggtccacgacgatactcc

SEQ ID NO: 73588 - DNA, 291 bp, Zea Mays
cttgaaggcatcgattggaagcctacttggtgtagactcctcttaaaaagcataagtgatgtagtatatgttctagaatagtatcgtttccgagttcgaaaccgaggactgaaatcaagttcaaattaaagtactcaccaaaatgtcttattgtcatttgtcaaactcgtccgttagtccaggttcctgtgtaggattgtataatttttatgggagacaaataccacgattgtttttattcttaattactaaaacaaataggaatacaaagtgttttacagtctatcaata

SEQ ID NO: 73589 - DNA, 366 bp, Zea Mays
tctcattcaacttcctttggggcatgagcatctactactaggaacattaaaaatatttgtagtatgcatcttcatctcatattattttcaattccagatctgagatgtaagtgtgtgaatcttatcaaccacggatcaacagagcagagcgcgactcggtcacgtcccctgaaaaggatggaatattcgcaaactagccatgatttactattgattgtttaatctctttgacagaagcattaatatagaaccgatgactgcctttagttttttatgggtctgcatcttgatttgtgacagatccattggcatttgcagagaagctggttttggcggtctttggggtaagtttatgtgccacttttg

SEQ ID NO: 73590 - DNA, 576 bp, Zea Mays
aataagataaccatgaactattaaagtgaggataaatgatacaaccaaggatatgtagtgagttagggagaaagcattatcaaggagaaaagtagagaggcaaaggtttaatatatatcaagatagatattgcgcaagggtggcaatgcaatggcaagaaaacaaaagtataagaagtcaagggttatatagcaatattatggattagagaaccaatataatatcgcccttaccgatctagtcgaaaatcttaatactaaagaacaatcctatcaacctaaccaagaagtctggtaatagatccaaaggatccatagcaaaacttcttgcggagtggggataagacagagaatagggcgtcgtcgatagcctcgaaagggtttcttttggcaaacttcgcttcaagttccgcaatcctagcttgatcatcttgcaatgcttctcattagaaccttctgatagacgaagaatcagacaagaagagttgaaaataaaagagacgagttttgatataaagtaagtttttatggaggaaaatatatcaggctttgaaagactgattggctttccatttct

SEQ ID NO: 73591 - DNA, 398 bp, Zea Mays
gacaagtaaggagatcgagtgcgagcttcctcagccacaaccttcagctcatatcccactttgttaaagaagacttcaatgaaacctttaattcgagaggggtcccgacaatccactttgactctaactggtccctccttgataatacttagctcatcgaccaccactggcttacccactaagcttgctacttctcttataatcccttcctcacgcgcaatgtctggcaggttgtaaattttgatccaaacacactggagcacagatgaagccttcagatctgctttggatttggttacttgaactctgtaactgtataaaggcaactcaaggctgctaagttttgcatatgattccaacgagcttttgtcaggaaaggaggcactaaaatcatattt

SEQ ID NO: 73592 - DNA, 564 bp, Zea Mays
gagttgtgtggcatgctgaaaacaatagagagtgatgtaaagaaaaccactggtagtagcagtcatgtgacacggtccatgacaagcctaactttaaaacgaagggtaaatctcagaagaagaagggcaaggctaaagatacaatctcccagccaaacccaccgcccaagggttgtcaaagatgagggttttagtacctagaggaccatgtcattggctcactcaacttggttgttggttgtgggtgagagattgtggcctagtctatgcagatattgaagtcatcacaaaactcaaggaagggacatctgatgaagtttgtcccattgttagtgaagatggagtttagagcccccaaagcagtaaacgattttctgaaagaagctagctcctgggcaatggtcatactaaacatcggctttgcctcgattcacttagtgaatttggtgatggagaagggcaagcgggggaatctagacgccttcgcaagagaaccaaccttgtttgagtccaatacgatgaatgaccaagtgatcggtatggtttgtagggtttaggttgtct

SEQ ID NO: 73593 - DNA, 608 bp, Zea Mays
ctcgtttcagcatccaccaacctccgacttagatatgtcaccacatgctcctttccttcagtttcttgtgtcagaacagcccaaggaccttatctttagctgcaatgtataatctgaatggtactcctgcttgtggtgcttttaatacgggagccgaagacaagtattttttaatgagatcaaatgcttcctgctgctctgccccccaagcgaattcggcatcattcttaagccgaaggataggggtgaaggcatcaatcttcctggctaggttagaaataaaccttcgtaaataattcaccttgccaagaaactcctgcacttcgaccttacaggtcggaggtcccacattccgaatagacttgattcggtcagggtctatctctataccatgttcatggatgacaaatcctaaaaacttaccagccgacactccaaaagcacatttacgtgggttcagtttcaacccacaccgacgcattttatcaaaggctttgcgcaaatcagctacatgagaactaaactcagccgatttgactacaatatcatcaatgtagactacgtgggttcagtttcccaacagctcatgaaagatcaaattcatagcc

SEQ ID NO: 73594 - DNA, 360 bp, Zea Mays
catccagcatgctagcagagctgcagcgattagcaccagcacgtaaatgatctaggatagcaagtaacacatgcaattgactcgagtagcaaatacccacatggtgtgaagttcctgtttatttttgtagttgctaattatatttcactagtcggtaaattcaggaggctcggtgatttagtgaaagttattgagtaatgatggatccaaacggaatgagagacatgtattgcaatttgcaatgctctatccactattttacttcattgccgcatttgattctacctgtctcgattcttactttgtcatacacagtttcaacttcgccataccttaatttggttctgtcctccgccactg

SEQ ID NO: 73595 - DNA, 341 bp, Zea Mays
tagtggtacgtagaacctggtcttagtggtactaatgcatccaaataaagtaggaacttctgtgttatctgtttgatgcatgcgtaaccgatgtacgaatgcttgaagcttatcttccttatgtacgaaccttttgtggaatgctttatccttttgtattaaacttatgtgcaatgcttcatccttgtgttcattttctatgaacctgatttgctatgctttcaagtctgacgtttacagttcaagtttgttacgtgttgtccaacttaatgtatttatgtatttcattccagaatggctgacaacaacacaaacacaccttttcgaccacctgctgccag

SEQ ID NO: 73596 - DNA, 594 bp, Zea Mays
cccgaacgccatcattcgtgttaggtcaaccccttgccttcgaagcctggggctcggagcggttcgccgtgttgtgccctgccagcagcctgcacacttaggcctagtcctgattgctcatgagtgtgccactggccgggggacacgaggaccataaatgttgcacagtccgaggggctcataggccatgagtgctctgcgacttgaggggtttgtaggtcatgagtgggaggtggaccgacgcctccgttgtggctcgatgccagacactgataatgcggccggtcatttatgacaggtcggtcttgggctagacacgagatccactcgagtggtttcctttcggcatgcctagttccccttgttcggttctgccacggccaaccccgggttcgatgccgtggggtttgtcttagggcggattcttctaggatagacgttacctatctcctccgactgaccagcgggccctagttgccagaggcctttccctagtgggcttgttgactgatgggccccaaggatcgcggatcgtatctccaacagtagcccccaagccctcgaggtgagaatatttccccaatggggctttcc

SEQ ID NO: 73597 - DNA, 311 bp, Zea Mays
atcatttaccaccatggagcaccacgcaacatcctcaccaaccaccgacatacataccagagggatttgagtgcaagttacaatacatgctgctatgtaaggggcaacaaccacctcagcgaccgttacttgtcgtcatgataaaaataagattgatgatcatgagttacttgagtggcaatccaagtacaatagcagaccatcttttagtagccatgccacatttttgaggcatcagcatggacgacatgcatgagcatctagtagagctcctgaaagaccagtttgggatcctttaaacaacatctttg

SEQ ID NO: 73598 - DNA, 519 bp, Zea Mays
ctcaagccaccgacgctgcctcaaatttagctctttctgagtgaaaatgtacttgagactcttatgattggtgtaaatgtcacaatattcaccatagagataatgcctccacgatttcagggcaaacacaacaacggccaactcgaggtcatgggtaggataatttctctcatgtttcttcaactgcctagagccataagcaatcaccctgccttcctgcatcaacacacaaccaaggccaatacgagaagtatctgtataaactgtgaaacgcttaccactctcaggcaaggctaagataggagcattcactaacttgttcttcaatgcctgataactgacctcgcaatcattggtccagacaaaaggaacacctttctccaagagtttagtcaatgacttagtaatgctggaaaagtttggcacaaaacaccgataatatccagcaagccccaagaaactttggatttttgagacactagaaggtatcttccactccaccacaatagcgacattctt

SEQ ID NO: 73599 - DNA, 688 bp, Zea Mays
tgatgtgactggtcatgggtaaaaccctagagtagggtacttaaccctaaactgggcttagaagagtaaacaaagctgactttggagccctacatctcaggattcttgaagtttttgctcaaagtcaatatagcaaagttgtagagctatcataggagaacaagtttgattaagtgactgagcactggtgctgaatagaaattggagaaaaatgagcccaaagttgggctataagtcagcctatagcttgaattctgattatcagtgacataggatgaactttgggagccctttcaaagataatccagtgggtgtttgagcatggttaccatagcaagattgtacctggattatagggctagaactttgttacagagagattaatacattctcacgcaaaaatccaagatcttggcgtcacaagttcctcgatcaggcgctctgaatcagattttccgtggtacagtgccactgaaatatcccagggttcagtccccctcgccgccggtgatccacgcgtccggatttgcgccggtcgccgggattcgtgtcaggcgcgctgtggatattcacggggagttgaaagatctcgcggggaggcagatagggtcgcaggggaagcttatcaccgtgcctgtagccgttgcgacgtggccggaccgccggtgtcatcgtggacactccggcg

SEQ ID NO: 73600 - DNA, 801 bp, Zea Mays
ggaacgagctggccacggtgagggctttttcacggtggtggaaaccgatttggggaaacttcgaaattggcgcgctctagtgggtaatcggaggcatgagttgctggattaggtgcttgactacctaacggagccgagggtgtgctcaatttatagtatgcttgagcggcggctagtgaattggatggagacgcatggcggccggagaggaggaggggcactagtgcacacgattagtggctttcaccgtggcagactcaccggcgacgagccagggctatagagcagtttactgcgacgtggtaaagctttagggcacgtggcatccgatcgacagcggccaatcccgatgaacttatctgagccggccgcaaagcaaagggatacaacagccagccgctggtgttatccccaggcgaagatcttttacccagaagagttatccggtcatcggtgagcacgaatcacaacgacggcgtgaatccgggcgcacaatcgccggcggtgagcttctctgtgttggcgtcctaatccggttactgtaccattgcatgggttcatccgttggtctgacaaagcatgtttggggtcaatttgctccatattttatgtggtgacccaaccaatactctgcatcaaagttgaagcctaataaaccagctttaactttgttactttgtgcacccacaaaaagtcacaggatcttactcaaaatcgagctctaagttcatctaacttcacagtttctgaaaattcagacctaaggctgactgaaagcacaactttgagcttatttttctc

SEQ ID NO: 73601 - DNA, 408 bp, Zea Mays
tctatcgcgaagactatccgcgcagaagtcgcctaagggtgcagccggacttagcacaacaagtgcgcaaaaatccgaagtctatcgcaaagactatccgcgcagaagtcgccgaaaggtgcagccggactaagcacaagcgcgcaaaatccgaagcctatcgcaaagacttcacgcaagcgccgcccaagggcacagccgacccagtacaacaaaagcagaaacgataccaagaccaattataatcatactggcacagcataaccaatcacaccagacaaagtacacggccctcgcaggcacaggcacgcgagggcacacaactccattttataagcccttacacacacacaagcgagggcaccgcgccctacatcggctcaaccttaggaataatccccatttctc

SEQ ID NO: 73602 - DNA, 612 bp, Zea Mays
cggcgggtaactagaatgtagaataagatgttgaaggatatggcataaaatcggcaatgtacaaaagtgcataaatattatatactttgtggcgtaaaatgttgagtcattgtgcgtaagtattgtgttagggaaattagttttatatgtacatcgctagaatatcgggacggtttcggaaataatggaaataccctagaaacgtggatgcggttacttgtatagtatccgtgatttcctttcatcggaaaaaacaccacaaagcctacataactatttggaggtggagatggccggctctggagagtcgccggcgatggtaggaggtggcgttcatcttgatctagagacagagggaggagttgatggaaactcactggtcacaccacctcctgctctactgggtcctgtaatcgacgagatgagcataggggaagaaggagaacaaagggtccgacctcctatgtccaatattagctccatggagatggatacgcctcaaatactgcattcacatgtaagtccaattgttgtatttgattcttgattgattagattgttatgatcatattccatcgtacaaacaacaatgtcaattaatttgcagaaaaa

SEQ ID NO: 73603 - DNA, 799 bp, Zea Mays
gcacaatgagacagtagacagggaactgtagcatcttgttatatgtgtctcatccgtgtacatcataggggtatttataggtaaccgagaggggcagtgggtccctaagtactgttatacccctggttacctgctacattcctggaatattccccttaatgtggtcattacagtgggcagagtacaataattcagacatgctacgaaatctaccatgcaatggggcttacaagtgggcctagatgactacggggtggagcctgggtctccccgtaatatgtagtggcctatgcctgcatgtcgcacccttgactctacgaatccatgaccttgacttcgcgaggactaggagctcgctatctaggaaaaggccttcgggctgcgtctgaggctacagcgagccccctcctcgtttgacgtggaccttcgccttcgccccctaacgaacggagaggtgtggagactactgcgtgcctaatccgatgtacccttcgcctgatgcacctatataaaaaatgtttggtcatagcgagtcagacagatcgaggtcgtgatcggcctttgctttaacaatgagctcatggcttaatctaggaaaatctataaaattccatgcaaaacacataacacattccttgagaagcatgattaactcaactttgtaactgactttcatgtttcaaattataaacatcgatctaggcatatagccatctgtagtatcgtctttctctagtgggttggctaacgtgaaacttggcccaacttattgagctcattaaagtcattaatatctaca

SEQ ID NO: 73604 - DNA, 410 bp, Zea Mays
ctcatttccaaagttaactgggtgaatttcgagatcaatttagttttacccagtttgcttctagtttttgttgaaaaagttttaacttgcctattcaccccccctctaggcaactttcaatcgcgaagggttacgcctcaacggccatcgaatcaccgatcagcggcccacacggctccatcgacccattttgatctgagccgcatctcatcaggttaacggttcagatcgcaccaggccaaatcggtatcggacctctaatctgagccgatcaaagggagatcaacggccagtgaccatcgttcctaacttctaatcatggccgcaccagtctaatccgatggtgccagaccgacttctccaccccaacccagtgtgcggcggcgccgccccttcgcaccgcacaatca

SEQ ID NO: 73605 - DNA, 397 bp, Zea Mays
taattttacaacaagattgattacacaatagtttttgtctagaaaatagttggcaataagttttaatccactgtaagatcgagtaaaatattgagctattgcaagggtatcataaatttagcttaagtctgacagatatcgtgtggcaaaagaataagacacgtgtatatcaaggtctagctgatgcatctttgtgcttgaggtcttgaaattttatcttttcattattcatacaaagtagtgaattgcctagagaccaaaatttcgagttctgctcctcgttcatgtgatggtaatagtttgcacatactcccatttcatgctttttaggcagtggcttgctaggacaaatgaatcgatagaagtgtcttttgctaccaccaccgctaccctcgcc

SEQ ID NO: 73606 - DNA, 331 bp, Zea Mays
aggcagcacagtgactattttcctggcaaaccgtagactgatctagtcatctaatctagatgctgctgcatgtgtggcatgttgcttgcgatgcaactctcagcttcctgttaattattcaagccaaccactgaaccacacatgcgatctctcctagctgtatctcgcatcacagtgaacaaacttttacacgaacgtctcaacaatggtttgatgagaggagagaacatattccacaggccccatggaagaattatttgcgaagacgatatctagacacatggcgtcgtcgccttgctgcactcgtcgcttggaggccactactacaaga

SEQ ID NO: 73607 - DNA, 568 bp, Zea Mays
aggaaattcaatatttagggcatgccttattagctaaaggaattacggttgacccagcaaagtcaaggatattctggaacgaagatctcctactactgtcaatcaagttagaagttttcttggactagttggctattaccgcaggtttattccaaatttctctaagatagtaaagcctattatggagctgctaaagaacgatgttaagtttaattagtctctcaagtgcaacgagccttttgagcatctgaaagagctattgaccatggcaccagtgttgcctcaactagacattggaagtcgtttgacatgtattgtgacacgtcaggcattggcattgtatgtgtcctgatgaaagaaggttgagttatagcttatgcctcaagaaagttacaccggcataaggagcactacccaactcatgatttggagttggcagtagtggttcacgcccttaaaatctggcatcactatctgctgggtattatatgccatatttacactgatcataagtgcctgaaatatatttttacccaatcagaattgaatatgatacaaagaagatggc

SEQ ID NO: 73608 - DNA, 538 bp, Zea Mays
ccacaaagaagtggtagacaatgtgacacatggcctcactccaacaaatgtcccacaaaagtaggaaaatgtggatagggtgcgaacagtggacgtaaggtgtccaagctggagactatagtagtcaagaatggtgtacagaaatctagagagggggaagtgaactccaactataagatggggatagaaagcaccgtactcgccgggctcctcctatgggagcaatgccaaaaaggtagcgggatagacgttgtccaagagtggtggcgagatctagccaatgatctctcaaaccttgcctagtccctctttgtttagaatacgtgccttcgagaggtgatcaaggatggatccgccatcacaaacatagaagtttgcaaactcccacagttccatggcaggctccaagcctccaaccaaccactgctagctttgcgaaccatatacaatgtgtcgatgtgcgatgtctcttatgtttaacggttgtttgtttaagattataatctagtcatattatacaacctaacttattttgaac

SEQ ID NO: 73609 - DNA, 293 bp, Zea Mays
cctatgctcgccccaatcggcgaggacaacaattctcgtttaccaacctggtctactcggagatggccacgctccatccccatacgacggtgcctaccacttcgcgaaaatttacccacactatgttttcccaccatccttcgctgcctatacccagtactcgcactaggaagatccccagcaccctccacacgcggcgaagtctccgccgcagccacatccaacgcaacaaaataatccaagccttcatccgaggactcctccgtccaaggaaacgaactcccagattcacc

SEQ ID NO: 73610 - DNA, 476 bp, Zea Mays
aattttcgtgagttttttcccgtcatccacaaaagagtaacccaaaactatcaactactcagatagcaaattgtttattattttcctgcatgatgtgttgaatttacctatcactgtcttttaaagttgaactgcttgcatcatttcatcagcacctttaagttttatgggatatcaggttattagatttcttggtttaggagatgaacatacattaaccgttatgttccttttctgactaatatgtggtagacttattggaaaacaaacaatggacctgtattacatgaagagaacattacactgggtcatttactattgatagtggctggttggagcacatcttagtatttaaagatggatttaactgctgacagtcaagactgaatcaatgcattaaaacatcttatttttaggcattaaattctcacacacatcttgctgagattttgtgtgtgacttcagtcccgtgcttc

SEQ ID NO: 73611 - DNA, 598 bp, Zea Mays
aaccttcaatagaacgaagcagtgcttcggtgtctatccatgcgtcatagtcatctcgagttgagagaacgcttttgtatgcatgagtttcgttgattatctaccgcatcatcccctctaggtcgttgatctgttcagcaacgactacgattaggttttcaagttttggctcagagggtgttgctgggtcgtcgaacgcggcgtgggtgatccagatcaaaatgggataccggtccgtgctattgtgatccgggacgtcggggtcacaatcaacaaacgcgatgaagactggatttgtgttgtctgatctaatctagacggcgtagattagaccaatggagaccccttcactttagtagatcgtgaccatagatggtgaatctaacggttcaggcacgcgcatatccttttggtcagccgcttttacatatgagcccctctattttcgatgaatcagcccgccatccacccaaagacatagaataatacgcataggtcccaaaatttacaccgggctccctggaaaactctaaaataatatcgccaacccaggaatcgttgtatagtaataaaactaattctaaaattgattttattg

SEQ ID NO: 73612 - DNA, 467 bp, Zea Mays
caaggccaaggaagctgcttcgattgtgcaaagtactgaagaggcgattgtagtgccgaaggtgcctacagtcgggccagccgaagctagggatgataaggctgaagagccacaggtggaaaaggtgaaaaaagcaccagaaatcctgagccccccgacagaggcagatttgccagagatgcaaaaaattcctgccccaactcccaagaggaggaggatggccagcgtattagacgctattatagagactacgaaggccctgagccctgcccctaagaaaattgttgaagctattaaagttcaggccgaagccgaagctaggccttcagtgcccatcgagacagagcctgccgcgcctgaggaaaaaatggcagagcagattgcacctgaaaagatcgaagctcctgctcccgaagctccgaacgaaaatgttgactacatcattcaacatgcttcggggaagaaac

SEQ ID NO: 73613 - DNA, 1159 bp, Zea Mays
tctgctcctattggattttgcggggctgggcgtgagcgtgtgggctcttgtagcgggggatccatgagcagccaaccctagcttgcctggacgggaactctctacagctgtctttcgcgattctcctcgggcgtgggttttgttgcaggaggtgtttcaagctgcattgagccaccgtgcccggagtttcctgtctcttagtccttcgttcagttgcggatttctttgctgcgttctggagtggaggatcgacgtgctcctttcgtggctgtttgatgcttgttgagttcgagtaggttcgtattcctggttcggaattcagtaaggtcagtttctcgctgcttggaacttgatccgaggtgttagtttaatttctgagatatgatcgggaggggatcagcggtgctgcattttctcgggagattgtacggcgcgcccgaatcctgctctgcactgctgtttcctgaagtgcaaagagtgggtgtctattgtcttgttgcaatgcaactcatgtgcatatccagttctctttctgtccctaatgacttgtttgttttcgggggtatggttgccatggttgattgcgatatatggaaatggagggtggaatttatctctctactatctgctgtgtagtgggccattgctgctgttgacactcgacggtaggatcggccgttgccctatatatttgtgttattaggtctgtataggaggtgatgatgtttgtttaccttattactcgccgttagcgggagcgcgagtgcaaacagttgttagtctatcgccattagactccctattttaaactccactttataaccaatatcgtctacagtacaaaacagtgttttgcacacccgtttacacacccgctggagttggccttagcctcgtcacatctgttctacatttgtgtgcctgaaactctgaacctccctactggttactactcctattcatggtgctgtatttaaaaaaagaatctgagacgtcactctaacttgagaaattaggaatagagaactgctaaatctgacatcgctcataggtcttctgttttctgttctccctttatatggagctttatgtgattgctcatgattttcttgcttagtagtgtatctaattactgatatatgactgagacttcttgttt

SEQ ID NO: 73614 - DNA, 1048 bp, Zea Mays
aagaggcctagcgttgtggtgcctgatgacattgtggcggatgttgtttctatgttgggcacttcttgtaatcctccggcttctagcggtcccacagacaatgttcctcgtgggggttctcctacgtaatgctttgaaagaaaacatgaaactggatattggttgcttaggttagaggacaatttatttcataacagtttattttttgatgtctgttgaggccttatgcggtattattttgagttgcttccagcttgagccaattgcttctgttagtagggtacagtaggcacccttagttccatgaggctgagcttgttgaggctgagcttgttgctccgacttaaggcattccctaattaaggcgttctgtgagcatgagcttgttgctccgagtgctccattagtagggtataattggcacccttggttttgtaatcgagagcgtgccgacttaaagcattttggacttaaaccgatcgctccgttagtagggtatagtaggcacccttggttttgtaagtgagagcgtgttgcactgacttaagatgtttctgacttaagccgattgttccattagtagggtatagtaagcacccttggttttgtatgcgagagcatcttgcaccgacttaaggtgtttccaacttaagctaatcactctgtcagtagggtataataggcacccttagttttgtgagcatgaaggcgctgtgtcggcttaaggcgtttctgaattaagccgatcgccccttgagagttttttgcatgtggacgaacacataaactttttttgcttaatattccatgagttccctaccgaagtaccatccatctgagttagccagtaagaccctagccaagttacttctgcgatcatgaagggcccttcccatggtggtgacagtttgtcccgtccttctcttgacatatgcggtgaagcaccaggtctcctactacaaatgcccggtgtcgcactgccttatgatggtagcgcctcatggtttgctggtatctggccgacagaaagaccacatttaaatgttcc

SEQ ID NO: 73615 - DNA, 331 bp, Zea Mays
ctccttctcagccttggataattcttgaccaattatattttgaaagttgaagcccttttcttccgaaatatcttcggcaatttccttctctttctcaggcactgcggccaggacttcttctgcagctacaacagtctcctccgcagccaaatctaagagcactttatcaataacagatagtgtactctccagattggtagcttcggtagtggcagcttcgacagaagcaacaattttggcagctggtgttattttttatgctgaggctggcggtggcgtttcctcaatagcttgcataacagtaacaattcttcgcttttttggcccaacc

SEQ ID NO: 73616 - DNA, 399 bp, Zea Mays
attcggcctctttggccgcactcttttcaaaacctatattaatatctggagttattccttcggccttctgctcggtggcgtcaagcttcgtctcagtaggcactgtgggctctgcctcggtttcagcctgggttattgtagtctcgacttctattcacttagtatcagttttgggttgcgttttgtcagcttcggcaaccctccctgtgggagcgggacttatggagtcggttgtttctaaaatatctaatacatttaccatcctccttctcttaggagttgtggcagaactcttttccgccttcagcgctgttgcttctgttgaaggacttaaaatccctggcatctttgttacttcttcagtttttcacttttcagccttatctttgtcaaccttcg

SEQ ID NO: 73617 - DNA, 596 bp, Zea Mays
gaaaaaacaaactcttctagagaattatcatattgcaccataatacaacacaaaaacaaagtacgcaaaagtaagagttatcataaaggttacttaattgtccacgagactaatataacataaactaaccataaccaagatccaacataaaagcgtacaaatcaatacaactaaacaatgactaatattatttttattatagcacatgcaggcccccaaagatatgaataatctcataagtaatgtgcacacaagtcgctactctcgtcccgacaatgcatcttctaagctcaagcatatgagattgaaacaaggtgtggtgtttatgtaaaaccttagcaagcatacaaaattaattgttatttaaatcaccagttgattaaacatcaaagttaaataatatgacaagaaatgcataaactacatcataaatatgtaaatatatatcgaaatgcaaatataaatgatgcaatacatgatttaacttctactgtcacatcctagaaaagggagtgagcgctgcaaccacattgatcatcaaactatgttgttgtattggtacttatcgcatcaatttggctatagttttctctaag

SEQ ID NO: 73618 - DNA, 654 bp, Zea Mays
tacttgttggtcatatattaaagttccttaatagaaccaaaataggacaacacggttaaagtaaaaggattctttctctaggaggacaaatctaggttgaaggttgaaagtaaatgcaagggattcgaagcagtcaaattcaattcatgttcatcctacttttttattaattaaacgatgttacaagactaccttcagaatgttcaaagacaataaagacacacctaaattttatagctttggacgtgcagcgatccattatgaaaatgtatatctcatctcaggaagaatctggctctatgcataggcacagtaattctatttatagggggcatgatacacatcttcatataaaattataattacaatctcgaatcctatacttgtgaactacacggttcatcaaaggtattgctatcttttcttcttggagacgtgctaaatatgtcgcttgattccttctttgttttcttgccatccgcttcacgtgtcacaaggtgcttcggctaaacaccaacgcctaagctagtagtttgaggactagaatcattctaggtcggtagaggctactgtgatgaagatcactttgttactcctgaaacaaaccacaaagcaatgagattaattagtttgagtaccttcggcaaaggtata

SEQ ID NO: 73619 - DNA, 499 bp, Zea Mays
gttgaggtagctccttcagtggttgttgcagttcttaaaaagtttcagagcatacagactgtccaacaagccctcccttcctccaactgggtccaggtaatcaaggggaatctatttcttgttggcttagaggaattcttgcaactttgggacttattacaagattttcaattgcatgagaggcccgacaggcatgtgtggaggttctctaactccggggtgttttcctcaaagtcggcttacagagctttcttcactggtgttttttctttgagccgtggaaaaggatctggagaagctaggttgagcctaagtgcaagactttcatttggctcactatcaacaagtgttggacagctgacagactaaagaagagagggcttgtctcccgtgagagctgcgtcctttgtgatcaagatgatgaaacaatgcaacatattctctccaattgtgtttttgcaagacaattctggcactccatcctctcccccattggcct

SEQ ID NO: 73620 - DNA, 517 bp, Zea Mays
gatatccaagcatggatttgttcgatgaactgatgtcggcgtcgtatactcactgattgactcgttaccccatggcgctgccatcttccagatcagattacgcccttcagccagccacgccataaccaatgattcgtactatctaccttttttggaagcctatgaatatttcctcttgaccatgcgcatatccattatcgtggacgcgatattcacggcgcatatcatttatccgctgaattctaggatcgtgggcgcgctaatcgtgggcgtaacagccatttatgcaatttatacatagatttatgatgtcgtaattgtctgtttaaatgtgcttccccaattttcgggttacacgtcaccggcccacgttcggacaaatggcccacgtttggttacgcatttctgtactaactattacacttgcgtaaatgcagtgcataaatgcgggccacctggatcggcccattcggtgcgaccaggctcggctcgtctacgtaacctcgtcggggctccc

SEQ ID NO: 73621 - DNA, 524 bp, Zea Mays
ctcagttggaggctcgttctcaccacgcacaatactctgtgcaacgcatttagcgtttgctcatgttggcctcacctaaccaatttagatagagactacataaaaaaacactgaataatatctgggaacaaagtgagtggtgtgaagatgggttgatgtcatcatcgtcgtgtgtggagtggagtaacgtgtttccctgcccagctttggcgttcggggagtggagcgccggcgccggtgcgtcggcatcggcacttgcatttcccaatataatcttccacgcagagtggcgtgcgaccggctggcccatcttgttgacgggcagcgcaggcgtaccgcggacggtggacggacaccgccgccccaggctccactggtcactggctcactgctgcacgctgctggtacaagaacggactgatccattgcagcaccagcggcagccggaaggtgtagaactgtctcgtcacaacaagtggagcagcgcaggtggcagagcccccctttttcttctcacttccgat

SEQ ID NO: 73622 - DNA, 491 bp, Zea Mays
tagataggtagtgtaggaggcctatataggggtgtccatggagtagcctataattctggtgtcagcggggaagcttcatcatagagtaaatcatgtacattgaattcttcatgtcgaaggttgtcatgcttgtgtccatcataatattggtccctgtagctgttcatgttttcgtgcgctttgatgttgcgcatctctttagttccttcatcaatcttcctctaaagctctgaaagacaaaccattttctccctgcgcttctcaacttgcaggtggatgagtccaaggttgctgatctcctcatcaagttcatcttctcaaggtggtgggctagatgccttcttcttctggttccttacttctctgatgagagcttcattcccttgattgggatcgatgagtccaaggatggagccagttgtatgctgatgtggttgtggaatcatcggaggtgggcaccaatgttgggtacttgatttcaatcccctgaa

SEQ ID NO: 73623 - DNA, 2307 bp, Zea Mays
gcaattggttccatctcaaactgatggtccggatcctgcaagaacttcctcagcatagagacatgaaaaactgggtgtacccctgccatggaatccggcaattgcaagcgataagccaagctgcccacccgggccaagatagtgaacggtccaatatatctcgggctaagctttccggagacactgaactgaacaactcctttagtgggtgataccctgagaaggacttggtcacccactgcaaattccaaatcccgcctcctcacattagcataactcttctgacggctctgagcagccaaaatattcttacaagtttcccgaaccttttcagaagtctgctcaacccaatcaggaccaaccagagatctctctcccaaggtctcccagcacagaggggagatacactgcctgccatacaaagcctcaaatggtgccatcttgatgctagcctggtagctattgttataagcaaactctgccaatgcaagatgatcttcccagctacccttccaagacagaacacaagcacacaacatatcttccaaggtttggatcgttcgctccgactgaccatcagtctaaggatgaaaagcaacactaagagaaagcttggtgcccaatgcactgtgaagactctcccagaatttggatacaaatttagagtctcgatcagaaacaatggacttaggtaccccgtgaatcctgattacttccttcatatacaaggggaccaattctgaagctgaattggtggtcttcatgggaataaagtgcgtagacttagtcaagcgatccactaccacccaaatagcatccctgccccgaggagaacgaggtaagcccaccacaaaatccatggtgatatgctcccacttccactccagaatctccaatggcttcagcaaacctgcaggcctcttatgctcggccttcacgcgctgacatacttcacaggcggccacgtacttagaaacgtcaaccttcatccacttccaccagaagttttgcttcagatctcggtacatcttggtttcgccagggtgaacggtgtaaggcgttttatgagcttctctcaatatatccatcttcacctctgatttctaaggcacacagaggcgacccctgaaacgaaccaaatcattctcatcgatggagaactctcggggtttaccatcgccaaccctctttcgagcttcctgcaataaacgatcctgctactgagccgcacgcactctctccatgagggaagattgaacaagcatacgagtctcctcactagcggtgccgacatagcacaaagcgatccccaaacggtccagatcagcaatcaactacaaggccacctttggaaccccggacctgctaagggcatcagccaccacatttgccttccccgggtgataatgaatagacaaatcataatctttaatcaattcgagccaccgacgctgcctcaaattcagcttcttctgagtgaaaatatacttgagacttttatgatcggtgtagatgtcacaagcctcgccataaagataatgcctccacgactttagagaaaaaaccaccgcggccaattcgagatcatgagttggataattcccctcatgcttcctcaactaccttgagccataagcaatcactctgccttcctgcatcaacacacaaccaagtccaattcacgaagcatccatataaattgtgaaacgcttatcgctctcaggcaaagctaggataggggcgtccaccaacttgctcttcaatgcctgataactgacctcgcaatcgctggaccagacgaagagaacacccttctccaaaagtctagtcaaaggcttagcaatgctggaaaaatttggtacgaaacgccgataatatccagcgagccccaagaaactttgaatttcagagacactagagggtctcttccagtccaccacagccgcaacattcttgggatcaaccgcaatgccctgctgattaatcacatgccccaggaaagccacttcggacagccaaaatgcacacttcttcaacttgccatagaactgattctcccttagggaacccggaatgagacggagatgctgctcatgctcagcctcggtcttagaataaatcagaatgtcatccaagaacatgaccacaaagtcgtccaagaactcatgcaacatcctattcattgcttccataaaagcagcaggagcattagttaagccaaaagacatgactatgaactcataatgcccatacctggtgcaaaaagcggtcttctcaatatcctcctcacgaatcctcaattgatga

SEQ ID NO: 73624 - DNA, 800 bp, Zea Mays
atgtagctgggttatagctctgcaactttgctacagagagttgagtaagttactagagaaagtttagagaaatttggacctaaaaacgctctgtcaggttgtctgatgaccctcgccatggtacagtaagcccccaaactgaagaagatcctgattcatccccccgctcgtcgccggtgattcttcgccgagattgatgacggatcgccacggttcgtgcaccgtgggcagcagataagctcgggcaggtaaatatctagcgcccggattgagttgagcctcgtggcagctaagcccgccgtacttccctccctagctcatcggtcaattggataacctcaccgccatcaagctgtcgccgttgtgcgccatgtgcttaagcactggtcctcatcgtggtgactcactaggtgcatgtccagtgatcaccggagtaactgccacggtgaaagccgcttattccacgcacagagctcgtctctcctccggccgccagcactactcggccgaattcatcaccgccgctcgctaagcctataaattgagcacgccgcaggctccgtagggcagtgaactatccagccaccacgaattagcctcgattgttcgccggagctcacgaattttgaagttcccccaattcgggtttccgccaccgtgaaacttacctcaccgcggtcagcgtgaaccaggtcagcctacgtcttctgctctctcgtttaaatattctcaccaccccgtaatgcttgccgaaccaccaatttggactgagagctcaccaatcacctggaacacgaacg

SEQ ID NO: 73625 - DNA, 510 bp, Zea Mays
ttacgatctagagtccatggtgctactatggataaatcttactgaggtgctcaatgttccaagagttccctatcggagtaccatccatctgagtgagtcgatatgacccgggctcaattacttctacgattataaaaggtccgtcccatggtggtgatagcttgtgccatccttctcctgattgtatgtggcggagcactaggtctcctactgagaatgctcggtgacgtacatccttgtcatggtaacgcctcaaggtctgctgatatcgggccaactaaataacaacatttaattgctcctcttctagtacatcaatttattcaagtcgggttgcttctgcctctgcgatacttctgaaggccaatcgggtgccccataggttagatctgctcgcaatactacttcctacccatacaccataaagaaaggagtatttccatacaaagctcgactgggctaggttcgcaaactctagactatgtggggcagttctctgatccattttcc

SEQ ID NO: 73626 - DNA, 385 bp, Zea Mays
agaaatttgaacaaccccaaattttttacacacttggaagccctgtagtacttgaaactatcttccaagagtgttagccaatagtagccataccacatggttaaccatttcatcttatgagtcgactagtgtgtgttgcacatgccttcgtgcacatcttgcatcagctctacagcttgggtgtggcccaagcatttcaaaagtggtccttcaagggtacataatacatttcatttccaatgagtacataccttaaggccttgtaccttatccacttactttctccttgagccagatctttcaagtagttgaaaatatcggctctctagtagcctgcattgatctacagaatctccacgtcatcatcctggttggcaggcatgta

SEQ ID NO: 73627 - DNA, 2526 bp, Zea Mays
ggtcatgactcagtcaccctacagcgtttaaaattaatgttttttagtacagaaggactaccttagcacactttgagtatatgaagcactaacctcgttttatatttttcatatatagcacctttaccatctgctgtatttcaagaagtggatggagagagtgaagagagaaggaaggcaagattggaacgacaccaaagaacaatggagcgtgcggtatgctaacctataatcaatctgcaactacctgtcgtttagtaattataaaagtaactatctgttcatatgatatttttcaggcaaaagctcttgctgagaagaatgagcgtgacttgcaagctcagcaggagcaagaagagcgacatgtaagctctgtatcttatcatactgattctggactttaagtagataaatgaattagatagtttgattttttgaggtaatgtggtttctttttttcagagaattggtgaatcacttgattttgagataaagaggtgggctgctggcaaagaaggcaacctacgggccttgctaacaacgttgcaatatgttagtactccgtttccagtgtagatatatgattctgtttccctttctacttataaatatgtttttcgattgcagtcgctgcatgcttgatgggatcttacctaacttgaatggggtgctagtgctcattatggagaaatgcaccttttagtgtttggctgggtttcatggagtttctcatctgcttacctttgcgccaagtgacagttgatttgttagttgaggttgttttctagtggaaagcatgtataagtgttgtgtgatgtttctatgggctctaaatcctttcatttttgttaatataatgatacgtgttagagatggccaaccaagtgtatttccatgctcaaagggacaaatatacaacatacgtatgcaaagaagttcttgaagtagaggaaaaatacataagcatcctatacatctaatattgccctcaaacgggatctacaacattgagtttggagagtaagaatcgatgatgggctcgtgtctgtgcgttgatgaagaaatcagctaactgaacctctgaaggcacatggtggagcgtcacaacttgatcatgcatctacgatctcatgtaggaagcaacaacgccaatgtgcttggtgagctcaagcttgactggggatcgaacaatacagaacacaacaatgttgtcagaagaaaggagttagcgtagtagcaggcacactgaaattctcaagaagccattggaaccatgtcacctccacagctatacttgctatggcaagaaacttagtctcaacactcgaggggaaacaactatttacttcttggttttctaggcaatcaaggagccaagaaaaacataataagtcgagagagagcgatgatcatagattcagagtgattgcccttgtcgcatcagagtatgcctgaagatgaagggagctcaagtggggaaagaaaagacgacgtgagatagtttcacaaaggtattgcagaacgcgaaggaggtgagtacaacgaagctgtgtaggagccgagacaagctgattcaagatatgaaccgaatgtgaaatgtcaggacatgtgatcccaaatagacaaggctcctaattagctgatgatagtataagtggaatcattaagtggcgcaatgttggtagggcataagtgaacaccaagctccataggagtatcaacaatgcggtgatcattaaaagcaacataggaaaggatgtcctgagtgcacttctcttgagaggataataccatcaggggtggaagtgacctcaagaccaagggagttacagagagggacccaaatcggtcatcgagaatgtcttactaagatgctgctttttcacagaggcaatgtgctaagaatcgtcacctacgatgatcatgtgtttgacatagagaagtgtgctaccacgagaagtgtggacaaagagagcaggatcgtggtcactaggcttgaagctagtatcagcaacaataaaagagaaatgctcaaaccaagcacattttgcttaagaccatagagggaacgatgcaaccaacaaaacataccatcaagaacagagtagcctggatgtagatgcatataaaattcctcttgccgttcacctatgaggaaggcgttctggacatccaattgagagataggccattgacgaacagatggcacaacgagaagggttcgaatagtagtcatgtaagcaacaggagcaaaggtctccttgtagtcacgactgcactcctgctagaaaccatgtgctacaaggaaagcattgtagtattcgagagagccatctgagtgagtcttaaccttttacacccacttgcgggagatgggaatgacacgaggtggcaaaggagtaagatcttaagtgccagtacacaagccatctcctcaaccatagtgtgctgccactcctagtgggcagcaagctcttgataggttgtaggcatagccaagacaacaacagtgaagccaagacgaca

SEQ ID NO: 73628 - DNA, 689 bp, Zea Mays
gagtgatccagtgagctaagtaccatgatcattacaacaaagttgtagaccttatattggtgaatagacttcctataaggagttggacccggtgttatgtgaattctagagtaaaatgtgtccaaaggtagtcatgtacagtaactaaataagatcatgttccctatatattgcccccaatgatctcgagccgtgattcgagctcgaagcagagatttgtgcttggtggtgagtggataacatagggggaatgaaaagatcatgagggtgatgaattcaagctctataccactgtgctcacatgctcttgcgttctgtcgtgttgtcgatgctagggtgatcacagctcatcgtggttgtgccacacgataggcagttttacaatgttgctatggtcgtggcaagcagaaagttactacccctaagtcgttgcactgttgtgcacgacggagagtaccaacattgagctatctgtccatgccagtggctcgatctcatccaaattcatggcaagcgtggctggttcctttatattgaatactcatgttgtctctgttacgcgcccaacccaccgctcgctactccatttcatccaccatatcccgagaatcgcacgttgccctaaaactagtcaatggcgtcgccgagcagtgcctcaccgtggccagagcaccacatgtgaggtcatc

SEQ ID NO: 73629 - DNA, 460 bp, Zea Mays
agccacatgcgattcgtgtcgtcgccgtcttgattcgtgctcggattgtttggatagcgttcaaggtcaagtaaatatcaccgtcgtggataagctccggccagtaaactattctgaccatcgtatcaagcttgccacggtggaatcggatgagctcactagtgaccgctgtctcatggccttgcgccatgtatctggacacatccatcgcgtcgccgtgactcgctataatcgtctgatcatcgcaggtgagagctgccacggttaatgccacgaattctttgcgccagtgaactcccacttctccgaccgccagcacatcttgctcaaattgatcaccaccgctcaagcacgctataaattgacagcatggtctgttgcgtaggatcatcaccaagcttgagcacccgctattgctgccgattagccaccacaactctccaatttctcatttccccca

SEQ ID NO: 73630 - DNA, 334 bp, Zea Mays
acgagacttgacagaaatggagagcgcttccgtgcatagatggcaaggtgatgctccggtgaggtgaggacgacttcgtgcatggcgggaagagatcgacgcaggtgggggctacctaggcgagggcaactctgagcattgcgtgtgtgggcattagcggtctgggcgatgggcggtggaggtggtttctgcgcatggaagggggcaattggggggttgaactggccgagatgtgaggcgggcactgctcttcctggcggcatgggcacaggaagttggagaagatgctcctggccggtggggctagggcatggtggtggatgggggcactggg

SEQ ID NO: 73631 - DNA, 1115 bp, Zea Mays
gaggacattgatgtgcttgaagaagaacggctaaatgcggtaatccaatcagcacggtaccagcagactttaaggcgctatcacgacaaggctgtacgacaacgatccttctcaataggagatctcgtcctccgccgaattctaacgggggagggacggcacaagttatcacccttatgggaaggacccttcatggtagcagaagtcactcggcccggatcgtatcgtctcgctcagatggatggcacagaagtcgggaattcctggaacatagaacacctcataaagttctatccctagctgtatttcaacaactgcggggatgacgatgtactctgtaaagtggaaatatgtcatcaataaaaaagggatttcaaagatactcagtttgtttgcgattgacttgcattcttacttaactcggggtgaccactatgccctactaacggagcaatcgacttaagtcggcaacgacttaaggcggtgcaacatgctcacgcttatttaactcggggtgaccactatgccctactaatggagcaatcgacttaagtcggcaacgacttaaggcggtgcaacatgctcacgcttacttaactcggggtgaccactatgccctactaacggagcaatcgacttaagtcggcaacgacttaaggcggtgcgacatgctcacgcttacttaactcggggtgaccactatgccctactaacggagcaatcgacttaagtcggcaatgacttaaggcggtgcaacatgctcacgcttacttaactcagggtgaccactatgccctactaacggagcaatcgaattaagtcggcaacgacttaaggcgatgcaacatgcccacacttactcaactcggggtgaccactatgccctactaatagagcaatcgcctaaagtcagtagcgacttaagccggtgcaacatgctcatgcctacgcaattcagggtgaccactacgccctatcaacaaaaataatcgacttaagtcagcagcgacttaaagcgatctgacgtaattataattacccatacagagatgacttctaaatcccgcaaacaaatttcataatcatcgagcatcatttcactactgcaaatttac

SEQ ID NO: 73632 - DNA, 843 bp, Zea Mays
tgtttttgaagcagtggaggtttccactacattagagacaaaacttgatcggggacaggagcaccgcaggatctctgttgggcagataaaccacaaagaacatcctatgattatgaaaagataagcaaaaaaactagtttgccagcaggaacagtaaaagagcgaaagttgattcacctgaagattggagaggaacaagggaagacccaaagcaagaagagttgatgcattgcttgatgaggggagatcagcaggaatgatatcaaaggcatgacttagaggaacttcagtcccatcagcaggcgataggcacctggcgtctggttcactggcctctaaagtaaccagaccagcaagagctatagatagacgtgtcaccacagcctcttcggattggactggtggcgatccaacgtggacatccatggaagcagcagaaggggaacctgccccaacaccctcgggggctgggtcgctaccagcaccaccctcgggggctgggtcctccgcggcagccacctctagggatggagatccctcaaccacgtccataggagttgggtgactcagatcaacatcttcgcgaggaagaccgccctctaaggtcgacgaggcacgagaagctacccgagttatctcttgcccggcagaatcatgcgacagacgaccatcttctgggacctctgaacagataatgggattgtcagctttaggaggctctaacaaaagctcttcagggatgatatcttccagcgcttggtcaaaatcagatattaacaacccttgaaggctgacaaggcttgcgcgtgaatctcgttgtccctgtggcgatgactgttcttg

SEQ ID NO: 73633 - DNA, 390 bp, Zea Mays
tcagttctgcgcggcgaagccacagcacacacccccatgaacaggaggagcttcacggcactacacaaggccatggcgggcccgccgagcggtggcacagcacaccggttgtgcatccattcatggcgaccatggatgtgccagaggagaggggaacgaggggcacggttaaataggcttgcgcaggaatccggtccgcatcaatcgggcgcccaggttgttacaggatctcggaaattccacggccaatttctcccaggttgcttccggattccgcggatgagttcgttggcgcttgctttggttcggtttacggtgaaggggagggatcctacaggaggaccccaccaagctgcgacgcggagtacggatgaaccgcgcgagtgtgat

SEQ ID NO: 73634 - DNA, 449 bp, Zea Mays
tcatgtacttcggccatggctaatatagcatcatctaggcccaagcacttaagtaggatgccattgactgttcggcggtaaagttcatcactcatcaaaatatacttgaaagctattcgccgaatgttcttttctgtcctgatattgggatttcgtaaataattaagtataggtgtcctccaatcacttgcatcggcttcattgtcagccgaattgatgaaaagaacatttctggtaaccccggacggtccggcgtcatcacgcggacagtccgcgacctgggaatttggctttgcactagttatcagattttcagttttgtgaaatttccctctctttatccgataacctgatgcatcttgtgccaaatcattagctctatgattctcaactctagagatatgctgaatactgaattcgtcaaaagaatggattatgctccaacattt

SEQ ID NO: 73635 - DNA, 397 bp, Zea Mays
attagcttgactgctagtttcgccatagttcaattgtgtgcttgtgtataaacaaaatataaatgtgtttggtgcttgtttgcgcaaaccatctttatccaacattcttctcgaaaatctttggccaaatcctcgttgatctcttttcacctacctcatcctagaagtgtcttgttaggaacctctcttttcacctacctctgataaattttccgctatgagccatgttgtgactttatcaaccaaatctctatactgtttattgattctacctcgtcatcttgttgttgttacaacatcttccaaaatatcggatctggatcactttaaatctctcgttgctatctcacgatacccatgcttgtgtatagagttaaccttgagacttgtttgatgg

SEQ ID NO: 73636 - DNA, 740 bp, Zea Mays
gatcattggcgttcatatttgcaacatggagaatttcatatcaaaatagatcaacaaagtctcattcaccttgatgatcaaagagtatctacggcttggcaacagaaggcactaacaaaactgttgggcttacaatacaagatcgtgtaccacaaggggacagataacagggtggctgacgctttgtcacgccggcctggattggaacaagatgagccacatcttcagctgaatgcagtggcagtttccaccgtagttccaaattggttactacatgtagtgcaaggctacaagcaggatcctaatgctcaacagattctacagaagcttgcaactggaactagtactggtccgtacactctcacaaatggagtcatcagacataagggccgtatttggttgggcgctaatcccagtttgcagcagactgttatgacagcaatgcacagcagtgccttagggggccactctggtttccctgttacataccgaagactcaaaacgacatttgcatggcctggcatgaaacaacaagtgaaggaatttgtgcaatcttgtctcatatgccaacaggccaaacctaacaaggccaagtatccgggacttcttcttccactgccaattccttcgcatgcatggcacacagtcagactgaactttatcactggtttaccacagtctggccgttcgaattgcattttagtggtggtcgataaattatccaaatatgtccattttat

SEQ ID NO: 73637 - DNA, 720 bp, Zea Mays
gattctgataatttacaaactttgttctttgactagggagcaaggaagtgtatctattacatgcgtaatggtacatgcagatatggaaagaaatgttgttttaaccatccagagcaagttcttgatgttcaatgccacacaacaacagggtgagatgacactaacttgcaacttcaccacactcaaagaagtctcattcataaagaatctaatgatatttatttcgtatcataaatgttattaatttttcatatcgatttggtcaaaatgctttttgggatagggggagtagttcaaatgaattatttgtttacggttttgaaagagaggctactaaatgctaatcaagtccttttgtatatttttgttcctacttgctaggaccttctgttgttggaatgattttcttggtagttttgctttctcagatctgattgtactattcatttacatatgcggcatatgcacactgttttatgccatatgaatttgtgcattgtcggcaaaggaaatcttgtgaaattttatcgaataatttgtgtcgctgcaacgcacgggcatcatactagtgtatatatatatactctattcatcactcggaccaaccccgtgcggaccagccaccatgcgtggctttgttctttgaccagggagcaaggaagtgtatctattacatgcagaatggtacatgcagatatggaaagaaatgttgttttaacc

SEQ ID NO: 73638 - DNA, 517 bp, Zea Mays
attttgggtagaggttgctgacttctgggccatgatttgggatttgctacatgtgaggtatctcttgttttgttgtgccttgatcttgcgatagtgtaggtcatcgaatcttacatacttcttgaatagctgatataactcttggagcgaagacggggggggtctcgagtgcaatggctatactggtggcctgtgcgtaggccaattacaacgtaatggatggcgtctccgtactcgactaatggcagttgagacttaagtgacagaaacttgttgtaataatcttgaattctctccttttccaattgtcagtataaggatagctttgtgaagacatcaatttgttgactataccgttgaagttgagcaggaacttctctcggagggctatccatgattcaattgatagcaagggcaaccttgtgtaccatgttagtgtggggccctcaagagagatgatgagtgtcttgtccatcacattgttgtcgcctccgttgtatgctaccggtgcctagta

SEQ ID NO: 73639 - DNA, 1007 bp, Zea Mays
cacttcatcacacccattcatcgcctatgtgcgcaataattcatttcttgcgacacatgcactcaaaatcaatccattctacataaaatacacttatctcttatttatgcgcagacttaacacctttcgggataaagcgtcactataaacacactacacctaattgccttaggaacctattagttcactcgaagacatctattcaagtcataagcacaatcatacacttatttgtgaagcacaatttaaggaacgcctaacgcgtatagactcgacttataattgtagaggaagtgatgactacttatggcatgacatcacctctctaattaagccaagacaatttctacctatattgacccgacactcatgtcgagcacactctattttttgccatgtctcgcatacaaccatattgtggcgtgcactcgagacactttggttcaacttaacgcaatcactactactacgcattcggcatacacgtttgacaacaccgtgctcaggcaaacccacacttccaatctacttatcacatccaaccaacaccacgatgattgcataaaatatatttaacatagactaactcattagtcgactatggaaaccactaagcatgttttacgctttatttattttaccccaactaacacactactttacgacgaagtgctttagcaaacaatttaatacatccgtgaccaatctctacgacgcacaaaaagaaactattgtacctacacatatatccaatccaacaaccaaataacatatcggctcacccacgcacctacgtgtccccacaacacgcacaaggcatcaactgcacaagtgactctaaccggattattcatactctcatttgcatcgactatcacattcaccgatcacatgcataaaacaatacacttttcacgtatacacctatcgatgcattccccaacacataatccgcattttaaaactttagttttgcatttaacaacgcatcacatattttccgatca

SEQ ID NO: 73640 - DNA, 420 bp, Zea Mays
ctcttgtttcatgtgaagcactccctctggaacatagtgttcacggaatgctagcttgaattcatcccaagtgacctgatgtccggctggttgaactgctacaaaattcgcccaccaggtactggcagggcctctcaattgttgggcagcaaataacagcttctgtgtttctgtgcaacggactaatccgaacttctgctccattacccttatccactcatcagcttcaagagggtcttctgctttaacaaaaagtggaggacgcgtcttagagatttccagatacgaggtttcacgcggtccttgtggaggaactctcccgccatgttgctggaactgattacccgccatctcacgcaagaagcgggaattatctgcagtagcattgaccaaggcagcgatagcctcggccagcgttgg

SEQ ID NO: 73641 - DNA, 319 bp, Zea Mays
ttgctgggcaggaagttctactctgatgtttggatgaagggcggtcgtgagatggccgatgaagccattaaaaagaatgaaaaagaatcccacgatgctcgagaagaggcaaagcaagctgaagaagctgctgaacgagccatgataatagctacttctatttaaagttttgcttcatcgttagtttctagctttgaagtttaccaacatattatttttttgcagctgggatttcacccccaccggagccgtacaaccctgaagtcgacccggttatgaaagaagccttgaatataatgaagattgctaacgaagtcgt

SEQ ID NO: 73642 - DNA, 852 bp, Zea Mays
cgaaaatcataactaaccaaaataacaaatttgttgatgtacaggtagcactgtacatagcagaagcaatacaatcaaccgtgttagagctaaatgctacgaaaaaacggaacagtcgattcaacaacacaaagtcgtagcggtgtagaagcaatggcaagaaccaattacctcttgaggtaaaccttgttggcttgtttatgtgatattgttgcaattattggaatccaagaaacagtttagagcgctggtataaacccagaacccaatgttgattcccttgtactgtgcgttcgatgcacataaataaacaggtaacttaggtggtggcgaagcagaggaaacacacaagcacaaggagataaaactatttcatgagtacgggtgaaattagctcatgctagtaccacatttagtatcaaagataatataagtgcagcatttagaagcaaccctttgtttgtcatcgcataaaagacgtttatgaaccaaatcgataaaagcattggtgcataggggaatacaacaaacatgtggcatgacgacaaattagcatgatctcgggttccctaataagatatcccaacggaatcttgcttttttgtaaagccaccctttttaaagaataaggaaggatgctttggatgtgactcatgagcaatacaacaaacatgtagcatgccaacagattaacatgatctcgggttcccctgaaaattccttgtgagagccttcaggaatcagcagaaaaggagctgtactgagcagcgaccaaacaattatcctatccttgataaaaagaggttgtgataaatatagcatatatatttctatctagcgaaattctccaaa

SEQ ID NO: 73643 - DNA, 489 bp, Zea Mays
gagggcttgaactcgatctccgtcaaggaggtctttagttgtcatttcgtcgatgtttgggattacgtcgggatctgatgaggtgagccatgtgcccatgtctgagctcttgtgagtcattactttggctccatacatgagcctgaaaggcgtgaatcctattgctcatgattctgttgcatttaagccctatagtactttgggtaggtgatctgcccgcttgcccttcttatccttgagcagtcttttatttatgacggtgaagatttttgccatttgcgtgctctaccacttcgttggattgtgggtggtaaaccgacgcgaagactgctcgggtgcctatggaagcacagaaatcttagaagtcttgattttcaaattgctttctgttgtcgactattagcttgaatggtacgcggaagcgacaaacgatgttttgatagaatattttttgcgccgtcttcgttgttactatggagactgctcttg

SEQ ID NO: 73644 - DNA, 372 bp, Zea Mays
gcgcccttcggtggtagaaggctctggcatggtgcggagtaagatcgctgctgcggtgaggttttgattggcccggtgaaaggccaagggtgcttcggcctcgacatcttccataatgtgatgacgtacatcgcgtgccttagcgcgtgtgccctcgtcaaggaccttgccggctacttccttctcaagaacctcctagagctgtcatagccattgttgttgttccccgagcttggcgtgcaacttgcgaagttgttggaggtgggccatgtggctccccaaacaggtttggaccccacccgtctctcctgcctcccttgcgtgtggggtggcacatcattctcctgaagcatgccgagctggttccctccg

SEQ ID NO: 73645 - DNA, 1415 bp, Zea Mays
ccatgatccaaccgatatgcttgtgtgtcccccatgcatatgggacaacacagtcgaccgtggacacaccagccagaccaaataccatatgcatgcaaatcatgaattgaccacaaatatacaacacgtaaggtaaattcacgttttatatgaccatcataagcctttacccctacccatagctctttgaactcttcaatcaacagttgcatgaatacattgatcttctttccaggatgtttaggccctggaataataagggcaagaaatatgaatctttctttcatgcatttgttgggagggggttgtagggcatgatgaaaaccggccaacaagagtatgaagttgaactattgtcgtaaggagtgaaaccatcagtggacaagcctagacgaacactcctagcgtctcttgcaaattctgggtcaaaacaatccagagccttccaagcatcgccatctgatggatgcatcataatgtctgggtcttggatctcacgttctccttccttatgccacaacattagcttcacagtttctggggttaaaaacagacgtttaagccttggactgatgggcatatatcgaagctgtttaactgccacttttgtagcaaaagttgctccatcctcttttagtacctccgcatatcttgatttaccgcatttctgacaatgggtggccgcttcatattccttccagaacaacatgcaattaacttcgcacacatcaatcttcttatacttcatcccaagaccggacacaatctttttagactggtataagtcttttggcatcttatggttcgatgagatgagatcaataatcagattgattttattgttatagcaattattcgagaagttatactttgccttcattgccataagacgtgtaaccacctgcaacacggtcacaatggtgtcgtcatgcactttttcctctgacgcgtgaagaagcttataaaactcctgtagctcctctggtgtaccctgttccgaggccaatgttggatactctctactaatatcagccaccaagtcatccatccgatcctcctcctcctcatcaattctttctgactctgtgatattctgctctacttctccatgtgagcgccacacaagatagttaggcataaacccattcttgcaaaggtgatgctccagttcttcgatctttctcacatacttaaaattccgatacttggtacacagacacttcaccacacgaggtccaccggaaaatgcgagatccacgaattgttttgcaaccctaacccattcctttgagtgacctagagtcacgctattgaatccatcatacatcgcccttcttctattgtcatccatttccaaaactaaataacccaatgtataaaaaatgtgtaaataaacatcattaagcatataaacg

SEQ ID NO: 73646 - DNA, 560 bp, Zea Mays
cccactttaggctggacggtccgtgtccttaggctggacggtccgtgtccttaggctggacggtccatcatatctgtaatggctataaatgtcatttgaatactgtcagagctgtcagaaaaaggcaggttcggacagtccgtagcacacaaccgaacggttcgagacctagcaacacgaacaacttgagctctattcaaacaacatctacatagacagactatctgtcctccaaggccggacggtctgccacatgggagctagtactgttcgtagtgcaatcatccaaaaacacaacccaattccattttgcacctgcagacggtccaccgacctcgggctgacggtctacataagcacacagggactcgcacaaacttgcaacctctctagttaggactacggcccggcccggccccaatgcacggatggttcgtagtacaaaagttaaagaacaccccgagagagaccacttctgttggtccactgagtgagtcacagacggtctggcctctgccccggacggtccaccgaccactaaacataccaactttccaaac

SEQ ID NO: 73647 - DNA, 587 bp, Zea Mays
agaggcgggactgagcgcaggctcaatttaaaggcaatcaccacgatggtgggcaatttgatcgctgacacacagccgtggcgatagcccgaggagctccacgttagcctcaacggtgtccacaagccagtaacatggcggacttaccacaaaccctttacggcggtttaatacacgagcctccaaccagttgagtggacggccggagcgtccggtgacttgctacggcagcggtggatgattcacggtgaggacacatggtgtccgtggctagagcggtaattcgatcatcgaatccgagctagagatctttttaccacgcattgatccaggtctcggcggcaccaatcgtggcgcgagctcaaatcacgatggcgggacatcagcggcgagcacacgacacttaggatcttcttcagtgtattgtaccatggcgatgtcaattccgcgcgcttgacagagtgatttgaagatcatttctcttcggctttcgttcaacaacctatcaggctgaccacagcaaagttgttgtccatcatattagctttaattttgttataaggttcttgctcatacctccactcgat

SEQ ID NO: 73648 - DNA, 291 bp, Zea Mays
cggccggatattgctttgcaatgatttgctagctaacagcacatgagatcgagttatgatctctaggtgtactcatgctctccttatgtttggatatactgatcttggatatctatagaagatccccaggtacaagatcaatgacatacttctggtaagttggacctactgtttgataaatgtctatcaacaggtattagtggacacttacactaatcattctgtagcacaattcgtgggattgtacagagtgatatactatatacatagggtatgtggtggtcatgattt

SEQ ID NO: 73649 - DNA, 435 bp, Zea Mays
gcataactgaagagaaggacaacgacagtcagcaggaaggagatgatcaacgggccggaccaaccacagtgcctgttgggcccccgtatgccaaaagggtgagaaaacgtaatgcgaaagtgtatgggccagcctgggtgaattgaggagaagaacagtagaataaatagtagctcgcgtggagttttgagttatgcggtaacagaactatgaattacttcttcttgtcgtccaagtatcaatacagccgccttccctctcctcctctcaatatctgattctgcctctctcttctcgagtccttctggtaggagaggttaacaattggtatcagattcgtcgatcctcgggttgcgtatttcttgcgctggattttccggtttctcatccgtactgcactcgttttcgtcggcaacaagttctgatgaatccaga

SEQ ID NO: 73650 - DNA, 588 bp, Zea Mays
gtggagcggcggtgactaggttaggggaagtggcgagactcgagaggaggtgcgggacaggcatggcgcagtggcaatagcgttgaagatttcggggttgcttcgcttctctggattgcagcactgcacgcagctgactcatgtttcactcgtagggggtcgttagtgtttagcatcagagacccggttataggcaggacaacaggttggattggaaaagggataatgacttttttgtaaaatggatgacaggtgaactgcataccttttttggctagtcaccaaccactcgcgctctcttcgagcccagcgtttcgacgaatcgtctcacgccatatcgcaacaggcggtgagtcctaggtgaagcaaaggcgagagccgtagtgtggtacagagttgtgtcggtcaccgccacagtgctccattccagtggagcggcggtgactaggttaggggaagtggcgagacttgagaggaggtgcgggacaggcatggcacaatggcaatagcgttgaagatttcggggttgcttcgcttctctggattgcagcactgcacgcagctgactcatgtttcactcgtaggggg

SEQ ID NO: 73651 - DNA, 285 bp, Zea Mays
cgggcgtgtggagttcgctcaccatgaaaagatctagtcacggatgtgtatgaactattgtggcctcgctgttccctgcccttcgcgccggcgacgtggccgtatggccgtcatcggagttgccgtgcttcaccacggttgtgccacgctccgagcttttcaccacgtcgtcactagccgcaccagctcaccggtaaccgccgtatctcctcaaccggtgatcaccggaggaagcgccacggtgaaagccacccatcccttgctccagtgtccatattccctccg

SEQ ID NO: 73652 - DNA, 734 bp, Zea Mays
ctggtgttaacttaggagcagcaggcttgtcttttgtgggagcgtgaggatttaaaaaaataaagcatgcatatatattaatgtttcttgcatacattgtaaatgaaataataataattgtgatataagtaagtcaaacattagattttggagtcttgtcaaaaataggggcatccataacttcatcttttttgcagacgttcccactgacaatctataatggaaacaactgaaatttgagtaaacagtaacttgtatgcagaatagaatatatgcattgtatatatagtttgtatgagaaaacttacatcatctgatactttgatatgatcagtaggaacatggctttcctggtcatgttgctgtttatcaggtgttggagcagttggtgtggatactggatcatttgttggaggcattgaggtagtgagggggggggggttatgtacatttggaacatataataatatagtagttgttactaaaatataactgcattataaatgtatcgttataaaaaaatggttaaacatacacatttgcaaactacatcagtatactatcaggatgcataaataaaatacagttttcaaaaaatgaaatacactgaaaaaatatgttgctgcttgtatgagtataaattaatatataatttgtatatacaaaactgcatataataaattatttgagatcgtataagtatatattattttccaggaaataattcgtgaact

SEQ ID NO: 73653 - DNA, 467 bp, Zea Mays
gctaagagggcctgatggtacatggtgggtaaattttgtagcaattcaaccggctggacaccagatcacttgggaggaattcaagctagccttccgagagcattatgttccagagggagtgctccatatgaagcaagaagagttcatccggttaaagcaagggggagatacagtcatgcagtatctcaataaattcaaccatctgtcccaatatgccatcgaccaagtaactaccgatctgaagaaaaagaattgttttatgaggggactcaatgacaggcttcaacgaaaaatggcaacatgcttggatcttacctacagtagggctgtcagtaccgcactggcagtagaagccaagaatatcggacatggaaaatccaaggggtttggaggtgacaggtcaaatcaagggcctgaaaagagaaccaggttggtgatccgaccttttaatcaaaatcattcttcac

SEQ ID NO: 73654 - DNA, 594 bp, Zea Mays
aatgattcaatggtcttacctcggtaacgtgtgggtcattggcgtggcccatgctttgcagactgtgcatgcctccgaccactagtgtggagaggtgtgtattctgtttgcattcaatgcgagcgcccccacaccagaggcatgcggttggccacacaaggcagcttctgccacgtggcagcatcggatctttgcctaagcagagaacatcgctgggaacacatgcagatgatgtggtgccagacctcccctagctagggttccgacgggaacttgtggaaacctaggcctacccataatggccccgacacgtggcagcactagacctcccctaggtggaggttcggatggcacacgtagaagtacgggactgttcctgcggggtccgtccccaagtttataatcgcatagtgcttttactctgtggcggggatctagttggcccttgcttggatcgtggactccgtcgtgggggtccagacccttagtcaggtcgaactgcctatcaccccatggcaatggacagccacaggggtcccacctagacccatcaggagttggtaccccggtcttggggtacggatagaggcccca

SEQ ID NO: 73655 - DNA, 501 bp, Zea Mays
agcattagaaaaccatctcttgcccttggaaacgagattcaagtgtgctgagttgcttataatacagtatgtacctacataggcttcagggacttagtccaagagcatattgcttatagagtatggccgctctcaagtgggtgggaggtgccgaaggaaactactgctgagtccagcaaaggtggcttggtctatctgaagtacacattcaagtacaggagccagttcgatgagccgaatgacgattggctggatgccatcgaaacaactagcgatgagttacttggtgcctactcaaggaccgaagatgatgccatgacggctgccttcggagggcgagacaagaaaatgttaaacagggtttttgatgttattggttttgtttacccagactattgctatccctcgcgaaagcagggaaaaagaggaaggctgctgcttcggctatctctgctacaccgaaggggaaaaggttaaagtttttacgcatcgacccatgta

SEQ ID NO: 73656 - DNA, 359 bp, Zea Mays
tttgagaggaggcgtttttttttgttttttcgccaaaaataaactaacatgctgaggctatccatagcggatcttgtaaaatataggatttatactttaaattacactgtttaaaaagtaaagtttgaaatatagatgagatatgatagccgctagaaacaacctaatgttatgatttggtgtgctcataccaaatgcgcaacgagggaaagggcaatgatagcttggacacacctataccctagggagagaaaatcatttgattttgtttacgttacataagtcgtacactttagatgacagatgtttgttgtttcttgctaaagagcggccaatattctggtgtcggcggtgaaaac

SEQ ID NO: 73657 - DNA, 443 bp, Zea Mays
gcaggtgcctaatcttcttccaaagctagtagctatcaatggactgaaacacatggcggcagaacagaaagtggtccctctttaaggttttgttgtttataaaaactgggagcggtttaaaagcaccattagtttcccttttgctttaatcctccaactgtcttcttcaagtgagtagtaagaactaagaaccaagcatatattgctgaagcacacatatattttgagacaaggcaacgctctgtttgagcagttgtagtcgtcttgtgtgagcttggcaagtagcaactgcatgtgtaggtagaatgttagagagcattcacatgactgaacgacatgggtcagatcagatggagtaagacgatgtgttcgtggctttagaatctgttctgacaagtggctatagcttcatcgctctttagctagcggcagataaaaatcgc

SEQ ID NO: 73658 - DNA, 799 bp, Zea Mays
tgacctctaaattttgttttacaagatttctccgtggctagctcgaactccttattaatagcatattgccttagagccaacctaaacgccttcatatctggaaacatggtgccaagctcaatcttcgggttatccttatcatatatgaacaatgagtttgatggtgtcaaatcttcagcttgattgggatattctgtttcatgaatataaccaccaacatcatgagcactacatccatgggcatcaatttcttggatgacacccccctggttagcacctatttcatcatcaatcatcaaccccaaagaagcatacatttgctcatcagccataactgctagtcgaccttcttcatcataagattccacaatatgtagagtagaccaatcaaccaaaggaacatcttctgatacatccactaggttcggtattaacccttcgacatgactgaaacataattttagggattgatgtactgctactccttgaattcgctaaaattttgagatatatatagagagaggcgttaccttgtacaaggtgttcgcgcatggtcgtcggaaggcgcaatttgggtctgcccaacagcacggttggcgcggagggcacttacatcgacgactgttgtggggtcgttcgacggtgcgtcgtcgaccggtttcatggccatggagcgtggaaggctcgagagggatgcagcagcaaccaacaggacgcactcctgcagcagcggaggaggaagcgagagatctcagcaacagcacggcagatggtgcgcacgtcggagaaccgaaggaag

SEQ ID NO: 73659 - DNA, 402 bp, Zea Mays
gttgagagccaatccatgtcgaggatcatatcataaggttggagatccaaaaccttgagagtcgatataaactagtatccttgaatggaccacattgcatcagggattttagagatacaagacaagcgatacccattagctacctgcactagcaagcagggacaaccgacacgagctgttgggggttggtgggctatggaaaaactgagaaaggagatagaactgcccaaatccagcaatatcgacgctgataatccaccaagttcacccacaaacctcatagttttagtttggggtaccccatctagcttggatgcgcatagatgcaaaccatggatttgttcagaatgatcatactctgaatgcacatcatcaggtggcacttgaaactggttccacaac

SEQ ID NO: 73660 - DNA, 612 bp, Zea Mays
aaaagggggagaccaaagtgtaccaggtcagggaccctcgactagttaaagggcaaggggccactttcgtccatgaagtcgaacatcaccccgtcgtgacaacaagaacgcgggccaccacttcctccttctctaggttcacgacggagtgatgatcaggatcgccctcaccactgaactgtcacattgtcctctgacaggccacaagaggctaaagccggtgttgcattaaagtgtgaatcagcctctcgccagaaggccccgtctacgctgcttggcgacaacatccagtatgaaagatatctttggcttgaacttctttttcgcaccataatcccacttgggcttgcccgcagggacaaggccagtgaacgcgggtgcactcccctcaaggttccaaacaaagaaccactcccgctcatagccatgaacggaggacagaaggaggattgagaggtaggacgccatccgtgacccatgtagctggacattgaaagagccgacgaacggccgaccaccacggctgaggcccgcccgcaggctaaacagatgcttctagagcttccaatgtcgtggcatgccgagataggcttcacatagcgtgatgaaaca

SEQ ID NO: 73661 - DNA, 1041 bp, Zea Mays
gggaccaactagtcattatctgtgcccctggcgctctcaccgttacgctgactcacgggcccgggaaactagtcgcacatggatcactcaggttcgtgcctcttacgtatgggcccagaccgaccgtgctgtcttcaacctcttctccgtgatggctgcaacagaatccgcgtcagtcggcgggggctaccggtcatggcttcctcttcccgtcgcggacacgccctctataaaatggtcgcgccgccccgcatcccggatccctggtgctgaggcaatccaaagcgtagagtgaatcttgggtgcgctcgggagaatcgggggacaagatccactgcggcctaggttagttctgggtggtggtggagctcagtggatgaacatggggcatcagcgttagatcggtgaagctcgcgcgcgacttatttggacccggtgcagtctggtattgaaggaattgctcgtcggagcaggctgtgcgccattgtccacctcgcgtcatgggcaggcgtcaccatggtccttcccctggtaagaatgcccctagaatattcaccatacgcgtgctacgattaacttcctctggggtagtgttaggatgcctggtggggtcaattgcggggtctccggtgaatactccaccgtgcgccaaggcagcgccaccgctacgccctgctctcgggggaagatggctctattgtcgctaatctcgattttgacgacagggattagaaattgggtaccgtttcggtcggggtggcgtgtgccatccaattaagggtgaacacataggaatggatcacaggtgttttaaatcttggtcaccgattgaggatccgatggccacaggttcataatggttcatttagattggggctaatcagggcaattggtttatgatctagtggccgaggcattaagataccccttcgactgtgtggatttgcataagagcccctgctcttttgtgaattaaaccgccgtcctagaactatagtagagagtttaatattggtcctagtatttgtagtttgaacctcg

SEQ ID NO: 73662 - DNA, 367 bp, Zea Mays
aacggcacaggcactgtctccttcccccggccggctaatcacggcggcgcaacacactggtgatctgtactgccgcgcccagggaaactacctcgagtctgaaagcgtctaaatgatgcgaagattatggcgaagacatgggtgaacgacttattggcaatgacggtgtagaaaatcccggtcatggaacggtgctacccgcgacggagttcagtcggcggtgagaaattgtccacccaccgcaggtcctgacctccaattgtggccgcggacgactaccccaagtgctaacggtccccctcggccccactccgaggacagagacccgacaatgacgagactcaccggcggcggcactccctgctcc

SEQ ID NO: 73663 - DNA, 526 bp, Zea Mays
caaatctccagttactctaattgaacctaaatgtggctgacaatgagcgggcgtatttgcggtgtaagatccccgctctccctctctctatctagtggttgatggcaagccgatcgcgctatggtcagggaaattggggtcgtggtggcgtggacgggtcccagggacgctaataagggcacgagtgtggccgaggggtccgggaagtgggcgttaactggtcaatcctagagaaaacgcagcggtcgttgcatgcgggaaaagaaagatgcacatcagagggggcccaccagtcataggagccaaggagcgtaagcgggtgggtgtccgacagaccggacctacctgtagacgatccgacggacgcgaggattgcgatggcatccgcggtgttcggcttcgcggttgaggacaaagctgatgaagtcggcccacagatcagtggcagagaaaacgagtgcgagcgcggaagacagacaagtgggccccgatttctagcttcctagagtatgtccgcgaagctgaa

SEQ ID NO: 73664 - DNA, 369 bp, Zea Mays
atcagactggagaaagtcaagtatttggtctagaaattctccaagaggcggaaaagcaagtgcacattatcagagaaaatttgaagacagcacagtcaagacagaaaagctatgctgataatagaagaagagagttgatgttcgaagtagaagacttcgtataccttaaagtttcaccgatgagaggaatgaaaaggtttaaagttaagggaaaattatcacctcgctatgttggcccattcaagattttggaaagaaaaggtgaagtagactaccagttagagctacccgatagtttatcgaatgtgcatgacgtatttcacgtatcacaactcaagaagtgcttaagagtaccggaggaacagttac

SEQ ID NO: 73665 - DNA, 408 bp, Zea Mays
caacagtggtttatggtcagaggtggagcgggcgagggtggtgagtgaggtggaagggaaggaggttgcaagattggggttgacgaaggccctatcaaggcgggccaaggtgggaatggaccgaccattagtccaagtgaagaggctgaaacgaaagggcgttcctggacaccaagatcaaaacaagggtgttgttgaaagccgagcatagatggtgtttgacattgccattgtttttgttagagctaccacgaacaaggatgaagtcgccaacaatgacccaggggccatggatgagggggagtaggtctgccagctcagagaggaaggcgggtgttaggctatgatctgagggggcatagacgttggtgataatgatattagcgccagacgaaaaggagtggaggg

SEQ ID NO: 73666 - DNA, 538 bp, Zea Mays
caataatgtcttcttcttggtattcaaattctccaagcaatttgttcaaatattgtggattttagggtttctataaattggtctctaatctttttttgatacattattcatcaaattgtttggtggaattggttattgtcggtaccctaaatcaggggtaccccttactacagtatgaagacacgatgcccgtacggcgttctctagccacacagtgaacagcacccggccccatcgcatggacggctcaaggggcaccgcgtggcgagaaaagatgatacatcccaggatgtatcagttggaccggacctctgcaagagagcaccggacccctgtacgcagaacccagacccctgattacggtccggaactcccaagtaagcatgtcgggtcccttgaatgggatctggatccctccacgacaaggtccgggacaggggataccctggcgaaagcaagggtccggtgctgacacgtgtctaggccttatcctgtgcgcttgcgctccccgctcaggcggagacccgatgctaccacg

SEQ ID NO: 73667 - DNA, 546 bp, Zea Mays
cgagactgccgttgtttcccaaacatgcattcagttgagctgattccttcttccaatcttctaaaaagttggttccctttattccgaaagtttttcggctgagggcgtctgctaccatgttgggctttccggggtggtaatgaatctcaaggtcacagtctttgatcagttccaaccatcttcgttgacggagattgagatctggctgggtgaagatatacctcagactcttgtgatcggtgaagatgtgacatttgttcccaattaggtaatgcctccatatcttcaaagcatgcactatggctgccaattccaaatcatgggtggggtaattctgctcatgcggcttaagtaggcgcgatgcataagcaatgactttctcgttttgcatcagcacacaccctaagccttgcctcgaggcatcacagaagacgatgaaatcctgatgtatatctggtagtgtcaaaacgggtgcagtcgtgagcttctcctttatgatctggaaacttccttcacattttggggtccacacaaacttatggtctt

SEQ ID NO: 73668 - DNA, 302 bp, Zea Mays
gcctgctcccattccttacctttagtctcgtataggtgtgaatatctcgtgtaattcttctgaagacaaaactcacagttgacgattagaagtttagaactatgcaaaactacgacgatcatgtatgtacttccactcgctgaatcagacatgaccagttgttttgcttttcttcaggaaaagataaaataaaaaaagtaagactatattcatgattctcagactctgaaccatgtcggtgttgtctctagtatacttgctttgttatgtgtagcacagggttatgctgagctgtgtagcgc

SEQ ID NO: 73669 - DNA, 309 bp, Zea Mays
attgggcgacacaggggcgggatcgaggaacacgtcgagctcggtgagagaggtagtggaagaagaggaaaaggggaaatccaacttgtcgaagatgacatgacaagagatgaggactctatgtgaggtgaggtcgaggcaccggtaccccttatggtcgggggagtacctaaggaagacacaacgagtggagcgggacgctaacttatgaggagtggtggaggcgagattagggtatcaagcgcacccgaaaacacggagatgatcgtaggaggggtggatgccgaagagagcgaagtaaggaatggg

SEQ ID NO: 73670 - DNA, 652 bp, Zea Mays
ggctacttgcttggtgcgtcgtccggatgatgatctccaggatgcagaggccttctcagagcattattctatcactgagagggatactgtcgaggtagccatgcaagatgctgcatggcatgctctttcgcagtatcgctcgttgttcagtggggtagctgatggcctagacctgaaatactaccatcgtcgttcgaccggcagtgctggaggtgtgattgtctaagtgagggcaatcctaggctgagcagtatggtcaacctagttgtcgtgctcaacaacgagctggaccacacccttggcgagttgggcaagggtcgggcgaaggttgcggaattgcgtgctgagcgcgcaatgcgccactatcaggatggtggttctcccgctcctgtcaggatttagcacccttaccgctcgctgcctcgtggccgctttgattacggcacccctgactgcaggacccagatagatttggagccatagattgacagagtcggagtctgtaataatgcttacttcggtgtcttagtcttagtcagtcttagttagccttagtttgcttatcatatgttttgatgcttgtcgtgatgaacttgtaatgaagttggatctttgtaatgattgtcactaaggtgtgagcatcccctgcaac

SEQ ID NO: 73671 - DNA, 346 bp, Zea Mays
ttgggggtcagtcattcctagctttgaatgacaaggttaacaaagcagcgaggaaagagctcaggaagatttgtgatgacaaggaaatgaaaagactttttgaggaaaatggtgggaactatgggggcttagggccatgtgaagtgccccggaggatccttgaagaattcatggatacccattctaagaatgttgataattggtctatctagtgttttttgatgatattatgcagtagcttccttttccccaatagcatctattacatatctggcgctgactatattgtgtgcaaggatttggatgttgttcctagacttgactctatgcctcgcgcgtatggttg

SEQ ID NO: 73672 - DNA, 441 bp, Zea Mays
gatatgtaaacaatggtcatgtgatccacatgtgcaatggtatcatcatattcatgaccatgctcctactaaaaaccacaagcaacaaggctagccttataacagtcgagagagccacctgagcgagccttaattttataaacacacttgcatgtgatgggttgagcatgagaaggaagaggaagaagatctcaagtgctagtgccctaaatagtagcaaattcctcatcgatggaatatttccattggggatgaaaaatgtcatcatgatatgtggttggcttaggaagagtggtgctagcaaaaccatataggtctacaggcttcaaagcacccccatcgtgaagatcatagcaagaggatgactgagaggaaaaaatcttcttgcgagaccaatttatcttccgagttcttatgccttgaaaatgatgatacatatgg

SEQ ID NO: 73673 - DNA, 754 bp, Zea Mays
ccatgagatcgagactgataagcttttagagacacgagagatccaaagataacaatgaaatccattgaacccaatggatacaccatttagagataaaaattgacaaaacagtgtcaggatcctcgaagaacgagtatgagaatgaccagaaatgagagatttaggcttatcaacatccgatacatgagaacaggttatagcagatatccagataacgggacagggtcaataagggatccggagatttggatgataaagccacaacatgattcacaaggaaaacgattaccagattcggacaaaggagaggtaggcaaacaggatcagctaggatgatcaatagaaatgctatgaagttttggattaaggatttacggaaagaaacatggctggcatatggtttgcgcaactagacaccaacaacaaatatatttttttgacacaagtgcacaaggagacttgggttggtctagcggtcaagatgtgggggtctataagctgtgcaggtgtaacttcaagcgtaaaacacataagggttaacaaaaataccagctcaagcatgaattttttttatgaggtttcacttgctaaactcaaggttgtttggagggggttcttttcatgaacagaacaagcaacaattttttttgctagctttgggaagaagggttgaataatcacaataccacctagatagcaagacaagagaaacacatagcacgacctaactagacttaccaatctgacacgaggt

SEQ ID NO: 73674 - DNA, 622 bp, Zea Mays
ggcggcgttccgtgcgaggtggggcggtcaacagaccggtttctcctcgccggagccatggatctgcctgtcgtcgtcgctgggcgcgcctttgtcgatccatatggtaagaactccccttgtaggtttgctttcccctcctaagtgtatagaacctggcagaataggagtaggagctttagagcatccatgtgtgtgctcaccggtgtactgccgccgcagtctgtgcgcagcagtcagtgcgtgtggccgaggaagaagaaataaagctagtcgttgattggtagatggacggctcagattaaactatggcgtactggttcgtggacgcgttgtagccattggatctagtaggggcggtgcagattagcgggtgttgtggcgggttttcatctgttgaatcgcgatcggaggatcggtgtcaaatgctgatttaagcagtgatccttctgatctagagcgctggtttctaatcgtggggctcaacgagctgataccccttcaccgcgatcattttctaaaagagcccctggatttctaaataattaacccgctgtccactcgggttgatcactgagtcttaggaaacttacgcgttagcccctataattctctagtaatt

SEQ ID NO: 73675 - DNA, 469 bp, Zea Mays
ctactatgctttagttaaaaataaaaaacacaattgcaaaattgcttaagtaccaaaattaatctacagatacggtttgcaatgcaggtaaacgttacaagcattctagttactctatgcatacgattgtaacacatggtaaatgttgatatgatcgtatttactctacgcatacggtttgcaacgcatgttaaacgttgccagtatcattgtaattcaacggatgtaggttgcaacgcataacaagcgttggacctaatcacttccaacacatataactatacgttgccaggtatatgttgctataggggggtttgttttgtagtgaaattattcatgccgcctgctttcctttgaaggggtgtcttcatgctctattcattatgaagatgattgaggtcgtgacccagttcagatttgacaaaggtacccgacatcaatcatacacccctttctggattgatcccaa

SEQ ID NO: 73676 - DNA, 285 bp, Zea Mays
cacacaacaaggatgtgccaagtcatgatccaaaagtagaaggaaatcacagaggccgaagcacggcagaatcagctgaagcaggtcttgcacattgcttcatgctatttgccatatatccctgaatatgtgggcaactagcaacccacgacatcagttgcttcagcaattcattcacaagctgcatgggctcagttaccaccaccaccacttgtgcctactttggttcataaccagcagccagaagggcatcgccaggcataacaacaacgcgatactcgggag

SEQ ID NO: 73677 - DNA, 581 bp, Zea Mays
acacggatgcatgtgcgggagggggtctatccaacttcttctctaagggctagtttggcaacttgtttctccgtggggttctcagcctttaacctgtggtggatgcccacgtgaaatctttccacgggcaaattactcaatctgtttagaagcgtcgatcgtaggggtctgagccacatgggagcctaacttccacgcagattcttcctcgacctcaggagaccacctcaggagaccgggcgacattccctgtctctggcctttgcctctcatgagcgagacgacaaatgctattgtgcatccctacaccatctactccgtggcccctcgcttcgctgcccccgtcatcgttgtcccatcttcccccatagcaccgcctcaggcattgctgcctttgcatccaacatcccctcggcatcttgttcgtcatgtgagcgagctgctccatcgatagttgttgcctccaccttggccacatcgacgagcaaaggttcatttgtatgcatccttctcaccatggcaaagatatgtttttccctcgactgaggcagacacctccttctctcagtgactccccctcg

SEQ ID NO: 73678 - DNA, 721 bp, Zea Mays
gaagaaagaacacaagtagagacgtctgggggacaaggcgtttggtaccgtgtccatgttgtctcccaaacaaaacagtgcctttcaccgtcccaattcccaaaccgtaggattaaacatgcacatgcgatgcgatgtcttcagcattcgaacgacgatctcattcattcatccacgtaaaaatccggcaaaaaaaaaaaaacttgtgcattcgatgccaggctgactgacatgggacgcaagcttcatgcttcacggaccaaatcgggtccaaaaacaagaaccggccggggtcccgtaaaaaagttgccagaaacatatgcatggttggtatgttgttgtgtggcgctggacgcctggaccccgagcgccagacagatgacaaaaactgtgtactacactgctaccaatcaagcagcgctgttccaaacccgtcagagacagggtcatcaatgttggcagcaatgatccgggattagtcgggtgggtgggataatcctgacaaaagaccgcggcagcatttcagcaggcagcatccaagccatgccagtgcgaggtcctgcagatctaacaattcagggaagattaatctatggttcgaggcagcatcgtgcaagagactccccctggtcctcacatgaggcatctactatatagttccagtgtcttttcccactcatttactacctattattagagtacatctcttagttcctttctg

SEQ ID NO: 73679 - DNA, 607 bp, Zea Mays
ttggtgtgtgtgtgtgtgtcagacttgtcctgatttgtagactgagctagcggagaagaatgctaggatagccttgcctgaaaaggttatctcagtatgtttaccgatatgtttatctatgcctacttagtgtgcactttatgagggtttgtggtcataactcaagttttgtcgacatagcaagactcgtacaaaaaggaagagaacacatacctttgaccagtcttgaggtaggtgtttagtagtgagcttcagttgggcatgatggtcagccaattcaggagggaaactagtggatccgggttaggttttgttgttagggatgtgaaagatacttgttatggcaaggttagtgattgtagtggctcgacacctctagaaaaaaactatagccacttcttagcttgtaaaactcactccatccaattttttcacactagttatgagagatggagtgtttgaggaacctccaaaagccccacctcaaaaacaaacgtagattcccaaacataaccatctcaaggatccacttgacacttttcccaacatctttagtgatcgccttcctagaaaaccactatcgcctaaagtgaaccatacccacaag

SEQ ID NO: 73680 - DNA, 476 bp, Zea Mays
ctttctttgcatctaaggttttgactaagtgttgttatctcgatcgcaaaggagttatacaatctaagctccaaacctatctagttgtcaataactaagctaggaaggtaaatcacataatttggcacgataaatgcttaaatgcgataaacatcaaactctcattgacatgctagtcttttactgaagtatcaagaaacatgcaagctttctcctaatccttattagagccccagtcaagagaatgcccatgtgagggcaatcactcgatcaggtaacttcgtagatagccatgagccttctatatgtgcaagtggtgcttcggttgtggcctcccccaaatactcctagctgtctcgactatcaagtttctagccataacacaacaatcctcgttccctccagtacatgatgtcgactgcaccacaaaaatagttactgtgatcttgcaagattacaagctctcctggtacaac

SEQ ID NO: 73681 - DNA, 476 bp, Zea Mays
tcctggagtggagttgcccatatcgcagttgttgacacagtgtccatgggaaaaaaggttcttacgggatgcgttggctccactatttttgatgacgttgggaagtcctctgtcatagatatcgagggaatagcaaagttcgggtgaggcggaggttcgtccgaggttgcaactgagccttgtcttgagacttgatgacgtgtgccacaatcgacagagtggttttccatgagattcgcgggggagcaggtagccgaggcctggttcgggcgaggcggagcttgcgcccgaggttgagtttagcgtcgagcgaggcggaacttgcacccgatgtctcgtcaggaattgtcagacggcgtgcacgtgtaatgatgtaggtgaatctttgacaagaatgtggttttgttgaaagattcacctgcagccgacgtgacgtaggtgcacacattgaatgcggttgtctcccaacggccctc

SEQ ID NO: 73682 - DNA, 302 bp, Zea Mays
aagaaatacaagcatgtcaatacaaaattttgacaacacctctcctgcacgatgaggtttctaaaacctgcaaaaaactaacaacatgatggctgacatgcacatatacatcaatcccatgatgaccgataactacttatgcatcaatctatgcactacaaaagacaatgtaaatgctgaccaaatcttacttgaatcgattgcaaatctataactcaactagtccttaagccatccacaagttagtagccaccacatgatcagcccaatgaaaatccctaatagcactactagcattccac

SEQ ID NO: 73683 - DNA, 356 bp, Zea Mays
tcgagtacactacaaacaagacaaagatcactgcgcgcctaaggagcataccaggcctacaggaagcctattggacccctcgattctggtagtgacagacaagatttatcttcgcccctttttccctatgtcaaatatctagtatgtgaagtgactcagcaacccatgaggtgggtgtatcagtgggaagagtccgagtattaccaaatgtttgtggactcatggagtacgacggctacagcgtggaccgagcaggcttgggcagagtacaaggcgcagctgacacgtgagcaaggtatttgcgttgctctcatcggaggagtataatacatcacacgaccagtggaatctatgcc

SEQ ID NO: 73684 - DNA, 861 bp, Zea Mays
agagctaatgggcaggtggaaaaagccaacgggatgatgcttgatgcactcaggaaaaagatgttcgacaagagcaaaaagcttgcaagaaaatggattagagaactaccgtatgtagtctggagtctgtgaacccagccaagtcgggccttgcatggaaacaccccattcttcatggtatatggatcggaggcagtattgccagtagatttgactttggagcacccaggctaacatttaaaagcatagctgaagctgaagcaaccagactggaagatgtcgacatattagaagaagaacgtctaaatgttgtcattcaatcggctagataccagcaaaccctgtggcgctacaatgacaaagcagtgcagcatcgatcctttgcagtaggagacctagtcctccgtcgagtgctgattggagaaggatgacacaaattgtcacctccatgggaaggaccattcatcattgcagaggtaacccggccaggatcctaccgacttacccaaatggacggaaccgaagtggtgaattcgtggaatattgaacaccttaggaaattctatccgtagcagtacctcaaaactctggtgggcaagctgtactttgtaagcaaaaggtttcattgtcaataaatcttctgtgttctaccgcatacaaactctcaatcaacaagcggtttaagtcggaaacgacttaaaaccggcacaacatacctgcacgcttacataacttagggtgattactataccctactaacagagcaatcggcttaagtcggagacgtcttaagtcagtgcgacatgctcacgcttacatgacttagggtgattactataccctactaacggagcaatcggc

SEQ ID NO: 73685 - DNA, 425 bp, Zea Mays
ctcgagtggattccacgcctgacccaggactgactcatcgtgccgcattaactgcgactggcagcaagtcgtagatggagagtcgattcaccttccactcatgacctacgaccccttaggcctatggtccactcatgacctatcgagactaggcctgagtgcgctggccacctacggggcccgcaacatgacgggtcgcgctgagacccaggctacgacagccaggggtcgttgcggcacaaagacgacaatgatggtgttggggctcttcgccacccgcaaccgcccaacataaagagcacgacttgggaagtacagacgatagaggcacatacagacaaacataactttaccaaggtagaacaccccattttaccacagcgcaacggttccttccatgagaagctacagatagtctacctcca

SEQ ID NO: 73686 - DNA, 373 bp, Zea Mays
aagagcatgactgagggggtagttttctcttcataacttgtcgtgcatgtgtgcagaccaatagtacgggtttatgggggcagaccccaccgggttatcatacacgtatgtgccatttagttataaaaaaggaaatagactcgaaccctttgtcttgctctatggatagaacttacagagatatttggcatcgggttaaggtactcctctagtcgtagctagatggttgcccctgggtcggtgcacccccgttaccttggagggtccttcccagctgggggagagttgcggaacacctcttggtgtggcacttgccgcggggctaagcgccaacccagggttcctattcgcattcgacacgggaacccttgtc

SEQ ID NO: 73687 - DNA, 464 bp, Zea Mays
agcaataaatcggatggagccaccaaagtcaagaaaaggggctcagagattagtagggagactagcttctctaaatagattcatatcaagatctgctgaacaaagcttgccgttctttgaggtcctgaaatcagcagaggtttttcactagagaccctctcatcaacaagccttcgatgaattgaaatactacctgataaagctaacaacactttctccacctttgccaggggctcctctattactttaggtatcatctttgcaatcaactgtaagtattgccttggttcaagaagttgtaaatgaaggtgtgaaaaggcaaatgcctatctacttcgtatccaaagtattgggcctatctaaaaagaattatacagagatggagaaggtcatgtacgcagtcctaatggctttaataagaaagcttcagcactacttccaatcccacaacattattgtgtcgt

SEQ ID NO: 73688 - DNA, 299 bp, Zea Mays
attgcttgcatttttgcattggatggcctgcaatttatttcagtctcaaccctacaatcttaacaatatgagagagagcatgttcatggagaggcaaccagggccatcattgcaattaacgcgacagaagtgtggtgacactatccattgcttattcagtcaggaagtacatgaacagctttggatttattcaccactgccagcgattactttgcaaacatatcagagggcacgattttggcacccagtatatattcttgagtttgggttctactttgctgcaccgaaatcataccgat

SEQ ID NO: 73689 - DNA, 286 bp, Zea Mays
ctaccgtcggacataaggtaaaagtcgtcggaaataacttatttctgacgatttaagctcgataatttctggttttactgatgttttgcataaatttgatttgcaaagagccaacttaattgcttctcaagaggtcagccttaaccgatcgatcatcaaactgagaaaattgttagtgagagcagatgcacgggtacattttctcgaatcaaagagatttaaattagagcagacaaaaaggccccaagcatccaccttttggttgtgtagagagctacaacacggc

SEQ ID NO: 73690 - DNA, 493 bp, Zea Mays
gtgatgtttgccagagagtaaaagttgaacatcagagacctgctgtattacttcacccactgaaggtacccgagtggaagtgggaagaaattggtatggacttcattgttggtctaccccgcacctctgctgggtatgactctatttaggtgattgtggatagactaacaaaagtggctcacttcatcctagtaaggactaattacacgggggccaagccagctaagttgtatatggcccgaatagtttgtctacatggagtgcctaagaagatcatgtcagactagggatcccagttcacttctcggttttggtagaagttgcacgagtgcttggacacgcagttgaatttcatgtcggcctaccatcctcaaactgatgggcagaccgagggaaccaacaaagtactataagatatgttaagagcttgtgctcttaaacatggtggcagttgggataagagttttccctatgcagagttctcttacaataa

SEQ ID NO: 73691 - DNA, 317 bp, Zea Mays
ggagggtgatcatgtgtatttgaaggtgtcaccgatctggggtatgtgaagattcaaagttaaagggaagttgtcccctcgctttattggacccttcttgatcctaaagcgagtgggggaagttgcctatcaactggaattacccgaccaccttgcagatgtacacgatgtcttccacgtgtcctagttgaagaagtgcctcagggtacccgaggagcagctgcctatggaggatcttagtgttcaagatgatctgacttatattgagtatcctattaagatccttgatactttgactcgtgtcacgaggaataaag

SEQ ID NO: 73692 - DNA, 905 bp, Zea Mays
tgggatcactcgctttcataacggctgtgacctgaagaagtagagaggacaacaagagctaaagcaatggctcaccagatctacttagacttgctgctgctgcttgtctaagccgccgacaggaacacttcttcgtcttttttttccccttccttacaagaacaacagcaaccgtgtgaaccaggtgtggttcaaaccctgtctcgtatagattctgttttgggttctcccattggcagctatagatcggccttctctgcatctttgcgcctcgttttgtattgcttcgatagatcgtttgatcatctgaaaagaaaaattttggaattagggttacagcaggcgtgcacgctgcaccacaatgggggtctcattattcgttaagcagaacctggaaccgtgttgctgccttttgagcaggcacggagaagcatcatctcagctgggtcgcggagctacaccacaccaaggaaaaggaacggccgagacttatacacataataatacacgcgtgcgtgcgtgtacagagattctggacgaactaaacaagtgttagttagagcgttttttatgtataaggatatggcaaagatggggggcgttgtcagatggcaataactccccccggttgcctgccctggcccaccaaccggatcagattacaaaaatggtagtaaagctaagctcttccttgatgcccaagcggatggcccttcacaattctgacaaacacctctgtgatatggtaccagcagcagccacaaggaaggggggactcgtcattaccgccttttccccgggcaccaccagtccaccacccccagccgcacagctcactccagccgaaagcacaagcacgccatggcagaggagaagaagaggcacaagcacaagcacaaggagaa

SEQ ID NO: 73693 - DNA, 586 bp, Zea Mays
gtggaggcgcgatgacaacggaggcgtggtagcgtcatcgaccacgcgagaggagaggaggagatgggataattgctcgacgtctggaggtcgagcatctttccatgcaaaagatgggttgaggtcgagtcgatacccccgcaatggtgtctttcaaacagggtggagtcgtgcccatgaaaaatgcacacgtggggttgccgacacggggaaatgagcgaattccacgcgaaaaatgatcagccaaactagtcctgcatgtagtagctcaactaggctagccatcgtattggtgcgatgcaggacattgacacaatccgatgtggataaaccttctctagtcctctctaagtaagcatcatggtgagggaagtgtttacaacagttgttgacaggggtgcaccatcaaatcatacataaccactattgacaggggacatgtgtcaacgtgtaggagaattcaaagaaaaacatcagaacagtcgatgtagacaatcagatcaattcaatggtgaaaatgctctttagaacctctctagaatgctttgatttgtcatggctttagtccgatgggcatcagatcgag

SEQ ID NO: 73694 - DNA, 672 bp, Zea Mays
tctggcattttcatcatttcttcaacctttggctcttcagccttatcaactttagcttcgactcgctcgactgtaggcgtcttcggcattacagttggttcttcaacgctctgtgtaattgaagcagcctgtcttgcttcagcagttgaagaggctccttcggcaaattcaggcaccacagccggttcaatataacgcggacggtgggtcagaaccttcacctttttgcccttcagcacaactctggtggtcgaagcggcaatcttcctcttttttccttgccctcgcagcgggcagcgataatcggggtatttgaagccaatcacatcaaagaccctgttcagtcttttcttcccccgacctccgaaggctgcggacaaagcattatcttcggccttggagtaagctccaagtagctcatcactggtagcttcgatacacttcagccagtcgtcgtctagctcatcaaacttctccctaaatctgaaggtatacttcagtcaaactagaccaccatcactagaatcagcggtggtctcctttggcatatcccagctttccacaagtggccataccctgaaggatatatgctcttgaatcaaatctcttgtgccaatgaaggcacaaacagtgctaaaagccctctgacatgcttcaacagcgtcgtcaatt

SEQ ID NO: 73695 - DNA, 800 bp, Zea Mays
tataatttggaatggggagagtagaacaatggtgataagtttgacatactgtgtagttttgcaaaacggaacgtcttttggtccacaattcttgtcccccgtcctttctttctgcatcgtgtttgtcagatctcacatggaattgtttttcttctagttaagtaggatttcccccttttctggtaggcaagctggcagataatgcacaccattattgatgttagggtagtaaggtaacttctagttataggatgtggtatatcaaggaagggtgtgttatggccacatcttctaggtagatattctgaagatttttttggggggtctccatgaaatatgtggtggtaatggttcatgaacatgcttcctgctggactgctatacaggctgtgtcatttgctgtctgcccagcataggattcttttgacacgcatctactatcatactattattactgactcgagttcttcagaagatataagaaatgtccttgtcagctggggactgggaacttcagaaggacagaccctgtcccatatctacctctttcgcttagtcatttttttttacttcaatgcagcataattcaatgttcatccctgaaaaatcgcagtctgaaatcaatagctctgttatagcatgtggtaagcaaggatctggcagaagatggggttgtggtcatcgctgctgtcccgtatcgaatacatctgtcaatcggagctatctgcaacgctaagctgaaaactggattttgtctgtatcaatagcttctggattttagaaattacctgcatgattgc

SEQ ID NO: 73696 - DNA, 474 bp, Zea Mays
ccggcggcaaatgctcagtcgagcgacagcgggagcataacctactcaaggcgacctaggaccacgcatcaatttgacaagagcgccctgcgaacggcctgtccacgttcacggcgggaaccgcggcgtcgatcccatgttcccaattatgcaggcccggattgggcaaacagatgctacggtgagctttacgtgcctacacagatgctaaaacaatacttgagaggcgtggaactttaccagagtggtctggccacagtgggggggtgggtttcacggcggcggaaaacgatttggggagaactccaaattcgcggctctcagtgaatgattgaggctgattcgaggcggctggttagcttactgccctacggagcccgtggcatccgctatttataggcgcatcgagggtcggtgacaaattcggccgaggggtgttagcggccggagagctcggtgcgggggaaaaagtag

SEQ ID NO: 73697 - DNA, 325 bp, Zea Mays
tttttgaatctgaattgcttctgcctcaatacgggtttctggtacttttagacatttgcgcagttgagacacatggaacacattgtgaatatctgacatggattctggtagctcaagacggtatgccacaggtcctattcgggaaatgacagggtaaggaccgacgaaacgcggtgctagctttccttttatctggaaccttttgacaccacgcatcggggaaaccttgagataaacaaaatctccttcctcaaatctgagctcccttcgcctattgtctgcgtaactcttctgtcgactctgagcttcaagtaaccttctgcgg

SEQ ID NO: 73698 - DNA, 805 bp, Zea Mays
caacccgaatcacaagggacaagtcaaccttgtgttcacaagattcaaatgggttagatgtatgttatagaaattgagcaggcccgggacaaatgagaaaatgggtaaacccaatctgcggataaagaagggggcggaaactactgattcatgggtatccttagtaggtgctccttatccattccaacttttccatgcaattaaatccatgggggaaccatatccactaattggaggagatgcttcaaacacagaagacttagggaaagtagcaaaagggaagggaattcgcgagttttcattgtgtggaagcccgtcgatgctgttcccgcgcttgctcaaggtcttcttcggggccatcgtcaatggggaacaacatagttaaatttggaggcagttgaagttagagattctaaactcaagagtggcgtcggcaatgaaaatgaaaaaataggaaataaggctacgtgaggaaggaactgttaggatgtcaacgccaaagcctatcgcatcagtcttagatgtactaataatactttccttagacacaggacacaccgcccatatatctctgtcgatgagcgttgtatgtgagatgagaacctagaaattgacattgatgtcgagttccactgcattaaaaacatgtctttagtgatgtgtgtaaaatgcgtctcagattttatgtcgctagttgaattggatcagtgatgcgtaaaaagacgtcactaataataccattttagcgatgtgtttttataaatgcatgtcactaattgaaccactttagtgacacgtttttata

SEQ ID NO: 73699 - DNA, 446 bp, Zea Mays
tcaatggctgagtatttctctaggaggactatggatcaattctctctgcccagtgacacaaacatccagtacttccatactcagttgcagtttgatgtgttctggggtactctgatggatataaaatttcataaacatcaagttattgattaggactacatgcagggccaaactgttatggaaggattactcgctaaattccaggcctatggtttatatgagttcatgggtcaaagaactgacttcaatgaactaactgtcaagcagtttcttgcaactcctgaaatcaacattgatgatcagctcattgtctggatgactgggtttaagaggtatgtggctacatttgctgaatttgcagtggctaatagcctagattatgcaattatctctcaaggtgtcgatctttatactgaggaccagtttgaagattttgctcagtatta

SEQ ID NO: 73700 - DNA, 1852 bp, Zea Mays
ctttattggcttttctcggtactagagatctttttgaatctgaattgattctgccttgatgtggttctctggtacttgcaggcacttacggagctaggacacatgaaaaacattatgaatatctgacatggattctggtagctcaaggcggtatgatgcgggtcccactctgctaatgacgggatagggaccgacgaaatgcggtgctaactttcctttcatttggaaccttttgacaccacgcatcagggagaccttgaggtatacaaaatctccttcctcaaatctgagttccctccgtctgttgtctgcataacttttctggcgactctgagcttcaagtaacctcttgcggatcagggcaaccttctcttcggcctctttaacaaagtcaggtccttctagtgtcctttcccctacattggaccacattaggggggtctgacactttcgtccatacaatgcttcgaacagtgacatcttgatactggcctgatgactgttgttatatgagaattcggcatacggcaaactggactcccaattcatgtcgaacgtcaatacacaggctcttagtaaatcttcgaggaccttgttgaccctctccgtttgaccatctgactgagggtgatacgcgatgctgaaatctaacttggtgcccatagcttgctgaaggctcttccaaaattttgaggtgaactgcgtccctctatctgacactatctttcgaggaataccatggagcctgactatctctttaagatatatccgggcaagggtggctcctccaaaagtggtttttactggaatgaagtgggccaccttggtgagacggtctattattacccagatagagtcattccctttttgcgtccggggcaatccggttacaaaatccatgcctatttcctcccatttccattcaggcactgggaggggttgcagtaggcctgcaggtttctggtgttcggccttcgttcgctggcaggtgtcacaccgggccacatactgtgctatctccttttcatccctctccaccagtatctggctttgaggtctaggtacatcttggtggttcctgggtggatggagtaggctgagttgtgggcttcattgagcaggacttcccgtgcctctcctattggtacacacagacggttcttgaaccaaagaactccttgttcatctgccctaaggtccagaagttgctccttgcgagctctttccataagtcttgcagtctccacgtccaggcgttgagccttgcatatgaggtcttctagcattggcttgacttccaggttaccgttgtctcctagacatgcatttagctgagctgattccttcttccaatcttctaaaaagttggtcccctttatcccgaaaggttttcggctgagggcgtctgctaccacgttggccttcccggggtggtaatggatctcgaggtcataatctttgatcagttcaagccatcttctttgacggaggttgaggtctggttgagtgaagatatacttcagactcttgtgatcagtgaagatgtgaaatttgttcccaatcagatagtgcctccatatttttagggcgtgcactatggttgccaactccaagtcgtgggtggggtaattatgctcatgcggcttgagtaagtgggatgcataagcaataactttctcattttgcattaagacacaccctaagccttgccttgaagcatcacagaagatgatgaaatccttgtgtatatctggtagtgtcaaaacgggcgtggtcgtgagcttctccttgatgatctggaaactttcctcacactttggagtccacacaaacttgttgtccttcttgagaa

SEQ ID NO: 73701 - DNA, 534 bp, Zea Mays
gactgcgtggtcacgccatgcttttgtttgggcttggtacttatttagagcctgtagggcgaagacgcggtctccatcgatgagatccttcgaagtgggttcatccacgtcggggacagctgacgagactgtctgtggggacccatgttttatttcttgcggggtcatggcctccgatccatatagaaggtggaaaggggtgaacccagtcgccctgcactcagtcgtgtttagcgcccagaccgcttcaggtaacaaatcggcccatttgccctttttctcgtcaaggagcatcttcttgacagctgtgaaaattttgccatttgcgtgttccttggactgcgggtggtatactgaggcgaaggcaagcttggtgccaatggagaagcagaaatccttgaagtcttggctgtcaaactacttgtcgttgtcaactatgagttcggatggtactccgaagcggcaaacaatgttttgccagaagaatttctgtgcagtcttcgatgttattgtgaatacaaccctcgcctcgat

SEQ ID NO: 73702 - DNA, 747 bp, Zea Mays
cgatgtcgggtgtcctcggcgctgtggatttcgcggctacatcagacaccgcgacctccgccgtactcgcgttcttccgtggaccggctcgagcatcctcgcaaccactagtaaggcgtcatgccctagtctgttatcccctcggcaatacgatactagtggtggcggtgcgattagggcactgggtcgtggagtcgtgttctcacaggcgtacgcgggtctgctgggtgtgtctatgactctatggcaccggcggctggaggaggaagacggcacctggtgccgttgatctgcgaggtaacggccagagtaaaacacagaaccgtggccgttagatttccagttgacgatcatgattgaatctagcgcatcctttcgaccgggcgatcgtagccgtggatccgagaacgaacgtatgagatcagattaaatatatcccgtcgcgctattagataggagccgtggatcgatcatcctacgactataatgtggtacccggttcggttgaattgtagatctaatccataccgtaggatggcgatctagcggtcatgacccgagaatacccctttggccggtaccaattgctaaagagtccctgaacattttaataataaacccgccgtcgttggccactgtgcgctgagtctagaaaatattgcgtcgtagcccctgattttcctggaaaatgaggcccagtccagtgcagcttgaaattgaataaataaattggaaaaaaagattttt

SEQ ID NO: 73703 - DNA, 585 bp, Zea Mays
ggttcatttgtattaatccgagggactcatatgctaaatctcaccgcgaaggggtacgcagagaccttggccgttggatgttgttccgaccgccgagattagacgctgatattataaaccgttatgtgatattgaccgttggatctaacatccacggatgagaagcgatcccgccccgatcaatcctcctccgtccgataccgcgccaacgttccagatctcgctatcgaaccgttatccagggatctaatctagaccatacgcgtagagatcaacgcgccagatcgattcactcaaaacgttaatcctatccattcattgaagatctgacggtcgccagccctttcttccccacggcaatctgcaagcggcggcgccgccacgcccgcccgatggagcatcaccggcgagacccccccccagccataccaacggccaaaccccacatacaacggtgctacacgatgaggacgacgaggcgaaccatatagggtagcgacttaccagaattcgtagcaagagctccctggtcgcggtggaatgcggacagcggcgctcttcccattccggtgagaaattcctcga

SEQ ID NO: 73704 - DNA, 355 bp, Zea Mays
ggagaaacagcgggacgagcaggctgcggctgaggcgaagctacagaagctgcagcaggaacttgacgacaaggctagcaacattgctcgcgccgaggaaagcctcgaggcaaaggatgcctccctagagaagcgagcgactgatctcgcctggcaggagaaggacctcgccttcagggaggagatgtgggaaatgtgaaacaagttgctggtcaagtttgagctcgaggcagaggagaaagagaagcgattggaggggaaagagcgggcactggaggagcaggtttgccggttccaggcggcgcaggctgctcaggcgacacagacggccccgggcccccaggcggtggaggtg

SEQ ID NO: 73705 - DNA, 449 bp, Zea Mays
gagttttggagctaaatgaacatgaagggtttagttagggggctgaatttcaatttaggaaaaacctgacttttcttttgctctcccatcttatgtgacattttttgagtctttgctaaccttttcggggtatcacccttactaacttttgttagtatttttatgagctacaacttttatttatggtccattttgtgattatgtgatttgattagtgttctggttgatccctttttggtgctctatgtattcaagcgtgggggtacttagggtttaggcacttcccatcctttggtgagcatggtatggttaaggtaggtcctcttggatgattagtacttacttagggccttgatccttaagtatggtaccttatgcccaaactaatacacacgtgataataagtttaacagtgtgtgttgagttaaaccctagagctaacacctggg

SEQ ID NO: 73706 - DNA, 863 bp, Zea Mays
aatcccttgtgaatgtctggcattacaatattggtgtagtggttagccttttcttgagttcctcaaaacaattctggcacacttcatcccacttgaattctttacctttctccagtagtgaggtaagaggtttcactaacttggaaaaaccttcaacaaatcttctatagtatcctgccaatccaagaaaacttctgatcttggacgcatcctttggttgcttccagtttagtatttcacttatctttcctggatccactttaattccaccatcagtaacaatatgtcctaagaaagcaacttccttcaaccaaaaatcacacttcaagaactttgcgtatagttggttgtcacgaagcttttgtaggactagccttagatgatcttcatatgtttcttcattcggagaatatattagtatgtcatcaatgaattcgaccacaaactaatccagatattccatgaatactttcatcaagttcataaagtatgtcggtgcattagtcagtccaaacgacatgaccaaaaactcatataatccatatcttgtggtgaaggctgtcttgggtacatcttctgctcgaatttttaattgatgatatcccgatctcagatctatcttcgagaatatcttagctcccttcatataatcaaataaatcttcaattcaaggtaatgggtatttattcttgatggttacttcattcaaacttctataatcaaatagaactggggctccccaaggggatgaacttgggcgaatgaaacttttttctagtaattcttctatttgtttcttcagttcaacaaaatctttgacatccattctataaggtcttttcgagataggtgcagttctgggt

SEQ ID NO: 73707 - DNA, 1011 bp, Zea Mays
cacacccattgggatcagcatcagcagggacacacccattgggatcagctccagtaaagagttccactggtacttcttcagcagcagtaacagaagggtcggcatcacgatccaagcacgacactcgccgaagccgtctctttttctttttcttcccctcggcaggagcagctggatgactgacttggcgaagacatttcgggcgagtaccctcaggccttcgagtatccacggttttctcaggctctgggatagttgcaacagccattgtttcagcatggaccgagtcagaagaatccccagccaacatgtccagcatagcgcttatctctgcatcacccggactcataggcatctcaaagtgaacttgcctctcatcattgggaagatatccaagtgaagcaactagaacctcaacttcttcaagagagggtcgcactctaagacccaaaccactgtcactagcacgaggatttgacacataatcgaaaaaggacttggaaggaggcagattccatgcagaatatgcaacaggagcaccaatgttcaataccttgcctctaagaatcatttccagtcgactcaccaaatccacagtaggaatcctcttgttggtaacccgggttgaattggtgacaccactatacaaataagctgggtatgccctatccttcagtggctgaatattcttaaaaacaaagtctgcaaccacagcttcagcagtcagacctctctccttcaacaagcaaatttcagcaagtataactttggcttctgctatctcaaagtctgtgggagactcaatccaacttggagcgcgaacatccggctgtctccctgaccgaagggggagagacttgccatggttttccacaatgaaccactctaaacgccatcctttaatgctatccttgagtgggatgtcaaggtattctgttttcctcccacggcgcatctccagactcccaccacccacgagctgatgctgccccccagccatcccagggcgac

SEQ ID NO: 73708 - DNA, 539 bp, Zea Mays
ctaaggttgcccaccgatgaactgtagctactatgacctacaagtacaactgtcgaaggccaagtctagatttctcaaccacccaacatcgaagacaatattgtggaagggctactcaaaatagatctagacatgttccatgtgatcaccatgacatcttcttatgttcaaattatttagtacaacaatagtatgcttatcttatttacaaaaaaatcgtttacatgatgcagctagaagggtacaaatgcactgttattatatcatgtcttatacaaggaaggccatatgtggcagttcccatcctgcaccaaatgcaacatgtcttcaactctgatctctactggatgtcaatgcacaccgtgcgactagatagaaactatatttaggtaacactctacacacatgctaaattccttgtgctttcttcaaaatagatgttccctttcttattatgtaatcactgatatactacactcatattgttcatcatatatacaaacttggcttcatttctactgatggaacctatgaagcag

SEQ ID NO: 73709 - DNA, 449 bp, Zea Mays
ggggtatcgtcggtggtgagggttactgaaacagatgcagtcaggctactgtaccatgaagaggatcttcagaacgcctgacagagcaagtttagatcaaattttctttaaatttactatggaaacatccccaagtctctgcatcaaagttgtaatgctacataccagctacaaatttgttacaggaatcatgcttaaactcgcactgcatcggaattgaattggcttttaaacttggatccaagtcactgttagtctgaaattcagacagtattagcctgacagcctgacttcaggcttgattatctctaatattttcttaataactatgctcacacctttaagcaaagttgttctccttagtttggtctacaattttaatgtggtgccctagggcaaaaaccctatattttaaaagttgcaaggctccaaagttgagctcatcaatc

SEQ ID NO: 73710 - DNA, 430 bp, Zea Mays
ctctgtgtgtcttgagcattcctgcaggttcttagctccttcgggagggttttcacacctcaaatagccatttccctaaaaccctaaatcctcgcacaccacgtgttcggtgaaatgcccaaaccagccaaaaatgccccgattgaacccaaactttttaggcaccttcacaacatctccagtaacatattcgccaaatttcacacccatccgatattccaggcttcaatttcacccaattccccgttttgagcgatcgattccgagccgagtgcccaaatctcattttcttcgcctaaattcaaaccaagcacacacttcactcatattcacctatataaacctattcgtgaagtatcggctcaattccatgtcatttcgtgcctcaattcgaattccaaacctcctatggcactttttattgttcaaa

SEQ ID NO: 73711 - DNA, 602 bp, Zea Mays
tcttgcttatattctatgctttgtttgagctcattgaattgtatcatggtgacacattcttcaatctcagcgttgggatccatcttcttgcaaaattagtggcgacaaggcaacaaatataggtggaatatgaagctatatataatctcacaacctcaccactcttaccaaccaaagctcttatgaggtccctgcgggttgcaagaaaaatgtgtggtggtaacaagaaagtggtggttaagcgaatacaagaccagaataccgtttacaatggcttatatgtggagcttggtgggcaataataaacaaggaatgcaatctgaatcctagttggtgtaaagttaaataaccatccaactagaagttcactgcctagtgctgaccacaagatatgagtgatgtaagtagatcaaacacacacgcaaagaaatttcagatttgatgcaaatcaaggagtatgattggaatgcaagtgttgcgatcagacccaaccaaaaatttgcaccaaatgacaatagcaaactagttgaacaacttgatgaactttcaacacttgtgcacacaaacaaactaatcgttctacttttctttcacaatcttgc

SEQ ID NO: 73712 - DNA, 657 bp, Zea Mays
gggggatacgacggtgagtcaccggagtgacgtccagctcaccggcggcgaggatccttaaccccgcgacgttatccatccaccccgagtgcgaatcctggcgccggtgacacgaatcacggtgagatttcatcggcggtgagatcttttggtctgatcccagccaggtactgtaccatggcaatcgccattcagtcgactgacagaacatcttggagcatgatttactctcaacttccaatgacaactcatcccaagctctgcagcaaaattgtagagctataaactagcaataattcgactatagggattgaactcatttgagcactagatcaaggttgaattcacactcaaagctggctctgttacactgaatatctgaatttcagaatggaaccagcctgacagccaagctttaggcttaattatttccaaattcttcttaacaactatgcttatgctcttaagcaaagttgttcttctatgttaggtctataactttgatgttgtagcctagggcaaaaaccctagtatttgaaagttacaagactcaaaatttgagcccacaaatctgaaattcagacttagagtaaattctcaattggggtcctttttgcaaatcattccaaaacttagggtttggcttgtaaacctttc

SEQ ID NO: 73713 - DNA, 785 bp, Zea Mays
gaatccaggatctggaggcccgacatcgaagggaaccttcggtgtagtggtgtgtgtctctttactagctagcaaatcctccagtttatctgatagagatcccacatcttggcgaagatgcagcacttcagtttcgatctgtggcttccacgaagaaaaatccctcaccgctgcagtattagcatccaaggcttgcttgatggagtcaatttgaagttgcatcgcttgcagtagcgttgtgagatcaccaacgcttttctctattgctccgataccaattgtaacgcatcctctgggacagtccgcccaaagcccaccatcgccagcgttgggcgttcatgccctcgtggcagcctattcagataggcacctcgctctcaaaacctagcctgagagaggagggaggcccgcccttataaagccaccacgacccccttggctaggcgaggtggtactaacccagggcatgcataccgatctctcacatcccaccccctaagaggccaaaagctctcccagacagcagcgacaatgtgggctctgataccaattgtaatcacaccaacgattgattgacgatgagcaccgctcctggtactctctctctcacgaagttcttagtttacagaaatccagggtagcaaatagaaatgaaaacctctcaacactctctagatccggacatagccggccaagctgtctcttccagccaactctctccttcgcctaatcctaacgaagctgatgaatagactaaatacactcccctactgagtctagtccgg

SEQ ID NO: 73714 - DNA, 726 bp, Zea Mays
ctttcttttaaagcttcgggagcaggagcggcaactttttcaggcaaagtctgttctatagcctcttcctctgctgccttctcttcaatttccgaggtttttttctcaacaggctctgaaggcccagcctcggcactagcctggctcgatgtagcttcaacttcagccggttttgttttagcttcggtttgcattttcgaagcctcggcaattttccctgaaggagtagagcttaaagcttttactgtttccaacacatctagtacatttgccatccgtcttcttttgggagttgccgcaagacctttttgtgccttcggcactgttacttctgccgaagggctcaaaacttctaacatttttgttccttcaatttttggctcttcagccttatcagtcttcgactcagctagctcggctgagggtaccttcgacattacaaccggatcttcagccttctgtgtaggagaaatgggctcctttggcttagcagctgaagaagtctctccgccaaattcaggcaccacggccggttcaatatagcgtggccggtgggtaaggactttcagttttttgctcttcggcgcaggctcattgggggcggtcgaagcagctattttggtcgaagcagcagccttcctcttctttccctgtcctcgcagcgggtagcagtagtcggggtaaacaaaaccaatggcatcaaaaactctgtttaatctctttttt

SEQ ID NO: 73715 - DNA, 608 bp, Zea Mays
gataactgcttgattcgcttctttgattcattgagatatttgtggggttatatcctccataaaacctagtgtagtaggtacatcctagcatgtaccaacatagatgtagtgtagtaatgataggtaggtgacactctaatctactaagctattttgactccaaaatacatgtgttcctcacctagatgtctatcttatttagaaatctatcttacattacatctcgaacccaaatggtcaataccaagataggaggaggtgttgatcaacctacacacattcgtcaaagaaaggaaataactaattcaaaaccatagatgaatccccaaacccggtgcctgctaggttgaaagcgttttttgccgcccaaaaccagctgctgcaacaaatgtccaataccatggataacatgcaagcccagctcaacaataacccccaacacccacacccaccaccacccaaagtaaagaaatgcgagttcatgagccatagaccacccactttttccagctccccagacccaccacaagctaatgactggctaaagtccatggagaagatgcttaacattgcccaatgcaccgacagggataaattactatatgcat

SEQ ID NO: 73716 - DNA, 422 bp, Zea Mays
agcctggaacctgcctcctcccaaggccttcactctttttgtgtcaaatccacctgttgctgatggcagtttgggccttagagtacgaccctctgctgaagaagttaacaccttggttgcctcgctcggggaaattcctgatgatgaacggcaggtccattttgaggtgcccttggatcctagtgaagcagaaataagtgctatgcttgacttgctggctgaggactcttctgatgctgctcctgctgggacattggtggtggcgcctctcccagaagctggtacaaccttggatatccagaagcctgccagcgctcgcccgagacgcccttgccgagccaatcaacttgatccttctgctgatgagcagaaaaagaaaaagagacgcctccgacgagtatctagtttggatcgggacgttg

SEQ ID NO: 73717 - DNA, 735 bp, Zea Mays
ggccactgcctggctcacttttgatggttggggtcttgagtgcatgcgggcgcatctgctagacgtagcccccgagcccccgagtagtccatgtggattgcttggaggttcacacagtgtgagggtcgcacccttttctgcgatggttcgtcaaaaaaccgggcatgactccactagcctctcgggtgcgcacgagcatgtcagctagatgtgcgtggggaacagatttcttctcctagtcttcgtgtagatctcttgacttgccatgcccttacctcgtctaatcggagtagagcgcaggggtatgttgcgacataggcaagtgctatcgtgtgtagggatgctcaggcgacgttgtcttgtcttctcctcttgtcacccttcacttcggtgctgtgcgtgctacagtgggggtcatgatggtggcagcgcacgtggcgcagagagtctaaggtcccgccttagtaacgcgcgagccactacgtggcccgtgtacttcgattgtagcgcctgccgctagagtggtcaggtatacgtctcgtccacagttaatgcagaggcgcactatactacggaggccgacatcgagtttccctggtggtccatgttacgtgtcgcagaatacacgacaacggtgggcctcgccctgtgagggagtagtagctgataccgctcttccttaatgcagctccagttcaccccctcgcttggtgacctacaaaaaggtgtccctgc

SEQ ID NO: 73718 - DNA, 559 bp, Zea Mays
ctccttccaaaatcttaagcaaaacaacttccaaaaagagttattcataatctcaatgacaatttcaacatgaggaacacatattccagcaagccatacctaggactcatttaaatataagtaacaacgaatatcatgagacataagaatattagtatatgtgtgtgtttattatatgtaagcaggtcataggaggtattgttagcaagatagtattttgcgaaagaaaaaagaagttcctgaaaacactgagaaccatctagctataagtacaagagccatcgtgtaggttagttgtctttatatatttattttctcaactaaatagattacacatggtcctatattatgaacaactatgaagctaaaaaagggttggttacccgcgtgtgaactctatataagggccttagatataaatgtaagctattgaagtacttaattactaacaaatttagcagtgttaagttgaggaggaatggaggatggtgtaggcacagctggaggccaatggccactagcatcctttagacgtcattttacagtctaacatatacgc

SEQ ID NO: 73719 - DNA, 451 bp, Zea Mays
tccctacgcgtgaggggttacggaagatctaatccaagccgtcgctacggagatcaacggctaacgcaggttcttctccacaccagcggcacacggcggcgccgcccccttcctcgacggaccatcgccgtggcgagggtgatcaaggcctaggtgcccccatacctcggtacaataaggtctacgcgtaaatgggaacacgacgaacaacatgaagggcatcataccggtgataacgtcgtggagcagtccgtccgtggtgcaggcagggttcacggcggagctctaactccggcgcgaaatcgccacacgagctgatcctaatcccgttcgaggatgcaacgaatagatttcgccagcgatgaagaccccgcagacccgacgaatggcgtgatcacagccctacctcggtggttcaccccaacacgacggtggcggaacacagttttcc

SEQ ID NO: 73720 - DNA, 438 bp, Zea Mays
cgctagcatcggcgtcaaagactccagctattgagagctctgctgctgccgaagctgcacccgccaaagccgaaagtgacgaagttgaaaccgctgaagatgtgaatctagatgccacgctctctaaaattgatacaatgcttctcgatgcgggcgcggaagaaactgctgcagctgctgaagagatcccgggcacagtggctggaaagggaaaggagaaaaccgaggatatttcggaagaagaggacttcaactttcaagatatacttgggaaagaattgacgaaggccgaaaaagaagaactgaaagagtatgctatatcttgcgggtacaaaccaggcgcgttactcttcgggggagtgaacgaagaaagctttgaatgccttcgggaccacactggggcgaaggttgtcggcactctatcaaagagtgttggcc

SEQ ID NO: 73721 - DNA, 830 bp, Zea Mays
tggtcggtgaccacttaattcctcgtcggagccgggcgggtacgcggatcctctgtagggctcttacacaaattccccctccgttctcggtgagttctcggtttctcaccctcgacctgttcctttccttagttaatgtcgcgtcgttgccaattgcgtgcggattggggcgaattcgacctcttgggtcgggaatttgccctggcgccacccgtatcgtgagcagtagggttaggccgtgtggtgattggcgcagtcatcccccatgggttcgccatagtcttagcttcgtgtggagcggacttccttcggagttggtgtagccaggcctcgccgggatttttccggccatggccccgccgtgagagggcgggtgccgccgcgtccgagcaccttgcgcgcgttgagtagtgaccgtggatgcgtggatgaagggttgagattagattccgcgtaccctttcgccacattcgttctggttcattcatctagatcggacggatccgactgaccacgcctgtttaaaatcctcgctgttggttcccaattggatggtggagggcgcgcaccgattcatcagctcgccgatctaatcgagaccgtgtaattgtgattggacggctgtgatagctctctaccccttcggcttggatattttacttaagagccctcggagaaagtgaaaaacaacccgccgtccaccagtactgttccctgagtctaggttatcttgcgcagagacccttgtgcttaccagaaaatgaggcccagtccagaatgtcatgaaaccagagaaattaatttataaatggatctttaatagataaata

SEQ ID NO: 73722 - DNA, 623 bp, Zea Mays
ggtgcgttcacacccctgcgtccgcacacgttttgcaaatgagccctcaagatttagggtaataaacccgatgtccatttttcagtgtaaagaaaataaaattaaatgaagactttgcgtattagcccctagagtttatttttaggcacaaaattaatacaaaaatgcacaaaacctaggaaaatccatatcttgctcattttaactccaatttggatcgttcaagttgcatttgttccgtaataaagttaccaaaagaataacaatattatttgatcatgtcccataacttttataaataggtattttgtttaacctgtgttagtagattaatctttctagccatctattttggcaagatagagacggttatggcaaggaagactaggcacaagaaagaatccatcctagattgtggatcttgattccttatcgatctcttccttcttggggtcctggtgttaccgtctgagttagggaccttcgaccttgttgtctctggtttttttagtgtttatcatctgagttaagatacaacagtggtacatggggtaggtaggtcaaaccaagttttcctttgcttttaggtggggatagatggattaggcaatctatcaggtagg

SEQ ID NO: 73723 - DNA, 294 bp, Zea Mays
aatagtacatattctaaatatgacacatcgctccaggcgttcatccattgcaacatctatgatggtgtaacagaagtccatcaaagatcgtaatccatcagggatttttcatcgatcacatacatcgttatagtctgtcattctggcacaatgaggatattttgccagtaacacctaaaccttataggtttctgccatcagggctttagaggatacagtaattccacatctagtgaaaaataccatgagtaaagatcgtggaatgcacatgtgcttattcggtgaacttcaagt

SEQ ID NO: 73724 - DNA, 373 bp, Zea Mays
gaatatagatatacataggattatataggagcttgatcccgataaattggtgaacagtgtgaggagttggtcatttaggatactcatgctcggtatttcttttgtgcaagaggagagccttcagaggtattatctattgtcgaagctcccgtaggaaaatgtgcactgtctacgcatttattcctctattttccccttgatttacagttctttatcttataacaatcgcttgtccctgtattaccatttgatttgaacgttattgcttcatgtgagaatatctaagggatataaagtaagaatcattaacttcgatcatcaaccattgacaagtgtaaaaaaacctttatttgattccccctatgaagagagg

SEQ ID NO: 73725 - DNA, 551 bp, Zea Mays
cgcgggcgaagggttacccagatctaatcctacgcgatcaccgcggaacggacgaccagatgcacctcgtcaattcccccgcaccaacacctgagcaggggcggtgccgcccgaggttacagcggatccaggccagagttgaaggcgtccggcatacccccgcaccaaatttcccccgaaaggtcctatacgacgagaggagactggtaaaccgcatggaggttgtcttacctcagatcgagcgctgggaggggctatccacgtgatgaggcggtcacgcggcggatactggattccgacaaggaattgaagaccttctggtgatcttcacagcgtactggggccacggctaccttcatagccgaacggtgaagcaccctgacccgccagtgcgcccccgacaatgacgtggatgaagactgacgtcggcggtcatccccccattccacttcctcccggtggtgccccaacgagcaattcggtggggtatgcgctgctcgacagaaggggatacgtggcacggggaggtggagcagagaaggcgagcgcgc

SEQ ID NO: 73726 - DNA, 378 bp, Zea Mays
ctctgataagtcgctcctgcgtttttgaggccgaacggcatggaggtatagcagaaagctccaaacggggtgatgaatgcattttttcctcatcttcttttgctaagctgatctgatggtatctagaatagcagtccaggaaggacaacatagaacatccggcagtcgaatcaaccacttgatctattctagggagtccaaagggatccttcggatagtgtttgttgagatccgtatagtcgacgcacatgcgccaatccactttattctttttgagtacaagaacaggatttgctagccactcaggatgcagtacttctctaatgaaccctgctgcgactaagcgagctagctcggcgcgaatagcctctctcttgt

SEQ ID NO: 73727 - DNA, 451 bp, Zea Mays
gacgttgtccacatcgctcgtggccagcttctccagcatcttttcgtcacgcaccccctggcggaaagctgtgatgatggaagcatctgagatacgagggattgtcccacataccttggtgaagcgggaaatgaacacccggagggtttccctgggttcctgccttactgcatggaggtgtgcttctacactatgctgctggtaggcgctggcgaagttcgccatgaaccacgcgcagagctcttcccaagagtatatggaccctggggcttggttcatgagccaagtccgggctggcccagtcagagccacgtggaagtaggtcgccattacggtggtgtctccacctgccgctgtaatggcgatgacgtagacctgcaggaattctaacgggtttgtcgtaccgtcgtacttttctggcaggtgtggacgaaacttggttggccacgct

SEQ ID NO: 73728 - DNA, 574 bp, Zea Mays
aagaagttccctcaacattttctgccactgacgcagaagaaattttaaaggtaatgaccgaatctctacctaattagctaagtccgctgggatcggaactgatgaagcttttatagaagaaggagccttggctgacgagaagcctgctgaaccaaaaaagcaaagaattattactgtcattgaggctattgaagaaacaccgccatcgacctcagcaccgaaaacagcatcagccaaagctggtcctgccgaagcttctacttccgaagctgcaacagccgaagccacagatttggaaaacacacttattgatattgatgaaatgatttcgaatatggctgaggaagaaactgctgcagctgccgaggaaaccccggccacagtgcctgaaaaaggggagaagatgcctagaaaagagaaggaacctgccgaagatacttcagaagaagaaattttcaactttcaaaatataattgggcaagaattgtcaaaggctgaaaaagaagagctgaaggactatgccatatcttgcgggtaccagctaggggcactgctcttcggcggtgttgccgaa

SEQ ID NO: 73729 - DNA, 718 bp, Zea Mays
ggcagaaccagtggttttatctccggaatgacgacggggtgctgccgcccttttctcaacgagtggtgaccgccgccggcgataactggcgctggggggccacacgcgagaaccaggagaagctccgacccattctccgtgccctgcagaagctccaagccaaaggccttaccgccgcgggggtcgtcgccgctatccaccaccggagggtgctcccattggcagagcagcggttgtggctttcggaaatgaagccgggggttgatttggagggttcacggatgtcctcgaccccctctccaccgacgacctcctcagacgggtagcgggcacggtagggaggctggacgctggcgtccttaactagcccccgatgcatcccgaccacgggtatgtgtccctggtaagtgtccgacccttcttctgttttgcgccatgtttcttacgtctttagcccttacccttgggatttttgttcgtccctaggggctgaggaactttaaaacctcccggccaccggtctcggaggacgcggcgggccgaaccgcgtgtaggctcgccctggagaaggacaagaagaaaaaagacgcggaaaaggcccgagctcgtgagaggatgcgggctcgggacgccttggagaagcatcgtcggaggccagcaagggatgggctcccgttggagccatcgtcggacatgcccgacgacgacgatgatgatg

SEQ ID NO: 73730 - DNA, 715 bp, Zea Mays
ccgatgcccgctcaaccgacggcgaactcgctggggcgagggccaatcccgtccccagagcatgatcacacggatcaagaggtgctaccaacccgaaaggatattgcgattcgagttgcgaagttattaccaacgatggtatggccttgcgtccgatccacggtgaagactgcctctacggtagaagaacaaccttggcggaaacacccgaaccagctggatgaggccccgagatccacaattggtcgttctttataaggaggagaatagatcccaggcagttgagaggttatgtccgagacccacacggttttctcgaaggtttgttgggatccgattccgagcggatgacatctaccggtgtagtggatagcgactagaggatagggatgacaaggtggtctcatgtgtcagcgagctgggcgcacagccgtgatagagcagacgctggcagggatggcccgcatgtctgtgtcaggcgcgggcacaggtgaggttgtccacaaggccccatctctcagcgacacaaagcatcgaggcgttctccactgacagcccagcccgcggaggcccaccaataagaggcccgatgcgtagaccaggggagcaagcggagtgggctgcgaggtgggagaaacgttcctgagccaccgacaagggtttgggccaaaaacccgttttcctttttttaccttttccattttcttttctattt

SEQ ID NO: 73731 - DNA, 1434 bp, Zea Mays
tgagagcccaacaaagcttagtcaggctagaaatcccgagacctcccatatgtagaggcctacataccttttcccaggctaccatacagtgacctcctttagcatcctttctgcctcgctataagaatccccttctaattttatcaattgcatccaaagctcacttaggaaaatcaatagccattgcagtataaattgtcatactagttaggacatgctgcactagaattcttctgccagctttgttcaacaactctgccttccagcttggaagaagatctgcaattttctcaataaagggcaggagctgctgtttggttagtttgtggagagaaagagggagacccaagtatttgcaaggtagggactccaccccagaaggtaacaagctttgaacctccagtatggtctgctccgaacatctgataggataaatactggatttctgcacattgttgtggagacctgaggtattcccaaagatgttgagaatgtccagagtagtggaaatgtcattctgagttgggagcaggaagagggccacatcgtcagcataaatagaaattctatgaagtttctttctgttggacaattgttgcagcaaccctatctcttcatctttggcaaatagaaggcaaaggacatccatgactaaaataaataacatgggggagaggggatccccttgcctgagcccccttctatgttggattttattgccaggacacccattgagcagcacttgagtagttgaggaaccaagtaacccacaaattatatttctccagatctgacaaaaacccaaagcctgcagcacctcaatcagaaaaggccatgaaactgagtcaaaggcttttgtgatgtcgagcttaaaaagaagacatgccttattttgctgatgcaaaaatcttgaagtttgctgcactaacataaaattgtcctgtataaatctgcctttgatgaaggcactctgatttggggagacaagctcattcagatgaccagcaagcctattggccatgatcttggttaccaattttgcaaagctgtgcacaagactaatcggtctgaaatccttcacctgatcagccccatcaaactttggggtcatagtaatatatgcagaatttactttatccaagttattgaagttcctacaccaaattgctgaaattgcattgagtacgtccactttgatgatgttccaacaaaccttataaaatctcccagtaaaaccatctgggccaggggccttgtcagcaggtaggttcaaaacagttgctagaacctcctgctcagtgaaaggggcgtccaagatggagaggttatgagctgggaggccgagagcaactaaatcaatggtattctccctggagaccgactgaccaataaggttggaataaaactgatccactaaatccgctttggcagcat

SEQ ID NO: 73732 - DNA, 900 bp, Zea Mays
gttagccgtgagatggttgaaaagcttggtttgaagttgcagcgacaccctcatccatatcatgtccaatggttgaatgaatcgggagatatcaagattggttataaggtgaaagttccattcaagattggagagtaagttaacacagtggagtgcgatgttgcacccatgtctgtgtgtcacttgatgctgggaagaccttggcaatatgaccaatattctcagcattgtggaagaacaaatcagtacacactagatctgaaatggagaaagtttgtactcaagcctatgacccctcaacatatcatggttgaacacttacaaaagaaaactgaaattagtgcagcaagtagaggaggagaagagcaaaagaaattgagtgccatccacaattcggtgagtgagtgctacaagccaaattcaagagataaaaagaaagaagagagataacatctagttatgttagccacaaaatctgaactgagagaagtgaggaacaacctatatcaagtgctttttgtacttgttagcaaagatgttttgatttctcctaacgacataacatcgcttcctagtgttgtggctgatcttttgcaggacttagaagatgtgtttccacaagaaatactagctggactacctccatttcgtgggattgagcatcaaattaatctcatttcatgggctgcacttcctaaccatccaccatattgaaccaatctagaagaaactaagaagatacgaaggcaagtgcaagaagttcttgataaaggttttgttcgtgaaagtttaagcccttgtgccgttcctgtgattttagtacctaagaaagatggatcttggagggtttgtgttgattgtagaactataaataatattaccgtttgctatcgccatcct

SEQ ID NO: 73733 - DNA, 580 bp, Zea Mays
tttcaggctagtacttttatttgagcacttgaaacctatgtgaaacccataaaaatttgaattcaaattatgaatttgagtgggaaaaacaaaacatgaataaaaaaagaaaaggaattcctagcgccttgggtcgaattcttagtaccacggcccaaaacaccccactgcccaacctaaactccccccagacgtgcacccatggatagtacttgcgctgacaactggggccgggttggcgggttctcgcgccctgtttggctgataggggggacccgttggtcagtcgacttctttccttccctacgcacacccgttctttgcagtcgctgtcatgtgggcccattaggtcggtcttgccataccacccacgctcttaggttacactagcacgtggggcccatttgttagatgaatcttccttcttagagtcggacttagctccctgggctataacagatctgagtgaaacatatgccatcgcagaattcgcaacaacccaccttggacgtagggaatataaatcccaactccgtactcttgactcctccatccgagcgcatattcgtgaacacccaaa

SEQ ID NO: 73734 - DNA, 576 bp, Zea Mays
gcaggtccacattcacaattactggggaagccatcatcagccttgcacctctaaaaggtgcattagacgcgtgagtcctagctgatcgccatgatgagtcaccaccccttgtccttccacgatctcatagagacatcttgtagcgactattcctctttggaacttgagaacacctctagtgtgccatctctctatgccacttcatggccgacggacatggcacatcgaccccagtacgggcatgcctcatggggtaataacactctccctatcaggaggtggaatacctatgggctcacatcgattagctccttaagcgtcgtgaggaggccatgaaggggctaatcccgctgatgcagcctgcctctttacctccaataggatgtcgaacaccatcaatagtgccacaccaacaagacaggtgatcaccgtcatccctcctacaatgacattgacatatggggagtctgggagagcagcaagccacaacattttccacacgctagccaaaatgtcactaccgcaacagtgatgttataggtgatcttggagccaaagggcccccaagctagggcc

SEQ ID NO: 73735 - DNA, 692 bp, Zea Mays
tttggttttatttgatgatatactagtttagagccccactttttaggatcatttgcatcatttggaagttgtgtttctcttactacagcaagaccattggcatgttaaactgtctaaatgtcattttgcctagaggtctatttcttacttgggtcatgtcatcagtgaagctggggtggctactgatagtgccaaggtagaagctgtgcaatcctggccgagtccaaccaatgtgaaggaacttaggagtttttggggctagcggggtactatagaaagtttgttcaacactttgctgtgattaccaagcctctcactgcattattgaagaaaggaaccttgtttgtttggactcaagaacatgaaatcttcctttatggtagaaaacacaacaatgtgctcggctcctgttttggccttgcctgagtttagtcaaaccttctgtatttagacagatggttgcaaaaatggagtaggagttgtgttgttataggctagtcaccctttagctttaattagtaaggatttaggtcctaaaattcaaggcatgtctacctatgagaaggaatatctggcaattctcattgcagtggagcagtggagaccatacttgttgcataatgagtttgtgatcttcacagatcagaagagcttgattcacttgaatgatcaatggttacacacaccttggc

SEQ ID NO: 73736 - DNA, 446 bp, Zea Mays
atttccaaccactcttggcaaggccctttgaattgtttctcaaatttgaagtgatagcgcaatcagacaaattcatccttcttctttgttcctttcagcttcggcatactccaaccactcaatgttggagataccctgttcgccaagtattcctgcactagatcactggtactgatatgttcagccaccactctgaatactgccacggctagctggcatggtaaccctggcttcttgttgcacaagggtctagtcatcccgaagcttaagctcagagtgctcatcaccagtgtcttcagcttctccctctttttctcatcagccttgatataaaaccactcacttttccagccagttggccatttggtccgatagctgagcaccggggccttcgtatccttgcaatacgcgaagttgtaacagccaaaattctcatgtagcccgtc

SEQ ID NO: 73737 - DNA, 349 bp, Zea Mays
atcgagattgacatccacttcgtccgtgagaaggtcgccctagggcagtttcgagttcttcatgttccctccgcctaccagttcgcggatatgatgaccaagggtctacccgtccagctcttcactgatttcaggaccagtctgtgcgtccgtgagtctcccgctgcgactgcgggcgggtattaggatatgtaaatcaggatcaattagagtgatcctgtagacaggctagttgctatgtatagcacccaggaatagcttccttgtataggtgatagccttctacttatgtaccttccatgtatgcctgattggctctatatatgaaaggctccccacccacattggg

SEQ ID NO: 73738 - DNA, 408 bp, Zea Mays
ggcgtaggaggagtcttcatgaaatgcatccactcggccaccgggaaacagttattagatgaaattcatgctgggcaatgtggtgtgcatgccgcatcaaggacgctagtgggaaaggctttcagatccggtttctgctggccaactgggaagagtgacgctgtcgagttagtccagaagtgcgaggcatgctaattcttgtcgaagcaacaacacttgtccgcgcaacagctgcagaccattattgtaacctggtcgtttgcatgctaggggctggacatgatcagacctttcaagaaagctcaaggaggttatactcatgtactggttgccattgacaaatttacaaaattgatagagtacaagccaattgcttccttgaccttagcaaaagcaatggagtttatc

SEQ ID NO: 73739 - DNA, 390 bp, Zea Mays
tgaagattcggaagacaacaaggattttgatgttgatagtggcgcagatgatgccgaagaccgaccgtggaggccaagtcacgtggtggaccagaggtgaagacactgttcctctccccgagaaagatgaggtggtggtattctgaagcttcatgaaagctgggctgcggtttcctttgcataagatgttggttgaagtcttgaaaaagtttgaaatctctcttcatcaacctacgcctgtagctttgataaaaattagaattttcatctgggccataaggagtcaagggctagaaccagatgccgattgtttttgtaatattcatgaattgtcctatcaaacaaagggtttagggtttaggacaatatcacaacaactttggatgctac

SEQ ID NO: 73740 - DNA, 271 bp, Zea Mays
actcaaccatctacctgtatcaaagttgtagctctataaaccagctacaattcgactatagagaccttgctcatttacttactccatcgagctcgaatcaagtccaaagtttatcagaactcactgtcagactagtatgaggctgtatgggtaactgacaacattaatttaggtccatttatctccaatttttgtatagcaccagtgcttagtcacttaataaaacttgtactcctaacatagctcttcaagtttgctatgttgaccagga

SEQ ID NO: 73741 - DNA, 1049 bp, Zea Mays
ccccgacggcgagcggcgctgcgcagagctccggcgagcttgtaccgaccggactacgcaaagaccgacactctccatctactggcacctaattcaagccttaaccgaagtttcccctcaactaatttcactaatggcgcactaacacgcactgaccacggtgaccgtatggacaacggccaactgaacgtgttcccagcgatctagggtgacttagctcaattgagttggtcgaggagcatcaggggaacacaagaatgttgaaacaagatagcagggagcatgaacagacctagaagtcgttgaccacggtgagggctcaaggcacggtgttcttggttgatttgggggaaatcccaaattggggaaatctagtggacgattcgagtcacgggttgctgcactggttgcataattacctagcagagtggatgggggcggcaatttatagcctccaacggcggtggcgtccaattttcacgaggatgtgctagcggccggaggggaaaaggggtactggcgctcgggatgagtggctttcaccgtggcagtcctccggcgatcaccggatatgcataccatgattcaccgtgtcgtgggctagtgcttaagcacgtggcacacaacgttgagcgatcaacgacggtgaagtctatcccgaccgcacgacgagcaagtgggtacggtgaatctcatccgcgcccgagcccgagctgatcctgtgccaagatttttacttcgtcgtggttatcccctcaccagcgagcacgaatcacggcgacgatgtaaatcacgacgtaaaaatcaccggcggcgagggcaatgcatctgcaatctatttcagtcactgtaccatcgcaatcttcttcagtcagcctgacagtcgatgtttagggcagattttctcccaattttccatggcaacacaaccaatgctctgcagcaaagttgtagccctacaaaccattttcacttttgctatagcatccctagtcaaattcccattggatcatgattgaattcgagccctaagttcatgcaattccact

SEQ ID NO: 73742 - DNA, 970 bp, Zea Mays
gatttgtatgtttttattgtacaaggatttgataatatttggttgtccctggaaacatgctcatacttgacggttcttggttcaccctatatatctactagcttgattcataatcactgtttattgtgttgttactcacttgacaattaacatagtaattaatggcatgtttgaagggaaggcatgttctagaaaattttagtatttagttcaaaactttatactaaatccatgggatttggatctcactacctttccaaataggatctgtagtccttacaagttacaacctaaatcactacacactggtggtgagatgtctcaaattgctttacatcatttatgaacaaatgagttccctgtgcaaaaggagaggtgccacactatcagtagtttgttcattttgtttactagaggtaacgacagaacccctaattggtgatgtttttaaatgttcggtttttttgcttctagccttgtaactgagagtttttatctaataaaaatagtatgcctacctaataagaacagtgaatggattgggttcaggcgttcagcttctacatgtactatctaattaattttggaagtctatccacaagttacattgcagagtagaggcagcattctgcatagatgcttggaagtctgttgcattcttttattcttgatttgttacaattatgacacatgattgtagaatgaggttgcctgttttgtggaatctgtgttgcttataggtactctcaataaggtatcctcattggaacccaacattataaatgacatcattgagcatagacatatgtccaagctgaaactgaacgcatgagcccacaagacaaatatttctgctatctaaaaggtaaactcctggggcctttccgtgtgaagggaatccatgttttatgcacattagcttttcacttgatgaattctcacttatcttcaattatttgttactaggctt

SEQ ID NO: 73743 - DNA, 472 bp, Zea Mays
ttggagttctcatataataatagttaccagtccagtctgaagatgtcaccgttcgaggctctacatggtaggaaatgcaggactcctctatgttgggaccagactggaggaagacagttctttggacatgaacttattcaagaggcagaagaacaagtctatataatcaaggagaacttgagggtagcccagaccaagcaaaagagctacgctgataatagaagaagaccactggagtttgaggaaggtggtcatgtgtacctcaaggtgtcaccactttgtggaatgagaagatttatagtcaagggcaaattgtcccctcgctttgttggaccattaagagtttttaggcaagttggagagatggcatatcaaatcgagctacctgataatctatcaaatgtgcacaatgtattccatgtgtctcaacttaagaagtgtctctgtgtccctgaggaacaattaccaatgg

SEQ ID NO: 73744 - DNA, 440 bp, Zea Mays
agcgcacaacacacgttacaactacacggtgtacactatacacaggatattcacccatcacaaatgtccccattgcagttctttggcaaagagggagggcagcattttcgctcatcgtcgccaaagaacggcgatggcaatactcatcattacatcggctcttccttcaggataagatcagcttcccagaaattaaacagcatcaacttcaactcttccccttcaaaaaggtcccacagatccccttccccaatacacgacccagacgtcgacaccagtaatccgtgacgggcaccttgatctagtcgtggtccgatccgaagatgtgatctctccatgcccattttgctatgtcttctaacaccttgtgaagactcaccgactctttgttttgacacccccatcttttttcgcccccgcaagtcgcccgggaatgcacc

SEQ ID NO: 73745 - DNA, 545 bp, Zea Mays
cgacgatatgttggcgtcggtgaccactaatgtcagattctagcttcgggaaaccaacactctttgacagagtgccgattatttttgctctggcgcggtcgcggatacatcccagaaattcttcgtcaactccgccgaaaagcatagaccccggctgatagccacaagatattccatattcttttagctcctctttatccgccttggacaattcctgatctcccaggtgccgaaggtcaaaacctttctcttccgatgaagcatcaataacttctttccccttgctaggcactacggccatgttttcctctgcgatcgcaattgtttcctctgcgaccatatcagcgacgagcttgtcaatccctgacattgtgctcacaagattagcagcttcggtagtggcttcagcttcagcacttgcagccggcaccattctggatgtcgatgctagaggcggtgttcgctcaatagcttgcatgacattgacaattcttcgtctcttttgaccttcaatcttctcttttacggccgaaggttgatccttc

SEQ ID NO: 73746 - DNA, 505 bp, Zea Mays
gtgactcaggaatttcttgctggagttcgagaagccgcctgcgccgtggccttgaattcctcccctcccaatcactggtatgaactcgccgtgtgcccttgccttggtctactctttgcgtaccacccctttagtccggggtctagggtcgttggcctccggagtaatcatcatggccatggcctccgccgtggtggggcgtggcgccaccgtgcgcgggtttagttgggcgaagtcaccaacgaccgttgagttggtaatcgacgaccgagatcgaaccgagcgtaatgattagggtggggtgaaccaggtccgttccgatccaatcggatggatcggatgactccgggtaaaaatatgatatgtgtcgtagattcactatcctatggtcctcgtcgcgtaccgtttcgcggccgtgccgatctaatcagggctctagagttcatatcagacgtctcagattacactgtaacctttcgtccatcactttatgcatatgggtccc

SEQ ID NO: 73747 - DNA, 355 bp, Zea Mays
cccctgtgctgaaatatttcaagaactggcacaaggcatgcaaaagtgcaaatcaaactgcaccttctatacactgatctagccatatagcttcaacaaaatatcgtttgataaaaatgaactcagcttcaatgtttatgttttcttctgttcggcccacaaaagtaactacgaatgaaatttggtaactgtaataatataagaattcttaagttttctgtttcacacatgcttgaagtttgcatggcacaagggcacacctactcagctgtgttcatgtaaagatgcaaattaaatttgcaccttccatactctgatgtagtcatatagctttcttgaacacaatgtgtcagag

SEQ ID NO: 73748 - DNA, 579 bp, Zea Mays
gcaaggtgtccgcggtggcgacctgatgaacgcccgccggagggtggcccggagctgcgcctgcacagattgagagactcaagccaacggtttggttggtcgtttgcctcgtgaaggttgggattcggagaaacgtactcttagatcagatcgagcggccctgagccgagcttcgcggtgaatgatgcccgcggatgccggaagtcggagaagacgatctccatcggagttgctctggttgcacgaggcttggcctgcgtgccacagtcagtgccttagtcctagtgtaacatgatttttgtaaattcgatgcatttggaaagcttttgcctccaaattcagagccaatttttggaacaccgtgtgcgcttcaactgttcatgaattggttcgagtaaactgtacttgcttacttgtgttctctttctccacacatggctacaagggagaggggttacaactgctaagtggaccagaaaggcgcctgtcctaccctatattaaggtcccgtttagctccttcaatcacctgactaaagtttagtcactaaaataccatatttagtttaggtgactaaac

SEQ ID NO: 73749 - DNA, 989 bp, Zea Mays
tattttcctatcgcacgagattacaagagactaaaacctttttgtttccattataaaaaaaccctgcttggttaagctatagcttttgaaagatttgtcatgagctagggactttagaaaagctggtgtagtttgtgaattttgaagaaggcatttttgttgcacacatgtaccttttttggaaaagtagttatctgtgaatctcacgtgtcaatcaactcaacctatcaatctgtctttgacactctcccttgtattctccatctctgtctagttctttttttcgtcttgaaacgctgactgttgtagagaacttgctcgccaaaggtagggcttgcgcttgcgtgagggctgtgctcaccttcgaggacaggacagagacacagagacagaggcagggcatgcatatacacctgtgccgaaggtgcttgttgaaatgtcaacacggccttctcgagttctttgcgtggagggcatgcatatacaatggatatcgagcatagctctgtggtggatggcggtcagacaacatgtaacaaatgctccagatcttcgtctggtttgctatacaacttgacatatttggaaggaatggtgcagacgcattttccagcgaaaaataactgctatcgatgagttatcttcaatgatctaaaatgacataatgatggagcagatggccagaggagtccatatgttaccgccgtagtcaaatgccttaggagttttccctttgtcgttttttccttatttgctttatttaactgtgcctccagggcctcttatttcctatctccatcttaatgaaatggtagagcacctaacacatattactaaaaaagggaacttgcattttatttatatatgacaccagaaatcgaaaggttgtcttgtttacgagtacatggcagcaaaaatttgacatagcaactaaaacaaaaaaaaccaaatgactagtccttgctagtgaacaatgaacttatcacagt

SEQ ID NO: 73750 - DNA, 691 bp, Zea Mays
gctgatgtgtgacagtatcttgtccaaccacataaacacatctgctacaaagaatcgttttgacagaccgtctctgataagatttgaatggactgatgcaagtgacggcacgtttcgaaaccgcgggatgttgaactttgcgcatgtgggttggttgtcatatagagcatccaagggtttggtctttggtgtagtttacattacagggggcaacccttatcgatttggtcagttaacgaaagagctagcgatttctaatcttgtccttctccaacagtcagtctcatgtaacaaactaaactaacgatgataccatggtattggacaaaattgcagtggcacataaacgattttttttcttactaatttctcatcccagcaaggacattttcttattcggaacgaagctgctaggcagcttgcctaactagatgatttatgatcagatatgtgttctctccctcttaaaaatatgagatgtatacatacattaatattcaatcctttaatatttacttaattaatcaatataaatatataaaacgtttatacaacagaaatggtcattcacaacaacaaaatagaaaacttcctactacggacttcggaagaccccgtaggaagttattaacttctgacggccaacaggacttcggaagaccccgtaggaagttattaacttctgacggcc

SEQ ID NO: 73751 - DNA, 464 bp, Zea Mays
ttatacccttgttgtttataattgtgatggacatccttaatcacttggtgacaactgctgctcttgaaggccttctctagcccctctctttgtggtctgtacaacctcgtatttctctatacgttgatgatgtggtgttgtttttaagaccagttgctgcagaactgaacatggttattcggattttggaattatttggagaagctacagggttgaaagctaatgtgcaaaaaagcaatgtggcccccatccaatgcactcaactggaagtccaagaagtaatggattgtttcccttgtaagattgaagagtttcctatcaaatacttgggcttaccactttctgttaagaagttgtcaaagaatcaacttcaacccatcatagatcggctagctgacctcttgcctggatagaaggtcggcctaatggcgagggttaggcaagccactacagtccagtttgtg

SEQ ID NO: 73752 - DNA, 533 bp, Zea Mays
cgtgtcgtgttgccagggcgcaaccaatgctcgccaatgccataactcaaccgattaacaacaaagtctgatcgacatgtttgagtacccactatatagtttaatcgctcgatatgagtccaaaagctcaacataatataaatatttagagcgatttaaatatacacaatatagagtttacatgcattttaatattttctgctaaatatctaccacgataaataaaagcagaaaaataaacaccaaaattaatgcatgagcataacacatcaggtgtaaaaggcaacttccttgtatgtaagcatgcattttttagtaattatttactacaggaaataattaattaagatacatactgcagcagaaagcatgccttattctatttattatttgcatccataaaatattatagaaaaatcacatatgtaattatccgcatccgctcatgttgtgcgtgggcgtccctagccgtttctggttggtcaaatggaagtggtccctcaccttttttcacggcaagaaacgagtgctag

SEQ ID NO: 73753 - DNA, 526 bp, Zea Mays
gaaattcctagcaatgcgcacaataccattatgctgggaatacggaacaatgaatcttttgttttgggaatgatggagatcattattaaatgtgggagacaaatatgtcgacacttatcttgcctatctagattgtaaagggatccaaaacaaagtcctaggcatgagtgctttaagctcttttatcgggtcattgataaatgcaatcgaggctgaaccaataatcgcaaaataaaagtcacgagcttgaagttcagacatttatgggcactattgaaataatgtgtggtgaatgcgatggttcaagtggtcttgtgagagacccatcccacatgtgtgttgaataaacactgttccactatgtaatatatctggcaaatgacatgaattaaaatatgcagttaataggattctgaagatccgcatgagatcctacgaggactcatatctttgaattataaatatgcaacatataaatctcgtactagataatacattcttgatgaatgatcactcttgtcggcgt

SEQ ID NO: 73754 - DNA, 407 bp, Zea Mays
caattgtgagccccgttggctaaaaatccttggaagttaatgaggagattagccttcaaatgctcccaacattggattgactttgggagtaatgaagaatatcattgctaaatcggtcccttgactgacataataagtgaatttgctaatgttgtttcgacacctcccctaatattactattgcttcaaaactcatcagaaattgtcttagattagattggtcatcatacgtggagagcatattgaatttgtaacctataggcaattctattatttgcatgtttgttgatagtgaggaggttggatcaatcgagatgaatgattgttgggagttttttctttcaaagcatttgctacgggccttgggttatcaccaagtatgttatctaggttgattttgtgaattt

SEQ ID NO: 73755 - DNA, 445 bp, Zea Mays
attgttgatcaactatgctagttctatgtgtaacttcttttttcaattaaataaagctcacttcaaacatcttgactatcatatcattaccgagatgtgtgtggggggcagtatcatatatttagatgccaacatagatttgtcacaaaaattgtatttgcactaatctttctctgtatattctcttaaaggatgaagtcgatgagttgaccctttgatctcacctcactcggttagtcctataaaggtactcaacactggccgatcactccatgtacttggatgtcgacttagggagattcttaggtctcttcaaggggtggtagtacctatacgactttgctaaagactgcacaagataagtcataaacaatggctcgataaagattcaatccttattcctatctcacttgattatcactcgaagagattgaggggacttgat

SEQ ID NO: 73756 - DNA, 468 bp, Zea Mays
gccaagtacttatatcagctcatgagacggacgctactgccccggatgggttatagggaggctaccactcatatccaactctggctacttggagccctgatctcacatttagagtttgatgttgttgacttccttatatgtgagatcgaggccacgatattggatggtcttcgtgcccagcgacagctgccatatgctcactatctctgccacatcttcgcacagctgatccggccaccgcagttctagggcactcttgaggcctctcacctcctctttggctcctaccatccagcccctgaggacccagtgctagtacctgatccagtgatcgacactcaggtagaggatacaactttccatcagttcgagactcagggcacaacggttcctgatgatgatgatgatgattttgggattccgcctccgcctcctgtgcctccacgctctcatgaccatgaggtcgag

SEQ ID NO: 73757 - DNA, 374 bp, Zea Mays
gccgctctatattgctggctcgtcgccggtaagcctgccacggtgaaagacacgtagctcttgcgccagtgttcttccctctctccgaccgccaacacgccatggcccccgctctgggatactataaattgagcatacccctagctccattaagtcatcacaaagccaaagcatccgctactgcatccgattagccaccagagagctccaatttctttctctccccaaatcagtttttcgcacccgtgaacacctcgttgtgaccagatgcctacaggttagttcaagcatccttgcttgatgttctagcctccattaagtcccctgctactcgtagacctgtttaattgagctagactgccctggatcgccaa

SEQ ID NO: 73758 - DNA, 1085 bp, Zea Mays
ggtcattcgtattatttatgtcacctaacaacatttgtcatgcagcgcaagtgtcatccatagtatttgtgttacatagcaacgcttatcaagtgttgcaagtattatatgtagtatttatgcaaatcactatattggttttgatacttacaaagtaatccctccatcctgatttgtagatcgtttgattttttggacaccaagtttgacttactcaccttattcaaaaaatcataacttactcaccttatttttattatggtttaatttttcccataattctcaggtctgcttcctttgcctcgccaccccgacctagaatccgaccccaccacaatcggacgctgccgccgagctttgccatcgcaagcactgcttccacatggagctccctctctcccaaagcaccgcaccacagcgggtgtcggggtctctccacctccccgttctcctcctccacccttcccatacatagctaaaccctaaccctacctatcgcagtcgccgttgtcaacaccgctgcttcctcgccttcctgatgccctaatccgaggcgtccccgccgcctactccggccgccgcagagcccacggtaccaacgaagccctccttgtccccggtggttggcagcgcacgtcccctgttcctctaatctctcatgtgctaaatctaatttatgttttttgttccatgccagcctcctcctgatcccaaattctagtgttggatcgaggaggttgtgatgccattcgttttgacgtggagctgatatcaaaaataggtacactgcttgagatcgaccccaacctctgcctcctccatgccctcaccaccaagtgtgcgctacaccaagctaggtcaatgttgcgctaggttagtgctgctatgcctcaccagccacccatccgctcctacctctctgcatcactttattcgtcttcctcctgagagattaattaaattttgttctattcatgtgagcccttctcctccgtgtgcttcttcttgcctcacttgattgttgcttccaacttaatagcattgactagattgagataaccttatactaaacaaaaaggctgaca

SEQ ID NO: 73759 - DNA, 457 bp, Zea Mays
tcatgtagcaattgaaaacaagatcacaaaagtcaccggagttagtcactgaagttggtcatcaagttggtcatcggagttagttatcggagagctggtcagccggtccgccttgcagagttggtcatcaaatagttggttatccggtctgtctcgtagagttggtcatcagagagtcgctcgacagagacttgcttgacaggtgggctgtttttaaagaggccatgggtctatttcggtacccgtttccttagtactcgacaaacgtctaaatacaaagaaaaaataaatcagcccaacaagaatctgaaagacttggactcacatccccacaaatcccacggattgcaactgaaagaaccaaaggcgaaacacacaggggacaaccgcaaagggcttcgaagtgatgggttgttatctgctagcgcctaggcttggcgttggcgaatgggcttgg

SEQ ID NO: 73760 - DNA, 303 bp, Zea Mays
atttaggtcttagcatactcctatgttagactctcaccaattaatttctaagatggataaaactcacacataacttcaacaacaatccatgcctgcatggtcatgctacatcatcatgtttgaggatgatagagaacaatcactttggcatggattatgattatgctataccataggaagacttcccatttggaaacacgatgttagtctttagtttgttgattatggaaagggaagcattactatagttgcatgtgccattttacatgggaagaaacttactagatgcttgtgttctctcat

SEQ ID NO: 73761 - DNA, 472 bp, Zea Mays
acactagcattgcgactatgtaactgtcatcattccatgtcgtttgctattttgctgagtctacatgtgcttgaaatctggcgctgagtttcagtttggtgatatcatttgcaacttcgtgaggtgtttttatgtattgatgttttctgattacacatggtccaaaagtttcggcatgaacgatgatttcacctcacaatgatttgaatgtgcacatctcgaacaaggaacctagattgctagcatgtagatagaggggcataggaatgaaacttatgatgtgcaggtgtgtaaaatatgttgatttctttttactataacaactttgtgaactcgactgaaatggcaaagcacactgcacagttttacaagcgcaacccattgcacaacacacccagacacgaagcaatcgagccccgcgcctcatctaaaatgtagccagcacaagagcagcaggacaccagaagacaac

SEQ ID NO: 73762 - DNA, 562 bp, Zea Mays
aaagattctacaaaataatgtttatcttatcagatacgcattattagatattttccataacatatattgctatattataaatatttggtgtcataaatgttaataatttaatattttagcttgtcaaatttaaggtgatttcaccttttttttttttgggagggagggggtggagctagtatgtaatttaatagaaacagtggtcactatttactcttaaaaccttaaggaaagctcaacatgcataaaacaaatagcacgccgccgcacacgatgcttgtatatatacactagtataagccctagccacttcaacgttgacccaaccacacaagttgcaagttattacaccgggacgacaaactaacaccaacgaagcacttcaatttgtaaatggccagccagatccagatcgaattcgaatcaacgtgctgcattttctaaccctcacacgaccatatctaggtacatgaaaggcaaaggccgtcaggatcgtcgcgcgcgcgaatcaaatcaaaatccgctgaattcaatgaagcctttctaaacatatcaattaatc

SEQ ID NO: 73763 - DNA, 458 bp, Zea Mays
gggccgatctgcttcacccgtcgtattatatgtcccatcgagggatggtaggcggtgtgcgcgtactgtagcggggtgtaatcgtgttgttttgcccgaatttgactattttcttgtttgccactgtgctcctattgccgtggcgtgtggtagggttgcgcattaaatgcgagtgttccccacctgtttttgagaggttttgtcttatctgcctaggatcagctcgggcgagatggacggagcgattgtgactttgggcgaggcagagttctgcctgaggtgggacactctcggggagaggcctcgggttaggagatacctcggctgcttcccctcgagggttatgtctttacttctcctgagtgtgtttttcggagggataatctgggtacccctaattatcaccctgacagtagcccccgagccttccaaggaagtattttggtacttgtttggag

SEQ ID NO: 73764 - DNA, 393 bp, Zea Mays
tggatatcaaagaatcaatagaacatatttcacataaagctgcaattgcatggcatgcttcttttccattctttcctccaccaaatgcttcatatgctgttccataagaggaattcccatctgggttttctgaaccactggtatattcatcatcatcttgaatatcatctattgtgtaaatatattctgtaggtattttaccagccaaacttctcaatgcatccccgctgactgttggccagccactcggggtgaacatatcgattttcagatcttcaacaatactgcaaagtttgattgtacgatactttgacgtcttcttaccctctgtagcaacactttcttcatttagcactttaaaagttttactatgtggccaagtttcaccagatt

SEQ ID NO: 73765 - DNA, 475 bp, Zea Mays
tactggccggaatacacaacgactagtcctttcctttgtttgacaccaaattctaccccgggtgactctaattccccaaccaatttcactaatccggaccggagtacgcttgaccatgatgacgacaaaaatcgagaagaaatgatggtgtccagggcaatccggtacgatctagttcaatcaatcaggcctacaagcaataggagactctagagatgctagaacattcaacagaggggcatgaatcaacctgaggtaggctgaccacggtgagagtctttcacggcagcggaaaaccgatttgggggaagaatgaaattctccggttatagtggctaatcgagggcgggagtgggtgctctgactttgcgataacatggcgcagcagaccgggccatcaatttataggggcattaagcggtggtgcctgatttgaagaaatcatgctggcggtcgagaagaggggatgagtcac

SEQ ID NO: 73766 - DNA, 284 bp, Zea Mays
ttgaaatctgaaattcagattaacagtgggatggcatggagttagggctcgaatttaagcatgatccagtaagaatttggctaggggtgctataacaaagatgaatagggtttaaaggtttacaactttgatgcagacagtcactctagttgttatacaaaaatcaaagaaattgttgcccaaagttgctctgtcagacttgtatcaagtaactgaaactgaacctgaagacagaaatggtcatagtgatatgggaccaatttgagcatgccataactttaaat

SEQ ID NO: 73767 - DNA, 564 bp, Zea Mays
gtaaaatccgtaactggctcattgccagaacgacgggcctccgcccggtggagaaccaaccctcggataataggagtgtgggcagagggaaggtcaatctcatcatcctttccaccatcatcatcacttgtcggctcccatgcttgtggatttgccacgggtcgggaccgatcggagggattccgggccgtccgaccgcgagctccatgagacccggaggcctcaccaccttgcattacgttcccagatcctcgcccacgcttggatctggaacgcgggggagtttcttcatgaatttcttgttcatcggaagagttggattcaacaactgatggattcctccgacgcaccatccttaaaataaaagatagaacctatgatgagtgaggagatcgatgttcaaggatcttaacaaacacgtttgagtagagacacgtatgatattgagcatgcacttcaaccgttcatgcgagcggttcaactacaacgaacaataccaaacaactaaactcaaacaatgttcgagacaaaagaagatagtctaagtgtttcaagcacctaaac

SEQ ID NO: 73768 - DNA, 520 bp, Zea Mays
cgacaattgtagatcaccatcagatggcttgagaaagaggactacatcatccgcataaagagagagccgctgaatagaacgcccatcagagaggggttgaagaaggcctagatcactagccctacagaacaggcttttaagaactatttttcgacaatcacattggtcttgctcaagtttttttggagcacacttacattatcagttatcagtgatagactagcctgcttgacatgaaaacttagctttaggctgtttggatgaatgttgcatatgatggcacatcatggcatggataatgatctcaatcatgactagtttccgcttgatcttgtcaaccagactatcatccgaacatatgatacggcataccatgtcaatgttatggcatactagtccatgtgaaagcaatggtattaggatggagtgtctcaccattgacgggccacacttgtcagtattgtttcatctataaaagatgtagtttttacattttgcaacaaaagtgtgttctttgaag

SEQ ID NO: 73769 - DNA, 417 bp, Zea Mays
tctcccagccacttcaaagaggccacactctataagcaatatgctcctggactaagtcccttgtgccaatataagtgcatacggtattaaaggccatctggcatgcttgaatatcattaccaagggcagtggctggcctcctaatgccgaagcgagatcagatagggcgttgaatgatcccctttatatcttctctttcaactaagtcattcttcacataaaaccactcttgcatccaggctcctggccacctcttcagaaatgtcagtactggatagctcacatcagagcgaggcacgaagccgtaacaaccaaaattattatgatattgttctttaccagtagccttcgtctcataggacagctcatgcatgttgcagaagcattttgcattcggctctaaaccctggcttctca

SEQ ID NO: 73770 - DNA, 766 bp, Zea Mays
ttaaagctatacatgataccacgaagccaaaacattgtcatataggggtgatcgtgggctacacatgtacatcaacacaagcaaggctgatctagtgggggtgatgttcgcgtcccagtgaccctggcacaacgcactcaacgagggtaaggttgttcacatcagatcatgtaaaacaggggatttgtattgtacataacaatatttgtagagtagagtttgaaataggggatgggataggatacctgttggagacagcctagtaggtatcaactgatgaacactttaacatagcaatgatatcgatacatggttcgttagtttatggcttcacgccctttgtaagattgatgtgtaattgttagtctgtgtattcatggcctttgtaacattgttgagtaattctaactccctaatggttgatttgacaaccactctataactaactattcattatccttttagtttgccctgatttagtaaagttgcacaaaagcagagcaacttcaatgacatgggagttttctgaaacccataggcattgctttctaaacctattatgttaccactagataggtatcaatcgatctttagcatagttatgatattgatatgtggttcattagtttatggcctcgtgtcctctgtaacattgatgcgtaaccgttagtttatggcttcatgcccacggtaacattcatgagtaattctaactcatcattggttgatttgactccaactagctttgcactataactaattatta

SEQ ID NO: 73771 - DNA, 563 bp, Zea Mays
ctttttagcttccaatgccattttgtttgctttcttctgtcccatagtccgcgggagttcgtgaggatcttcatccataggatcactgacatttccccacactgcccttcctatcgtgtgttctcttcaggtcattgttgtatgtaatccactttgccacgcatctaactgtgttccatacaaccattagcacgaatgggcccaacttcagatgtttgttgtcctctacatagaacttgtgtgccttatcaatccacatttgatctaaatagccacttgtatatattctgcgagccttcaaccaagcagcgtggaatagctcagtccatttattaatcttatgccaacggtctttagcttgcttctgagttctcattctatttttttggcgttgtcaggttgtacttcttaacaacatcaccccaatactgttcatttctcttatcagctccattaattgaatccatcgaattctctaaccaagcactcatctataaagtaatatttatgttaaagctaaatggcagcaactcacaacagaaaaatagatttaagtaatacta

SEQ ID NO: 73772 - DNA, 519 bp, Zea Mays
taaaaatggtagcggggagtctagcccaaaggaagggcaaaatggtccatgcacccctcatttttttaacatcttactactaaactttatttactatcaagtatagaaaaaatgaagttttagatgggctaagacaaccatatcctgagctttctcgttgggtcagcccagttctcctaacttttatcttcctcttcgacctagccctcgcatctatccgtccaacctcattcttccctatatcgcctgagccagtttgccacgatgccccattctcgatgccactcaccatccccctatctcgacatgcgatgctacccgaccccttcccgatgcccatccccttcccgatgcccccacactgctcgtcgtgacgtcaaccctcctgacaggtccaatctcgctcgtcgcgacgatgcgactagtccccggtgaccgacgaaccgtcaagcactagctctcaacaggagacatcgtttggtcccgtccctttcttagtgtccttgtccttcgagaaga

SEQ ID NO: 73773 - DNA, 889 bp, Zea Mays
ctttaattggaaccatcatgaaattttcactagaccactacaacatgtgcattaacatgtcaaattgacgtggcggttaatgtgttaagtaatgtggcactaatgattttgtcggtgttttgaatctagctcccacaagtaaatttgtatgtgcgtttcgagctccggatggtatgcgctgtgggcgcaagatttatactagttcggacaaaagatccctacatcgagtgttcgacggcttacgctaccgacaccattgttgatcaatgctcatagtagaggttacaagcgagcgagagatggaggagaggctcccaagtttcttgttgtggaggtggaggagctaagggctacagagtagagtcctaactaagtcttggcttagtagcagggtttcagcctttgggtcctcatcggtgcgacgtccttcctcccgtcgatccgtcgtctttgcgtctgggtgtccgtctaggcattcatgcatgtgtgttctctgttcgtctggggacaacctgtcgttttataaaccaaggagggggtcggccaatgttttaccccggtgaagccacatgcattcgtgagcccctgggtcgcttggttgtcttgtattgtttatagcggatgacgtggacagcgttgggcctgagcgccataattcaagctacatcaaccctggccttcgtagcttggggctcggcaaggcttgtcatgttgcgccctacaagcagtctacgtactcaggcctagtcccgataggccatgagtgtgcagtaggccaggatgagcaagccataaatgcgccatagtccgaggggttcgtaggttatgagtgcgctgcagtcgagggtctcgtaggccttgagtgggagacggaccagcgcctctattg

SEQ ID NO: 73774 - DNA, 358 bp, Zea Mays
cgggaatggggtctttcctacgccactaaccctcggtcaccttcaacattagcaaagatgtttcccagagatcgggcgaagtcataacctccctaggtcccgcacatgtcctcgccatttcctcaatgaaacacctagaggccctcggcctcgccattatcctctttgtaccttttgcctccatcttcctcttccgagtcgccgcaatcatagccttccctttcgaggtgccttcttctgaccaggtcttcacctttttccctcggtcattcctagcatcagcagaaccacctccgggtaaggaccgtatcgctaaccattcagatcaaaaactcggttcaaccggacattggaacct

SEQ ID NO: 73775 - DNA, 463 bp, Zea Mays
ggacgtagtagtagtagtatgtagagtaggatggagatgcatgcatggacgatgggtggtgtcgcggtggggggtgatgggatcggatccggacgtacagtagggcaggcaccgttcgtgtgcttccgtatcctccagatctctattggcgtcgcttcgtcgtcaggggtcagctatcgaaacgacgccccctccactcactgcgtcactgcgtgtactcctgtcgcccattaccagccatagttggatcagatgagcgcacgcgcgactactcctgcaccgggggaaagggagttcattctatttccaggacggccatggattggggcagtgcagtggtaggagcagttggcctggggcatctccaacatggacagatggactagagtaattcacaatttcacatgaacaaccaacaggtccaacacaggtgaatgaactaggaaggaattgcctatagttt

SEQ ID NO: 73776 - DNA, 752 bp, Zea Mays
ctcctatgtgattgttaatggcttagctatttatttgcttcttatgttgatgatatgctaattgtggcaaaagaaaaatctaaaatagctaaattgaaggcatggttgagtaaagaatttgagatgatggacttaggtgcaactaaaaaaattttggtatgtaaattgttagaggtataaaatctggcaaattatacctcagatagcaatgttatattggaaagtcccttcgtcattttaatatacacgatacaaatcagtgagtactccattacatgtagatttcaaattatcctcaacttgtgagacgatgattttgagtacatgtctagacctccatattccagtgcagttgattatcttatgtatgccatgtttcattctcgtcctagtttatctcacacatggtgtattgtcactagatcatggctaatgtcggtaatgagctagagggttgtttagtagatttttatatgtgaggtacttccaatgcctatttgcaaattaggaaatctagagatggacttgttggttatgttgattttgattatgctggtgatttggataagaggatgtctctcatgaattatgttttcaccatttataggctattgttgctttgtataatatagaagttgaatatatggggtttctagagcttataaagaatctatttggttaagaggtttgtattctgaactttatggggttacttctcgcattactatacagtacaatagccatatgatatt

SEQ ID NO: 73777 - DNA, 594 bp, Zea Mays
tcatgttattagattgatacaccgctaaatgtgtattccttgaccggttgctacactccacaacatgtaagttgcacatgtgcatgaggcagctcaaaagatcgaaacatatctgacaccctatcttacctgcttagcctcattgtttgccctggttgaacttctttggaggtcttgatccatgttcacgtgtgtgatcatcgactcttaatagtgaatgttcctgggatcaccagcatgatacatgttgtagattagatttgggatgttcctatagatggtttactatttatctggccctagatttggttaatgtcatgggtaataaatggtggttctttagctcattgttgtccctttggccatgaacgtagcctcgctttagagtaaacatagctcaagcatgctctagacatgttagtttcccttattggttgctttcattgcataattacgttcattgattatgactatagccaacctagaaaagatgaaaatcggctcaagggagctaatcggtgcaaccatcacaagtcgatccatgcaatctggctagaatttaatgtttagcttattgttgtgcatttgtagagc

SEQ ID NO: 73778 - DNA, 418 bp, Zea Mays
tcgaagttgccgaaggtgtccaaaggtcctgcaataactcccaagaggaggaggatggctagcatgttggacgctgtcttggagtcgacaagggcaccaactcctgcctctgcaaaggaggccgccgaagctgctacaactcatgttgaagtcgaagatgggccctcagttcccaccaaaacagggcccgttgaaactattgagaaggattctgaacaaagacctttggatgccgctctggtcttggaaaaagaaagcgcacctaagaaggttaaatcgcctactcccgaagcgtctactgaagagttagactttatcatttgacatgcttcgggtaaacagttatcggaagaggagattgccgaagctaaacactatgccagggaactgaagtatccgaaaggatccttggtgtata

SEQ ID NO: 73779 - DNA, 584 bp, Zea Mays
gtttgttcatgatcgacttgcattcttacttaactcggggtgaccactatgccctactaacggagcaatcggcttaagtcggcaacgacttaaggcggtgcaacatgctcgcgcttacttaactcagggtgaccactatgccatactaacggagcaatcggcttaagtcggcaatgacttaaggaggtgcaacatgctcgcgcttacttaactcggggtgaccactatgccctactaacggagcaatcggcttaagtcggcaatgacttaaggcggtgcaacatgctcgcgcttacttaactcggggtgaccattatgccctactaacggagcaatcggcttaagttagcaatgacttaaggcggtgcaacatgctcatgcttacctaactcggggttaccactatgccctgctaacagagcaatcggcttaagtcggcaacgacttaaggcggtgcaacatgcttgcgcttacttaactcggagtgaccactataccccgctaacagagcaatcggctaaagtcagcagcgacttaagccggtgcaacatgctcgcgcttacgtaactcagggtgaccactat

SEQ ID NO: 73780 - DNA, 278 bp, Zea Mays
ctaataaaaattgggttccaatttttctggccacagatttatttattttattacctatagagaaactcaatttttgtatttaaattcaaaccgagtaccaaagcattcaaaccttgacatgcaacatttttaaactgtagatctgacctaaaggagtcctacaaaatttgtttcaccatttttcgagttcaaaaactcgagttacaaattttacagggttctctgctttttaaaccgaaaaaggagaaaggaaaacagaaaaccactttgcatgttag

SEQ ID NO: 73781 - DNA, 529 bp, Zea Mays
ttgggatccaattgctcaacagataaagacttctcgggatgtggtttttgatgagttccgtccttcttgtcctcgtccctcgtctgatgcttctttcacatcattggttgaccccatctgctttctgttcttttctaataccctacttctactataccggtttcacactcatcacaatcttgttctatggagtcttcttctttgattcttgattattccatgaagccttcggtgacaaaattttacacatgctgcaccacgatctcttctaatgcgccatcttcgtctgatgagtcatctcctgctgcttcatcctctcttgacgagtcgacatctccttgtgagtcatttattcctgttgacttgtccttttccacggagccacttttccttgctgcttctataccagagccgtctcttagacgtattcaccgtcttcggcatcctactaatcggtattctccttcagtttttgggctgctgctcttcctgagtcgacatcttatcgtgatgccattcttcatcaaca

SEQ ID NO: 73782 - DNA, 786 bp, Zea Mays
tcggatcactccaattcaaatggagttccatgatttaaacaacaaagctcgaaacgctttgttctcgtgtctctcacttggtgagtttgagtgagttggacatttaactacggctcatcagatctggtctacccttgagagattccatgagggcaacaatcatgtgaagactagactatttgatacgtacaggcaagagtacgagaacttcacacagttggctggagagaccattgattctatgttctccaggttccattcaagtgtgaacaagatgcatgccaacaaggcacacctaccctatagtgatcatgagagagcgctgaaattactacatgctctagatcggagggtttgggaggtgaaggtctcaacgatcatcgtgtcgcccaactacaagactctcaccatggacgagctcttcagtaagctcaagtccacagagattgatcaccagactcgggcaagattgagaaccctagtgcacccaccatggccctagtctctggaggtggttctgcttctaactcctcacctgctatgtttgccctatcttctttgttgtctattacagaggagtaggtggagagctttggggatgaggagttggcacttgtggccagccggttcatgcggttccacaacaaccgtacaagtcgatggcatggcgtgtccaaggacggatgctacaactgtggtgatcccgaccacttcactgccagctgccccaagaagggcaaatcgaagtctggcccgtgcgaccatcactctggtcggtgcaagggc

SEQ ID NO: 73783 - DNA, 1490 bp, Zea Mays
ctccgggcatgctctagggcaaggaagaacttcattcaagccttgcaaactgagattggcttggtcgtcacataggaagaaaaggagaaggtcatcactgaccacttcaagcaacatttgggcacaacggcccctagagcaaggacgttcgactagaatttgctaggctaccaccacattgatctttcctccctggaagcacctttctcccacgaagaaatcaaagagactatcctctcaatgcctcgcgacaaggcgctaggcccggacgggttcataggtaccttctatagggcgtgctgggacatcattaaggacgatttaacagtagcgtttaatcagctccacaacttaaatgggcaaggcttcaaactactgaatgcaggcaatattgttctcatcccaaaaaaacggatgctttgcgggtgagcggcttccgccccatcagcctcatacatagtgttgccaaaattttctcaaaattattggccaataggcttgcgccccacctagatggtcttgtcttaaagtgtcaaagtgccttcatttagaagagatgcatccaggataacttcctatatgtgcaaaatattgtcaggcaatttcaaaagaccaaaacaccggcgttattcctatagctggacttccagaaagcgtttgacacgataaattggagctaccttttagaatatctacaagctcgcggatttggacaccgttggcgtgaatggattaccatcctttttagcacagcgagttctagggccctgataaatggtgttcaaggagacaacttcgaccacatgcatggggtgagacaaggagaccccctctctcccatgctattcatccttgcctttgacccaatgcaaaggattttagaccttgcttcagagcatggcgtcctgacacctctccctcttgctgcagctaagctcagaacctcgctctatgttgacgatgtggctatcttcatcaatccaacccgtaatgacctgcaagcggccaaacaggttctcaatgcgttcggagctgccacgggtctaacaacaaattttgagaaaagctccatccaccccatccgttgtgaaaatgtggatttgtccaacatcctccagccgttcccgggatgctgcaaaaccttaccttgccaatacctcggccttcaactccacacccgcccgctccaaaaaattcatgtccaaccactagtggagaagatcgaacagcgacttgccggatggaaaggtcgactgcttaaccacgcaggacgcctgaccctaatatcttcagtgctctcctccatgccgatctaccacctaatcgtattcccccttgcaaaatgggctagaaagcaaattgataagattcggtgttctttcctatggaaaggcgaggataacatgcacggggcgcactgccttgttaattggcaaacagtggctagaccaaaggacctagggggactaagggtgctcgatcttgacaaa

SEQ ID NO: 73784 - DNA, 668 bp, Zea Mays
acccaaaaggcatgactaaccactcatacaatccaaacttagttttgaaagcagttttccattcatctcccaatttcatacgaatctggtggtacccactacgcaaataaactttagaaaacacgatagcaccactcaattgatgaagcatatcatctaaacatggaatagggtgtcgataccttatggtgatattattaatagctctacaatcaacacacatacgccatgttccatctttcttaggcactaaaataactagaacaacacacggactaagagactcacgcatgtaacctttgtcgagtagttcttgcacttgtcactgaatttcttttatttcctctggatttgtcctatatggcgcacagttttgcaaagatgcgccaggaataagatcaatttggtgctcaatccctcgtataggtggcagcccctctggtctctcacttggaaatacatcagaatactcctgcaaaatgttagtaacaacaggaggcaaataatgttgtatatcttgaattgaaatcaaagcatccttgcataccaaagcgtaggcaacagaaagtggaagcaaataattcattaacatcagatttcgtcgcaagcaaacaatgtcctttcaattttatcccatctttgttattaccaacaactttaatattctt

SEQ ID NO: 73785 - DNA, 302 bp, Zea Mays
tctatcttgggtctgctttgctttcgcttcaacgcaatgcccccagtgccagcagtctgtgaaagcttagctgacacgaagcatgcagcagcagtactcatctaccagtacgtttccgatgccaacgggatcgacctttggtatttggcagccagttagctttgaggaaccagaggcagagactttgtgcttttcccacgctaaacctcatcaagatcgcccggaagcgaagcctctgtatataggtgtgctcgctctgtctggcaagcggcggctcggctcggctacaccagcaatctgcg

SEQ ID NO: 73786 - DNA, 437 bp, Zea Mays
tgaaggtgccagcacaaacaaaggcaaaacagtgtatattaacatagatattttcaaagtaacaaatcacaaggcagcacaaacaaaggacttttaccagattcagagcatttgagaacagagttttagaaggaaattatgtgatcaggttctaatctagagaaataatagaaatgtatctgatagcacatagaatataactgtccaaataacaactgatttaattcaggaaccacaagcaacaaaaagataatatagttcttgaatagagtaacataagaccaacatttacactgtcatgcactaaaaacctcaacgcttaggaaaagttttattatttaaggaacacggtgctagatttaaggtttcatttaaagaggtgaaaatatcaagctatatattctcttatgacctaagcaactcattctcaattctaa

SEQ ID NO: 73787 - DNA, 491 bp, Zea Mays
atatcgatcggcatgcatactactaatagtgcttcccacgttgtcactcgctttttgctctgccggccatattaattcgttactctttattttgcatgagttcatcagatcagttcctctctccttagaccagctacatacagacaacggtggcgagagtccatcaccatcagtatctattggtatttaggatggactaaggtcgttcgtcagtgcttaatcacaccgtgcaagcaatgtcattgtacttacctttgctttatgacatgcaacagctgcatgcgctgcagatgcattcacctcgaaatgcatgcatgcaccactcgccagtcgtcactcaccagcattatattgcttgtgtcttggttttcggtcaccccccctccccctctacaaattactatagagagtgagtgagattttttttttcactggacaacacgacgagtagtagcataagatatatagcctaacataataatcccattccc

SEQ ID NO: 73788 - DNA, 1376 bp, Zea Mays
agaattccaagccctcccttgtcctttgggaggcaagttgagggccagttgacgaggcagtgacccccgctgcaagcttttggattgctccctttccacaggaagtttcttcgcattttgtcaattgtttgcatcagccttttttgaggtggaaaaaccgttagatggtggattggttgtgcggatagcaccgatttaacaagagtttctctaccggtcttgtacaacattttgcctttccagccagccaacctgttgttgatcttttcgattagaggttgaaggtcattcctttttactttcctgaaatgaaggggtaacccaaggtacttaccgggtaggctagagaatttgcccggaaacacctccattagcgcaggccataatgatgtcgggtatcgaattgggtaaatttctgttttgtcatagttgatctttagccctgaacatccctcgaacgcgttgagaatccctttcagcacctccaagtctgatttgtctgctttaacgaacacacccgcgtcatccgcgtagagagagcaccgcaacttggcccctctaggcagaacatgtcaagcattctctcatcagcggctttgtcaatcatccgatatagtggatccatcgctaaaatgaaaaggaagggcaatagtgggtctccttgacgcaccccacgcctgtgtttgattgcgtttgaacgttgcccattaataattattcttaaggaggaggatcccagtatgtcagctacccaattgcgccatttctgagagaacccgcaggcccttaacacatccaggaggtatgcccaattcagggtgtcaaaagctttggagatgtcgagcttggcgaagagagcaggattaccttttttatgcaggttcataatcatcctttgcacgtatagaaaattgtcatgaattgaccggttctggatgaaggcgttctgagcactggagataatttcgttcattcttggagccaacctatttgccatgatttttgttataattttcatgaagctattgattagactgatcggcctaaatctatcaattctgtccgcatctgatagtctgatgtgaatggctagctgcagttgtactttttacgcattacgcatccacatgtattgcgtgcaaactcaatcaggacttactaatgtaatgttcgatcagcaagaccctttttaagtcaagcttgcgaaatacagtgttttttaggagcgaaaaaaaagggtctaaaaacgcatgtaaacttcattggaccatctgcgcttgcgccacttcagtttcgttgtcagtctacggtcttctcttctactgctaccagaaaagggcagacggctttcgtaagctcagggcgtgtctccatca

SEQ ID NO: 73789 - DNA, 461 bp, Zea Mays
gaacggcccacgatccctcttcttcccccaacgttgacgcacggcggcgcaacccaccgtgcggcggcaagaccgccggagctgagactccaatcacccagccagccatcttctaattcgttcgctccttgcctaattagtgacattacgagcccgtttcccccaccaattcctgctcacaacaagcccagagtaccgcccacggcgcgccgcggcaacaccatggccggacagtggacccaggggttcagctgcaccatcctacgattcgctagtgcatagcctataggaagggaggacgaatacggtggggacttaccaatggccggccaaggtcagacgacgctcgtccatgtagaagggcggtccctgcgtgcagtggtcacggcggcgagcaattcgcccaccgcaccaacgcctgaccccaatcgcaggcgcgaccggcttccttggaagattac

SEQ ID NO: 73790 - DNA, 702 bp, Zea Mays
atcggggttaaaacggagaagttatggattttctaccttttctagaattatttctatattaaaaattgatttccatatttattttgcaatttctggataacttatggatcgtggccattaatttcaggaagctcagggtctttctcgtaaatatatggacctgattgtaacgatatgtacactgtcgaggatggcgggttatttcctaagttattcggggtctcatatgcataaagtgctggttgaaggggtatggtgtgatctcggtcgtaggatccgaaacacgtggcccagatctgatcgccaaaattggaccgttacgcgttggtggccataggatccgagattgatggctaggatttcaatggacgaagggatatgccctattctaatcgcagcccttcaattgagatcccacggctaccagcgcatcttcccccaaaaacccgagccgcggcggcgcagaattccccacggcgacgcacacgccggcaagcgattaagcgcaccacggaacactaatctgagcactactagctaccacgtgttcctatagccatggccaacacctagagcaaggactcaccggggatgatgttgtggtgaggttggtgcgccacggacagtgtcactgcgacggccacccaacatcgacgaggaattaggaacggcccgcatgatctccgactcccacgaatcacg

SEQ ID NO: 73791 - DNA, 657 bp, Zea Mays
ttttaaaactacgaaaatagaccattgaactttacttacccatgcaaaatcatataaaaatcagatttgttcaaactgtatggcgacgtgacatgccacattggaggcacgttggcgtctccccacatgtgtcgtgtgccacctgatacgcacagtccctgaatttggagtgttgtgtcacttaggtcattgaacttggtatgttgtatcgtttgggccttgaactttcatcagtgcactccagtgtggcacgtcatattgacatccggtttgagcgaatccagttttgcacgattttgcataggtcggcaaagttcaaagacccattttcatggtcttgtaagttcgttggcccaagtgacaaaccgtgtcaagtttaaggaccgataatacattttaattttttaagagctgatttaatgaacaaaaaaatggaggaaattcatagagggagtaccctagctattcaattttgaataacgaggaatttacctccatggatcttctccgtccgatttcactagtcaccaaacagccctaagtacggttgtgcgagtagaaggggtcacggcacccaacaataagcagccgatgtagaggctggacccgttcgattatcttttagaaaaacaataaatagatgcttttgcatcggtc

SEQ ID NO: 73792 - DNA, 670 bp, Zea Mays
cttggaagtgtttgtgcacatgtatgtttcactagttctgaatggaagtttgtgtgctgaaaatgtggattttttaccagacatgtggatgtccaaacctgaaaaaatgtgctgaaagtgtttgtgttttgcggaatcatttggttgatgcttgctgtggacagaaaactgaatatttgttgacagaaactgcttagtgtgttttgctggttattgctagtaaggacacatttgtcggcaaaatttgcttatgttctgcttattctattttgttgcttattatcagttagggcacatttgtgttgcttatgttctgaaactgtgtaatagaaactggcgacatgagagcaagcaacaagcatatatccctgaataagtagatcatgcttatatatttctataggataaaatatgtatagctaaagctagtgtttccatctaactgcaggctcatttgatttgaggctctggtctctctctccaatctaacagtaggccgacccgcgtctcctcgaccatcaccacctctgcagccttcacgaaggtattttttcttctttcttttaggattaattgacgcatagtattagaattagtttgttagttaaaatttgatgtggtattttttgggtagttgttataatcgatggctattcattttagattaatc

SEQ ID NO: 73793 - DNA, 743 bp, Zea Mays
gcccgctcgcttacccgcagagtggcggggacgacgcgccgccgaaagacgctgccgatcggccacgggaccaggtgagtcatctgcgataaagatatatgccatctgcaatgcaagaaatgatgtgccggaactaatctattctccttttcaccgttcgtaggcggcggcaagctcgggccagcacccgacgaagaggatagtttggagactgaaattccctctcggatccaaagtgattaagggaaaaattagttcgtttctctactagcgctagtcccctccaatctaggaggagggatctgattaagtagcagcaggcgtcctgtatgtgccggccgttggcggacctgaacgagccggcgtgcgacgaacagcagcaagcacgggcagcggaggaggagcagtggcaggccgcgatgcagaaggcgtaatcggctggctagccaaactgggctagcacgtggtagaggtagctagcagcagctaatataacgttacattttatgtgttctggaaattatttgtataagttaaaaacccattttatgtatacgttaaaaactgggcgggcggaggggcctcttcaaattaaaatactttaaaaactcattttatgtgttctgaaaattatttatatacgttagatttggtgaaccaaacaacaccttagttcatcgagctatcgtgcgtggagaccaatgagtaagagccgcaacaactatatctaaattaacgttttg

SEQ ID NO: 73794 - DNA, 411 bp, Zea Mays
caagaatatgaatgtctttggaaaacgaaagctttttgatgatgaagtcttcagattatagagtacaatattccttcaagagtttttgaggccttgctaagcgtagaactttctgaggtgttctatgttccacgagttccccacttatgtgtcgtccatctgagtaagccgatatgatcctggtcgtgtaacctctaatacaatgaacggtccttcccatggtggtgatagcttgtgtcgtccctccccgaccaagtctctcactgcaaaagattgatgtcgcacaactttgtcgtggtagcgcctcaaggtctgctggtacctggccgactgaattactgtgttcaatcgtgcttcctccagcacatcaatgtcttccagcctagttgcttccgctttcggctatgtttt

SEQ ID NO: 73795 - DNA, 621 bp, Zea Mays
atctgcgagatcggccttcgtcataacgcaaaggctagcttcgagctttgggaagcccatacttctggccatctctcggcagatggataattctttgttctctgggaagcagtacaagaaatcatcttcatctgtaccgttaaacactaaggccccctttggatacttcggttccagggcatagtgtttggcttcaaaattttcttcttcggataatctctttcccgcagcatgtcgaatgatataatcaaaatcttcggaggctgcttcgggggcgagggattcgacttctttggccacactcttctcaaaagctatattagtatctggagttattccttcggccttctgctcggtggtggcaagcatcgtctcagcaggcactatgggcccagcctcggtttcagcttgggctattgtagcttcaacttctatttgcttagtatcagctttgggttgcgtcttgtcagctttggcaacattccctgtgggagcaggacttatggagtcggttgtttccaaaacatctaatacatttaccatcctccttctcttaggagttgtggtagaactcttttgtgccttcagcgttgttgcttctattgaaggacttaaaatccc

SEQ ID NO: 73796 - DNA, 363 bp, Zea Mays
ccgagctctgcatggaaatactcccttctttatggtctacggttcagaggcagtgctacctgctgatctcaagtttggggcaccaaggttgatctttgagagcatagcagaagctgaagctactaggctagaagatgttgatgtactcgaagaagaacgactgaacacggtaatccagtcagcccgatatcaacaaactctgaggcgctaccatgacaaggccatacgacatcgatcctttgcagcgggagacctcgtcctccaccaaattctaacgggggaaggacgtcacaaattgtcaccactatgggaaggaccgttcatagtagcagaagtcactcggcctggatcatatcgtcttac

SEQ ID NO: 73797 - DNA, 382 bp, Zea Mays
accgagtacaccacatgaacatgacaaaccatcctctttgaaaccaattcctaggatgttggttaaaagattaccccgaagaataagagggctcaaccactcaacattgatgacattttagaagaatgggtccttatgtctaaaactttggtttagtggcttgatgtatcaaactagttgcatgaacttttattgtagccatctaatgtaaggtacttaatgtatgtgacaattttgtatgaaccttcatggatgagacacttatgcattacatgctgtgatacttgatgtatcagaccttatcatagctgtaagcataacatcacaacacatctttatttacatggtgtcatagctataacaacataacacatctttattt

SEQ ID NO: 73798 - DNA, 688 bp, Zea Mays
acccttccaagattctggattgcaaggaaagatcaactcgggctaaatcgatcaagatgtataaggtccagtggagtaaccactcagaggaagaggctacttgggagactaaggaattcttgcgatccaacttccccgattgcctacctaaggaaattggtacgtaatcatgcccaacccctcctcctgcccttcgaatctaaatttcagaaatatgatcttaaatcagaatgaagtaattatgaaacaaaatttaaaaggacttccttctgaagatgcaaagagaatgacatttgaagagcagtttgccctaataataaagcacccacttcctgtaagtctcacccttcgcttcaccccggaaggactctgacccgaatctcgggacgagattaatttaaggggggaaggttgtgacacccagtgtcacttaggatttctctcagtgctaacccaagaatcaacatttcatgtgggccaaattgagcatgaagcatcaaattaacttaagaataaaagatctactaagtgtatatctaaagaatcatgttccaaacaaataagattttcaaaaagggaaaaatgttgaaaccctagcaccaaccctaatcaagctatctaagtagagataaagaaaaaggtaaaagaccatgaaaagtataaaatcatggcttaggccaaatataaa

SEQ ID NO: 73799 - DNA, 857 bp, Zea Mays
gtggtaccctaaatgttgatgcttgtggcggagacgatggattagaaagaggatgaggtgcatgaaaagattgtggaggtgatgatggatgtaaaggtactaaagtttgaggagacagagatggttggggatgagacaatgacgacgttggtggagacatcccttcgaggccaaaggatgaaatttttgatggcttgtccaagtgtcttgattccttctggcctagggatgtctagcatgtcgtcctcagatccttggacgatcgtcgtcacttctaccctgcaataatcatatgttatgtcgcttccatgaaacttgcatcctgggatcgcaatgtttgttcctactttcttcgtgcaattattgttaataccatatcttataactaatgtgcacgtcactggccttgttatgtcatcaactggataacagaacttatttcccgttaacgcgacagagcttgggacggttgtacaatcggtggaagccggcggttgagctgctgcaattatttgcagctgtggagtggtcatctgttgaacatacaccgcacttgccaactactgcatcaattccggtggaggatttgatagcatttaagacatcagctctttgaactctttctttgcctcctacttaaaataatccgacaactcttttttatatcgatcacgtttcttgtacaaaccttcccactgtggtccgaatccttccttccatccttccttaaacgagattcctcgtacacggccaggatgcccaaggttaccgagaccaaccgttaggatgtctctctccctttgtggcttaaatgatccttggctctgcttagctaccattgcatatatgtttttcgc

SEQ ID NO: 73800 - DNA, 324 bp, Zea Mays
tttggatttggctgaccttgaaatatgggtaccatctgtggctatctctaattttggttggtgtaggagttgaaggtggcaagatcatttcatcctcagttcaacaacagcatacaatacttccttgaagtatctgctaatggtctctatagaccttcaaaaggtcatgtgtataactctaaacctttggttatgacctaccacatgtaaaaacatggcaacctgctcctctactgagctatgaatgctatctctcaatagttgcctagtgcgaaaaaggtcacacaattgtataaaaggggctcttctcatcccgagtaagtg

SEQ ID NO: 73801 - DNA, 287 bp, Zea Mays
gtcgtaccaatctaccctatagctacgggcaacgagaagcatggccactggtgacaaacagtgaaagccgtggcacgttgcgttgggcagggcaacttgagcggagcctgaacagtgaacacagccaggtacggcggcctcgtgggtgctgcgccgcggccgtacacggctcaacgcttattgttggcactgtatcagttgagaagaacaaatagaggataaaataagtgagaattctgcgcaaaaaccatagacaacgattcggcggccatagcataccatagtta

SEQ ID NO: 73802 - DNA, 434 bp, Zea Mays
ctagaatctcgttacgcagcgtagaatattattatgctggtgttggtgtccttgagggtgactttgcttgaacggttggggtggattgctagagaaacggggacggttgctgctcctagcctacggttcatcgatcttgcacttccagtcttccatctcctagcgcttcctcttagtcatgatagctctatcgattagatgttggaaggtagagaaggtatggttcatcagcttgtagtgaagggggtcaaccaaacctcttagaaacatgtactgtattgacatcctcaggtgcatagcgagatagttgcataaacttgtccttgtacacactaacaaacaggggatcttgcttcaaggccaggaattcttccttcctcgttatcattaaaccctcaggcatgcggtaccggtggaagttgtctctgaactcc

SEQ ID NO: 73803 - DNA, 1132 bp, Zea Mays
caagcacaaggaggctgagggccttttccctgtgatggagttgacagccatcactaccaccactatggctctactatactagtgaccggaaagagagaacccccagctgtgtggcgaaaactagcaccatcatctcgttcctttcttttctctctctctctctctttctttatttctcccaagaggagcagtacgtatgtgggcccggtgaacgaatttctctggttttttctctgaaccacatgataccctgatgaatagaaaacctgcaaaaaaatctaccccctccgagggctccatttttcttttcatctccggctcaaagggagagggggagaaaaaaggtagatacagaagggaaagcagcaggcttgcattgcacaggatatatagtgattaaatagaaaaaaatggcgaaaatttgaaaaacacaaagatatactagtagctgatgtgcttgggaacaagggactgagaaaaataattgaagaacacgctctccgctttggtacttggtatccttttttgttttgttttgttttttgggggttcctagggcgtagtacacatatatatgtatgctaacaacaatgcctttgtttttgtgctaaataaacactgatgaactgtacagtactacatgacgatctatcaaacttgggagacagaggcagccccacagcagctttggggggtcctccacagcacatgctagctgtggtttagaataatgctaaaagcagctttagggcaagcaaactgctgctgctccaatccattgcagtcccttcccttttctcttctcttcttcccatggatggataggttgtcttgagaattattcaggtactaccaggccaccggtgtgtggatggggttaagggtgacggagcttcttcgtaccattctcttggggtttcttgtgctcgctcggcgggcgactagctaggatgcttcctgtccagtgccgactcgtccgatggacaaaataatttctgccaggcgatcatcgatcgatcgagtttctgtgcatctgtatgtgaaggggaatctgacaaatggagcagtacagtacagacaagtaggctacggatcggagtagcaacagcttgccgagctcgatcgatcggaa

SEQ ID NO: 73804 - DNA, 323 bp, Zea Mays
ctgagaggcatgtcggagcctacaatgctggtcgaggcagcaacagttggcagcgagaccaaccattacagacagtgaacaaagagcccgctgcaaccaaaaatggctacaacaaaacaaaaccctacgacgaagggagaggaagtaggcactggaactcagagcctgcacatgacaaaagaagaagagacgagaggatgttaacttgatgcggcagcagcgacgcagggtggtctggtgccatgtgtaggattacggggatgctacactagcgcaaaacaaaattttcaaccccataataccaagaactactgcggttatag

SEQ ID NO: 73805 - DNA, 1066 bp, Zea Mays
gtggccatagcagactaacagtagtcgttagttccacaattattatatggtttaggccatagctgactagcagtagcagctccacaatccaccagagcaccacgccatagcagctagcaaatagaaacaacatatatggtttaggccatagtagctccacaatccgcatatttttatcattttataacaagggcaactcacaaatgtttaggaactaggatgtggtttggtgtgtcgacttgctagctttgcttgattgtgactgtgcaatagagctatcctgctcattaaccctgcgtttgccttttcctttttcaccatgttcttcaatcaactctgaaaatgtgatggattaatttggattagaaccaacatatacggctataaagtacaataaataagattgaaacatggttacctttttctaattcaaccaattgctccatgtcctcctggacattaatgggagtagtccttcgcagccaatcctgagtacaaacaagtgcttccaccatgaatggagtaagagaggtcctaaagtcatcaaggattcgtccagttgtgctaaaaactgattctgaagcaacggttgacaccgggattgctagcacatcacgagccaagcgtgctaataatgggaatcttgaggaattcaccttccaccatcctagaatgtcaaacttattatcttctggttcagtatcttcagcaaggtacttctcaagttcagatttgttgctgccacctccataattgtgttgttttaatttttgtgcaatcaaggacttcatccttccgccttgggattgggactgtcttactacttgagaatcattggctgctgttgttgcatcaggtggagcatacaatctcctatactcttcaaataattctctaacacatgatttcacagcagcccaaaccttctttccattttcctcactaaacatctcttcaattgccagctttgtgtattcagatagtttatatcttggatccaaagctgcagcaacaaaaatcagcaagttcatattctctttttctttctccttccccttgcctctgt

SEQ ID NO: 73806 - DNA, 479 bp, Zea Mays
gttaggctgagtaatagttaataaacagtgtgagagtcctatactaccgagtcaccagggagtggtgcggataattatctgatctgaatcctaattgtacgctccgatccaaatccgaggacaaaaacgggattaggatatggaaaggcattatcggttccactctgatccgtttgcatccctacgagtcagtcatcgcaaacttctcagccatttaaccatctgttgaattattgttccctgtttcttaatctttcctaattgttggcgccgatctgggcatttgtacctgtctacttgatgccttatcttcattgggaatgttccatgtgctcaaaattgaactattttctgtagctattggaataactgataatatatttttaatgtgtttattatagaccgccatattagttacagatgttgcacaaagatagtatagtcatgcatttcagaaattaagaaattattggaactgg

SEQ ID NO: 73807 - DNA, 649 bp, Zea Mays
ccgcgacagagctttgcctcttccgtttcggcgccatcgcaatctcgccggcggaacgaacaagaacgagatctcagggaagcagaggagtggttcgaggcagaaaagttaagattagggctcagaaatcaaaaacacacgacggcgcgagtataaatggggtttcccgggtcgggcactatttctaaaaggtgccaagtcactactcgggaaagcgaaacttcaggcacgactcggcggatacctctaaaacaccgacagcttcaggcatgactcggcggttacctctaaaacgccaacagcttcaggcatggctcgacatttatctctaaaacgccggcagtgtaagacattgcttggcggttacctctaaaacgccaatggcatcagctatcgctcggcggttacctctaacaacgccggtagtgttaagcacatggatgaactgtcaagcgagtaaacagaaaatgcagcaaaagcacaacgttcactggaagcatctaaagtttttcattaatattaaaaggggggttacagagttacacaaactcaaagactgactcattatgagccgacctttttacccctaccttctactacattacgttacattacttcactacttacactacactatactactaactac

SEQ ID NO: 73808 - DNA, 464 bp, Zea Mays
gcaagtgattagtattgtactactagtgtctcggacaggtggacgacgccacgacgggatggattagtttaacaaatgaacagattctcgaggggcgggggatacggatgggcggacgagtggacggccggtagagtagaagattcttgggatcggacagacgtgtgcgcggcgcgacaaaagcgagccaagacaagtgtcaagtgacagacggacggccagagcttggggagagagggggagggacagaacacgcgctctagtttaacttggcttgccttgcctcccatggataatgctaaacaggagcgaggtgcctaatcccattcccatcccgggtctccggtagtgcccggcacacggcgtgtttaattaggcttgcgctctgccagatgtccggtttgcgagctaatcactacccgatccgtgctcctttgtggtgcttttcctcgtcttctacaaag

SEQ ID NO: 73809 - DNA, 1090 bp, Zea Mays
tgcattcccatctctcttgcttctactggcatatatgcttcctctactctattgtgttcacccaatctagcccaaccaccttggtattttccttcctatgcctattgcttcgacgaggccctcttgaccctattccttgtctggcacacgcttgccctagtatagacttgctcctagcttgccatggtgacaattcgctcacatctcccttgcttgaaatgttcgttgcccccaaacagtagcatgtggaaattgtgttgtaatgcttgaacatcttcccatattgctaattctgtcgataattgtgaccaccagaccaaaatttgagaggttggagtcccattgtgagtgacagtacaccttttaagcacctacactagaatactgaacagagaagtattagtaggtaaggagggtgatggaacataacccgtaccaacagtcttcaattgcgacacatgtaccacaggatgaatcttggaagtctctagaagatgcaacttgtaagcaacggtaccaacacgtagaaggatctaaaagggtccaagaaatttgaatgctagcttttgacaagaacgggcagccaccgacgattgcatgtatggttgtaacttcaagaaaactcattcaccaacagcaaactcgcactctgaacgtcctttaccagcttttcgcttcatgcgaagcttggcccgctcaagatgttgcttcaacagatcagaattcaacaaacgttgttgtaaccaatccgctagctgtgacgaactgatgataggctgatcggtgatcccaagttgtctgggctgacagccatacaaggcttcaaatggcgagaggcctgtagcaaagtgagtagaagagttataccaaaactgagcaacagaaagccacttactccaacgatttggacacgcgtgcacaaagctacgcagaaacgtttctaggcactcattaaccttctcaatttgcccatcatattgcagatggtacgtcgaactcatatgaagctgaacatctgccaggtgaaattgttcttgccacaaacggctaaggaacaccttatcctgatcggatacaatggattgaggaa

SEQ ID NO: 73810 - DNA, 389 bp, Zea Mays
gcaaaatcaatgtcaaccaaccacgattacaagggggagatttttgctttgggagaggttttgagcatgttgagttcccttcgagggagagtactttgacatgtagaaattttgagccatttctagcttttgctagttgtgttgagccaattggctctttcttgaggaactagctttgatttcaacactcttgctaattttgtgctctgatttggctttgtctgctggctagtcgtgttgagccctacttttgccccttcttaaggactagccttttctgtttggtcgtgcgttgtctatttctttgggaaccaagctttgcttgctttgaatgacctgttttggcttttatctagctttttggtcgtttgagtgagtttctcttcttc

SEQ ID NO: 73811 - DNA, 427 bp, Zea Mays
tgacctatgtgtgacaaacactcttttgacctagcatgtgtatgctagcaaaacctttggcttgcatgcacattttatcttacaaagtatgtgatggaaatgttgtgcatgcatggaatgtgatttttgcctttgtgattatcacatgaaatcttcttctatgaaatctcatgtggcatagtttcattcttccacttaaattacaacatgtctcaacgcatacccatgataaaatatgcagatggtgagcacacatcttatcaacacgagagtgggtggagcttctggtagtggcaaccaggagggtaatgaagatgtacctcttcctccacctccaccctatacacaagagcagttttttgtgcagattctgggagctcaaagaaatatggagaatttgcagtaaaacatggaagcagcgctttgc

SEQ ID NO: 73812 - DNA, 985 bp, Zea Mays
tgcgtgtttgtttgtttttcttatcagggttggaggttttctaataggattgcgttgtattatttgatcgttttttattttttaagagtgtgctgaatcggtgaggagtgagggagattttaagtcttttaggctaacaattttggtcttcttttgcgagcagctggagttgttatatggtggtgtgtgtgaccttggtcctaccctcgaaagagccgaaaaccggattttgttccattatctaaaaaaataatgacagagagatgataggtaacacgaggagccggagaggctcccgagctaacgacactttggaacctagccccattcacgtctagaggatccaaaccactatggttaaagctctcaccgcataatcagaacatcctacatgtagctgggcccagcgagcgcgacagatggtagaccgctagttagattagaggcacaaaagatagtgggagccgactcctagaacaatccctgttcaaaccagcgcaaggcatcagacaagtcaccggaacatccgactcgtgtgcagggcctaaccatgcatatgttaaacaggtccttaacggataaggactaaccatgatagatcatatctaccagacggaatggagcaaggcgccaccattgtgcatgagaacatgcacaaggatgacaagatgcttataatcggcaagcaatagttgttcatgaaggaactgccgatactactccatgaacattacggtaactagtgcttctcgccataaaaaatgctttaatacgagaagcacaaaggtaaatgaataagggcaacatcaccctgatcgtgaggcacgatcaaggtaacaaggcacttacctatagaaaaccatggaacaggagtggcgatgcaccggaaacttgtggccataaacgtgtgaagatttacgattaccttaacgattgattgtaggtacgtattaatagtatagggactttctaacctagctaaccc

SEQ ID NO: 73813 - DNA, 864 bp, Zea Mays
ggaggatgtacatgtggtttgatggagttccctccttctgctttttccttgtctaatgcatctaattaccgctttacacttgtggcgaggcctatcatggcctacaagtatttactatctttctaagagttgagtggttggacacatatctttttagagttctttttattatacatgtctcatccgatgtacgcctagttaggagcatgtgctaagtggtcagagaaccataaatgtgttagccccacacaaagatccatgataccttcatattgttgtgttgtagagtcttatcagacctaggctgacctagcttaggggtgactagggttagggccgacctgtttgggattgctatgtcgggggctgacttagtcgagtgaccaggtcgaggttgctctagttggggaccaacctagtcagggtaactaagtcaagatcaggttaggaccaacctagttggggtgaccacattagggtagttctgattggggccaacctagttggggtaaccatgttggtgtcgctatggttaggagcatgttttgttagcggtgttctctatcctttgggccattttaaaatacacgtagtatgtatacatgttagtggcccttgaaccatcgattgagttgtaaaactcggtcaagggtttccttgcgacttttcttggttctcagttttgcttatgttttgtttggctttagtgaatgatgtagttcttcaaagtctttaggttagttctagtcatcctagccgctctagcacgtgtaatgcgtctagtgaacgtagtccccaagcccttggacgatttcatgaaattagtcaagggttgctaaacaagacgacttaagttttctgaag

SEQ ID NO: 73814 - DNA, 546 bp, Zea Mays
taattagagatacacacacatatagaggaaatacctcttttcccttttatattatttcttacaaattacaagtagggtattacaaatcctacccccttaacaagaatctcgtcatcgagatttaggaaggactagggaaaagatggggaaagtctatgcgattctcttcttctctctcccaagttgcttcatcttctccatggtgactccattgcactttgcacatctttataaccttatttcttgtaactcgagtcaaagtgtcaagaatcttgatcggatattccgtataagtcagatcgtcttgaacactaaggtcctccattggtagctgctcctcaggtaccctgaggcacttcttcagttgtgacacgtggaagacatcatgtacatccgcaagatgatcgggcagttctaattgatatgcaacttcacccactcgctttaagatcaagaaaggtccaatgaagcgaggggacaactttcctttaactttaaatctcctcataccccggatcggtgacaccttcagatatacgtgatcac

SEQ ID NO: 73815 - DNA, 313 bp, Zea Mays
ccaaaatggctagcagaggctaacatcggacgacattggccaatttaggggttgaggagggagcaaagggagtgagggagggaccaaatagaatgaggtaggaaggaagtagatgggtgggcacggatggcaacgttcatgagggtggtcaacatggctagagtgggtgtcgtagctagagctcgataggtggtgtggcatggaggtggaagaagacacagagagagaagggcttgtgtcagattcctttctctccttccatgttatgcaggttatcgtggcaagggggtgcaacatcgaagttgatgatgcg

SEQ ID NO: 73816 - DNA, 3801 bp, Zea Mays
tcatcgtgtaacttaatttctaggtcagtctgggcaggaacgggctggtcattacaattctcctgagctaaaacatctgataaagggaaagaatacatttaaaaaataaatgtcagatacttaaaagacaataaatgacaatgaaacatgtgcctagctgttgcagatagaacaaacataaagcctattaaaaataattagaatgaaagtaaccaacaacttgacttagaactcagtatgtttaaaattggtaaattaaacacagtccatacccggatcagcaagttcatcgtttaacttaatttcttggtcagtctgggcaggaacaggctggtcattacaattctcctgagctaaaacttctgagaaagggaaagaatacattcaaaaaaatgtaagatacttaaaagacaacaaatgacaatgaaacatatgcctagctgttccagatagaacaaacataaagcctattaaaaataattagaattacaagtagccaacaacttgacttagaactcagtatgtttaaaattggtaaattaaacacagtgcaaacagcacaagttttcatcaccatctccacagatcagtaacaagttgtggaacaagtattaatgcaatattaccttcaccagtctccttaattagcacatcacaatcatgttgcagatgtttggtgtggagattgttagaaaagataacggttaggggttttcgtgcagattcacatgcacttgcttcacgacagacgcacttttcaacagctatagggctcactccatatttttcttcatgctcttcaatagggaaaaccaaagacaaaacatctggagatttagcaagtttaatttagtgaattgaaaatcttgaagcaagattactaagcaagatctttagaaaaaaaacagtgaataatcagctggcacaggtggatttagatgttcagcatacatattatcttcactcatcaatgttgcagagtttttattatggatacaggattaattcagttgtacctttatcagtctctttagctattctgtcaatatcatgctgcagacttttggtgtggagatcagttgatgtgacgttagctaggttcttttcctcaggctcattggcatttgcttccaagctaactctctgttctccggacacagggctttgctcttcacggtctgcgacaatgaaactaattgataaaccatttggtgattttggaccaacaaagtctccctttgagtatataacatgacaataatggacaaagctaattacaacatcacaaaatcaatagggtattaatatgccagctttccagcatccaaagaagatcaaaaaataataatacaattgtgatgccatataacttaaacataattaaagcctatagatttggctatgcagagaataaattaacaactagtatgccattaccaccaaatgttgacctcaccttcactcatcaatgttttgtcctctgagacaacacaattgtcagagactaatcctgtgatgcatgttgattgatctaatttcccacttcttgtttcagataaatggtcatcaacagtttgagtgacagaatgttcctgaggttgcttactcttatcagaactttgatttgcatcgtcaccagattctgacccaggtatcaccacagctacactctgcactgtgcaaatttcgtcactaggagctactgttacaagcaatggacctgaagagaactcttctcttgcagcattaacctgacaaatttcttgaactttactactagactcattattatattcaagtgtgtcctttgtttcttccatgataactatgtcatcatttgccaccttgaaaggcatcacttcttctggagcagttgttcgtctcttctttgaagaccttctctttgaagttgtgcaatttgatgcctgctgcgatccttctgtgttatctttttcattagagatctgtgcattctgatgcttccaggaaacattagctgaagatgatatttccagcaaaaacctactgcgcttcctcaatttcaagccttcttcaccaacttcaatgtgatccatgctgacctcttcaactgcattaagggcatgagatttgtgtgttgtcctcctcgtaggatttttgaacttttttccttcatcattattttgtccctcaagtagcactgtagcgatagatctccttgattgcctaatagaatcttttactttctgttgcttctcaccatcttgatatttaccactttgcaagttctcatttctagccattttatggtgatcttgcttctcattatgcatgtcaggaagaacagacttccgtgttgatctcctaacattcatctcagcattcattttgggtgctagaagtccactattattctcaagcatatcaggcagcacagatttgcgcgatgatcgcctagtaggttgcttcacaacaaattgtttatccacatctttgcccttaccaatttgaattccttcaccaacagctttaatatttttaactgggattacaggcttccgcgttaatatcgcttcatctgtttccatgttcttttcggcaatgagactcttctctttctcatgcaattctgtgataacagatttacgtctcagccccctagcaggtcctttagttgctggttgcttcgccacatcttcactgttagcatattgagtctcttcaacaatacttttggtatctttaacctgcacaactgatttcctcgttgatcgcctaacatgtgcttcagggttctttccttcaattacatccttctctttctcaagtgcagccaaagcaatagatttacgtgttgaccgtttaattggttctttaactgctggttgtttctccaaatcttcagaatgagaattatggtgtgccaatggctgagctgtgctcgagtctttggccaatttgatgtttactgaatttgcactattggcctcagaatagtttctccgtgaccacctcagtagaggggacttactggtagcaggaattttttgacctttatcctccggagaagatgcaacctgttgatgcctacgagtagacggacgcatcttgttttccaactgcctggtagtgtgagtttcgtccacgacgctgttgttaacgtggacaattttgttccttaaagacctggtggcaggaaaatcacttctgggcacatctgaaagcatagtcaactctacagttgtttgtggatctccagtcttcctcctcttgttctcaaccacagtgggtggcaccacaacaggtacgattgagcgagaccttgtagtcctagctgttacttccaccagagcggacttctgcacatcagactcagctgcattctgcctccctctcttcttctcaacagcaggaggcaatacagtagcagaccactccaaatttgaccttctcgtaactctagcctgagcgataacagcaacgccctcgtcattctcctgattcttgcgcttgggcttcctgtcaacagcaacagcctctcctgcttcctcagcctcggcaggattgaacgaattcctcctggaccgcctcactgggacatcagcgcccacatctgcagaaataccgtcttcagcagcagaatcagtaccggctcgagcagacttcccccttgtcttggcaacgaccggcgaccatatgacccgagacctcagtctcctggccttccctacctccgccccaaaagtaaccttcttggcctcggtggcacctccgcccgtttgcttcagacaccccttcctcgccggcactccggcaacctcc

SEQ ID NO: 73817 - DNA, 498 bp, Zea Mays
gttagagaatgatttattttctatctcatagattaatcaatgcaattaaaatataaataaaagtgtccacgtcaggaaaaggcttgtacacgcttagaatattcaaatcaaatcaagtcgagccgaagccacgtctagtctgttgccaagaccaaatccacgcacgtctgcacgttctcaaagtcactgtgctcacgtattcaaatcccacatcgtccagcgtcattggcgctaatgccaaaatcaaataagaagggcgcgcggctgcacaactgctgctagtactcgcttctataaatacagggtatgggagtaggaaaggctctcggctccccagttgatagtgccgtcaggctgccgctttgcttcgctaaaaccaaacatcgccaggctgctgtgtttccaagccaccaccgcgggaggagtgcaagcaggctgctgaagttcttcatcgagaaattactgcttcaataggttccatcgacaacaaaaattctc

SEQ ID NO: 73818 - DNA, 1005 bp, Zea Mays
gtttcgtaggtaactgtagcatctcgttctgtgtgttctatcaggctacagggcaggggtatctatagggaaccgagggtaggtgacccaaaataccttcataccctcgattacctactacatcccgagaatatttggctcaagggggtaattacagcatggtgttgcctgatgggcaggtgcacccaaatgtctacacatcgattacactaaccgatggggcctctaaggcaccctccggttgattgactttatgatagggactaccttttcaaggtctttcgctactgtggggccttcacatcttaggacccctcgtatccagcgtaggacgatccacactgtctcctgaaccattgtgggtgacaaagtccatgacccttgctctccatgtataggaatttgcctggccatggtggaggtcttcacttgtggggagccccctggtgggcttctgccttcgcaagctgttggaaattacaggagcgaggaccccgttggtgagcctgtttgaagtctttggtttggcctggtcgtgcgatcatgtatggttagttatcgcctagaggcaagtttatgaagggccgattaaggtcaatgatattaggcttgtccttcgcccaaacagtacctcaaggcaatgactcatcctgatgagccgacccctaagtctttattgaagggacaaactcgaatgctgccctcgatcatcaggtgaacagcctgggggttgaaataactgttggaagcgacatggtaggcgaggttcacacgttttttggtgagaagactagttgcgatgcaaaagcggggcgttggccgtctaggggactacggcaagggagggctctaaagccagagcctaggaggtgttctcattaggattgcattgatggtgcggtgtctttgctagcttgttgctgttgcgaacacgctagcccccatggcaaaagtccaggaagaagtggttcccgcaaaagcggagtgtgcggaggccaagaggag

SEQ ID NO: 73819 - DNA, 750 bp, Zea Mays
ctcacggtatcgacggcaagtttattaactgaaacaataactcgttggaatttggcagttgaatgtatatatgtattgaaggcgttcattaatttcattggtgattttacttaacaaaaatgtcgttgcatatgcacaagctcgagaaaccagtacaaatgctgtctagtctgcatgcaagataaaagtgctagattctgtccccggcatttttgaattatgcgcggggcagttcgtattttcgtgcaggaggggagaaaacgacacatcgtggagttgcatcggatctatcaccaacaacggtgacaggaaccgcagtgtatgtagcactagcagcagcagaaacaggagcagcaacatcaaaaacgatagcattgcacatttaaagccctaggccaggatactgaaatactaaacgcagagacagggtattatttggccacttgctaaacgcagacagggtatttggccagctacggagctactcgttcgtcgcatgcatgctgccatggttggtaaacgttcatttactccagagccgatcatttccatcacacatgtatatgtacagttaaataaatgacggactattaccagactatatactagtccacctgataaagtaacagctcttctgtgtttttacgagaaaggcgttattcacattgctagcactcagttggttgtttttccattagttcttatcgttatctctttatgtgcgcgcgctcacgtggacgtgggcgtgtg

SEQ ID NO: 73820 - DNA, 279 bp, Zea Mays
cagaaagtggagaagcgaggaagaagaagagagtaagtgatcaagggcgagtgaagaaagcagccagggcaagagggctatttaaagaggccgatggggtgaccgtccacttcctaccctgctcattgaacagtcacaagaattcaataagcaattcaagtcgactgaaaatgagtcaggcaactaacaccgttttgcgtaacacgacaccggttggactcaagtcaactgctcaggcaaatgattacaccactccgtcacatcaagttactacttcag

SEQ ID NO: 73821 - DNA, 557 bp, Zea Mays
gcgaggaagaccactgcggccgccgccattgtcggaggccggagcacatgccccgcggtcggatgcgtatctccaatcgtagactagtgtaagagaaggcgagagctaacacgaactcgagaggggtgcctcaccgagggttgggatgaaggcgaggacggtcgatggtgtggtgcgtcaaagcggagggagcacactagcgacgaattccccacaatcagcttgcccatgcaccccaagcttctgcttcttatcttcctcacgacaccgagacgcacccaggcacgttcccggatccgaatggtggcgccccacggcctcgcccatggtgacggtgttttcttcttccgtgccaccgtcaatggctaagggagcgcgggttcttatatgcccaggagcacggctgatttgtggactccgatgaagctcgcccgaagatcccgcgtcaggtgcaacggaactcagttgcgaaaaccctggattcttcccatgatctgcggcacaagcccccctggtgaccacgcacgagttcgttttctggagacgaaatttctgac

SEQ ID NO: 73822 - DNA, 931 bp, Zea Mays
caagaaacgtagaaaaggagaaaaggaaagagagaaaaagtggattgctcatttagttggttatatgtaacttaacaatattacaaaatctgctatagagtatattattaaggttgctcttagtagagctggggcaatttcattgcttcaacagccttcctcttgccccagcccagcaccgtcctcgggtgagtgtccgcgaacacgtgtagagcaacgacctcggatgagtgtccgcgtcgacactgtctcacaaacatatatggtggcacgtgcgtcgaaacatatttcctatattacaaagcaggtaagaaacgagccacgctacggtgtccacgtcggcgcaaatttttcaggccgttagattcataatcaagcgtcatacagtctcttggattttcttgtaaaaaaccccatctctctatgcctctggatgcttctgggtcactctccctcgcgtcagctcgctttgaccccgcgtggagcttctcctcggcgtcgtcgcctactccgtcgccgcttcctcttcacgccgagcgctacaggtttgttccgacctcgctccctccgccattgcaaccgcgctggattttttttatacggttcagcgtcattacgcctttcagcttttggctgcgttcttggttctagggtttgtatcctctgcctgctagatctttgctcagcttcatgtttgtactggcggatgtgtgacagcgaatcgtattcatagaaatcctcttgaaatctacccttacctcgcccctaaaaccatagctaggatggtgcgccgttctgcacgacgtttcctagctgtgaactccgattcttctgctccggtcgccgctcacctttgccggacggagttccagtgcgggcgcatgtcactgatggtcgctgatcctccttgcgctcgctgagctgccaggtg

SEQ ID NO: 73823 - DNA, 504 bp, Zea Mays
ctatgtactagaacattatgatagatatagactgaaaatggtgtactagagtcccatgtgtcgcgtgtgtacgtgctgcatatgcagagtctgtagaagcatatagtgttgctagcgtgtgcctgttcacttggctttaatccgtacccattttattatttctatggtattttatctttataaattataactgcagcaattcaaatatctggttttaatccgaagcgaacaacatgtgcttctcagttggcatgcacggtcatggttgagtcgtagctcgttaggctctctctccaaccgtgcccgaccccctctcctgtcaggcatggggtgccccggctgctccccttcggttccatggctccccttcgggggccctctcgcgggggtgagaggagtactaatcttcccctctccactaatcaatgagaataattacgaaaataactgttgattgctttaattcaaattcatatttgtcttcgagttattttttaatgttta

SEQ ID NO: 73824 - DNA, 576 bp, Zea Mays
ttgtgagcttcggctttctgccgtgatcatcatcgaaatggctgaggataagaaaagaactgatcccacactcgctggcttctacgaagccatggaaaggaccaacgtagagaaaatcaccaatgaaatgttagctggactatctggtgattccagcgacagtgaaatcttcgatgttgagagtgagaatgaagatattgaagatcggccgtggagaccaagccatgttgtttttgggaaatccacaattagacaaagacagattgaagggatgaaaggcaattactttcatgatgtgtgtatagtgagggctgggggagaaggcaccgttcccctgccagaaggtgatgaagtagtagtctttaggagcttcatgaaagctaggcttcgctttccgctccacaagatgctggtcgaagttttgaagatgtttgagatataccttcatcaggttacccccgaagctcatattagagtgggaggttttatatgggccatgaggagccaaggactggagctagatgcgagatgcttctgcaatattcatgagttgtcttatcagacgaaggcaaccag

SEQ ID NO: 73825 - DNA, 399 bp, Zea Mays
ctcctgttaggtttgaaatttatttgatcggcggcagattggacgtctggtagatagctcttggctagtcttcatttcgctttgtgcttcaatgcttctattgactagacttgtactttagcagctatatttggctttcctctgatctccatcgatatctttcttctgtcttgatacattcattgcgtatactgtacggatgtgactgcttgggaaaatctattaaaaattcttggtcgtccccccaatgggtgtgaccgagggacgtcttggtacgccgagcgtttagcaaactgtccttgagtagtaacttgacgtgatcgctgtgtgtaatcattttgtccaagcagttgaccttagtccaaatggtgtcgtgttacgcgaagcggcgtctgctgc

SEQ ID NO: 73826 - DNA, 423 bp, Zea Mays
gaggcagtgttgcctaccgatctaatcttcggggcgccgaggttaactttcgaaagcatagccgaagcagaagcaaccaggctggaagacattgatgtgctggaggaagaacgattgaacacagtaattcagtcggctaggtaccagcagaccttgaggtgctaccatgataaagctgtgcaacaccgatcctttgcagtgggagacttggtccttcgccgaattctaacgggggaagggcgacacaagctgtcaccactatgggaaggaccattcatcgtatcagaggtcacacggccgggttcatatcggcttactcagatggacaacacagaagtggggaacttgtggaacatagaacacctcagaaaattctacccttagcaaggcctcaaaactcttgaaggaatattgtactctgta

SEQ ID NO: 73827 - DNA, 746 bp, Zea Mays
cctcgatggccacaatcaacctcccttccatccccgaccatcttcttcgacgccagtgtcaaccaatccctctccaacctttaccaaacatgcctcgtgcggccgctcgtgggtagaagggtggcaggactccttgtcggaggaaggtttggacgtccctcctcgaagaacctctaaaggctttaccgcgacatggtgtcttttgggatggacggacatcttcctgttgtagctaaggacgtggttcacgttctagaacagatggtgatgtcgttggcgtgttgcgatcaagagtagaggaagtcaacaaagaggacgtgcggtctggagcaggggactggtccgacggaaccaagaaaagcatgcctagaagaccatggttggaaattggtagaatttaggcattcgaagagaaaacatctgaattgggatcgatagagacatgttgtgttgtttgatctcatcggaagatgctttaacttcctctcctagggtcattttgcctttcggtgcctgaagaagactagatgcttccgctaccatggcccaggacatctctcctataattatgtgaagactaaagatttagtatggcagagaatcactactgctgtgtcactccgtgtgtgtggattcttagtctggaggagggtcaaactaccggcagacaactcagtcagtgacaacaattggggtggtagttctcgacctgaggcaagagcttcggtctagaggagaatcaccca

SEQ ID NO: 73828 - DNA, 382 bp, Zea Mays
gcacattagaccaactcaaccatgagcagaagagctaaaccaaccaatagagtcatgatggattgcataatctgtctatccctacctaacatcaaacaaacttttgacctacatcatgtagtctatctcatccataactatcttaaccatattcccccaactccgatgatatgcactgacctcgaatcaatgagaccaagactggagaagaaaagatcaacatcgacaaggaaggatttaacagtcaaagcgaatctcgagatgaatcaagacttaaacaattcggatgaagtcttttccttgccataatctttcttgcctcaacttgtccagcttatatcctacataataagtagctggatacctatgctctcctaatctc

SEQ ID NO: 73829 - DNA, 694 bp, Zea Mays
tttttgtctcagcaaaatattccctgtctgttgagtgcattgcagtcttgctgggctgtgctgctgctgcttggtattggtcagcttctaaaaaaattcaaaacgaaggagatggttattggtactaattcatgactaagtttactgctgacgtattttagctgtcagagagttcattttgtcactttcaatcattacattgcatttcatctccttcagtgcacactatgacaacctactgtgatattattactgacagtattctttgcatattttttctcttttagttggttacaacattagccggatcgattgcaaagggaccaccattttgatgctctggtaacaatctacgttttccttttgttaggttacatacatgtagttctcatttatcaagtgggacagtgaagccagacattacatggcactataatttcacaccgtgttaaatctgcccatacgcaccagtaaaatttcaatatgaaggagatggttattggtactaatttctatcctccttcagctgttttactgcttcatccaagtgcaattgaccagcaacatcttaatttggagcaggtgtttgacacaaaatacttgcaagtgggtatttgaaaaccccctaaatttgcaagcgtgtttatgcagttttccctaattaatattaggtgtctactacttcttaatccac

SEQ ID NO: 73830 - DNA, 376 bp, Zea Mays
ggagcaccaacatttgacactatgcccctaaggatcatctctagtcgactcaccaagtctgcagagggaattcttctgttagtaacccgagttgagtcggctagccctcgatacagataagctggataggctctatctttcaatggctgaatattcttgaaaacaaaatcagtaaccacggcttcagcagtcagacccctctctttcagcagtccaacttcagctagcaacacacctgcctcagctacctcctaatctgagggagactcggtccagcttggggtgcgaatgtccggctgtcttcccgaccgggaggggagagaattcccataattctcaactatgaaccactccaagcgccatcccttaatactgt

SEQ ID NO: 73831 - DNA, 407 bp, Zea Mays
cgagcggaggttgcggaattgcgtgctgagtgcgcaacacgccactatctagatggtggttctcccgcccctgtcgggattcagcacccttaccgttcactgcctcgtggtcgcttcgactatggtaccccagactacaggacccagatagatttggatccctagatcgacagagtcggagtctgtaagaatgcttagttcagtgtcttagtctagtcagttttagttagagttagtttgcttatcttatgttggatgcttgttatgatggacatgtgatgaagttggatctttgtaatgattgtcaccaaggtgtaggtatcccctgcaacttggtgtagttattaataaagttagttatttagttgggtaatccatttatttccactttcctctttatctgagaa

SEQ ID NO: 73832 - DNA, 455 bp, Zea Mays
cctagggcctcatctccgcctcgcccgaggctacctcgccctaggactgccatgtctgccttgcctgaaccagtctcaggcgacgaggacaaagcatgcccgagggccaatgggggacaactatctttaatgcgcatacctaccctgcccagcactacaggtgcacagtggcaacaagactacggtcttgtcaaatattaacatcatgattacgcatgcaccactgtgcatgcacgccacctgccagcccctcacgggacatgtaatacgacaggagggcagatcggccctcgggcacaaattccgcctcacctgatgccaagctcaccctcggatccaaagccccctcgcccgagctcggctatctgttccaccacgaatcctgcaggaggccactccgtcgactgtgtcgcacgtcagaaagggttcgtctatcacctcgggaagacttccac

SEQ ID NO: 73833 - DNA, 331 bp, Zea Mays
cgggcacactaccaaggactataccttcactaaaaatacaaagaaagaatgacaataacgaactaggaataagcatcgaagactatcgtctaaaccttgtaccaacatacatatcaacctcattaccaaaatctccaaccatactacccacaattcaccctagctcattaacagccacaactactacaccaagaaagactacaactcccaccccctacactccaactatcacccctccacctcagtcatgaggatgaggagtaatatccacaaacacgcctccacgagatgataaacatgatatctagcaactccagtatagatttctaaa

SEQ ID NO: 73834 - DNA, 460 bp, Zea Mays
gcctcccattcgtgcctcatagaggagatgaagaatcaaatgctgcattggattgaagaagccgggtggaaatatcttctcaagcttacacagtaacacgggtgccaatctttccaagtctacaaccacggtccgagataactcttttgcacaaagttgacagaagaaataactcaactctgaaagcgctagccagacatgctcagggacatagcctcgaaccatcgcaggaagaatccgttcaatccatatgtggaagtcatgactcttcatccctaagactcacataatatataagttcaccccctacttaggttagctgcatacccatcagggaacatcaacatcttgatccactgaagtacttccttcctttgggccctacttaggacgaaatcggccttaggccttctccacgtcttttcgccacttggcggcttcatctctaggtttggtctat

SEQ ID NO: 73835 - DNA, 722 bp, Zea Mays
cccctcaatctgacacgggtgaacaatgttcagactgcgccgaaatgtagtgaaatacggagatggcagaggcttggtcatgatgtcagcgacttggtctttaatggaaatgatccgaacatcaagctgtttggtggtgactcgttcgcgaacaaagtgataatctacctcaatatgcttggaccgacaatgaaaaattggattagcagataagtatgtggccccaatattatcacgccaaagtaccggtggtcgggaaagtttgactcctagctccttcagaagaccttgaagccatatgacttcgacaatggcatccgcaatggctttatactcagcctcagtactggattgggagactgttgattgcttgcgtgaactctaggaaataagattggcaccaaaaaatatagcaaaacctcatgtacttcttcaatcatccgtgttaccggcccaatctgcatccgaaaaggcgctgagtaatggagcaccagatttggtgaagtttaagctcatatcaaacgtttcatggatataccacaaaattcttttgatctccgacccgtttggagagaaattggcacacacagttcaccgataatgagatatcagaccttgtatgcgaaaggtactgtatagaacccaccacacttcgagagcaagtagcatcattgggtgagagaggtataccaccgtgtagggataacttctccttggaaagc

SEQ ID NO: 73836 - DNA, 588 bp, Zea Mays
gtcctttctgccaaaagtgtggggtggatggtcatcatgctagagattgttttagatctctgtggtgcgacatctgtcgcaaagaaacccacatgactgctcgctgtgtcttgcccaaacaaaacaagccttgcatgcctattgttggtatggcggctgatggatttagggttttactcttctcatttcgcgaaacccttgtccagaaaacctaaaagaagcttcataggtttggtgaaagttgtggagggtctgatttctgcgaaagatcttgagaaggactttggttttcatttcccatggggcaaaacttggaaagctaccaagtgccatgccgggttcttgatgcaatttccttctcaagagaagcttgatgagatgattaatttccctgagcttaaaattaaaatgccgggagctaaattttctgtatcacattggagctctcaggctaaacctaagtctaagcttcatgcggtgtggattgtggctgaaaatgttcctgaggaactgcaaaactatcaggctatctgtgaattagggtctacaattggggttgttgaagaggtggatatcttatccttagac

SEQ ID NO: 73837 - DNA, 584 bp, Zea Mays
ctgcatctgaaaatgcacttacaagaagagaaggcgacttacaaattttgagtccaatctccatagtgtgtttgagataccttagtattctctttactgtagcccagtggatagtagtaggtgcatgcaaatattggcaaaccttattcacagcaaaagaaatatctggccgagtcaaggttaaatattgcagacctcctaccatgctcctgtatgcagtagcatctttgggcccaagaggatcaccttcatgagcagacaatttttccgaggtggacaatggtgagctaactggtttgcactccatcatgtttgcacgctgcaacagttctctagcatattttccttgtgttagcagaatgccattatttatcttccttacctctataccaaggaagaagtgtagatctcctagatctttgagagcaaattccttcctcaaatcctgcaacaggcatgctgtggcttcctgagtggagctagcaacaattatgtcatcaacataaataagaacatatatagtgacagatcctttgttgtaataaaatagagatgtatcagcctttgatgctttaaagcccaac

SEQ ID NO: 73838 - DNA, 562 bp, Zea Mays
ctttgtaatttggtttttaccaaaatttgtatttttctcccaagtttttctcccaattaccctttatgcttaaatggttcacttaggattaattaggctttgagagttttccttccttaggattcatgacaagattaaggagagtttgagaagactcattataaatctttgttctcattttttatgtttatcccttcatttggtttatatgtgataatagtttggggttagcttaaggaagaaaccctaagtgacactggggtgtcacatttttggtaaaacttccttactatttcttgtaggtatttaaatatgctacaacttttgtgaatgggtcaagtcatgatttcgtaatttacatagttctcccactaatcctttcttggagctctaatggcttaaggagggtggtctagggttttgagcatttttctcaattggaggtgcatgaaaaggctaggatatgccttctagtatgaccaacacttgattaagacattgcttctcaatttggcgcctctttctcaaactaaaacacatgtgataataggtcacaggtgta

SEQ ID NO: 73839 - DNA, 827 bp, Zea Mays
caaaataaaaggtgaaccggtatacgttatgagaccttagatcacaaattaatggccaggaaacacccaatcctcgaccaaactctgtccgatcgctcgccgattagcggctctaacttaaattacgaaggggtacgtaggtgttctaatctccgttgtccaactcaaatcggacaacatacaccattcctgcttccttgcgcctgcttgggcggcgccgcccgcccatgacggcggtaaccacaccggtgccagccgaaacggaccccctgtgtccattacttgacccaaaacggtcctattcctaggggtgacataggcggacgtagaggagattgccttacctcaaattatggcgtccagagtcctacccacggtacggtacggcttggcagcacttcatcaagtccggcgagtaatcccggatacaccagcctccaatcttccctggcgaggccataaccatcacgcatgggactccatggagcctctagaccgacgctcgtgtcctgaataggctaggttccatggcggtagatcttgtctcccttcttctctgtttcttcatgcggcggctttagttcatgctacccggccgtgagaagatagcctggcttcgattggatgagtcaaggggattgcggggattcctatttataccccaacgacgccctgagaacgagcgagggacgactggcggggtctctgggtgagctattgtggcggtttcggtttgttaccgagaagcaaggaggacctgacgaggcaaacccatggtactgcgaggtggctgcattgcgcggaggggcagtgggggctgacgagca

SEQ ID NO: 73840 - DNA, 352 bp, Zea Mays
caaaatttgtaatagtatcaccagtatcatcatctatggcctcgcatcgaagatcactgttttatgacatgcttcttttgtccttggacttggtacaaaatgtgaatccactaatgtcatatgtttgccatgtcgtgaccaagcgtgatggtccagatgcaaacccgttgatggtttgtcttctattgtttctccatgtggaatgaccttcaccattagccatgtgttgcaccactgcttatgttgcttcattacccaatcatctgtatgcccatgattttgctcgcgaagctcattgatgtgttgttggataaatggcctccattattgctagctgatgtaggagttgtga

SEQ ID NO: 73841 - DNA, 612 bp, Zea Mays
cggattaaaggccaacggcctagatttaatgaatctgagactactcacacccctccgatacagatcctatggtcgcgttttactaccatgaatcgttattccgcttctaatgtaggccatcgatacaggatccaacggcccacgcggattctaaccgaatcgatatagcaaatccaatcatggccacacgatcccagatcgagggcccctagctcatcctctccaacacactgagcgcacggcggcgaacatcgccacggcggcgaggcattccggcgctacagtcctggtacactggctactatccaacctatggatcccctaaatagcaacagaccgatacgggaatcaaaaagcagggcagggttctcaccggagacctatgcagcaacgacaccacgaaggagagcgaaaccgaaggtgatccgccgcgcggaagagaaattcgtcacaaccagtgcacaatctctcccaccccatctatgagcaccccacaacaatcccagcgaatcacccggagccagcaatgcgacaatagcgacgacggcaaggtggaattttgttgacggccggtcgctggctttttccgcccacgacgagggaccagagaac

SEQ ID NO: 73842 - DNA, 314 bp, Zea Mays
gtccatgctttgggcgaaaccaattccatggcgtgttcatggcctgggtacatattcattgatgcatgcaaatcctattcacttgggagtagtatgtgagccatttgccctgatgcttcactcctgatccataaatacatgaaagtgaaacagtattttcccccatatgtgctgtggatagtggcgattttctggaacttgggactcttttatgcttcatggcaagatggaggccctagttttgttgtgtgcgtgataacctgaaacttccaagtaagattccatgctgtcgtacacatttgttgctcacattt

SEQ ID NO: 73843 - DNA, 916 bp, Zea Mays
gaaaaaaaaaactgagaaccagatctgttcaacgtgtgaattaaaacaccagtgcagagcaggaacattatttggtagttccaaatgcaaagaggaaagcagcactgcgtccgtctttgatggactacagtgttccatctgctagttctgccggcttgcttttccttttgctcgaaaacatatatatttgttgtgcttgtcagggtaactgcccggtggcctggctgtgagtggttcttccttggtttgatggtgacggcgtgctaaggtggtgatgtgcacaacaagcacgtttcatccgtgatctgatcgcagtctctttgctgctgcgtgatgttcggggcgtcctgaagtggttcgggctcgtgttgcctgatacggttagatgctagctgcttgattcatcagtggcgcgctttgcctgctgatgccggcgtgcagatcgagatcaaagtgacggcgagaggtgcccggcgtcgcagggcaaaccacatcgtccatctacgtggccacgcgatgattacactccctagctgcacggctgtttatatacaaatcttaaatgagacagtgacctgtataaatgttgtttccctccaaaactttgccttgccttgccctgcgctgcatgccatccatgtccagtccatcgtcttcgtcgtcgccgttccagcagatctcacgatcccaaaactactgcatctcaccccctttctttcgagaactctataaagcagcacctgaacacgggaaatcccctcgctcgtgtctcagctactgtggccactcatttgccagcaagtggcattatatatattcgttcctccggccgacggccagtacgtacgtaggcgccgacgagctaggtctcgccgccgccgcctcgctcgcggtagagaaagagagagagagaaac

SEQ ID NO: 73844 - DNA, 718 bp, Zea Mays
tggctcctagactatataagctggattatggtagatggatagaagagtaaaataccactttgtgatcacaaataagctacccaataatagcttatttcagcttatttatggtctcgaagtgatattttactatcttatccttccacaataatcaataatccaactggctgctatttaaatagacctcaatccaccgatgcacagcgccacagcccaacccaaacctcaacagagacatggttttcggttcttcaagcaaaagaaagcgtgcggatgaaaaataagatgatgatgatgtggggctgcggctaatggtatgagacatccacttctagatgaagttaatattattggtgttccgagtggaaaatgttggtggaacaaaggagtggcagtgtaaacattgcaagaaatcgtacaaaggtagtttaactagagttcgtgttcatttgcttagtccattacctggtaaaaagggacagattgcacgttgtatgtcattgcaaaacaatcccaacaagagcaaagctttgcgggaaaaggtgaaataagctgatagtaaaggatgtcatatgagatcaacatcagggacgtccactccgaattcgttagcaaaatcatttggagtagcccaaagagaatctgtcgatatggaaattaccaaatttttatgtgctaacggtattccattcaatgtgttgaggagccctcaattttc

SEQ ID NO: 73845 - DNA, 818 bp, Zea Mays
atcaacttcaggacagtcacacccattgggatcaactttaggacggtcacacccattgggatcaacttcacgactatcacacccattgggttcaactttaacatggacgcaaccattaggatcaacctcaggaaggacctctcttttcacttcaccacaagctggagcagaaggacctgcatcctggtccaaacatgacagtcgccgaagtcgcctcttctttttcttcttttcctcaacaggcgcagtcgggcggctaacttggcgaggacgctttgggtgagcgccctcaggttttcgagtctccactgctttgtcaagctcttgtccaactgtgatagccatcggctcagcatgggtcgagtcagaagattccccagctaacatactaagcacaacatctatctctgcatcatctggactagctggcatctcaaagtgaatttgcttctcatcattgggaagattccgaagaggagcaatcagagcctcaatgtcctcaggggagggtcgcactctaagacccagaccaccatcactagtacgagggttggacacaaattcagaaaatgacctatgaggtggcagattccaagcagaataggcaacaggagcaccaacatttgacactctgcccctcagaatcatgtccagtccgctcaccagatcctcagtaggaattctcttgttggtgacccgggtagagtcgttgataccgctgtacaaataagctgggtacgccctatctttcaaaggctgaatatttttgaagacgaagtcagcgaccacagcttcagcagtcaaacctctatctttca

SEQ ID NO: 73846 - DNA, 280 bp, Zea Mays
tcgcgaccgcttgcctatgccattgtctcgagggcctcgcttgtcagctctttcccccctctaacctccggtttgcgcgctcgccatggccacgcccacgtccgcgtaaatcccggccacaacccacgtgcccgacccctactcaaaatccctcccgtccgctctaccattttccccactcgcagacacctcccagcccgccttcgctcgtgcgctgcctcttgcccaagcctggaagaccaccgccattcacagcgcctgcacgtccattctgccgccg

SEQ ID NO: 73847 - DNA, 620 bp, Zea Mays
attggattcattgagtaaccttcaactacatttgtctcatgtattaaaatagttttcaaagaaataaatacggccttactccaactatgattcctcattgtaattttgaacttactaataaaagctccccatccctacctataccccctcaatagacatgatgagattatgcacagaatcaaatcgagttaaatcaatttgtattcccaatagtaatttccaaacagttaatagaagatacatgaccccacctataatcctcattatacatgatggctttaatttatatacaaaataaagtcataccaaatacctttgaccacaactatgaacatatataaacttaggattctattagattcattgaataaccttcaactacatttgtctcatgtaataaaatagtcttaaagcttccaatacatttcaaagaactaaatccaaccttactccagctacaattcctcatggtaatttcaaacttattaatagaagctccccatctctaccaatacccctcaatagtcatgatgagattatgcacagaagcaaatcgagataaatcattttttattcccaatagtaatttccaaatagttaatagaagattcatgacccca

SEQ ID NO: 73848 - DNA, 498 bp, Zea Mays
aaaattgggcgccactgctgataagcactataaaattgatcgttcggctagctccgtaaggttgttacgcgcccagtgcaccagccctcgcctccaattagccagcgtagcttgcgaatttcaaactttccccaaatcggtcggaacgccgcttgagacatctcgccgtggccagccctcgacaggttagttcaagcttctccgcttgattttctagactcccttaagtctcatgttgcttgtagacccgtttgattgagctagaccgccctaaatcaccaagaacatctcgatttctcctcgggtttcgccgtcgtcgtgggcagaaaggctctgggccgaaattttgcaattgatggtcggattagagtcgccaagagtagaaattggtgtcgatcgagttagggcatcagttgttgcgtatcccagccggtacttgctcgccggagggcgtgctcaccgccgttcgccgtcggggacctgggtctgcgaagaaac

SEQ ID NO: 73849 - DNA, 320 bp, Zea Mays
tggagttgaaactgggccttcagaaccaaccaaggtaataccttcggaagcagaagaagtaaaaattgtaaaggcaaccgaagaaatgaaaatgtcagagccagcttcggtcgaagaaattgataccgccgtccccgaagcatcttccaaaatatatgactatattgtgcgacatgcttcggggaaaaagttatcggaagaagaaatttttgaagctaaccactatgccaaagaattgaaatatccgaagggggcactagtgttcaatgggacgaacgaagaagatttcctatactacctcccagacaacaaagaattat

SEQ ID NO: 73850 - DNA, 502 bp, Zea Mays
gtggctattggtgggggcagccaatggacaactcctttctaatttctcagtgcgaaaacgatcatagcgattgtagtttcttgctgacacgaaattttaggaggtagggttatagttcgagtcccgatcagtttacagtaaggttttctagtcggttacaaggaaatctatcatgtagaatcttttatcttaggcatatcttgatctccaagcttcccttcggttggttgcttgtccagcaaggccaatgatgtaccctgtctcgtttgggcctcatatttgacgtcctcagcccaccgcgtgcttgtagtgggatcatatgtgggcggtgaggtatcctgggtccacatcaccgacacgacttgttaaatacgttaagtaccattgatggttaagatgaagatcaggttattggaaccctaacttgcatgtgggctaggtacctatatatgccatacctggatgtcaagtcaacggccttctgttgcctctatgaaacaag

SEQ ID NO: 73851 - DNA, 375 bp, Zea Mays
atggggagcccggatccgtcactaggctgctttaggtgtttcgagatatgatgtaataagttatgcttcacgttagacgttgaacactcttttaagttttcatattaataaataacaaccatgtgatggtgattggttgacatgcttgagttggatctttgtttgagtgcaatggtcttatggaatgatggccataagaacatataaaaatttttaaacataagctatttcccccctagaatcttttctactcttcactcctctaagatgttcacttcccaaccaatcaaatggtgaacgctcgtcaaggacccaacaacaaccggaaccagcgtggtcaacaagtaccaccaccaccgaatcccaacatggagc

SEQ ID NO: 73852 - DNA, 569 bp, Zea Mays
cgccgacgatggaggctaagacgagcagggcgtagggaagaggacatccaagcgtgaaagcaacggctagacctgggtgagcaagaatgggaggagtagagggaggcaggtctggcgtgcgtggctaggcgcgagcgctagtgaggaagatgaagaccggtggccctagacctagtgagcacccgacatggaaaggtgaagatgagggggcaaccccttagactagaggaagagcacaatagagaggagcagcaggggcgacgagcgcttgatagcgatggacgaccggtgcgtcgagctcgacagtgaggaagttgtcggagctaagtgcctagaaagaagaaaccatggaggagaaaagagaggagtgtgttgtgcagatgcttgggggagaggagtggcagctaggggtaggagtagaaaaatgtcccaagtgcaagaaagaggtcccatatttatagaagaaaaaattcagggtacgatttgagatattgcttaggggagaagcaaagatgtttacttagaagagatgcaaagaaattgcttagaagagaagcaaaatatggttt

SEQ ID NO: 73853 - DNA, 441 bp, Zea Mays
cgggtagatcggggtggccaacgcgatttgttgtcctcgacgttcgggacgtgtattggggaggaggatctgcgaaatctttttgagggtgaggagttgaagatgatgttgtttaattttcgtgaggcaggccttatcccgaaggctgagtcgatgtagcatgtttgctgccctcgctcgcatgttgcggtagtgagcgaaaacgctgccctcccccagctcacgacagagagggagggcaacaaaatgtgatttgtatttatttgtgcaatgtggtcggtggcccttcgctgtgtgtatgtaaactataacgactttgcttgttgtgaaatgagatggggacttcacttgctacggcaatgtgtgggtgcttatgacatgtacttggttgcgtccgtaggtggtttttgttcgaccgtgtcagatagcagagactttgca

SEQ ID NO: 73854 - DNA, 440 bp, Zea Mays
gctgacgtgtgtggtgggtgcaacactatatgcaaataaactagagtatactacggtgcacatatcaaagtcatcgcatacagaaggttaggaggatccacatcgatagaacaggatgacttggggatcacgcatataataaaaggtacgaggaacattaatgtgtaaagataggatggagtaattatataagagcacgccccctaaaagacggcatgcagacgtgacacaaatagttggatctatgataggtcaggaccatagaagcgtatgcatgtgacactatcatccctttggactatacaacgggtgagaacaatatttaatttcgatttcacacaaccaaccactagacaagggacttcaagacttatttaaaagccaagagcaggagagagatagacaacttgccttagtttaccactcagaggatagatctt

SEQ ID NO: 73855 - DNA, 811 bp, Zea Mays
ccgcggccgcggaggcgacgtccccatctccgcccccctcgctgccaacgcaaacgccttcctctaaaccaggacccccggctttgggcggcatcgcgaacacgaggtcttggtcgcagtactacggcagcggcttctccatccgcgtgcctccgtccttcgacgacatcctcgagcccgatgtaattaccgacctgaactgtttcttcactcctacattccatcgtcctcctgcggttagggttgctgggcgtcgcgggggtgcggaggagctcagtgtttggtttcgaatttagtgaatgctgactcattcagtccttccgcgtctcaggactacaacgccgggatgacatactacggtgacaaggccaagccccgggcgtacgcggcccgctttgcatctccagataggtaggtaggtaaggcctcactctactccatcaactgcggccattccagttctgtactgtacatcaatttgtgattacatttgtctcactttcacaaggatgctgtaggaaatgaattttggtggtgacgtgttgcacatgctaaatgcggagtgctctgctcctttgtttgatgtagggatgagctcatcagtgtggtgattaagccgtcaaatcagctcaaaatcacattcctagaggttataagagacttgccattttattgtttttgccagacatatgtaatcccccttgaatttatctgttctctgcaatatatagtaaaaaatgacctggcatttcataacaggcctcgtgatatgtgttctcacatcagcttagagcattctcttgtatccttg

SEQ ID NO: 73856 - DNA, 1044 bp, Zea Mays
tgaggccaggcttccttttcctctgcgcgctgcctgccctggttcctctctgttccaggcgattctcctctcctcctctccctcaccgacgacgatcgccggcggccttgctccggcgtgctgctctgcccgtgctctagtgcccgagccccttcctccctctggtgagcagactctcctccctatctctgttgtctctctgttctctcatcagtgaacttctcccaccctttgattcaatcactcaaattcactccaaaatcttgtgaatccaagtgcatgtatgtgtgcctagtactctattatacttccctgcaggttttgagctccctagggagggtttcatccactaaaatagccatttcaccgctattcaaaaacctcacacgccacgtgttcggtgaaatgcccaaaccagtcaaaatagctcaaatcgaccccaactttttccagcacactcatgctactaccagtaactctctcgccaaatttcacgcatatccgatatcccagagacctattacaccacctctttacatttatagcaatcctttttgagccgagtgccaaaaatattttttctctgccaaacatcaaaccaagtacatacttcactcatattcactcatatatacttatccataaagtatcagcttaattccaagtcatttcatgccccatttcgaatttcaaactctctatggcacaagtcaccgttcaaacgtcgttctcgcgccgtttgacctctgtttctccaaatcactttgtttctatgtcataactctctgtgtatgtatttattcacatttcatatacttatgactatgtgactaatatgtgctcacctcttctgtcatttcagtgatctcacctgctcgcctgcatatctcctgtcttgcttggatcttttctctctcgagaagttcccaggtagccataactctatttgtggacttacctactgctctctactctcgcttatcttttcactctatcttgcagcagtcagttcaggatggtgagaacaaagaacgtcacaccgcc

SEQ ID NO: 73857 - DNA, 412 bp, Zea Mays
ccccgccaagcctacggttacctatgtgaatacagtacatctagaatcgtagtggtcagtgcagttgtgggtgagcgattgctcgccgtcacgagctgtcaccgcggagccgctccgcagcatgaacaggatccgagcacatccaattcccttaagtgatagctctgtgtgatttgctagaggctccgctacctagatttcgagttgggggtaggaatcggggctctggtccgcgattgggtgttcctccggcgatgctccgccgtgtgggtggtatgcgccaccgtcggatgcgccaggggggaagacaagtcatcggccgcggattcgtgaatggacggttaggattaagtccatcatacccctttggtcaagagtatctgtgtccttagatcgtgatcggacgttccgg

SEQ ID NO: 73858 - DNA, 541 bp, Zea Mays
gacgtaccgtcgggccatccctaataaggttacaatccttaacaatatcatagaaacaacactataggatatttttaggtcgtgacaacctgagaggcatgattcactaagcaaatctgatcccccgaaatgtgcaccatcactacttctgcttctaagcattcaaggtagccgaacgtgaggcggtgagtgtctggcggtggtggcgaccaccttaggcagctatggtcgcctttcatggcactcatattagccctatgttcctagggtacgatattggtctaggcacaatcctatacatcaagttatgatggtctagacccacaccacactagaccttgtcatacttgtaccagacaaaaaacatgttttggttaaactatcctacttcaggctactatacatcggattatggcagtgtcgaccacacaacacgagaccatggccctgtttggttacgcttttctcccccacgcttagatggttctcacgattattttgactctcgcatattagtttagtaggtgaaataataattgtg

SEQ ID NO: 73859 - DNA, 394 bp, Zea Mays
ttggaagcaacatatctttgattccattcatttttggtctaaggatcctatattaagtttgaagactgttggttagtgaacaatctttattagtgaggatcaccttgttcttaacacgaatcaagagaaagggagggtgaaagggggtcggtttagtaaagcactgaagatcagaacaatgaaatatctgaagaacgatgacaaagattaggggcactgtagaattggatgtgttcgagtgatttggggaaaggatcgaccacggggagataacttcggacgtgtcacgactccgcgaacctagccagagcctggctagagatatttcaccggcggtcaccgtggctcggtcattccgccaccgtgtcactcgtacctcgctcctccctcactg

SEQ ID NO: 73860 - DNA, 400 bp, Zea Mays
cccgcgtcagatcgacgaccaaccgttgatgggattcatcaccaaaccgtcaagcccgtaaagaaatccccagctactactgcgtgtgttcgagttttgttagttagttagtgttcgcataaatattgcagtgtgcctgcgatcttcaaacgcctataattggcggttggtgagcgatctgctatgccattccatgcatacctgaagcaacgcgcgatcgccctagctagttgcatgcatgccacgggaaaactagctagcaaagtcaacgcgattacggtagcaatgcgaaataaaaggtcctataattacgataaccatgcaaaaggtcgatatttcgacggtgtcaatcctgaccctccttgaactcgaggcgtcatttggtcaaaactcgatcgcg

SEQ ID NO: 73861 - DNA, 282 bp, Zea Mays
gtttaacaaaatatatcaagaacaaacattcaacaatccaaagtttactttgtctatttaatgtttaacgaattttacgatgaacaaacatttagcaattcagtgttcaacgaagtatagtaggaaataattcatccattaaatgtttagagaaccaaatttgtcaccacgaaaaagatattgatgggtcgaggtcgaggtcgagagtttgttgctgtggtggatgagtgaaggcacaatagtgaagaattatggacgttgggtggtgcgggtcggcgtggc

SEQ ID NO: 73862 - DNA, 400 bp, Zea Mays
cccacactcgccccagccggcgaggacaacaattcccgcttgccagccccgtccacacgaaggcgaccacctcccacctcaccacgaggacgcctatcacctcgcggcaactcactcacccttcatttggccaccgcccttcgccgcctatgcccaacactcgcactcagaagatcctcatcacaaattacacgcggtgaagcctccgccgtagccacatgcaatgccgcaaagtaatccaaatcctcatccgaagactcctctgtccacacaatcgaactcccggaatcatcagactcaaaacacttagacacagaatcatcagaatcgtcttcatcaaccacggtcgaagcccccacaaaattatcattgacagtaacgattgcgtgcgcaggcccaa

SEQ ID NO: 73863 - DNA, 364 bp, Zea Mays
ccggggtgcatgatgtggttgatccgtatgaacgacgagtggctttgtccgttgcatgatacgctcgatcggtctggtctctaccctctccagtctctacacctgaatcgcgctagctgtggcttcatatctctcttcttggatcttgatgccattacgataccaagtgggattgtgcgagcagaaagcgcaccgccacccccactacatacaacccacttttgccatgccaaacacgacgtttggctgcctacctttttttcttcttcttctccgtagagccatgctgctgaactttgctgtttgttgtgctgatcgtgcatgcaatcagcattccctcaaacgctcggagcccaacccctgg

SEQ ID NO: 73864 - DNA, 532 bp, Zea Mays
atatttggcaaagccgccagtgcttaaagcatccaaggcgggagtgcctttcaaattgtatattgcagcacaagagaaggtaatcggtgctgttttaatacaagaacatggtgggaaagagagtgtggtggcctatttaagccgtcgtctgctggacagcgagagcaggtatgtgttcattgaaaaactctgtttatccttgtactttgcatgcactaggtttcgacattatttgctctcaagtacttgtactgtagtatgtcaaacggatgtggttaaatatatgttgcaaaagccgattcttagtggtcgagtcgggaagtgggcatatgctttgatagagtatgatctaatttatgagtctttatgttctatgaaagggcaagttatagccgattttataactgatcatagggttgatgtagagcataaaatctcatgtcttaatattcgtccttggcaattattttttgatggttctgtgtgcaaagaagggcagggaatcggctatgttttagtgtcactaaatggt

SEQ ID NO: 73865 - DNA, 618 bp, Zea Mays
agcgtgagcatgtcgcaccgacttaaggtgtttccgacttaagccgattgctccgttagtagggcatagtgatcaccgtgagtcaagtaagtgtgagcatgtcgaaccgacttaaggcgtttccgacttaagtcgattgcaccgttagtagggcatagtgatcacccttagtcatgtcatgccgatttcgagtcgagcccaatctaagtcagttgtcaatcaagagtttgaatgcctttggaaaatgaaagttttattgatgatgaaatcttctggttacagagtacaactttccttcaagagtttttgaggcatcgctaagggtagaactttctgaggtgttcaatgtttcacgagttccccccttctatgtcgtccatttgagtaagtcgatatgatccctgtcgtgtgacctctgctacgatgaacgatccttctcatggtggtgacagcttgtgttgcccctcccccgttagaatttggcggaggaccaactctcccattacaaaggatcggtgccgcacaactttgtcgtggtagcgcctcaaggtctgctggtacctggccaactgaattactgtgttcaatcgttcttcctccagcacatcaatgtcttcc

SEQ ID NO: 73866 - DNA, 730 bp, Zea Mays
ggaatagccttcttcaattaggaaacatagaatactgggtgcacactggttgaagatggcaaacccaatttataggcaacaacacccaccttggccaccattggaataggatcgaaaagcgaaaaaccaattttaggttagctctaggtgcaagggacgactgaacaaaaggttggattttcagaaacaccatgtctcccactgcaaactgacgctatacacgattcttgtcagcttgtgttttcatatggtgctgggcgggagccaactgttgttgcacgagctgctgcataacagtcttctcctggatccaatcctgcaagggaggagtcgggcacacaaaatggatatcaaaaccaaagtgacgtggcttatacccatagaggacttcaaacggtgaaaagcccagtgccgacttgcaactagcttgaaaccaaaactctgctagatagatcaaatgcacccatttatgatgacaagcactcacaaagtagcaaagataagtttccatgcactgattcacacgttgtgtttgcccgtacgtttgagggtgatacacactactcatctttaaggatacaccaaccaactcaaacaagctcttccacaattgactagtaaaaatttgatctctatatgatatgatagcaaggggcaaaccatgcaatctatacacctgctgcataaacacatgggcaatcgtggcagcaacgaacggatgtttcagagg

SEQ ID NO: 73867 - DNA, 671 bp, Zea Mays
atgctgccggaggacatccataaaatgtccgtacccacgacagcctctacagtgttcctggtgatgtcgttcggactgtgcaacgccccgacaacattccaggctctaatgaatgatgtattgcgcccctacctttgccagtttgtggttgtctcctttgacaaaattttgatacacaacacctcttgggcagaccacctatgtcatctccgtgccgtccacgacaccctctgctagcaccgcctctttatgaagaggtccaagtgctcatttggcgtcggctctgtcacctacctgggccacgtcatctcagcggagggtgtcactatggatcttgcaaaggtctaggccatccacgactggccccaaccacggtcagcgcgggccatgtctggattcctcagcttggcgggctactaccgcaagttcgtccacaactatgacaccattgtagcacccctcatggccctctagaaagaaggaggggttcgcatggtctgacgaggcgaccactgctttcagcgccctcaaaggggttgtgacgtccgcaccagcgctgacattgctggacttcaccaagcctttcattgtcgagtgagacgcatctacccatggcttcaggatcatactcatatcagaggctcattcgatcgccttcttcagtcgacgcc

SEQ ID NO: 73868 - DNA, 591 bp, Zea Mays
gcctccccgccaaattcaggcaccacggccggttcaatataacgcggccggtgggtaagaacctttaattttttgccctttggcataggctcgtctggagttgccgatgtagcagcttttctcttctttccatgacctcgcagcggatagcggtagtcgaggtaaacaaagccaatggcatcaaaaactctgttcaatatcttttttcctcggcctccgaaggctgtggataatgcattgtcttctgccttggaatatgatccaagcagttcatcacttgtaacttcgatgcattttagccagtcatcgtttggttcatcgaatttatccccatatctgaatgtgtacttcagccagaccagttcaccttcactagattcggtgatggtctccttcggcatttcccagctctctacaagcagccatactctgaatgctatgtgctcttgaattaaatctcttgtaccaataaagaagcatacagtaccaaatgccttttgacatgcttcggcggcttcgtcaatttcaaccttcggccttcggaggccgaagcgggaccaaatagggcgcataataacttccttaatatct

SEQ ID NO: 73869 - DNA, 410 bp, Zea Mays
tatggaacgtcgtttccccatatggaatacgatacgtccgtctctggtagattattctcgtctgcttgattatctatttgtcttccagtcactagccagcacagatattcaaaacgacgagccttcggattctcgcgaaatattcaaaacgacgttcaaacgaatcatccatgttcagactagggatgggatgttgccacgctacgttgtgagcgatggaaaagtacaaagggcaacggtagttctgaactttgctatcgacaccgtgtcaacgtaactcattttacccatttccacttccaaaggagtcaattgatccatattagttttctccaggtttttaccgaatcgtgcaaagcacatggtttccctcgctgtaatacaaagtgaaactttacaagggagcatat

SEQ ID NO: 73870 - DNA, 591 bp, Zea Mays
gcaatatttaaatgtctcgttgagaggtatgtcatgtagggtaggtaaaaaggataggtatgcaaaggatctgcaatgttgaacacaagaggtaagatacgtggcaagaatagttagaaatggaaaatcggtgtcaggggaaagatccctgggcccatgggccccctgagtcagcaaaaggacgagggaaatgtccatcctcgaatagtctcgaggcacctagcccaggatcgagcaagacggagccagaagggagggtcagatgaacctagaggaagccacccgagttgattccacgcctgacctcagactgatccatcataagtgatcgaccgcattaactacgtctagcaccgagccgcaacgggagagtcgatcctcctactcatgacatatggacccctaggcctatgacccactcatgacctatcaaacctagacctaaatgcacttgtcatctataggacctgcaacacgacgagccacgccaagacccaggctacgaaggccaggggtcgacatggtggcacaaagatggtaatgatggtgtcggagctctttgccgcccatgcagccagtcttaaagagcac

SEQ ID NO: 73871 - DNA, 546 bp, Zea Mays
cactagctacgctcctctgccacgacaagctcctatctacccagtggtagtagaggaaggtccgttggatctccctcgcattcgagtggagcatggagtcatcctggaggacagctcagaggaacttctgccgacgcccaccccgttggtagtcactggccttcgcagctaggtcatcaacttcggcaccgcctgcactagccattcaagctcctgcacccggaggcgacgacctagatgactctggggatgatgatgaggataacgacgacgaagatgacgaggaacacgtcaacgaggaggccaacgatgcccaacaggactacttcatggggtttgggcctgtcgccgaacattacacatcaatgtttgagacagggcacttccccaacctgctgcaagacgtgctgcacacgttgggaacctacgtccgacccttgtacgaaacaagacgagtgtgtgagcctccccaggcttgctactacatcactcgcatccacgtcagggtgatggatacaggggatagggggttcaggactctatcag

SEQ ID NO: 73872 - DNA, 621 bp, Zea Mays
tcattcacaagcccaaataacgttttcatccactagttgtactctaataccttctcatgtgaattgaataccctcgacatcaaagaaatgtcatttgtggtttaaaaggtgatatattgttttaaattgtttatagtccaaccttttagcaactgtatggtggacaaaggtgccttacaaccttaacatgtgtttggaaagttctctcacacaatttggctatattttccatggtctttattttattttgagaaacgatgtggcataatgatgtgtggtgtttacttgagtggacataaataccatcttagtatgccttgaatataggggattatggcaaacttggtatcacaaaacatcattagctagcccaataacgttttcatccactagttgtactctaataccctctcgtgtgaatataatgctcttaatatcagaaaaacactatttctggtttaaaaggtgatctattgttttgaattatttatattccaactttttagcaattgtatggtggaaaaaggtgccttaaaaccgtaacctatgtttggacagttctctcatgaaatttggctaaatattccatggtctttattttattttgagaaacaatgtagc

SEQ ID NO: 73873 - DNA, 823 bp, Zea Mays
acgtagggtggttggttggtttggcacctgctgcttgaattcgctttcgacccgccctgtttccatcgtccacactgctgctctcaaggcaacatgacatgaacaacacactcgtagtagcttctctccgggaggtagaaaatactccgtattaaagtagcatgatgattgccatcatgcatgctcttcaatgccggaaggaaaaggttgtgagtttgaacggcgacgtggtgctgggggctgctaatcatgggggccgcgaaggcagcagcaggatggagcagcaatgagagtatggtgcggaaaaagaggagcaggatggagctggatctctcacgctcgccctgattccggttccaacacgttcgttgcctgtcctttcgtttctttcctatgcgtatcgtatcgaccacttgcttgctagggttgccacgcaccggtagattttgacgatgcctgtgttcgcacttggcacaggtgaagttaccactagctaggaagccgatgatggagatagacgctaataaccgtcaaaatccatggagagagagagacacacacacaggcatcgtcgtcgattccattccatgccacggattggacgctaataacggtatctgaccggtcggattggaacttgaccttcaacttttcttatctgtgcttctctctctccctaaataataataaaaacaatacaaaggtagcttgcataaaaagtactggctatagcgttgaataagaccacagcttgtttccagaccggttcccagcaggaaattagggttaggacatgtacaacctagacactgctgcacgacct

SEQ ID NO: 73874 - DNA, 405 bp, Zea Mays
tagaaaccatccttgttccttgactaatcttatcttggaaatcaaaaagttgtgttcgctcttcatcttaatgtcatacaagccccttatgcagtctatctcactaactctttttatcctctgactagatgatgaaccccaatggaaatgaagtaaatggtgccaacgacaatattcctgccttaacaactatgaacgagagaaatgagtcaccaagatattcgatgaatggaatgaagaacaacaaaaggaatagaaaaatgtttggatacatgattagtccaccgcaagcaaaagccacgaaacacacggatacccaaacagaagaatcaagtcaggctcagctatatgagatacagacacccagtcaaccctcaccccctgttggtcaaacaaagttgactc

SEQ ID NO: 73875 - DNA, 717 bp, Zea Mays
tatggatatcacatgacgcgggttaaggatgaataacaaacctctaatcacctaggctctctcaatcctcgaccacgaagggttagggactcgagcatcttcgtcttgagttttggctaacctttgcctacattccgccttgcccaacccctgaccatgaaggggtcagggactcagtcatctctgtcttaagctcttcctgtctcaaccccgagggtgagaacccagagacttcacccgaccacccgagcgcgggattcccatgctcataccgactcaaccactacgaacatgggacgtgtgagtcaacctctgacacgatgcagaactagaatgatagcatgggagtaggcgtgtcagaatggatacaccacttctcatgacgtggagactaacaccaactcaaccactcccgcatagcaaagtcaaaagtgaccactgactagcccaatgtgtgatgtgacagaacataacactcgacgataggatgactctcgcatggttgcagtgctaggatggacagaggtagacaacatccatagtgtcacttgatcaatagaaatctcaacgggtgataaagtatacaatgtcgcctggccactacctgtttcacccaaccctagcctcttgtaacaaggctcgcacccactttaacctatataaaaggatgtgagaggctcatgctcaattcaccaatcttgttataacaatcatcac

SEQ ID NO: 73876 - DNA, 703 bp, Zea Mays
gtcgggcttgactcgactcccctataatggcgacctgctccttccacacaacattgacgtgatgcacaccgaaaagaatgtcgccgaggcactttgggaaacaattatggacattcctgataagtcaaaggataacgtaaaggcaagagtggatctagcagcgttatgtgatagaccaaaccaagagatggagtcgcctagtggtggaaagtcttggagaaggcctaaggccgattttgtcctcagcagggcccaaaggaaggaagtactatagtggatcaagatgttgatgttccctgatgactatgcagctaacttgagtagggggtgaacttatctactctgcgagtcttagggatgaagagtcatgacttccacatatggattgaacggattcttccagtgatggttcgaggttgtccctgagcatgtctggctagcgcttacaaagttgagctagttcttccaccagctttgtgcaaaagagttatctcggaccgtgattgcagacttggaaagattgacacccgtgttactatgtaagcttgagaagatatttccacccggcttcttcaatacaatgcagcattttattcttcatctctcgtatgaggcacgaatgggggggcccgtgcaaggacgttggtgctatccaatcaagagatgtctaaagactattcgaaagaaatgtgtaaataaatgc

SEQ ID NO: 73877 - DNA, 605 bp, Zea Mays
gtgggttgggctgcgtgctgctggcacatcggtaggaatggtgtactgtagcgggggcggtctgcctgccattgccgtttggtcaggcaggcacctgctctcgcagtctcacgtgcgcgtgggatggttgggttgcacacacagctgctgggcatggactttcagtgagtgagcgttcagttcagcaggtgccaactgccaatgcaaccccgtgcattacctgacccatagcgatatcatactgcattgcaacccgtgtccgtgagtgactgaaagtactgtagactattaccactacgcgctgtggagctcctcgattttgtctagtacttcagctacatcaatacagtaggggagtgagtagtaataggaaatgtcctgtctttagcctcccgagaagttgatcagtggccacctcctccccgtttgggaacagtgacaggcgcaacgcaaggcaagcaacgcgggaatctccgttcgtcgtatcgctgggaaaaggggattctctttccttccacctccgacaaagacacagcccccttcccttccccagtccccctatcgaggcacacgggcacgcctccccgttgacgcgcagcggcgca

SEQ ID NO: 73878 - DNA, 273 bp, Zea Mays
caagtttcatttcttggtcatattttgtcaacggaaggagtatccgtggatcctagtaaagtgaaggatattctagaatggaagccacctaccacagttcatcttgttcgatgttttctgggcatggcaggatattatcgtcggttcattccggcattttcaaaaatctctaagccaattatagaattgctgaagaacaatgtgaagtttaattggatgccagaatgtaatgaagcttttgaaaagctaaataaattgctaactacggcaccg

SEQ ID NO: 73879 - DNA, 588 bp, Zea Mays
ctcttccaccggctccttcgccgcctcaaccattaggtttgattgtcttagcaactattgttgcacctcctccatcacctccatcttttgtcaaccgatccagctcaccatcaccttcttttagcgctcccccttcgcttcgactccacaaccattgcctccaacaacaaccgagattacattgagggtttgatagctcaagccattgtgaccaccctcaggacaagcccactcttcgagatttttaggaaatcaatttgtagatcaccgtcttgccaaactcgaccaaccccttcgaaacataatgacaaacaaatccgaaagaataccacaaccacaacaaaccacacccacaccaaggagaagctttgatatcacgtgtgttgcctcgtggccgtcgtcgagccaccgtcatgtcgtgagctcgttaccggtttgccgtcaagccagcaagtgagcaaaacatgagctacaagttgttacaaatatttttctctatttcgatatcgtaaacgcctaagacgttatacattcctgtgttcccgtctctcttcaaccatcaagcgttatacctatgttctgttttca

SEQ ID NO: 73880 - DNA, 407 bp, Zea Mays
ttcggccgccgcgtgcgttacgggtgaggtgagctgaataactgcgtgctcgtgggtggattcgtgggccccgatacacgtactctgctgggcgaaatctacgcgaaggcccatggaccgacacgtggattactgtttcataaacggaaacataagacatcgtaataccaatatttgtgaggggactagtacgactgcccagattgtgggaacacaattttctcgtgggcccggatgcccgaaacatgcgcataccagaagtgtataaactgatacacaaattagcataacacgtaataatatttgacgtaagcaggtgggtacagtaagccaaaaagtgtacggtgcagtctgcgcacctggtcggtgggtggtcggggcttccaatagttatacagagcccaagg

SEQ ID NO: 73881 - DNA, 1297 bp, Zea Mays
ccttgactgaaggcatggcctcgggtacgactccaagaacaggataggaatggggtagttgggtcttagccggtagaatccaaggttgatgtaacttctctcctcccttgcactataaaagggaggtagagtaactgtttaaggggtgagacctaggggattggatcagatttggtcaattggggttctagattccacaagattaataggggttggttatgcccgagttgctacgtcatactcttacacaagagttcaatctacactgaggatagacataaaggtggactagtacaatgcccgtgcattgcgacaatatacctatcatatttgatggtatagtgcaacagttgtacgacacccgagggtccagtggcaagccagttcgatggactctccccacaaaaaaataaatttaaaattaaagtggagtagtggaccctccccacaaaaaattgatttaaaattaaagtggatatatggcccacataccggatattaaactacaaatactgcattttatcttagctaaaagggagaaagttgagttgaaaatgagacctggcctttttttatagctcacttggtcgctcgtaaactgtagatactgcattttatcttagccaaaagggagaaaggtaagttgaaaaggagacatgtccatttttatagctcgcttggtcgtcctccttcacctagagacgtggtactatccgggagcgctgcgctgtgtgtagcttcgtgtcatatgttgggcttgagtgtttttctcactacctatctgagaggtaacgacctgtttgttaagcgagacatggggagaaaaatagatctactctacgcgtgtgacgcacgacgcacaaaactcgtgttttaaaggagtagagattaagactattagtccattaggctagaactcccattacaactacaaggtgagggagtgctagtatggacagctatgtgcaagcttgtaatctacttcacatttgtgttcatcaatcaatgagaggatgtagagtattcacaacctgaacctctctaactgtccacatgttggctcctagtcgtgccatgtttagcacgaccgccgacttacaccccgctctcttccaaaacctatcatttcatgcaactacattattattgatacattgtgtggttgtgtggcaaaaatcgttgtttctgtctggcttgttgagtatcatccgctttatacattttgcttgttaatcaagaagtatccaaaatttagagtttccattatcaataggacacaatggtaccctaatacggc

SEQ ID NO: 73882 - DNA, 599 bp, Zea Mays
tgagttcccaatttccgtgccatccatctgagtgagacgatatgatcccggccgagtgacttttgctactatgaatggtccttcccataggggtgacaacttgtgtcgtccctcccccgttggaattcggtggaggacgagatctcccactgaaaggatcgacgtcgcatggccttatcgtggtaacgcctcagagtttgctggtaccgtgctgattgaattaccgtgttcagccgttcttcttcgagtacatcaacatcctctagcctagtagcctcggcttctgctatgctttcaaagatcaaccttggcgccccaaacttgaggtcagcaggtagtactgcctctgacccgtagaccatgaagaaaggagtatttccatgcaaagctcgactaggttgagttcttaggctccaaacgacgtagggcaactcccttatccactttcctgcaaacttttcgtttttatcgaagactttcttactgagtgcctccaatatcatcccgttagctcgttcaacctgcccgttggctcttgggtgtgccaccgaagcatacttgatctgaatgctcttttgctcgcagaaatcgaagaactc

SEQ ID NO: 73883 - DNA, 742 bp, Zea Mays
cggaaattgggaactcatggaacatagaacatctcaggaagttttacccctagctatatctcaaaagctattgggacgacaatgtattctgtaaactagggaatatatcatcaataaaaagacttcaaaggcactcaaattgtccactgtcaacctgcatgcttacttaactcgaggtgaccactataccctactaacggagcaatcggcttaagtcggcaatgacttaaggcggtgcgacatgctcacgcttacttacctcggggtgaccactataccctactaacggagcaatcgacttaagtcgagaatgacttaaagcggtgcgacatgctcacgcttacttaactcggggtgaccactataccctactaacgaagcaatcagcttaagtcggcaatgacttaaggtggtgcgacatgctcacgcttacttaactcggagtgaccactataccctactaacggagcaatcggcttaagtcggtaatgacttaaggcggtgcgacatgctcacgcttacttaactcggggtgaccactataccctactaacggagcagtcggtttaagtcagtaatgacttaaatcggcacagtacactcgcgtctacttaatccaacacgagcacatttgcaattactcatcttagggcgacctctatgccccgcgaaatacgaagacatttcaaaaccatcatactgcatttacttatgcggttatagatacggttgtattctaaca

SEQ ID NO: 73884 - DNA, 526 bp, Zea Mays
atagaaagaagagggtacgtatctttaattaatttaaacaataaacctgtggacaagcaatataagcaataatttcacccaaaaacatgtttttaattactaattgtgtgtaatagcatatctctcctgttgtaaaagaaatctatgatgttatatataaaaaaggccattacattacaactgacaaactatagtagaaattatgcaatagcaattccaagcaaagaaaaataaaatgccataagaaccaacgaagcaaagagaaagatgtcaacaaatgtgttccggaaagctaatcacaaaaacttgtaaaagagatgtgcgaatgagcagcatggacggtattatgcaaacagttatgtctgaatctcaattggaaaaacacaatgctacaggaatgagcctttttaaaacatattgcagagatgaaaccaatgtttatagttcgaccaataattcagttgatgagcagtatgatcaatattagttgataaacacaatgtcaaaggagtcaacataaacataa

SEQ ID NO: 73885 - DNA, 610 bp, Zea Mays
gaatatcacgatctttcgattgaagaatggaattttcgggagcttctacaatccaaaaatgctgaactgctacaaattcagaaaatctattggaaacaatgggcttccatcaattgggtcaccaagggggatatttgctctagattttttcatgctcacgcaacggtaaagcatcagcgtaattcaattgcgctgctctctgatgataatgggtcattattttcagatcatgacgggaaagctggtcttctgtggaatgtcttcaaatgtcgcttgggttcttctgacttttcggacaatgttttcgacctctctagcctaatttcgttgcaagaagatttacattggttagaggagcctttcacaaagcaagaaatcgacagcattgttgctgcccttcccaccgacaaatcgccggggcccgatggattcaacaccaattttctcaaaaaatgctggccgatcatttctcaagatttctatgacttatgtgagcaattttatcagggggatgtctgtcttcgaagtattaatggttcttttattgttctgattccgaagaaggagaatgcccaattggtgggagattttaggccaatctcacttctaa

SEQ ID NO: 73886 - DNA, 327 bp, Zea Mays
caaaaaaatcctcccatttgttggctaagctagatgcaaagttggatcaatactatggctaaccagaagctaaatgatttaggatgattttgatttcatgatggctaaccaggtttaacatttggtaataccttgctagtaacaacatacttattgagcactacactgataatagcaaaaacttgtctagatattgacaagccctaaacagagctcatctttttaatcaatttcttgattgtgcaaaatgttaggaacaccacaaagggcacaaacatcatatattcagacgcatgtgatttgtgtatcaccaacaacgtaaacaaa

SEQ ID NO: 73887 - DNA, 469 bp, Zea Mays
ttagttgtgcaattagatttaatttaatactcattattagcattcaaacatctcatgtaatcacttctattaaaacctgaaggagattcaaccgctatccgcattccgtgggcctctagccaccgtcctcctgacacgtgccactagagaaaaggtgaacaacaaaactgacgagtgcgcacgcggacgcgaaaactccctcacggacgcaaaatttccacccacaggccacaaccataccacacccctctcgaccccatccttcacctctctccgacgatgctcgcgccacagcccacaggctccttccaatctcgacgccgagcatgcgtccccggcgtcggctgggctaggccgtcgtgcctgcccacaacattaaacaatgtcactggtaacgtcgtcacacactcacactaacgccaccgccgtgggccatggttcggaccagagcccaaggcatgaccctaac

SEQ ID NO: 73888 - DNA, 697 bp, Zea Mays
ttggattggaacatctttaaagtcttaaaaaccaagagtaaactgggtcattatcgggcttatataggcacacacctttacgcttgctcgtcgacagaggactccaacaaaaaatgtggctgcctaccaacaacaccaccaagcacacaccttttctcctcttctcctgacagagaataccaacaaccaagaatgttgctgcacttgatcgaccgcgcgcgccgagttgaagacctacgggggagacttggaccttagatcgaggctgcactgcagcacctagaaatgtttagtcaaccgtgatatccatcatcctgtggagaatctctggatgcgcaggaaagttttagggtctgcaatgactacgatgcctctgctagacaaatcctcaagaatgagtgcagctttggtggctctctagtccaaccgggcttccattgcaacgcagctcatcacaccgtcccccccttctttcattatttcaagggttttactgattgtccactgagcaaactgaatcagtaaaaaaaaaacttaaagcgcgctgttaacaattgggattaaataaatttccttgaactaacgtcgaaccatgcgccattgccttgagcaagaaaaaacagtctaagttaatccaccagtttcaaactatatatagttcacctcggttttcttctatgtcaaaactcaaaactcc

SEQ ID NO: 73889 - DNA, 759 bp, Zea Mays
ccgagtcttcactgagaggacaagtgacgaccaaggcatagaggactcgagccgaaatgcagtggtgtccagttcatgaatgcaactggagacgagcgccatccggggagtacaggcggacacttcccccaaatgcaaaacaccaaggtggtcgcatacgaggtcgatggccacggacagattagagtgctcaacgctaagggcccagaggtgctccttcgcttgcgcaagctcctccagcaccatcgttggtaaaaacaggaaaacccatcagcgaactattgtgactaaaaggatcgaaagttggggatgggagagtatgatactcaccttcagtcaaggaccccggcatggatccatcgacacaactgtctgacgattatgtctttaggagatctagctgggccgttgggaggccgttattcgtctcgaccatgagatgattaggccgtgccaattgaccgaacgctgaccctactgccgcaaaacccctctatggtgggacttcggacggcgacgcgagacccatgcctcctgaaacggctgagtcattgtcgaactgctaacgcctgggttcaggaaaactaaacactcccccgacccccacaaggcagccgcacacctcagacgctgtgcatggaccatccttgtccttcgaatgtgatatgccccaacgacggggaggtcgcatctcctccacatgtgacagttggtgcagggagtcgacactcctaggatgcagttcgatgaagggatggc

SEQ ID NO: 73890 - DNA, 632 bp, Zea Mays
attctaggaattgtttttatattaaaaactcattttctaattcattttcctgattttataactctctggacggggcctcaaatacagagaagtacaggggctacggtgcaaatatttctaagattcagagagtccctggtgtggacggcgggttgttttctgttttagtcagggtctcattagcaattttgacacggcgaaggtgtatgcagtgtttgcagccgttagatccgaaaccgtcggtctagattcaaaaccctaaaataaactctcatctgcccgatctaaatcggacggctctcatctccccaacctgaatcgatacacccggagtaatctgatccgcccatcggccatccaacgacccagattctattttacgaaaggataccctctcttctaatcacagccgctaattctagattctacggtcagcggctatcttctctctctggtatgtcgtacgacagcgcagagctccccacggcagcgctccatggccggaaaaccttagcagagactcgactgcaccattctagtaacgattcggtgctacacctagaggagatttaggctaactgatgggggatcaatacatcggctaccgtgtgccccccacaccgatgccccca

SEQ ID NO: 73891 - DNA, 782 bp, Zea Mays
ggaaattatccagcgccccatctggtctcgctacggccttcgaaggccgaaggtggctattgaaagtgatgtcgaagcatgtcagaaggcttttagcaatgtctgtgctttcattggcacaagagacataattcaagaacacatagcctacagagtatgaccacttgtggacagctaggagatgccgaaggagactactgctgaatccagtgaagctggactagttcgattgaaatataccttcagattcagggaccggtttgacgaaccaaatgatgactggttgaaatgcatcgaggctactagcgacgagttgcttggggcatataccagagtcgaggatgatgccttgtcctcagccttcgggggtcggggcaagaaaagattgaatagggtttttgatgcaattggcttcatatatcctgattactgataccccttgagaaggcaaggaaaaaagaggaaaattgccgcttcggccaccactgctgtgccgaagggcaagaaaataaaggttttgacccagtgacctcgatatattgaaacagccgtagtgcctaaatttggtgaagggacctcctccgctgccgaagcaaaacaagctgcttctgccactcagagcgttgaaggatcgattgtagtgccgaaggtgcctatagtcgggccagccaaagccaaagatgatgcgaccagagagtcagaattggaaaaaacaatgataatgccaaaaattctgagcccactagtagaggcagaattgccgaaggtaacaaaggctcccg

SEQ ID NO: 73892 - DNA, 631 bp, Zea Mays
gtaattcagcgatgtttttcccgctgagatacctcctggacttcctcccattcgcgggattgagcatcaaattaatttgattcctggagcaagtttgcctaatcgtgctgcatatcgggcaaaccccgaagagactaaggagattcagcgacaggtccaagaccttttggaccgtgggtatgtacgtgagagccttagtccttgttctgtacctatcattttggtcccaaaaaaatggtagttggcgcatgtgtgtagattgtagagccattaacaacatcaccattaggtaccgtcatcctattcctcgattagatgatatgcttgatgagttaagtggttctaaatggttctccaaggttgatttgtgtagtggttaccaccaaattagaatgaaattgggcgatgaatggaaaactgctttcaaaactaaattcggcttgtatgagtggttagtaatgccttttgggttaactaatgcacctagtactttcatgagattgatgaacgaggttttacgcccctttattggtaaatttgtggtggtttactatgatgatatcttgatttacagcaagtcattagaggcacatatggatcacgtatgtgctatttttggcgctttccgagc

SEQ ID NO: 73893 - DNA, 393 bp, Zea Mays
taacgctgttgttcacagatcagaggagggtcgaggagattgcttgggactcggggaggttgtacttgtcctctttgagcacaatcgaggacaggggagccagcgatttctcgccattgactcgacatcactgcagtgctgcaccatcacacggccaacattgctcgggccatgttcgacggtacggagtgttcgattaagttccccatttactctgcattatgtataactctttgggttggagatcggaacaccaaagcgctcgggcacttagcaccggtgaggacacggccagggatgctgcacggtgccgtcgctagcttggggttgctcatgtaagattgggaggtacccctttgcccaatagataagtgtcgttggaagcgatggaga

SEQ ID NO: 73894 - DNA, 599 bp, Zea Mays
attgctcaattatttattgatcatgtttacaaacttcatgggcttcctcaagcaattgtgtcagaccgtaatccagtgtttaccagcaagctttggcaggagctgttcactcgggccggagtcagtttacacatgagttcagcctaccatcctcagtccgacggtcagacggaacgagtcaaccagtgcctggaaacgtacctcagatgcttcgtccacacctgcccctccaaatggattaaatggctatccctagcagagtattggtacaacaccagttttcactcatctctgggttcttcaccgtttgaggtcctctacggtcaccagcccaaccatttcggcttatcatcggcagatgtctctgttccagctgatgtctcatcctggcttaaagagcgctctctcatgcaggctgtggcccgacaacacttgctccgcgcccaacaacgcatgaagaagcaggccgacaaatcacgctctgaacgccaattcgctgtgggcgacctcgtttatctcaagctccaaccatacattcaatcctcactgtccaaccgttcatctcagaagctgtccttcaagttcttcggaccatttac

SEQ ID NO: 73895 - DNA, 450 bp, Zea Mays
gtgaaaatttaaaacgttcagaataactagatcggcaattaatataaattgtttccccacaggtagataattcgaaatacatcctacaaataataattcaagctaatttaatagactgtaatataaaattagcaaaaaaacactacatgcatcagacaggcaatagagtgaagacaacaaaaaatgacaagcatggtatgctgaagttgactactattttgatcagacttatttaaacatcataccaagatatcacttattacattaactaatgcaagtttgggaacagtcggtcatttgttctgctcggatagtctggttatggtaataatcttcttttactacaactttctctgtattttgcataatcacatccacagtaaactcaaagttcagaaagagctaattcgcaagagacatacatggtagcacaacagataaattggatca

SEQ ID NO: 73896 - DNA, 530 bp, Zea Mays
tgtttccagtcgactcccatattgcagaagtgttatttgatactggagcaacacattcatttattgttgcatcatgggtagaaacacataaccttccaataactaccatgtcaacctccatccaaattgactcagccggtggtagaattcgagccgatagcatttgcttgaatgtaagtgtggaaataagggggatagcgtttcccgctaatctcatagtaatgggtactgagggaacagatgtcatcctagggatgaattggctagataagtaccaagcaattatcagttgtgataagaggataattaagttgatgtccccactaggagaagaagtggtagccgagttaatctcacctgagccaaggaaaggaagttgtcattagatggctattgatagcaaggagccagattcactcgagattatcaaggttgtgtcagaatttctagaggtgttcccggaagacttaccaggtatgccacctgagcggaaagttgagtttgctatagagcttcttcctggcaccgcc

SEQ ID NO: 73897 - DNA, 380 bp, Zea Mays
caggaagaagctctatagcaaactcaactttctgctctggtggcatacctagtaaatcttctgaaaacacatctggaaattctgacacaaccttgataatctcgagtgaatctggctccttgctatcaatagccatctcatgacaacttcctttccttggtttaggtgagattaactcagctactacttctcctcctagtggggacatcaacttaattatcctcttatcacaactgataactgcctgatacttatctagccagttcatccctaggatgacatctattccctgagtacccattactatgagattagcgggaaacgctatccctcttatttccacacttacattcaagcaaattctatcggctcgaatttta

SEQ ID NO: 73898 - DNA, 672 bp, Zea Mays
tgctcatcggaccgcgggttctatttacgtaaaggatgagggttcatatgcaaaactgcagtcgcgaagaggtatcgcgaagtcctggccgcccgattcgaaacagacgcgccagattagatccaggcgagttacacatccgcgctcaaccctagccgtcggatccggaattcacgaccctgatttaatgactcgaaggggtacgccaggattgatctaagccatccatctaacatctacgactcccacactctcaaccatcgatctaatcgtgaccgttgaagatgagatcaacgatccgctgtccttcttcaacctctggctgcccaggcacagacgccgaccacacacaacccgctgccctctctcctgccattcaaccggcgctctgcctggccaagaccaaacagtggtcgccaccgtcgtccttcatcggcgcactggccccgagaccgcttcctacaagcaccagataaggcagcactgtgctcccacggcgggcatcgccatgccgccaaataccagccacccagcgcttgcccttgagtcgacagaggcaccccgacaacacgccagccccactggataccggagacacccccaggccccagccgcagcgagttgcaatacggtctctggaatacgcgctgagggaaaaatactaaaactcat

SEQ ID NO: 73899 - DNA, 632 bp, Zea Mays
cctgcatagcaaaacctatctatttgtccagaagacaaaagattctgatccggtcctggtacggtgaggaattccgaattccttctcttggctcttggctgccgggtggggcgagttcagattctgatcttctaatggactggtggactgggaaccaggggtcagcagcacctagcagggagccacacgatgacacatagcggcggcctttgagatcacggggaggcgccgttgggcatgggaagttgggacctgggagtgagatgtgcatcatcacctccatgtcggttgtcggacgtcgccgtcatctcctctgcgctggcggctcacgccatcacctggtgcggcatgggctactgctacgtgcactgcatgcacatgtaatgattggttgcccatctcctaagacctaggctcctcacaaatgttgaccgcacctgagttcgggctacgccccagcctgccgatgcacgcaaagccattttatgcttgttggtctgcatacaatggaaagtaacgagggagaccctgtgactgccggcaaccaataaggaggatactgatcgtcataacacatgttctttcatgaaatcagatggatttctctctcgcacccatcgtcagtaatttga

SEQ ID NO: 73900 - DNA, 460 bp, Zea Mays
aacgagcaaaattcacaaaaatttgctaaacgagatcgagttgttacccctctcctgatgctacccaggatgttgtccacatgatgatctctctgaatgccctggtgcactcgagggtgaggcacaagagaatatctctgaatttgatcatcactttcttcttgttcaatgacttcttcactagcattctcttcttgctcattttccacaatggttggcatatcttgtggtagaagcacttcttcaaggattggatgacttgaggttgatgggtttgcttggagggagggattttcaccaaccactctaacactcccatcaacgactctatttgtcatccaaattctcccttcatcatcgtccttttcttgtggcttcacttcacctattgcaagctttttgatggcttcattaggtgggatttcatttcctgcaataccattagaaacatgcccttgcg

SEQ ID NO: 73901 - DNA, 1007 bp, Zea Mays
gccggagctgggacaaggttttggcggcgcggcctcgcagttcctgggagccggggcccaagtaggttggtcgcagggtcaaggaagccagtgcctgaggaggttggctgccgggagggagaacctgggatgtcgagaggtcggtcgtgagagcctcgaaccccatcgctggtaggagggagaccggcctttcccatcgcagttgcagggagccaatgaggcggagagccagggaggtcggtcgccagaggcagatcgaggcctcacaatgagccagtgatgcagaccgccgaaggtgcaatcgtcatggggagtaggtgagtacgtgaatatcgcatgagtgtcagcggcggcctatgggagtgggatgctagggcagagagtaacattatatacctaaggttatacgggccatgtgttgggccgacatgccaaagaaggcaagaaacttgtacttcgaggctccatggggaacccgcgggtggggattgaaattcgccccacacttgttcctattcggggccccaaacctgtggatccgcggggataaacgtggacccgcctcagcacctatcgggtccaaaacctatgcggacctgccctgaacccgcctcgctgccatccctataggtgtgcggtctgaatgacagcgcgggagttggtgtgtcaggtcaaaggcgtcatttgccacgacgtggaccttgtcaacagaccaaccaccctgtcataggaaagttaactaatgacgatgagtaatccgctgcatgacaagatggcacataactacaaccataacttcgctacaatactctgacgaaagaaagaaagatcatccacagaagtccttcggttacaagaaacctagaggacaaggagctacgcgacaagacccgacccctcctcccttcgttcaacctctcgggcatacatgaaagtcaacaaaggacgatgggtaatctgctgcaagacaagacgtcacgtaacaacaaccacaatgtcgctattgt

SEQ ID NO: 73902 - DNA, 740 bp, Zea Mays
gaactttgtttcttctccaaataagcccctgacgtcgaacggcgttgcgcagagctccgacgagctcgcataccggccgacccacgcaacgactggcgtccaggtttggccgaagtcaaattcaagacctaaggactgtttctcccaaactaatttcataaacggtgatctaccctgctctgtccacggtgacagtggttatcgcggacacccgaccgcgttcccggtgaccaatggagttctagcttaattggacgggtcagtgatcatcaagggcaaacaagagtgccgaaacaagaacgcagagggcaagattggacctgatttgggctggccacggcgagcttggttttgcggcgttcttcgaccgatttgggggttatcccaaattggggagctgtggggaacgatcggagctgagagttggtttactggacacacaattacctaacggaacatgttgaggctccaatttataggctgctcaagcagtggtgatcaatttgaccgaatcgcgctggcgaccggaggggaaaaggggctctggcgcttgacacagatggctttcaccgtggcaagtactccggcgatcaccggacatgcatagaacggttagccgcaatgtggtaaagtatctggacacgcggcggatggcgtggcataactgtgaagaacggaggcacgccagtgaaggacatgcggccacgtcgccggtaagtggatgagcgacaaagtggcta

SEQ ID NO: 73903 - DNA, 743 bp, Zea Mays
gtcggccaggataacaatgcctcagtctttgccagttcagtggccaccccttgggcaggaaataatgtgtcccaagtactccagagattgttgaacaaaagaacacttagagtgtcccaagtactcacagtatagctcatatagatgttcattgcttcaacaactaaaattaacttgcctccatactgacatgccctcaagatcatgttgagtgactattctccatggtctcaagccacatgtccatgatggaagacacatatggatgtccttctattacaaatttcttgcttgtgattcatggtacaactactcgggctcatatgttgtgccttcactggtgtctaaatttggatctacaacaagtacctggtctgtaatatacttagatgggtccaagaatcatggagagtccctggcataagtagacccatccttggcagcaagctcatcaatatgatgtgtcttttcatctgtcatatgctcttcaccatttgctagctgctgcagtaaaccttgatgcgagacaaagttctaaggcctcatctcatccacaccactatgtcatatagctcatattcacggtggcctcactaaccatacactcttccagagccactagcttaagtgaactatcttggggctcataaatttgcagcaactcatcatcccacacaacctggctcgaaagtggatcgaacactttgtgtgtatcactcttggacatcattggtgccttgaac

SEQ ID NO: 73904 - DNA, 719 bp, Zea Mays
ccgccgccaccaggaagcaccatcgccaccgcggacaaccgccgatagcatgaattagtccccagccaggtcatctggggcttgtgccgatcccgaagaagctgttcgcgggcgcaatcggtcggtggtgaccggtgaccgtgtgaatctctcgccgaagttagtgatccgtcgtgcgtcgcgggcgacttcattaggctcccctcctcggtgagtaagcaccacatcgtgtttgcccgttctttacgattgtgtagcacccaacagcatagagtttagggcgctaaatcaccatgcccagaagtccggtgatggcgcgccgccgtgctgagtcccggaccaccgtagtcttgtgtggtgagaggaggagacgatgtcgcggccgtcgatccggtcaagggcagctctgattagacgaccacgtatccattcgcgctgtgagatccgaaccgttagctgaagatcgtgcgggcggggtcggtaggagttactttaaatccggatcctcgatcctggatccaacggtcacagaagcgtacggttcgcggggtctgtgatttaatctggacgctcggtcagggatccaacggccgatatcccacgatacccgttcgcctagacactattgcataagagtccctcggtttaggtaaaaaaataacctgcagtccacctggtgggtcatctgtgtcttaggattaattgcatcagggcccctg

SEQ ID NO: 73905 - DNA, 577 bp, Zea Mays
gaaatccccaaccacaatcatctagtttgtggccaatatatgctattatggtgatttatttgggaaatcttacgcacattacagataagggttttatgcagtgagctttggacttagattgatgtagtggcatgaatactacatatttgtccttcaacgtgaaggactagtgtcaacttccagcatgacacgcaacaaacaagttgcttcgtggttacaattctgcaaacttatttttattattaccaaatgtatagtcaatcattaagatttagactaacatgcacaacgttattttatccataaggatccttcaggggctcatgaataccattcgtcgtttggagccattagttgacttcagatcaacaagtaaaatgaccatcagggtctagcgctcataaggacattcactggttgcattgtgctttgaggcacataggaaaaatgtgtgtgtttatattggtagtgaagtgtacggcatcaggccaatgctgccaagcaaagatttttatatgcagagatgtatagtccagctcgtttttatcactgcccatggtttacccaattactcata

SEQ ID NO: 73906 - DNA, 479 bp, Zea Mays
taaccaatatggaactacagagactcacttttactagaatggaactcatgaggcttgtcttactagaataggaccgagacagacatatctttactcttttaagaccaattaagttaacgaacttgctcctctcacattgttgtaggcttaagaaatgacacgcactgtccctatacatggatgttggggcttataccgaacagagagtacccccgaactgaacaagagctagggtttcacttaggcttggtttcgtgaccatggatttagaggagatccataggggaggaaaccccttgccctatgtgttgtgcacccaagaatagggtgcccggacaaagcccaagaagactcttcaaaagaagccaagtccctgccgagcaacctggtgaggcggagaggatgaccaagtccctgccaagcaaacttgcaaggcagagcgggtgaccaagtccctgtcgagcaacctcacgaaagag

SEQ ID NO: 73907 - DNA, 904 bp, Zea Mays
tgtttatcgtgcacaacggttgtttggacttgccgttgtggtgactgtcttggtgtcaaatgccaaagaccgacttcgcggtctttttgacatttgggagtcatcattgtctctttttgtgggggttttcttggcgctttattacatggcaccacctcattaaaaacctcaccccctgcaaggaaaagggtgcggggccaaccagagtaatgtgtctataggtgttacaagggcataaaggccctggaattggttggtttatacataaaagttccttagattgtctatgttccacgagtgctcaaggtcttcgccagagtgtgttgcgagtctgtaggtgtttggtgtcgttttcctcttgacgatgaagggcccttctcatttaggctcaagatttcctcgggattctgttctactggttctgatgaggacgaggtccccctcgtcaaactctttaggagtaacagtgttgtctcgccaggcctttgtttgtgcttgatatttgttcaatgcttcgagggcggcgacacaatccccatcaaggaggccttttgttgttgactcatcgatgtctggtgtggtcgtggtgtttgttcggggtgatccatgcttgagctcctgcggagtcatggtctctgatccgtacattagtctgaaggggtgaatccaatggctcgggattctgttgtgttgagtgcccaaatgacttcgggaagttgctcggcccacttgtcctttttgtcatctaaaagtctcttctttatggtgctgaaatgtttttccattgacacgctctactaccccgttggattgtgggtggtagacagacgcaaacactgccttcgtgctgatggagtcatagaattccctgaagtcctgattgtcgaattgttttctgttgtct

SEQ ID NO: 73908 - DNA, 510 bp, Zea Mays
gaaagtaccaagggcagaccagcaggaatacccagcaaaacaactcccaaggttctcggttctgctccggaaatcagagtgggaacaacaactaccaagtacaacgctttggacaacaaggtcagaggagcaaccaataccagaaccagtagagaagtagcactcaaaccgtcaaaggtctagtgggcaacaacagaatcgtcaaggaagcatcgtgaacacactggccaagaacaacaacacaactaccccagttcaacctaatggttgtttcaagtgtggcgaacttggtcactatgccaacaactgcctaaagcataatcaacagacaccccagaagaacaacaaccagatgactgaccagaacacacctgctcgtggatctgcacaaaacaagactccgcagaaccagagtagaggaagagtcaatcatgtgacagtggaatcagttcctgaggatgccgacgtggtgtatggtatgtttcttattaactccatacatgtatctat

SEQ ID NO: 73909 - DNA, 320 bp, Zea Mays
aattgtgtgttgtttcgaaatgttaatgctaaaatgaatgagtgcccagtatgcaaggagtctagatggaaagatgaaacttgttcgaagcgggttccacataaggttttgaggcattttccactgttgccaaggttgaaaagaatttttgcttcaaaacaaacttctgaggaaacacgatggcacaagaaagtgaactaggcagtagaaatctacggatagatgttgtgaaacggctgaaaggagaaattccattgatcctatgcaagcttgagaaaatctttccacctgccttctttgatgtcatggtgcacttgtgt

SEQ ID NO: 73910 - DNA, 652 bp, Zea Mays
atctcaagctagcaccgcttaatttttcactgaaataagcaaccggttttccttcttgtaacaaaacagcacctaacccaataccactagcaacacattcaagttcaaacactttctgaaagtcaggaaattgtaagagtggagcatgggttaacttatctttcaaagtgttgaacgcctcttcttgtggggggtcccaagaaaaagacacacatttctttgtgagttcgtgcaaaggggcagcgatggagctaaaatcacgcacaaaacgacggtaaaatcctgcaagtccaagaaaactccgaatttgggtgaccgtcgttggtgtaggccagtcctgaatggcttcaaccttgctgctatccacctcaatgccctgcggagtgaccacataaccaagaaacgagacacgttgcgtgtaaaatgtgcacttttccatgttaccaaacaagcgagcagcatgcaaaacatcaaaaacagcacgcaaatgttctaaatgctcctctatagacttgctataaataaggatatcatcgaaataaaaaacaacaaacaaacctatgaaggcccgtggaacttcgttcattaaacgcataaaggtgctgggagcattagtcaatccaaatgacatcaccaaccattcatataaacc

SEQ ID NO: 73911 - DNA, 632 bp, Zea Mays
tgcgctgacgctttctagaagccttcggaagcccaatatcgacaccaagcatagtacacatcaggcacgggcgccatccatggaaccatcacctgcacacacaatgttacatattatatcaatcacaacaatcaacaaaaagggtaaaacaaactgaatactaacctcacaatattgatcctcagtcaaatatatctttaaggacccttcctttttattcaaggggcctgcttcttccggatgattttgaaaatacaggtttgtagcctgaattctcgcatagtatatggcatccttcactaacttctttgcattgttatggaacacatgttcagcgtgccccatgtaatcctctccgttaggcaaccgatatcgaagctacaacataaaagaatacaaatacaatggtataagtcatagaattacaatattaagaaacagaacaaaaacaataaataattcatacacaaaagtcatgacgcacaagtccctgtctgtcggtgtggtttagttcctttttaaacttgtactcatcccaggtactgacgagcacctcatcaacgatatctccgtctgaaaccttcactatactagggtagtgaaggcggcaaagagaacccaacgtaaggtta

SEQ ID NO: 73912 - DNA, 910 bp, Zea Mays
ggaaattgtagtatgatattaggaagagattggatccatgtgaatcaatgtgtaccttctactttacatcaaatgttgttgcaatgggtgggcgatgatgtagaaaaggtacatgctgatgcattggcttgcattgatgtagtcgatgcccctgtattttggacctatgagaccgccacatgtctcactagagttgatttttatgattatcaattcataagcatagacagaagagggttcattcctgtaattctggagctgatgtaaaatcggcaaaatcataaataaggttaaaatgacatacacactgataaatgacaagtgccaggtcagggacgatttcgtgcctgaggttgtacggtccgaggaacaccagagagcgtcgcagagcaaggaccctctcacggatggtccggcccgtaaggtcgggtggtccgatgttccgatagacagtccgacccctaaggtcggacagtcctgtggataccagagagggccgcagagctaatccaccatcacgaatggtccaccgttgaggtcggacagtccgcaaatgcgtagagagcctcgaactcttatcaggtaatcaaaatagaggagtttagagatctcaacaaattaggacaggagtttacatcggcaaatacttttgaggagattaacataggagatggtaaaactccaatgtcgacttttgtaaacaagaccttataagccgatcctagggatgaaatgatcaacttattaaaataatattatgattgctttgcttggagctacaatgagatgctggggttaagcttagagctagtggagcatcgtttgcctattaagcccgatttcaggcacttcaagcaaaggcaaggtcatttcgttcggacttactccccaggatcaaggacaaaattca

SEQ ID NO: 73913 - DNA, 631 bp, Zea Mays
caaggcgttgatacgaccttcctgcgccgccacaaacccttcctgtgctgccacgagcgttgagatcgccttgtcctgtgcagcgaggcgtcgatcccacttggcgtcgttatcggtgaagcggcgtgcgatctcgtcgaggatgatttgcgtgtcgggattcatgataacttgacgacggcgcagcctggtgaagtgctcgtgatgcgccgatgaatccagtgcgcggaaactcaattcgccagagatcggtacctctgataccaatttgttaacacctctctggatacggaatagataggattatagagaagaacagcgagggaggcagagagtggttcttcagttcagaagtggaataatattctgttacaagttatttccctcaactcctctctcgtctacttaagtctcacgcaatacttccatgaagttgatccacgttggcccagtcaccatcttgttgctgcgcctgggcctggtcgaccgccgcggcccatcgggtccatcatctggtacagactgctcccgctccttgctttgttcctccagtgcctcgcctgtgtcactgacaatgacgtctctcgtgggacgacgacctgatccgggaagacgccgccagcttcagctt

SEQ ID NO: 73914 - DNA, 556 bp, Zea Mays
actgttgggatgctcattacgcagcacatgctactgttgacaccatttcttgggcagaattctccaccaacttttgcaactaccacattcctgctggccttatgaagattaggaagaagaagtttctatccctcaagcagggaggcatgtcagtaagaaaatacaaagacaaattcatccagttatccggataagctcctgaggaagttgcagatgatgagaagaaacatgaacaattcttggaaggattgatagggtaactccaataccaactgatgtatcactcattcctgtccttctagaaacttctagacaagaccatagctttggaacaaaagcgtgtttagctaggaaagatgaagaggaaggctatcacttagtgtcaaacatgaagcaacatccgccctcgctatgctccaccacaaggaaacccagttcgccagggtggtgtaaagcagtcatacccacaccctcctccataaacaccgcaaaccgccccagacaccacaaaatcccaagctagtacccaaccaaaaacggccacccctgctacccc

SEQ ID NO: 73915 - DNA, 619 bp, Zea Mays
gttttcccatccgttttcatcccttggtgaaccctaactagtgaaatatgcatggagatgagacaaaccttggaaggaaatgtacctacaaacaaaggagcctcacatagtataggaatcacaaagaggtactacgaaactttgctgaagaccccagagatgaaggtggaactccctggaaactatgctgatgttagggagagctaggaaccgagggtacacttgagcgatggcccactagtcagtgagaagcttggcacaatgtccgaggtagaggagaatagtggcacgacgagaaggagtggcggtgcggtagtggcgtagctagtgagtgaaagggaggaactagagaaagcgacaacggtgggtggtggaagaaggctatggaaaaccatctcacgagaggacccaatgcgacgggggaattaaaaatggtgtggttatgggcacactagaccatacatagggtcactgaaccgtcaacggtgcaaagtctagtgagcaccggaccacaaacctaggctgaggaaaaccctacagccaatgtgcaatggaccgtccggtgaccaggcccagtgcgccaatagtgcacccataatttttcaaattttgtttttct

SEQ ID NO: 73916 - DNA, 375 bp, Zea Mays
ggagtttatacgtttaaagcaaggaggagactcggtgatgcaatatctcaccaagttcaatcatctctcccagtatgcaatagaccaagtggacaaggatctgaagaagaagaattgcttcatgagaggtctaaatatgatcaactccagcgaaagatggccacatgcctggacctcacttatagcagggtcgtaagcatagcactttcggtggaagccaagaattcaggacaaggaaaaacaaagaaatatgggggtgaaggatcgtctcaaggagctgagaagcagacgaggttggtgatttgtcctttcaacccaaatcgctcttcacctcgtccacccgtatatcccttcaagcaacaagtttttatccgc

SEQ ID NO: 73917 - DNA, 688 bp, Zea Mays
ccctggtgcaattaatcctaagacacagttgacccacaagctggactgcgggttgatactcaacttctccggggacttttatgcaaaacgctatcgcaaaggggtatccaacgccgagagccatacgattacaaacggacggccctgattagatcatcgccacaacagatcggtctacaaccatagccccaggatattgatccaacggttactgacttcgaaccccgctcaaagcacccgaccgttcgatcttagatcaacatcgatcgtccactcaccgaatcgttatcttggaaataatcgcgcacgttgagctaggatccaacggttaccaaccaaccctatcgcccaagccgacagcgcggcggcacagtacccgcacggcggcgccccccgccggagcagtgccccatggacattccggcgcccctgactcaatctggagtgtgctacacgaagcgcatgctagtatgaacaacaggggaggatctttaccgtcactggccgagagttgaagccggtcgacggtgctaagcggaccaaaggcggagttctgacgctggtgagcaatcgaggtggcccgagccaaccacgagtccaattagtcgatggtgaggttgcacacgaatccgcgagttcctccgggcacaaaacagggggagcggcgatatggtgcgaggttttggcg

SEQ ID NO: 73918 - DNA, 957 bp, Zea Mays
acaacgttgagccttaaatgttgcggtggaaaaagatcttctctctcggccgccatgtagatcttatgactaggcgtgcttccatcccgtctgtctgctcgagtcggctacgaaatggagcctagtatgttgaagtatgtaggggtcggctaggctgacatgtgcaggagttatgatgatggacccgagccatcacctctattcagcactgcagtggtgcactgcccaagctagtggttgctcatggtggcgttacccacgagcatgacgctaagacacaaccgtctacctcggtaacgtgtggcctactatgcgacccatgcgcgtgtcactaacacgcaaccgcccatttcgataacgtgcagagcaatcatttgagcatgcacgtcctgataaaagcctgcctatgccctgtgcacaacagcgtgcgctgcagcaggccacatcgaatgcaattggctgagcttgcttccagtcgaaggattgtgccatgaacccacgggccacatggcggcactagaccccttcccgagcagagagcagggaccaagagcgcatgctggcttgaagttttgcccccctagtcaggggtctagctgtcagacggggaggtgtgggactctcccgtgggaaatccggtacacgtggaggtccaagacccatctacagggttacaggcccgacctatggaggtctagactcacggtggtagtccatgagcattttcaacactgggacacgcggtggcactagacttgtcctcgagctaggagcaggccccaaggccagtggtcttgtcagacaggtcgagaccatgggcctgtctactcagtttctcagtaagtggtcataggtaaccatgtgagtatcggccttgacatagtaggagagggtattgtagttacggggtaccgacagtcaaatatttcctttttaattcaatctcatttaataagg

SEQ ID NO: 73919 - DNA, 777 bp, Zea Mays
attgctagggatttctcttcaccatcaccttcatccacttcacacctatgcctcatggctaaaggtgaacggaaggtacaacctgaaaatgatattattgatgattgtgacagtgatagtgatgacgagtatgcttctcctacctatgatgaattagctgacttacttaaagaatatactcaaatcattaggaagtcaaaagctaaatgtgacaagttgaatgatgaaaatgagttcttaacagccaagtatgacatagttgttaaagctagtgaagaaatgaaggaagaaaataaaactatgtcatccaccaaaaatgagctcaaaacctcccttaaagatgccaaagataaatgtgaaaaattaagtgaagcaaataggaaactgaaagatagacttgtcaatgtaaaggaagattatacaaaaattaaaattgactatgataatcttcttattgcaaatgagcttttatcttgtaatacacatgaggctattaaccctgtttttaagattgatgtagcaacctcatgtgatgatttgagccaagttgatcagtctagtcttcatgatgaattggttgaaaaagttgaagttatgacactagagaaccagaaattgaagaagtacttgacagacgcaaccactagaggaaaagttgtcatagaaagcaatgatattaataatgagttggcagtggacaatgaaaggcttagagatgaagtcaagaaacttaagattgagaaagaacatcttaccacaagtgtacaaatgttcaac

SEQ ID NO: 73920 - DNA, 554 bp, Zea Mays
tctcagatggaacagttcaaaaaggcgcatgcacagtttctgcaagcaacctctcaagtggtagctagactccaacaagttgatttagcagaatttatagcacatgagcagattactggtaaccatatgacatcaaccacaacatcaccctcgatagtcgacttagaaaagttgttacaggcacaagctctgataatacagaaagcatctcaactcacctcctcataccaacaagtgttggcaagtcgaaacgtcactagaaacgaaacaactgatgaacaaaaggatgctcaccaacagacaaatgatcttggagcatgttgttgttgtgagtactatggaattccttgtcgccagatcagtacaaacgaaagtgaaactacaaaacagaagaaccagattttattttctggtataaaaagtcaatggtcttcccaagaacaactagtagcagatgcactgtcagacgatgaattgccaggttttccaaaaaggaaacatcacaaggatgctcagctccaaaaagaagcaaatgagtgttacattgatggatg

SEQ ID NO: 73921 - DNA, 350 bp, Zea Mays
atggacccaggcatcatcactttggctacatcgacccctggcctccgtagcctagggctcggcgtagcccgtcgtgtcctgcaggaggtctgcgcacttagttctagtctgataggcaataagtgtgttgtagggcgaggggtgcataggccattaatgcgctgtagttcgaggggctcgtaggtcatgagtgttatgtggcctgaggtgctcataggtcatgagtgggaagcggactggcgcaactctgtggctcgatgtcagacatggttaaatgtggttggctacttatggcgagttagtttgggactgggcgcgggatccactagggtggttcccttccgacacgc

SEQ ID NO: 73922 - DNA, 339 bp, Zea Mays
gtccggttcaaggacaacatctgttacttcaatggttcgatcgggaacccgaagacacttcttcaattgtgacacatggaacacattatgtatagcagacaaagtttcggggagttgcagtcgatacgccactggtccacattgctcaagtaccgggaatggaccaatgtacctaggtgcaagcttccctttaaccccgaaacgcgatactcccttcattggtgaaaccttcaggtagacatagtccccttcatgaaaatacaagggcattcgccgtttgtctgcataacctttctgccgagcttgtgctttcttcatattgtgaataattttctgaac

SEQ ID NO: 73923 - DNA, 608 bp, Zea Mays
gagtatcaggggcacacaagaatgttgaaacaagataacaaggggcatgaacagacctagaggtcgctgaccacggtgaggtcaatccgggcggtgctcttgagtgagttgggggaaatgcaaaattggagctctctggtggaggatctgaggtacgggtgggtgcgctagctgcttgaatacataatgaagccgatggtgcacttaatttataggctccgggggaggtggctctcaatttgattacggcgtgttggcggccggagatagggaagaatacgggtggctgtgaccatggcgttcaccggtgcaacagcgcaaggataatactcctaaggggccacgattactaccgcacaataacaagctacggcgtggcacaactggggtcaccgaagcttccacggcgacgctggcggtccagccacgtcgcgacggctacaggcacggtgataacttcaattcgcgatcaaatccattcccccgtgagatcttttaccttcccatggatatcttctgcgtaccaagcacgaatcatagcgaccagcgcaaatccggacgcgcggatcgccggcggcgagctcactgagctggcaatctgatcggga

SEQ ID NO: 73924 - DNA, 600 bp, Zea Mays
acaaaacaggctgaggcatcaatttatagaggacggccgcgaggagggcgaatttggacggggaagcgctcgtggtgagaaagggggaagagtcaccggagttgctaatgtggcgctcactggtttacggtctacggcggtcactgccgagtcttcacggcttgcgacgagtggtgagatgacttaaggcatgtcacaaccaagctagacgacggcacaacggcgacgtcgcgcagccacgttgccggtgcaagtgggtacggcgacagggcaaaatagtgccccaaagtcatccatgcgcaagatcttttcaccgtcgaccgttatccgcacgccagagcgcacgaattgcaatgccagcgaggatcgcggcgcgactcaccagcagcgacaggttcactgcatttggggtcttttgcagatattgtaccatcgcgattaagttcagtatgtctgaccaagcaacttgcaggggtttcctctcaaatttttgtgtggcaactcactcacctgcctatatcaaagttgttgtccaatgtactagctacaactttgttgcaaacaccttgctcaaacatccactaaattccccgcaactcg

SEQ ID NO: 73925 - DNA, 643 bp, Zea Mays
ccaaattgcatcagctagggcagtgaggagaccataccttgttactacctccgttcgcttatatttgtcgctgtgcagttcaattttgaactaagcagcgtcaaataaaaaaaccagagggagtacattccaaatctatgtatgagaggccttctcccctcaccactataagtcatgaaagacatatgtatcatcttatattcctcgcacctcatgcccccttgctagaatcaagcttatcctttgctttgctttgctttgtttgatagtccctgacttatatggaaaaggcaaaagacattctgttactttggaccatattgtttgaaattgttttttagcacaattcaattttcttcaccacattggcacattatggatagccacatgagtaaccatggactagaggtgccacaaatggatttttcacttcctattgacaattggcatcatattgctctagccataaaaaatggagttgatgtacatcaatggtcactttgtatctaatggaagatacattgattgccatatggatctctggcagaggactcttccatgcaccagaaggtccacaatgtgtcaggaaagcttaatcatatgaataggacatatcagattttgtgcttaagctacatgttag

SEQ ID NO: 73926 - DNA, 368 bp, Zea Mays
tgcgaccgtcgacctccatagttgatggactggctgcatagctatcgtcgtagctatgatcggccatgcatgtctgcctacgctaactgagtgtgactgtgtgtctgtgtgagctagctagttgcaactgcaaacctgcaactagttgcgcacccgggtcggccagtgtctgtagctgcatgcaagatagcaagcacatgcacattgccaacaaacctgcaacaagattgcaagcacaactacatgtccgattgaccgacccactttctgtgggctaacgatcggatgggttgttttagaggaggtcgagtcctagcatgggccaagggcccaagtacagcctacactacttttggatatttctagag

SEQ ID NO: 73927 - DNA, 409 bp, Zea Mays
tgatctgcgcatggacaaaatttgttagggtccctgatttcttgcgggatttgttagcgaaatatgcgtgatttgtttgtgagccgacttgtaacgggtccagacctccctcttcatatagatgatagggtacgtccgattgaacctctgtaatcgatccaatcaaatctacttatcaattttgccttatttgcattgtcctttccattcattaggagtaggagtaatttagctctagacccgctctagtttagccttgctctacctcgagtcttcacctctctttggctctacgtcgactacaggcatcttgggtggcctgtcgatcccaatacaaccttagaatttctcctccttgacggggtccctcccaggaggcaagattcatgttcttcatgaagaagatgac

SEQ ID NO: 73928 - DNA, 958 bp, Zea Mays
ctgacggagtgaataaatattgaaggccaagatcacatagctgaccgactgatagcaaaataaaactcaatggtgcaaccaagagaacatttgaaattgaaagatcgtttgatattgccaccttgccaagccctttaacttttccttttgaattatctccaaatgtaattttatcttgttcatcaacatcttcatctaatcaggtgaacatctgtgggttatcagtcatatgttgagtgcatccactgtcaattacacaatggctcccaccggtcttgtagttcacctacatgcatagataaatcaagcttcaatcttagggatcctatcttgcatagggcctgtaactttctcaatcaaggactttccaacccaaatttgtctaggtctactcttgcttggtggacctaagaatgttactttgaccttcccatttgcaacttttctaagcacatagtgagcattgaatgcaaaagatcttgagtgctttggcaagggagttggtggtgtggctttgcaattgtgagcaaagtgtccttcttttccacactcataaaatttgataggcctaggagttttcttagccttgttatgatttgttgctttcttttgaacaaatggattgtatccaataccactcttgttatttttcatgactgtgttcatgaggagctcattttggaggtattgacccttgtcgaatttttgcacactagtggcaagattttctttctcaagtttgagtttcttgatttattccctaagcctctcattgtccaataccaactcattattaaaatcattactttctatggcaaattttcccttggtggttacatcagtcaagtacttctttaatttttggttctctagtgtcatgacttcaagtttttcaaccaaatcatcatgaagactagatttatcaacattgctcaaatcatcacatgaggctactaca

SEQ ID NO: 73929 - DNA, 581 bp, Zea Mays
cgcctgagtgaattttcttttgtcaatgtcaaagctttataccgagctgagtcagttgtaaggcttggattctacctgtgttgtgtttatgtgagcatgtatcaccagcacaaaccaattcatgatttaggatgattgttccgttgatcgggtttagtcaccctaggttctgtaagcgtgagcatgtaacatcagtatgagttggtaatgactcatatcgattgctctattgatatggtttagaagtcaccttaggttctacaagcgtgagcatgtagcaccaatatgagtcaggtaacgacttataccgattgctccattgatagagtttagaagtcaccctaggttctgcaagcttgagcatgtagcacccgtatgagtcgggtgatgattcatatcaattgctcctttgatagggtttagaagtcacccttttgtttcacaagcgtgagcatgtaacaccagcttaagttggtctacgacttaagtcgtttgatctatgacagtggttgtggatagaataggaaaaaggcaattcaatgcatgcaactagaagttctgtggagaacacttctttattg

SEQ ID NO: 73930 - DNA, 526 bp, Zea Mays
cctgggaaaggtgagcagaggtgcatgataatctcttttcaatcctatgaatgagcggtaaaaagtggcagattttaggctttgacagaccaagcggaacaccaagataggtaaagggcattgaacctatctgacagttgagggttccggctaggatctccattttagcgggactgacattgatggggtacatacttgatttattgtagttcaccttcaaccccgtcgaagttgcaaaagagttcagaacggctctgagaaaaaatagttgtctagggcaagcttccattatcagtagtgtgtcatccgcatattgaactatcggaaaatcttgaccacaattcgcggccaggggtaacttgagcaggtcttgctgtcgcgctttattgatgatgctctgtaacagatccgccgcgagaacaaaaagaagaggcgagaggggatctccctacctgaccccacgcttgcaatgaaaggttttccctggaacaccattaaggaggactgatgacgtgccagaccgaag

SEQ ID NO: 73931 - DNA, 909 bp, Zea Mays
cagactgtccgagtatgccggaccgttagacaaagagtacacagaacatagtactgcgtgtcaggcacaattctcatactccaccccacccgcagcgcactgtagtcatagcatgccaccacccgcgcatgaggccgaatatttcggtccctacgaagcaagaaagattcaccccataccacacgacaatgggatgcaatactggtatgccttaggggcctttaccgaaagccacctttgaccatcctggtgcaaaagaccgacataaggataaccggccacctgagcccatgtcccgaagaccgatgggttacatggatgaagttcgggaggaaataactgaactattccaagacaaattaggagtcagtgtgtctagcccatggcagtcccattagaggccatatgacccttgatgagacaccgttccgtgccccctaggaccagtttgctagatttctccaaattctcgggcaagggcagtagaagtactcgcgaacacatgggccaattcttggcacaattggtagaattggccgacaacgaagttttctgtgttcgcttgttttcattatctcttactggcaccgcatttgcttggtatgctgccttaccccctaattctattgattcctagaatgatttagagcataagtttcatgagcacctctatttagggactgagtcatatttagctgatctagcatcgctccggcagggggacgaagaatcagttaatgattatctccagatgttccgggatactaaaagtcgatgctttcaggtccaccttacaaataggcagctataggggcagacctagcctaaaatgtgagtgggggcccaacatctgagtgagggcctaaacataggcatactaactaatgagcctttgtagatacaataaat

SEQ ID NO: 73932 - DNA, 495 bp, Zea Mays
tgcacattgtttctatcaattctagccatttagtgcatggctctttaaatgtcttctgaaatttgaagcggtaagggagtcgaccaagttcataatttttcccttcttccttcttatttggcattccccatctgctagaggttgggaaagttttgtttgccaagtattcctgcactaaatccctattgctaatatacccagtcaccactctaaattctacttcggctagttggcatggggagccaagctgcatgttgcataatggtctcgtcatgccgaagcttaatttcaaagggctcatcaccatactcataagcttctctcttttcttctcgtcagccttcacataaaaccactcatttgtccagccagtagaccatttggtgtggtatccaattacaggggccttcttatcttttcgatatggaaaattatagcacccaaagtttttgtgcagaccgtcggctctcgccttcgtctgctagtgaagttcgt

SEQ ID NO: 73933 - DNA, 310 bp, Zea Mays
caaaggcttactagatgcatggcagccttgaggaggttcatatcaaggctgggcaagaaaggcatgccattctacaaattgctcaagaagctggacaagtttcagtggaccacagaagcacaggaagctctagaagcactaaaaaagttcctgactacgccaccagtactcaagccaccacgccgagccacgccgaatcagccgacagaagatctgttgttatacatctcctgcacgactcacgtggtgagcaccgcgttagtagtcaagcgggtggaggaaggacatacatatccagtacaacatccag

SEQ ID NO: 73934 - DNA, 822 bp, Zea Mays
cgccgctgttggcccacgtcctcgtctcgatgccaacctggggagctgcaggcgggcgaggatggatgtctgtgcccggggaactcttaccatgggaatttgggcctctggtgatcgtggatgggtggcaatttctcgctgaggttgatctccgtcgcaaaaccacgcctagtcgtggctagatcttctaccacaccaatctccggtaaatctttgaccgtggtgttggcctagttctcctccagtcatggcactaattgtggtagggtttcgggcactggcatggcggaaggcaaggactctagcgggtcgtcaccgcgtcagtgggcggcgccgcctcgcgtctagtactagtgaagaagatagcgctgctccattcgatccgatctgtgcggtctggagtgctcgggcgaagcgttttgattttattaaagtttggtcgtgcgatcttgatcgggtggccagggattagattaagcgttggcgtaacgttgtccgtcgagctctgatctagcgacagtgggtgcgtaccggttataaaatggatggtttaatcttggtggtccaatacagatcgaacgactcacgagtgtcgataccccttcgccgtgtatttattgcaaaagagaccctgaatatttcatgaatcaacccgtagtacaggtcagtagtaaactaattggcagaaggccctggaattaacgaaaataaccccgaactccctggattttgtgtctgcagtccataggttatccagaaataataaattaatttagaaaaacgatttttagattaaaaataaatctagaaacttgtttaatt

SEQ ID NO: 73935 - DNA, 371 bp, Zea Mays
tcgagaactgactataagaagttgtgttcagttaattaattaagttgcagtagaatgtcctgacgctagttcgatccatcatgcgcatctagctatgtcccccgacgcatgtttatgcaattattctcttgcgagccgtcacatcccgccatcaacctctgacctgaccagccactagaaacggtggtggtgtgctgtctaaccgtgatcctgttaacccatgactcgcttgggtcaagatccagaacgctacaaaacgtggtgttccgtggtccacggcgaggattgtcccgctgcggcatcaagcatcacgtagtggactcggccgagtcgaaagcgaatgatcagtctttgttggctcacggggacgg

SEQ ID NO: 73936 - DNA, 350 bp, Zea Mays
tggatggttttgatgaatctttgcttccttcaataatagatgatctcttctttccttttctttaagcgcaattcatctatttgaaatagcacaatactgtagctcaaatgctacaaacaacattcatcaagcaagtaggctgttgctaaccttttttcctggacaatttgttgcatgatacataagaatctggtctcgtctttggtctccctgtagtgtgaatactaaaactttatttcaatactatatttgtggcacttgcgaactctcatttcttgcaagcactcttttttgtgaaatgcttattgatttgaaggtgctttcagatcatgtttccttcaacactacaa

SEQ ID NO: 73937 - DNA, 278 bp, Zea Mays
ctgcacgcccgttgatgcaattactgtcggcccgcctatggtcacgccgactaccacgcctgttcccgcggctgactaacccgtgacctccgcacttaatgccttcgttgggccatgtgcggggtgcgtcgagtcgctgcattggtttcgagagtttatcttctcagccttctgcgacggccccgaggaggcgcgatattggcgcgagcggcggtgcgacttttctgctctcagaaaccggcgcgtcgggtgcatgtcatgtgggcctgggcccccat

SEQ ID NO: 73938 - DNA, 1203 bp, Zea Mays
gaagcacacggtgtacccaacttatccgtacaatggtatcaatgactctacccgggtcgcaaacaagagaatccccactgaagatctggtgagtcgactggatatgattctgaggggcaaagtgtcaaatgttggtgctcctgttgcctattctgcctggaatctaccacctcataggtcattttctgaatttgtgtccaaccctcctgctagtgatggtagtctgggtcttagagtgcgaccctctcccgaggacattgaggctctgattgcccctcttcggaatcttcccaatgatgagaagcaaactcattttgagatgccagctagcacagatgatgcatagataaatgatgtgcttagtatgctagctggggaatcttctgactcgacccatgctgagccgatggctatcacggctggacaagaacttggcaaagcagtggagactcggaagcctgaaggtgctcacccaaagtgtccccaccgagttagccgcccgactgcacctgttgaggaaaagaagaagaggcggcttcggtggctgtcatgattggaccagggtgtaggtccttctgctctggctcgtgatgaagtgccagcagaggtccttcctgaggttgatgccaagggttgtgaccgtgcaccgactgatgtctgtatatttgatgaagatgatgatgaagaagaagaagaagtcccgttgatccgtaagaacagtcggcattacagaggtagtgagggggggtgatatttcttctctagctctgtcggctcttgtcagtcttcagggattatcaatatcggatttggatcaggcccttgaggaggtcgtccctgaggatatgctgtcagagccaactgccgatgacgtgatggttgtttgttcaaaaattccagacgttggattggaggtatcccgagcagtgtctcgtgcatcgtcaactttggaaggcagtcttcaatgccaagacgttggttcgagttgcccgactcccatggaggtgacaggggagccctcagccttagaggtgactactgcagaaagcccagcccccgagggtggttgtggcagttacccagcccccgaaggtgttgccggtagtgatccagcattggtgggtagcgcaagctgcaacccagcccccgagggtgttcaggtgagctctccttcccacacctccatggacgtccatgttgggt

SEQ ID NO: 73939 - DNA, 344 bp, Zea Mays
ctatttaaaatatgttttccagttgtttagtataaactctatatatacattagtttaaaataaaactcaagcttattgtatttgcagatgtataatgctcatatgggatctccactacaagaaactgataaatgtctgcgccgtctcccctcccctatcgttgacgtcagttcgctgaccacacactgacaattgtttcttgatgctattaataatggtaccaccgacttgctcaagaggactcttattctggttatgataatgtttactgataacttttttattttattacctgcctggtcccaatggaaggcaactgttaggggaacaattggattcactga

SEQ ID NO: 73940 - DNA, 898 bp, Zea Mays
ttcccaaaattgcagaattccaatcaagataaaaatggtatgcatcctcttctcatgtctcattccctcgtgctttccttattacgttagtcttgcttgattgttgattataataagataggaacctaaataaagtgacttctgcgtatcttctagatgatgggaacaaatcctcaagactggaattcttctacaatggcgtgacactccaaccatctgttacattttttgaatcgattctccatctgatgtacaagggacaatctgatgtatggatcgaccaatctttctgggttgaagaacacagcataacctataggaaaagaatcaaaagcaataaggagatctcgtctcagagttcctactatactcggttatcccacgtgcatgaaatccttcaacgtgcatggttaaaggacccttttttcactgccatacttaatggcaaacttcctggcaatctggatgtgtctgacctgtcatacaatctcttattcatgctgaaagttcttgaaggggtgaaccgtttttcatatcaactcttgatggatgaacagataaacaaatttgctgaaggtattcaagaagatatcaatgatattgaagtggcaatatgtccagtaccacgacatcagttcctcagtagtcttctcataaataagctagagatgcaaatgcaagatgtcttgttcgatgatggcctcataccctcgtggtgtgtctatctggtcgagaactgcccattcctgttgtccttggacacacggtggaagtacttctgtctgactgcacatcgctcattctttccagaccagattaaccgttattatccacaaactaaaaagtacagggtagcccgaagtgctatcattgaaggtgctgtatcagtgatgaccaa

SEQ ID NO: 73941 - DNA, 728 bp, Zea Mays
cttctagaacaggaggctgaagctgtctgtcatcaagaacatgattctcatatgcttttggtggcttttcttcttctattatttcagcttgagctctagtgcattcctaagaagagtcatcagatacagcaaaacaatgttgctcactggctgagacatcagtcccatttgatgctagctgatccaacaaatcatcatgtccagtttcctcatcccggatctcattgccagaccttgcatggaacactttatcattagctaattgttgccgcaaatcattatgtgaattgaagtcatgtagcatgttctcattacaaatcacatcttcagacaattcatcgaacacttcatctgcagctccaattgaccccactggattcaccctcgactgctcatcttgaaatggcatctcaactaacttctccaacgaaacaccttgcaagccatgtccatccagcgagtctccaccccaaatcacagcagcaggaggcacctcgtccagggtagcaaccttcgatgccataacattgacgacatgactcaagcaatacaaagaacagttgaagggcgcacagctctcgaagccgctcgactctagatcgatgagaggctcctcaacgaacacaggcccctcgtcaaagacgggctgctcatcgaagatgtcgccattcccgtcgtagcgtgcctcgccgtgagccgatgtcgtggctcgcccaaggaactgcgcc

SEQ ID NO: 73942 - DNA, 363 bp, Zea Mays
aagattttcgactagatcggtaatggcgatattatattatagtggttttataatccctaatattgctatataacccttgactccttatacttttgttttcttgccattgtattgccatccttgcgcaatatctacctggtatattaaacctttgcctctctacttttctccttgataatgctttctccttaactcactttatatccttggttgtatcatttatcctcactttaatagttcatggttatctcatttcactcttggccaccaacaaatatgtcttgtctaactccttgctatttcttacctgactccttggctttataatatctttcttattccaaacctcgtctcaccttttgc

SEQ ID NO: 73943 - DNA, 793 bp, Zea Mays
atgaggttaagtttcatccagaaaggcaatacttggtaccttgagtgaagctaatatggaggagtgtggtttatttttagttcccaaataggtcgccaacatagttctgttacgttcatggaactagactcgtatttgtgagctttcatatttacacgaactaatgtgattgaaacacatttgtgttaccatacaaatcagtagggaatggttgtgtagaattacaacacacatctattaactaatgtaaaaaatagaatgtacatgttacttctgagtccatatgtttgtatgattgcaatttccatcctgattttccctcctagataattagtttgggcatttcttttgatgcagacatttctttagcagttaccatagaccttagtccatatttattcattgtaacaaaaggctaaacaatagagcagtatatggcttgatttgttcatggtccatatttccagtttgtaaatatacatcaaaatgtgatggtagaggaacacttattgctacccttccttacctaaagtattatcagtgtaggtattctataatgatgtaccctttgcaggatcttattgacatttcgtgttcagtataggtgttttagattgaaagcagttccttccttgtttggcgcccttggttgtcttgtcgtaaccgaagcaccatgtctccttcttggaacccccaaggccgagcacgcctcacatggtagcgtcagagtgattgttggtacttggccgagtggaggagtgttacgtcctaagcctcttctagctggccaagc

SEQ ID NO: 73944 - DNA, 557 bp, Zea Mays
caaggtttggaataagaaagatattataaagtcaaggagtctggtaagaaatagcaaggggttagacaagacatatttgttggtggccaagagagaaataagataaccatgaactattaaagtgaggataaatgatacaaccaaggatatgaagtgagttagggagaaagcattatcaagaagacaaaatagagaggcattatcaagtaggagtagggagacaaagaattcagtatatcaaggtagatattgcgcaaggatggcaatacaatggcaagaaaacaaaagtataagaagtcaagggttatatagcaatattagggattacaaaaccactatgatataatatcgcccttaccgatctagtcgaaaatcttaatactaaagaacaatcctatcaacctaaccaagaagtctggtaatggatccaaaggatccataacaaaacttcttgcggagtggggataagacagagaatagggcatcgtcgatagcttcgaaagggtttcttctggcaaacttcgcttcaagttccgcaatcctagcttgatcatctt

SEQ ID NO: 73945 - DNA, 745 bp, Zea Mays
cccgcacgctccaccaccccgtcgcgggtgtcctagtatccgaaactatagtcctgtaggtctggaaacccgaggtccggctctaaagaaagggcacacgtctcagggggaggtctggagctgcgtgactgcttagcccggtcccgtaccgtaagcctacgcactccaccaccatgcgacaagtaccctagtaattagaagccatgacccagggggtccagacacacgggtcggccccccagtccagatcctacaggtcatattgcgtaagtcaaaggatgaaggataccagttaatgggtccgatgggtgcactactgaaactccctagctaaggctgtgtgcaggtccgggtcccagtcgaaataccctcctgggggccaggtcaccaactccttcttaagtatactggcattcagcctcgacaagtcgagaccgcatcccagaggggccaagtaccagggaggaagttgacaacaacacacatagcaaagggaaagtagcatgcagataagttgtaatgttgcttgacaagtaatacttaaatgtatcctacaaaaccaaaatatgataagccgcttccagcggaacccttgctttctctccgcaggtccgactactcatcatcagtaggatcccactggaagcgcttggccaccacgtctacagcgtccttcacgctcccccgggtggtgtcttcggtattggccaccggaccggcgatcaccggccccaaggagaaagct

SEQ ID NO: 73946 - DNA, 345 bp, Zea Mays
gacgaagcctcagaagtgggagaaactcccgacgagcaagtacaccgagaaaggcggaactctcgccgtcgtgatcgccgacaagctcaggaccgagaacgggagtaagccaagctaggtgcaaggctgcatcgagagaaccctctctttgctcagaacctataccccgacttcgctcacgcaatgaacacgccgagtgaagtcggagaggtgctggcccagatagctgacggcctcccatgaactccagacgcggaaggttaccagcggctgcttacttgagcagctaatcaccttctgcccatcgctcatcctttgagcaacctacgccacgccatcaacaac

SEQ ID NO: 73947 - DNA, 864 bp, Zea Mays
tggcaggccatccacggttggtcacaagactggacaaataacactaattcagtcttgaactccacctctatgcttgcgccttcttagggtcatcaaacagccatggaccctatggccttgtcatgatgagcatgactttgggttcggctctaagaggttgtgaaccatccacaatggtgtaaagagccctcagatgaacctagatctcgccctagagagggatctcatcatggtaagattctagggtcatcttggggtcggcaggccacccaaaacaactctagccgatgtagagtcagatataggtgaaaactgatatgtggaatatataactaagctaggctacatctactcctaaggcatgaatcataaagaaggtaaatagattggttcaattgaaatgtgttcgggggttctcaatcggtcgtaccctttaatatttatagtggggaggtatggacccgttcctagacgagatccaacagattcccatggataggttacgataatgacgcgtgaaataagtactctcgccgagttaatctggtcgcggaccatccgggctaaccccgcggaccgtccggccatgcccaggtgccaaatatggtgctcaacacatgccctgccttttggtggagcttgacgaaccaaaagcatttagtactaccatccacttttgggaaacaatagattatgcaacatgccttgttcccaaaatataaactctagcgcgatgtaagtcgctggctcttgtgatcagacaatataactatttgataaaaatctaatgcatagaggatgtttaggattgcaacctcttcggtcatagctacctcatcaacatgttaataggtaaaaacttgt

SEQ ID NO: 73948 - DNA, 331 bp, Zea Mays
agcttatgctctttatgaagtcccgaaagccaagatccaaacatgtcagacacattctagggagcatgcagattggtagctgacatgaatcacactccaaattttgtgagcaaaagtgtaaatgtaacaccctaaattagggatggcaatggttgggccgggtggagcaaaaaccagcccgcgatcacacccgtgaagtttatcaaaatccgcccacgattgcacctgcgagtgcaattcaaaatccgcacacaaacccgtcaggttttgggtcactagtgggtttttgctgtatacaataactcactcgggggttaaaatagaaacccgt

SEQ ID NO: 73949 - DNA, 793 bp, Zea Mays
aggggaggtgcgcggactgacccaggggctcggtggtgtctgggacatcatcaattgatcgttgaagtgtaggcaactccgatgtgtcgcccttccccgttgccaaggttctacgtgacttggtagccggtaataagcccttcttcgttttgtgctcgctttcgtatcatgtggcaccagttgatctggagattgggtcacctgtgggccgtcttagacttctccggcgtgaccgccgccgcgggtcggaggaagggggtggagagaagggtctccattcgatctggtatggacgattgagattagaagctagaataccctttcgtctattgaatccaagttgtagatctcagggtgggcagatctagaatgatcagaacgtggatatgccacatgaccgtcgatccctgatccggtggtccctgttgcgcactgagtcgatgatgggcataatctaatctggcccagcgatcctagatcggacgacgtagatcagcccgtaccccttcgccacgggcgagtttattaaagagaccctcggaaataagaaaatcaacccgcagtcctgagtggttataaaaccattgctctcaggtcctttcctttgcaatcagcacccttacctttaccaaaatagaagtcgtcgtccatctgtgcataaaattatataagctagttctgcaaattgattttaggataaaatttaatctagaaacatagttaatttatatttctcacattttaaccttgagttgatccattcaaattgcgttaacttcatattaaaattgcc

SEQ ID NO: 73950 - DNA, 432 bp, Zea Mays
aagagaaccgtgaagttagtgtccccatcaggagaagaagtgttagtggagttggtcttgtcaggaccaaggaaagggagttgtcaccaagtcactgcccatattgaagagattaaaccatcagaggttatcaatgtagtatcagaattcccagatgtgtttcccaaggagttaccaggtatgccaccttaaaggaaggttgaatttgccatagagcttataccaggcaccgcccctatttccaagagagcctatcgagtgtccggaccagagttggtggaactcaagaagtagattgatgagttgttagataaaggctacatcagaccgagtacctcgccttgggcagccccagtgctatttgtggagaagaaggatggaataaagaggatgtgcattgactacagatccttgaatgatgtcactatcaag

SEQ ID NO: 73951 - DNA, 1055 bp, Zea Mays
cagcgacctctggtaacctccagcattcacgcggaagattcccggagcttgggcgaagacatcgtttcccaggaaccgcgcatgtctccaacaagtccacaacgaaatgattggaagccctcaaccccttacctgctgtacctaatttccttttcttgatggtcgcgcctagagccttgtcccgtgaggggccctcgtcggccattggcatcgcctgtttcccccggcggacagcaacatcggtgtagtcgtccccaggtagccagcatacgacaaacagttcaactcaaaaacacgattcaacctaacattcgaaccgcggatatcccaactcctcagtgtctccgtcttcggcacatattttcctacaattttcgcagcctgtgacaccccagtgtcacctagggtttcttctcagagttaactcataaccatatcacatgtgaaccaaattgagtaaaggacttcaaaaattaggaacaaaggtttaatcaagtctttttcatcttaataaattatgccttaaccatgtcatgcacctcagggtgagaagaattcacaaaccctaaacaaccttaaataggccattttagtgcaaagaggaaaaaacttataaaaagattttgaaaaacacaaaatcatgatgcgaaccaaataacaaagttaaagtgcactaaataaactacaaaatatagtaagaaagtttgatcagcaaagctttgcaaaattctcaaaaagacccctcaagctaaactccaaaaaggaaattcagaaaattcagaactgaattttcagccctttgtaaagttcagctgtgttctctgttttccaaaactcaaatctacaaaacccaaatataaaagtggcgccaaattaccttgaacacaccctggagaaatttgggagcaaaaatcggccgtttgacatattttggcagggatttgcctcgggactccaccctgtgacactgccacattgccgaggcgacaactctctgcccttgacccaaaatcgctcggctccacgcgcaaacgacagagtgtagttgggagaac

SEQ ID NO: 73952 - DNA, 490 bp, Zea Mays
attaacttgtgtgttatgttgctttcatagatactgaaaattcaacagctgtatgatggttcatcatgtattttctcccatggtcagcagcggtttcgtcttttgcgccattggttggatgtcgacggagtagtaagtctttattaaggccttttggatccactgtgattatgctaatcagctaaagtaatgtaactgtgatccaaacaggtcttaagtaaaaagtatgtagctctctgaactagaaggcagagatcattttctcatggcatttttcttgttgacagccatggggtgaagtccaaattattgaagaagatacacctcaaagaactccaagagatgcttttgcacaattagctgcacctaacagtttcaggcaatgtgcttcatcgataatgcccagtttgcatgtgtattgttctacacaacttgatcatgtggattctgatatggacagggattcactatcacccactagcacttcaag

SEQ ID NO: 73953 - DNA, 754 bp, Zea Mays
gttgagagatctcttcacctgacattcctttgtcgattctgtgtggaggcttatgggttttgttgactggagccaaagatatggagtgatgaagtttggtttgtctcattgctgtaacccgagatgaaatcccagatttgacgtgtctatggtacgaatctcaatgccatctttacacatgttgtagaagggttaatttagcacaagttgtcaggtgaagacatgttgtgtgggggcttaaggatttgagctagggatcaaggtgaacgcgctcaagttctaggtgagggctgaaattcagaaatctgaattttcagatttccctagagagctccacttggatggcctttttggggattttaattaattattttggccaaacttttctaatagatattgtaacttaattagtatatttcaacttttataattggcctaagccatgattccatgtttttcatggtctttttaccaatttctttctttttacttaaatggcccatttaaggttattctagggtttagacatttttcccactttgagtgcatgatatgattaaggcatgattcttaagacaaaaagacttagttgaatttgtgttcccaagtttttggtgtcttttgctcaatttgattaacatgagataatggttcttgagttagcactaagaagaaactctaggaaccactgtggtgttacagccttcccccttaaaggaatcttgtcccgagattcgggtcgaagtcctccggg

SEQ ID NO: 73954 - DNA, 699 bp, Zea Mays
gtcagattgtcactttcaacacaccaatggtgattcttgtcgtttgtgagcagacagtgaaccgaaattgtgcacggactgtccgagagattgtttggagttcatcaaccatgtcttcatcttggtatctctaaatcttatggaatttgtctgatttattcaaatttggggattcatagggttttctctctgatctagaattgggcagtggaattacaattttgattggtggaattgctcgtgttactcattgtgaatatggtgcaaaattttgaatggatatggatggttattttctgtcgaatcgatgattggatggatggggcggctagggttctagaaatcgcctctggacggtcgcggaccatccaccaggatggcgtggacagtccggcccctggcgcggacagttcgatccctgacaaaaacttacacttcctttctctgtgttgtgacatcatcaactattaaccagtggatattcctcatatatattgcagtggtctgggtggtcttaagaagaagcttgcaggtcgttttaagtcaaagcgccatcgtgcagatgatgtagattataatccagcttcagactctgaggcccaatcatcagctgggggcagcattcctatggacacagaggatgttccacacgctcatccagattatccaattgatgtcacaggatggacctatcccaag

SEQ ID NO: 73955 - DNA, 785 bp, Zea Mays
gtgaaattgacgccgctgcggaaccaatcgaggcgcggaacaagcggaattcttcaccgaggtgcgacaaccgcgtcgtggccacacctcaccgtggaggaagcttggcgcagcgaaacccgtggtaaacatcccatccctcgcttgtacttcatacccctatcgtgttgcaccaattcgaatggaagatagcttacaagaacccacgaaattgctcaccagaagctaagctccgtcgcggtgccgcgttgggtcaggggtagggcatgccaatgtatcatccgcgatgggactgccttcatcatgtccgttgtggcttggggttgcccgtgcaatggaaatccttagttctagggcgcccgtgcatggttccgggagactccggtgaactcgccaccgtaggcggtggcggcgccgccgcgctctgcggattgagctcgtgatttggggtgagccgttggattgtagatttgcggtgctgattgttcctcagcaaacattgggataaccggtaatctgggtcgtttaatttggaatgaagggataagattagatcacccttcataatatctgggccacccaaacttgatccgatggccgttgccgctccgattcggcttgatgcgcgactaatctggagcatcccgggtggatcggacggttgacctactttcgtagacctgggctatgtcagcgttacgtatgagcccccgagttatactgaaatcaacccgcagtcctatggtagggtcgcctgtgcctgggattcatttgcgctagacccc

SEQ ID NO: 73956 - DNA, 587 bp, Zea Mays
gagccctgagctctatataactgtggagagtcccgatcatcaacaccaacaaatctgttcgagcctacgtccgctcactatttatgccagcgaaccaatgtagcgtaaacagaaaaccaatttagcgtaaacagagtaactccctcgaccccacgttctagaaaaagcggattaggcccactttccacacggtcaaccactactgccatagtcaaaacatgtttacgctatttcaatccactgtttatgcaacaatatcgatttagcgtaaatacctcatccagacccatgttccagaaatacccgtttaggcccactttccacgcggtcaaacagttctataccctaacctcctggccgactcgccgcgattcttcaggcgtcgccagggcgattcgccttcctcccctcccgccagggcgattcgccttcctccgcccccgctcgccctcaaccctaatcgacgccgccgttgacagtgtcgtggagccgcccgccgctgacaatcctccgcccacgcgtcacattgttcttctacacgcccgccgacggttgtccggcttcccaaggtgctcgagttcctctgt

SEQ ID NO: 73957 - DNA, 550 bp, Zea Mays
tgaagactgagatagcttcatctcggaggtgatctgtagtgaactcttctcaggacagttacgaaagtaatgaccttcacgtccacattgatagcaagcttttcttgaagttatttcttgactttttccatgtttccctttttgtttcttggacctgatgcgacgatgaggctgaaactgtgtgcaagtaatagtccatccatcaatgtaacactcatgtgtttcttcttggggctgggcatccttgtgatgtttcctttctggaatactttgtaattcatcaactgacaatgcattaggtatgagagaatctgctattagttgttcttggggagacatctgtctgtttatgccagaaaataaaatctggttcttctgttttgtagtttaactttcgtttgtactgatccggtgacaaggaattccatagtactcacaccaacaacatgttccaaggtcacttgtctattggtttggttgtgcatccttttgcgtcttgaatgtctgttcatcaactgttttatttatagtgttgtttttacttgccaac

SEQ ID NO: 73958 - DNA, 701 bp, Zea Mays
gcgctgaagagccgactgtagtgccgaaggtgcctacagtcgggccaaccatatctaaagatgataaggccgaagagccacaggcggaagaaacaataaaaatgccagaaattttgagcccttcaacagtggtaaaactaccgaaggcgcaaaaagcttctgccgcaactcctaagaggaggagaatggccagcgtactggatgctgttatagagactacgaaggccttgagccctgctcctaggaaaattgttgaagctatcaaagtccaagatgaagccgtagctgagcgagccaaaaccgaagctgggcccttagtgcccagtgagacgaaggctgctgcgcctgaagataaagctgatcagcaaacttcggaaatcgatttgatagcagagcaagatatggcaggaagagccaaagaaactcctgcttccgaagcgccggccgaagctgctgattatatttatggacatgtttcggggaagaaattgtccaaagatgaaatcgcggaagcaaggcattatgctcaaaaactgaaatatctgaaaggagccttagtgtttaaaggcagtaatgaagatgatttcctgtactgtctcccggacaataaagaaatatttgtttgccgggagatagctaagagtatgggcttcccgaagctggaaaatggcctttcaattttgtcaaaggataatctggcc

SEQ ID NO: 73959 - DNA, 1495 bp, Zea Mays
aggaaattaatgatgcaattgcagtaatagaacgagagcggccagatgtaacattctttgattcagtagatgtggatttgaacgagagcccgaggccttcggacgaactcgcacccggagctatacgtgttgtcatctactttggcctggacccaaacactaatgaggaaatcgttgaagaaactccatatatcaaggcataaaggtagcctttgctagtaggcaatacatttttatgccttgatataagaaaggcaagcatcaattgaataatgtgagtgtgatgtctgatcttgctttcatggttgatttcatacatttaagtgtatgtttgaatctatattgagtagtgtcctactcaatatattgaataataaacaatgagatgccttgtgttgacgagtgatgtatgtccggtgatgtatttattagtcctttatttttaggcgcaattatattctagaaattggtgagcaatacttgacacacttgtggatggtccccaatattggtgtcgagcattccaatcatggattaatgccgcaacaacttttgatccgatcctcctaggtacgaacatcatttctaggatatgattaataaaaaatgaacgagatgcatacaatatatatgaagcactagttataaccattacttatgggtgtcaccggttgctgctgtagggtctacatggtggactagagggggcgaatagtcttttctaaaacttaatcgcgttggctgaccgaaataattgcggaattaaacttaaaggtctagccacatccgagatatgaccacggcgaggtggctagaacttgcgaccacgacaccacatgcgcatggtgttactaaccatggcgaggcagcctgggccgatagcgtgatggccacagtacgaaactatgccgaaactgcaccacgacacaacgttcatgccggagtagtcatcgcaacacgcacgcagtgtcttcaggcaccctaggccggaactatgtggtgcacacgtggcttagataagcgtctgccttgttggtccccatacgcatagaggtgacccaatgcacaagcacgctagtgatgtctgtagtctgctctagagacggtgcctttgatacgatttgacttccagttccaatagtttttaatccaacaggacgcctaggagactgacaggaagtcgccgagatatgcgacacgcagccgaagcggaacgcgcggcgcacacagcaggcgcgcgagataaggaaggtccggaagaggaaggtccagaagaggaaggtccggcagggggctaagataagggaatagccttccatgaataaatccttcctattattgagatagctttatataaaataaaaccttcctagtattagtagttctttcctgttatgagatcctaaattagtgggctgatggcctatatatatgctgtaaccgcacttagaataatcaagcaagaaataccacttcctattctcccctcttctct

SEQ ID NO: 73960 - DNA, 1046 bp, Zea Mays
ctaggatgattgtggccaagatagtgatttgattagtgagacttcaggaggggtgattgttggaggtatggttccaccagaaatgaggtaagtgataactacagagttattgagtactcatgaaagaagtggtgatggggatcataatgatccaattattaatagtcaagacgagacagaggatgatgaagctgtgattgttggtacaatcccgtgttctattgggggccgaggtgaatgagaagtagagggagcaatgacctatagtgtactatcgaagactagctaagaagcagggggagcaaccactacctgaacagccacaacctgaacaagttgaagctccagtaccatacctctcttcagactcctctccaacaccagttggtaatgttgttccccttctaaacatgtagaattacctcttgcacaaagaagagatcctagagtcaatgctagaaaacctccttctcgttatggttatgaacatgacattgctaagtatgtctcacactctagtgtctctcctgcatataacatttgttacatctctacaaacattgtctatttcgaaggattgtaggtgtgctaaacaggacccaaagtggaaggatgccatgaaagaacatctgctttcccttcaaaagaacaagacaagggaacttgttcaccttccagaaggaaagaaggcggtggagtgcaagtgggtctttacagtaaagtagagtcctgaaggaaaggttgacaggtacaaagcaagactggtggcgaagggatatagtcagacatatgggattgactatgatgagacctttgcacctgtggcaaaaatggtcatcatgaggactttaatctcatgtgtggccaattctggttggccgcttcattagctggatgtgaagaatgtatttcttcatggtgtaggaagaggtctatgtggaaattccacttgggtttgcaaatgagcagactgctgggaaagtgtgcaaacttaagaagtcactctatggcttgaagcagtctgtcaagggcgtcaaacccctgac

SEQ ID NO: 73961 - DNA, 838 bp, Zea Mays
tagtaatatgccctagagataatcataaagatgagcatatttatttgtattcataatatattgcttaatttaatatacatggtcgaagatggtgggaggcgatgtcgagttgtgccagccatggagcagagctggaagagcgcgttggagcagcactgaagaggagggcgcgcttgtagcggaagaggaaggaacaaaagtctagactcgtgataccatgtaagtaaatagaattgcaggaattatgtcttgtattgatagagaagaattataggtacatatataggggaggagtgcaagaggcaaaaggaaatctcataaacagggaaatcggcaggatcctaattgatccatcctggactcctccccaaaactctctatcctagcctgctatacaaggctcaccggctatagaagccaagcatcaggctgctatacaaggcaatgaatattgttgtttaatagcgacgacgacggctggcaagttggagtccagcaggatagcctgaccgatgtccttcatggcgactcacccagtaggatggtgcatcaccaacgcctcctcctcctcctctccctcgattgttcttgctccgctgccagcaggggcgcatggtggcggagacccggttgtttatccacgcatcgccatcgtcggtgcctcctcttcctcgttgttcttgcctcgctgcctacatgttaacggttcgagacacttggcgatggggagggtaaaggcggcgacagctgacgagtcggaggcagcaggatggcctactcgatgttctctatgacgacacgaaagaatctaggtgagggagcaaagaccaggaaagag

SEQ ID NO: 73962 - DNA, 495 bp, Zea Mays
ttctctaaaattataagggttttttagcaaaatggactagtgaaagggtatgggtggttctcgaccgttggattaaaagccgagcgtccagattaaatcacaaccctcgcaaaccggtatgcgacgatcactgcacgatcgaatatcaacggcgtagattttaaataacctaaattgactctcgcccgatcgatttgaatcagacgcaccagataatccccgtgaatcggtattcccgcgatctaatcttagccgtcaacattggatccgacggcgcacgtcactcctcaccatctctcacacagacgcggcgacgtcgcccctccacgcggcggaccatcatcggggttcatgaattccgaagactttgcatcccattttcccccgtagcatgaagatttatggtgtggtaacgaacatgagggaatgcaagggtagtcataccagaggtaaggcacagggagctccagccacgaggacgcgcggttccgctgc

SEQ ID NO: 73963 - DNA, 453 bp, Zea Mays
ggaggtagaggaggacgaagcttcggaggaagatacaactcccaaccaagaagactattctgcttgttctgtagagaggataaaggacatacaacaaggacttgccaagtcacaatacaaaagcagaaggaaatagctgaggccgaagcacgacagaatcagcagaaccaagttcttcataccgcttcatcttactctttatacatcccagagtacgtgtgtaaccaatagccaattccacagtctacagcttcggttgctttagcaagcccctctccaactgggtaggccttacctcaaccacctgcatcagttccaacttcatcttacaatcagcagcctcaggggcaatatcaagatcagcaacagtgtgatacaagagaagagtccgaagctcgaatagtcaacaacaatgttctcgaatataaacacatctactgaagcaacagaggg

SEQ ID NO: 73964 - DNA, 362 bp, Zea Mays
cacatttctaatatgtttctatatattctcgctgaactacttgaactagggttaaatggtccaactttaaattaccgcatctcacagcgacaagtttttcatgaattcgcttcgtcttaacgtcacataccgccaacaactcatgtggaacttcaataagattttgaggtgtaaacctaaaaactgttcgcaagtggttttaatatctaaaccaccaatagcctcgtgagtagcgtgtctgatgtactctctcgtaatctcgacatatatcaccgtcaatttgtgaccatcttattaccaagttctccggtgcccccattatacttagtgaatcattttgttgatttggtcaacacagtcta

SEQ ID NO: 73965 - DNA, 403 bp, Zea Mays
gagaacgagaggcggtttatgggacgaatgggtggaggcgcgatgataaggaattgtagatgttggcgtgacgtgtggtggtgggtgttggaccatgtcgaagcagagtttgactagttgcaaatggataatggtggctccaacagcaacagccatatgaggaattagctgcgatggctggatacacatggatggtccgatgggatttaattaggtgagactagttcagatgatgggcctcttatagcgtaaaactttagcagaatatcctcaaatatacttccttcacgtccaaattagggggtcattttccaccatgtttgagttaaacctgtaaaactttgactacaaataattattttgttatgtgattttaaaatctaatggtcgtatattcagtgca

SEQ ID NO: 73966 - DNA, 452 bp, Zea Mays
gaacaacggcgcaaagcaggctatttatagaggacatgagtgaccgtccacttcctaccacgcccgctgaatagtcacaaacattcaataagcaattcaagccgcctaaaaacgagtcaggcaacagacaccgcttcgcgtaacacgacaccatttggactaaggtcaactgctcaggcgatatgattatgccccacggtcacgtcaagttactactccaagacagtgtgctaaacgctttgcgtaccaagacgtcccttggtcacacccattggggggacgaccaggaattttcaatagattttctggacaagtcacatccatacagtatatacaatgaatgtattgagggagaaggaatttatcggtagagatcaaagaaaatccaaatatagctactgaactacaagtctagtcaggagaagcattaaagcatagagcaaggcgaagac

SEQ ID NO: 73967 - DNA, 1063 bp, Zea Mays
gctagcctagagtagcattggtcgtctaaggacttattgattattacttcacctcatccttcatactccttcaaaatattagtgacatcgactaactctatgttgtgctcctatatatcaccttgccaaaagtattttattctagtacggtctatacttttctcaatctattaggtctgatctcattcttgtgcttgcgacctctttgtagatgccccctgaccatagcctttatttttttgggattctttcctcttccattattaaattgctaccatttgaccatctctattcccttgtcttggtatgctcgtacccttggagtcttgcatgctcttatattcttatgtatgcttattttcataccccaatgactgtttaagacatttcagttaacatgtccttgaccacccttgtttcttgacgatccatgagcggtcattttatttttgcacatctgtggtaacctcgttgtttccttgtaacttccgtcggtaatgaatttttacttcaactcttctgttggaaccctacctaacttacccttgattgttttctccacctcgccattttgtgagtcttaccttaattctatcctttgttatgctttttattgatatcatctttatctttgtcaactctacatgtcaccttgttgcttattttatacctgccctataaaatcttctcttttccatctcaaattgagagttgtattttacccatttccccttggatgtatcatattctttgccacttgaacttttaaccctatcgtttaatgtgttttgttcgctatcgcctttatccttgtgatcccaccttgatgttgtcgtacatctgccacttaaaacctcccttctcccctatcaattcgagagtggtgttttacataccccgtgcttggccataacctcatctttgccacgtgcaaatgttgtcttaactccattctttgttgtactcatacccttggttcaaatatacctttacctcttcccttacacccttttatgttatcctcttcaacccttgtaatacctatatttttaccatgacattt

SEQ ID NO: 73968 - DNA, 648 bp, Zea Mays
cattccaggagttcccgaagttcgccatggatgcgacatccctcgatggtggagggctctggcatggtgcagataagagtgatgccgctgcgaggctttgactggctcagttgaggatgggaggtgtggcgacgtcgacgtctttcatgatgcgacgctagacatcacgtgccttcgatcgcgcacccccgtcgaggactttgccagcggcttccctctccagagcttgtcatagctgttgcagccattgttgttcctccttgatcttgtcatgtagctctcggagttgctcaaggtgagccacacgggtcccaggaggagtcttgacctcgtctgctttgtgtggtagaggctggtcaccttctcgtagcatattgaggtgatctcctctgtcaaggatcttcgagttgatgtggaggcattcccgggtcgggtcatagccttccccaccagtgctataaccttccgagctctcggagagcatttcatcgcatgcatacaagaactgcagcatggactcaagatctcgcagcccagagaagtctcagccgaagcccagaccgtcttcttccttggagtccaagcaccccgatggaaaagtaagcctgacatacattttggtgacagagctggtgtcggaacttggat

SEQ ID NO: 73969 - DNA, 468 bp, Zea Mays
gttctaatatattttctaagccagcaactaggacgagtacttagaacacttattcaacattgctatctgttactgacttgtgtgccacaaatatatattagtgagccttcccaaagctccacctttctctcgatcagaataggtacccctttgcaatcacacccacgctctttgcgctagcacaccggccaccgtttgacacctgcagtgctggtaagaaccttgtaagagcagggtaagacgcttcataacttgtgttccaacaccatccttgaaagtagttgtaggattcacaccttttgcttgttgctttgtttctgttttgtactaacaatgacaggaacatttcatctggagctccgtgacatgatgagagctatgtgtgatgcactcaacatgaacactgaaatgttgaagagagtttcaggatttgttgaacagatggacacgatgaagactcatctaccg

SEQ ID NO: 73970 - DNA, 845 bp, Zea Mays
cccccgccggcgatctccgtccaccgacggtgctccggcgactttgggcccctctccttccctccctcggtgagcagacctctccctctgttctcctctccctctctttctggtgagcagtggcccctcacttctcccttttgtgcaacacttcaaatcttgagaaatctggtgaatccctgttgtggttgtgagtctctgtgtgtattgagtatccctgcaggttcttagctccttcgggagggttttcccacctcaaatagccatttcaccgaaaacctaattccacgcacgccacgtgctcggtgaaatgcccaaaccagccaaacttgctccaattgaacccaaatttttcaggcaccttcacaacacttccagtaacccaaatttttcacgccaatccgagattccaggcttaaatttcaccaaatttcccgttttgagcgatcgtttccgagccgagtgcccaaattcctttttcttcgcctaaattcaaaccaagcacacacttcactcatattcacctatataaacctattcgtgaagtatcggctaaattccatatcgtttcgtgcctcaattcgaattccaaacctcctatggcactatttatccttcaaacgtcgctttcacgtcgtttgacttctcgatcgtctcatcttgtgtttcctgtgccatatttctcttgtgtatgtatttattcacatttcatatacttatgactatgtgactaatacgtgctcacctcttctgtcatttcagtgaccttgattgcccgtgtgccgtctcccatcctgcctggatcgtcacctctcgtgtgagctttccaggtagtcatctcattc

SEQ ID NO: 73971 - DNA, 558 bp, Zea Mays
aagagcatcaaaatggcaccttttgaagctttgtacggacgacggtgtcgtactccgtcaaattggtctgaaccaggcgaaacaaatttcttcaggcctgatatggtaaaggagacagaagagaaggtacaacgaataattcataatttgaagaaagctcaagctcgtcagaagagttatgcagacaagcgacgataacccttgcactttcaagttaaagattatgtctacctaaaagtttcaccaatgaagggtgtatcacgtttcggggtaaaggggaagcttgcacctcgatacattggtccttttcctatccttgaaagatattgaccagtggcataccgactccagttacccaaaacattgtctgttgtgcataatgtgttccacgtgtctcaattaaagaagtgtcttcgggttctcgaccgaaccattgaagtaacggatgttgccttagaaccagacttgacatatttagagcatcctatttgagtcttggatcaaaaggacagaattacccaaagaagaactctcaagttttacaagatctagtggaac

SEQ ID NO: 73972 - DNA, 987 bp, Zea Mays
aatcttgaggaacgaataggagatcccaatcgcttgaagacagaaaatcttgtctcatcaaaattcccaacagaatgagtgagaacctttctgcgatgaatcgggacagcatttgcaccagataggggaggaagcttaacaatattagcaaaagaaattttcttcttgcccttaataatccatcaattggcattttcttcctgaatgaatttcctgtattcatgagtccaattcggtccaccatgattccatagattgaagaaagccctgaattccgaacgatcaatgcatttagaattataaacatgaaaaccgacggccttggagaataccgagaagcgaaaacccgatcagatagctgagatacattgaaaccctttgcaaaacctcccagagcagcttgaagaagataaccaactgaaaccgtgtcaagcttgaatatgcaacgaccaaaagagatgaccaaccaaaaggtcgcagggagattcagacgcctaggacacactgtagaagctaaacggcgccgaatatcatcctcaaagattgtccccggccgaaaatccagctttgccagatccatccagaagaaacaaagaagaccaagtaggaggagagagggggagcaggagagcacctcaaagcagaccaatcctgaaaaccataggaagacgaagagagcgtcatggacaaaagagatccatacgccatactcatccgatgatgaagttggagccggtggccaagtcttcccaagggaggaggagggagggggagataggaatcgccatcaccaaatttttcctcgtcacgccttttttgcctcagtgcgtctcctcgcagctctagatctaggcaggtacggtggtgctagctccgcagcttcgtcgccatggatcttgtcgccggcgccgtgggcaatatcatccgcaagctcagtcctgcgactgatcctcgccaccttcgtgaggtcgacgacgtcgccgttgc

SEQ ID NO: 73973 - DNA, 469 bp, Zea Mays
ccatgacactcaccccaccaaccggtgaatggtacatggactccggcgccaccgctcatatggcctccacctccggtatcctgacttattgccacccccttcctcttccactccttcttcaattattgtcggcaatgggacctccttgcccgttgtctccacgggatccacacttatgggtcctatccaccttaataatgtgcttgtctcaccatctattatcaaaaaccttgtctctgtttgtcaattcacaattgataataattgctctgttgaatttgaccccgctggtttttctgtgaaggacctcaggacacggagcgtgatcgccaggtgcaatagctcagacgacctctatccactctccatcccgttgtcctccaccactacccccaagtcctcctcaccagcacatcttcacagctgtggcatcgccgtcttggtcacatcagccacgacgcccttcgtc

SEQ ID NO: 73974 - DNA, 649 bp, Zea Mays
gacgggtgggtcctgtgttgcagtgtaacagagccgcggggcaaaggtttctggtgagcgcgtggcatggggagtgcatcaaatccgagcaggcggtagcgttcttcatagacatcatccatcacttcgaggtccccatctccatcatcacagacaacagcacacagtccacaaggaagacattcctaagcttctgcattgaccaccacatccacgtagactggtcaaccatagctcatccgaggacaaatgggtaagtagagcgtgccaatgacatgatcttacaaggccttaagccaagagtcttcaatgaactaaacaagtttggaataagatggcttaccgagctctcctcggtgattcagagtttaaggacaacctcgagctgggccacgtggttcacgccattttttctagcctatggggtagaggccgtcttacccatagacttagagcatggctccccgagtatgagcatacaacgaaagcagcaaccaggtcaaccgtgaagactcgcttggccagctggaagaggctcaggacgtaacactcctccactcggccaggtaccaacaatcactccgacgctaccacgtgaggcgtgttcgaccttgggggttccaagaaggagacatggtgcttcggttat

SEQ ID NO: 73975 - DNA, 498 bp, Zea Mays
tgaagaatgcacatttgatatttttcaaatcatccgcacacacatgacaaataagcagaaacaatatatattacatctataatcgcattacatagtagtgtcaagaagttgatccgtagttatagaaatatatttacatatggctcatcttaagtcattatgatctagatccaaataaaaaaagaaacaaaatagacattcttatgcaagctcttcaccttcgtagtgttcctgaaaaaatgaagaaaataaaatataataggttaatacaaaccacatggaaggaagaaacaattcaaattagagaaaggctatgaacagtgcataacacatggaactctgcaaaaactagaacatataaatcagtagaatctcgcatgaataaacatgtgttacaagattctgttgtttgtgcccaaggactttcggccgaccaataaaattaaaacttctattgatccacaaggtaatgataaacaaagtacagtacttgacacc

SEQ ID NO: 73976 - DNA, 549 bp, Zea Mays
aacgggtagatttttctcccattccttccgatcctagctggcgcaatgcgagagcgggcaagcatgggagaacgtaagcgagggtgcggcaaagttagggttaccactcctttttcatgccattcaccgctattgtatatagtatagcaacgtcgtgccctcatcttctgccattttcgttgctgaagcatagatgaattctctctgtgctcatcctctccactacttcgctaaaatctaaccagattctctcctctcctctctgcacttgcgaatcttgagtgaattctctcttcatccaggtggtaactatccataatcgatttcgttcgattatgctccctctctcttcaatgtgatgatatttcatgaattcccttgatttgatgattgctaatgactagattttttgaagggagcaggtctgcctctcctcccccttttcccctttgatctgtttgtttcctctctaattgctagtagggttccgataacaaatgcataaccctttcctctgtacccgttttctggttgatgatttaaactgag

SEQ ID NO: 73977 - DNA, 759 bp, Zea Mays
ttgggccgataagctccttagcatgtaacggtgctcaaacgagggtaaggagaacgtgaacggacctggagacggcggtccacgacgcggtggttcacggtggcgtaaagaaccgaattgggggaaatttgaaattcgcgagctacggtggctattcggaggtgagggctggtgtagtgggcgcgtaacaacctaacggagctagccaaacgctcaatttatagtggttatcagcggtggcacccaattttggtgaagacacgcgggcggatagagatagagggaggtaacttgcacgagttaccgtggcattcaccggagcaatgactcagccgatagacagaccatctatagcgacctattgcgacgtggtaacaaggtaggagcgtggcatgctcgggttaacggcaatcatcaccgcgacgaccgcgcggccatgttgtggcacaagttggtatggcaacatggcggccacagtgccccgaccttagccacgacgaagatcttttcaccccagtcattattcgcgcgttcaccgggcacgaatcctagcgccggcgaggatcgtagcgtgggggtcatcgacagtgagttcagtgaacctacgatcctttgcaggtattttaccatggcgatctccatcagagcatctgacagagcgatttgaggaatgattttctccaatttttatgtaacaacttgatcatttgcctgtagaaaacttgttttcctataatccatctttaattttggtatagc

SEQ ID NO: 73978 - DNA, 858 bp, Zea Mays
gttgctatagcagaatttaagctggatcatagggctacaagtttgctgcagacagattggcatgttttggcactaaaatccgagatctaggcgttgcaaattgttctgtcaggcgccctgtcgaacgtttccaatggtacagtaaacaaataggatcaggttcagagaacctcgccgccggcgatcgtgcgcctggattcgtgctcgtcgcggtgattcatgctcggcccaattagataacgttgtggggtaagtaaatatcgtgtcgtggatgaactccggccactattttactccggctgccgtacccgagcatgtcacggccactttggataggttcaccggagttagccacctcgcggacttgcaccatgtgcctcggcatttaccacgtcgcagtcactcgtgttatgcatgtccggtgatcgctggtgagcccgccacggtgaaagccactaatccttgcgccagtgcaactattgtctctggccgccaccgcgccaactccaaattcactggccaccacccctggagcctataaattgagtgtgctatcggggccgtaaggtagtcaagcacccaatccaccaagccgtgcctccaagtcgtaaggtagtcaagcacccaaattcaccaatccaccaagccgtaaggtagtcaagcacccaaattcaccagagctcgccaattttggatttcccccaaattggtccgaaacactgcgccttgtgacctcaccgtggtcacgtgctccaggtccactcatgccccctgctctttcgtttcagtatccttgtgtgtccctgatgctccctgacccagccgattaagctagaacctattagatcgccgggaaca

SEQ ID NO: 73979 - DNA, 780 bp, Zea Mays
catggatatagatcattgaggattgatagcttgagttaataagaattgacttgactctctcaagcaccccaaagtttcatatcatctcattctcctgcaaagtttgtcaagcatgttttagtacccatcgcttgatgggtccattatggttagtcaacaaagatctaggatccaaaaagtcctttgtgttagcgcttggtaaactcattacctttctagcacaagttgcaattttgggttgcctagttacatgagaattaattgacaagctaggagtggaatagttaccaatgggacaatccttgcattgatgtcccttctttcggcatatgtagcaaaggcgatcttcaagtcttgaagatttcttccttccttgtttcttgcttgctacatggttagtaaatattttcttttctagccctatgcctttttgtttcaactggggataagatttaataaagtgtcccttctttgaacatttaaaacaaagtttatcatccttgttaataatcaagccatttttaatatagggacatgatctaatcaagtgccccttttcaaagcattcactacacttcttatttctatttgtatgaagtgtgacttgattgttaccttggatgttactttttatggaggcatggttgaggcttttggaagaggtattgattttcttcttttgatccctcctcttggcaatcctcaagtccttgacattttcttcaagggatttagtgcatgccacggttgttcccgtctcaagcttctttaccatgtgat

SEQ ID NO: 73980 - DNA, 554 bp, Zea Mays
gtcaccggcgattaccagacacgctaaggcgagtcactgcgacaaagtactgcgtttaggcacgtggcacccgagcggcaggtggctaagtccggtgaggttatctggaccggccgtgagacaagcggacacggcgaccggggcagaacagtgtcccgagcacatccccaatgcgatatttcttacctcgagcagctatctgcacttcactgagcatgaatcgcaacgatggcaacgatcacggcacgggatcaccggcggcgatacactgaatctggcaatctttgtcaggtcactgtaccattagaacaccattcagagcacttgatagagcttatttggggggcgatttgctccaaatttcatgtagcaacttggccattcatccactatcacccaagaaaggccaaactttgaaactctataaatttcatgaatttaaattcataatccttaatcagctcaagccatcttctctgcctcatgtttagttctgactgggtaaaaatatacttcaaacttttatgatctgtatatatatggcagatattttc

SEQ ID NO: 73981 - DNA, 727 bp, Zea Mays
actgtgaggcaaaagctctagcccgggtagcagaactaagagcatccctagagaatctgcaagcgtattgtaacaccctgcatgaagaggtgcacgtgttatacgaccggctcatccaaatgtaccgccagaagttgcagcaatgggagccggaccatctggagcagctagtggaggacctgatggggagttggacttttttggagcccctccttccatgaacctcgcagatgaacgttctcccaaggctggcagtggcgcggtcaaggacgaagataattagagtagtgtagtttaagtaatgtacttatgtaaaataaataaggaagttgagctgtactaatgagtatgtataattattagcagttcagcatgatgtaataaaggtggtgtactttcggcatgtaataattcaggatgtttttcttagatgccatcaagaactcgtgctcatgacggggcgggaacttcccgtggcggggaggaaactccaaacccgccacctgtacctcctacattggctgaggctatcactgccttagtcaatgctaccactgacaacacacgtttcctgcgtgaactggcagggaatcaatttcagcaacatggaggcagaggtcaacctcaagggccacgagacaccacatacttagagttttctgaaacccgtccaccgctttttgtcaaagcagaagaaccattggaagcaaatgaatgggtatgggtt

SEQ ID NO: 73982 - DNA, 749 bp, Zea Mays
agcggagctgccagaatctgccatgagtttgttgcaagaagcggaactgccgaagattcaaaaggttgctgcaataactccgaagagaaggagaatgtccagtgtactggatgccgtcatggaatgcacaaaggtgctgactcctgcttcagtgcctgctgaagaggagaagattgtaaaaggatctgccgatgttgggacagtgcaagctgcgactgaggctgagccctagatgctcgctaaagcgagaccctcgggtgccgctgaggagggtgctgaagtaaggtctttagaggctgctgagggaccatcatcgctaagaaaagatagtgctaccgaagaatctgagttccctgcccctcaagcccctgtcgagaaattagaatttatagtgcgacatgcttcagggaaagaattatcgaaagagcaaattgccgaagcgcaacattacgccagggatctgtagtatcctcgagggtcattggtgtatggtggggatgatgcagatgacttcctttattgtctgcctgataataaagaaatccatgtctgtcgggagatgacagacaatataggatatccgaagcttgaattaggtttgtctgcaatgtcgaaggatcaacttggagatagtcttgtctataacagtctcaaggtgggaacactttttactagttaaaaagcagattattttcgtaatttatttcctttttagtgtgtactcatcgtctatttttgtatggactaat

SEQ ID NO: 73983 - DNA, 347 bp, Zea Mays
ccgaccctattccacgttagtagtgaccgcacagtgccattttatattttaaaagaatctggttgtcaaatatgtcttctaggtactgatgtcaaggctctcatatgtattgaacagatgatggaccctgctggcattgcaaactggtcagtcacctacgttgactggtctgaaggaaagtggcatcccagatcttttcgtgctaaggatgtcacttatgaacgcctgaagaatatgactgtatgtttacctttattttgtcattttaacatgataaatatgatccttttatgcctctaacttccgttttgctgcagtcgattgatgtgagctaccacatcaccagt

SEQ ID NO: 73984 - DNA, 679 bp, Zea Mays
gtcagaacagctgaagaagattctgatggtatagtagcgaaaagatcttcaggttcagtgtatctcgccgccggtgaccttatgccgcgattgacgccggtcatcgcgattcgtgcgccctggtatgcggataacggctggcggtgaaagatctcaatgaagagaagggttggagccttatcaccggcctattcactttgccacttgccgcgcaattgaccgaggtgtcctcgccggagttcgccgcccttcgtagccgcgccatgtaattagaagagttaccacgtcgcagtacatagtcgtaggttgtctgtccatcgcttgagacattgccccggtgaacgccatggtagttcacgccggtgactcaccccctctcctcggccgccagtcttccccttccaaattcggagccaccgctctcggacactataaattgtgtgcgccgctagctccgctaggttgttacgaagccagagcacccacccttgcccttgattggccaccatagctggagaatttcattcttcccccaaatctgttgtctgcaccactgtgagacgtcgtgtcgtggccagccatctccaggttcgccctcgctctccttgtccgtgcttcagcacccacgcatgcttgtgatactcatcggctcaacccattgagctagaccacgctcaat

SEQ ID NO: 73985 - DNA, 678 bp, Zea Mays
gatcttctatctcttctccaaaaacacccctcgccatggcgcgctcgtcgttcgtccttgacgtggtccgtaccggccatggccggcgacgactgctacggctaactaccggggaggcatcactggcttaaggcgacctaggaacatccatttaatcgacacaaaccccactagaaactatctgtccatgatcagggcggaacccgtggtgtcgatcctgtgttcccaataatctacgctcggattggtcaaacggccactacgaggagcttcatgaatacacagagctgctaaaacaaagcttgaatcggacagggccttactagagagggctggccacggagcgcagagctttacgttcgccggagactgagaaaggggaaaacggtgtcgcagcggctttgggcgaaattgggagatgggatcggggctataggtccgtaagaggctgtgctttcactgtgcacaatcgatttgggagaaggtggagagggcagttcgaattcctggttgtactcaagcttacttgaagaacagcgagcacctcgccgtggctccctgtcctatatataggcacggcggtccggtgatcgatccactgctacgaggtgggctattaacgcatggcaaccacgtaaggaagaggcacagtgaggcgaatcaaagcatgtgcgacag

SEQ ID NO: 73986 - DNA, 300 bp, Zea Mays
cgagttttcatccccttttattttataattatttttccttttcacctacgcttaaccatacgcagatgacttctcacggatcctcggaaggagggaacgcacagtcccacacggacggacttgcacgagagggtttaacccgtatcttgtgggaggtacttcagggagccggttacacgacgcctccctagtacgcagcgcagctgttcgagaagcaccgagtgccccgctgtagggtgaggatgaccctagagcctcatcctttacagccaggctggcattcgttggactccgactctt

SEQ ID NO: 73987 - DNA, 571 bp, Zea Mays
ttactagatttccctttagcactcaaatgcttaaataaggtagttctagggtttgagtattttcccactttgagatgcatgatgtggttagggtatgattcttgagatgaaaaagacttgattaagttttagctcctcaagtttgatgtcttttgctcaaattaatccacatgtgataatggtcacaatgtgggttttgagggaaaaaccttgagtaacatctggggtgttacagataggcgggtggacgaggaaaagagcgatttgggttaaagggacggataagcaaccatgatcgcttctcggatccatgagaggatccttcacccccttcacacccaaatctttttgtctttccttgccccgaattcttggcctccaccgaaagtgttgtgctcatggccctgctgtaagtgaggtctaaacaagtggccatcttctgctgtagtcgatcattcagacctctcatgaaacaattcttcttttcaggttcgtgtcaacttgctctatagcatactgggagagatggttgaatttggcaaggtatttcatcactaagtctcctccttgc

SEQ ID NO: 73988 - DNA, 559 bp, Zea Mays
agggaaatagagcgcatgtgccaaagaaaggtggaagcagcgccgtcgcggcgatttcgtgccgtcgtccctggatcaccctcggtgggtcgatcgtggcaattgcttgccggtgggggagggagggtgtcctgaatcgtgcatcaccgaggcgggcgctccatggcttccgggatcggtaaggcttcaatcccatgtcgctcgtacctgccaccgagttcgtcgattatgggtcggtttggagcgttgggcgctatagattgttcgccggagttcaactccgcctcgtccccgccttattgcatggccagcctcgtctagtgcctttcgcctacccatggtacctcgatcatgttcgccgtcatttcctcgtgccgtagccctaataacatcatgtcggggcacaagttcgctagcttgtcggactccggccatggccctgccgtggccagcgggtgccgccgtcgggccatgtatggggaggaagaagtcgctggaccattgatcctgatacaagcgagcgagattagaaggagtgtaacgactcacctagttaatt

SEQ ID NO: 73989 - DNA, 379 bp, Zea Mays
gggagcttgccacggtgaaagccactaagcttgagcgccagtgaccttcttcccctccggccgccagcacatcttcgtggaattagacgccaccgccctagaacctataaattgccgctcttgtccgctccgctatgtagttgtgtaaccagtgaagcaacatgtgcctcaaatcctcccctagaactccccaatttgggatttcccccaaatccctcaagaacactgggcagtttgacctcgccgtggccaacgcgtctcaggtccgctcataccctctgccctcccgttttagcgttcttgtgtgcccctgatactccccgcccaacttgattgaaccaagctatcttagatcgccgggaacgcggttgaatgtccg

SEQ ID NO: 73990 - DNA, 324 bp, Zea Mays
gtcaaacgtgggagaaaagaccctagaagggcctacctttatcaaagaggcagaagagaaagttgccctgatccgcaagagactacacgaagcctagagtcggcaaaagagttatgcacacaacaggagaagagaactcagtttcgaggaacgtgattttgtctacctcaaagtctcccaatgcgtggagtcaaaagatttcaagcaaaagggaagctacctccgcgattcgtcgacccctatcctatcatcggcataatagggccagcagcttaccgccttcagttgccagaattcatgtcagatatccacaatgtatttcat

SEQ ID NO: 73991 - DNA, 715 bp, Zea Mays
gcgatccactggaaatcgctaatttaacctgaaagccgctctagagctcagtccacgcgcaaccacgaagcttgagacaatcctgatgcgttccttatgatctagcgcggtatagcttaattgacgggaccgacgagcatcacaagcatgcgagagtgctgaaacatggacaaggagggcgagggcggacctagaggtggctgaccacgacagggtgactcacggcggcgtagatggctaatttgggggaaaccccaaattctccggctatagtggctaattggagacaagagttggtgttccgggtttgtaataacttggcgaagcaggccggggcatcaatttatagaagctcaaagcggcggcttcgaatttgggaggagagcggagcttatcttctcggcgaggcgattcctgaggcccgtagtggagcacatgcattcaccgtgtgacagtcactatctaggggatgccacgatcatgacaatgcggtgaatcaggcgactatgtgtcccttgctgcgatcacggcgagcaccgacggtgatatttcatcgatcgcacaggcaagtgggtacgaaggtgactcagctctggccaagccctcctcacccaaaatcttttacccaccatggttatccactccacaccggcacaaatcgtggcaccggcgtgaattgcggcgtggagatcaccggcggtgaggttcactgaat

SEQ ID NO: 73992 - DNA, 278 bp, Zea Mays
aaaggggggaatggaaacacgattttaaccataactgatctgaaccctagatagctcatccgacgactgatctcgtgtagtactgcagggtatgcgtggttgtaatctaaagcgtagaatgatgatcggacgactcctaatacacgatacctcttcgccggtctatttttcaaaagagcccttcgggtatcggataactaacccgtcgtccaccctgactgtactctgagtctgtggaatcttgcgtcaggccccctgacctttctggaaaatgaggc

SEQ ID NO: 73993 - DNA, 1192 bp, Zea Mays
cgggaagctgctctttccgtgagcgccaacattcttgtcgtttcatgcctgaattgtctcgcgtcacaaccaactcttataacggtcggttggtccaagtaggtacagagccactgtccgcatgattggatgcccaaccacgtgcgtctaggcaactaggccctctgcttactgtctaacgacattttgtcttcactcgaggccagtggccaaactgggtagacccagccactaggctgggacggccccactattaacatggtgactaaggatagttttagagggtctaccttaattcagcagtagtgtgtactccaatcttgaagtaccaacagtggccccaggcccacctcgaatgagggggcgaatccgtaggtggagccagaagtgtgctttgattctaaaaggcatcatgcatggggccctcatgtctttgtgccttgaacggagggtgttcctgcacttggcttcgtaatggtgcttggtggcatacctatggggacctcatcctgattgcatttaattctctggattatgcttttggaccttgccgagcaggatttcaagaacctatccctcagtgaggataaggtttaggtctctaggggccaagtcctaggtactagaacagttgttctaggatggtggagggcttacggtacggagccaagcttctagtatggaaccaggctaagtggctacttgcctccagaccacccctcagaacgtggtcctttcccctggacatagccccttacaacccgatccttatccattataaggggaggttctaaaactgagtgacaaggtggaagcaggtttcttgaaggcaacaaaaactagatcctactcaaggttttaggtgagtggcgctcgggccttgcttcctgttgtaaaggcaagttttccatcagctagccccctgggatattggtaacctcggaagcttgaggctacgatcagaccaggggtcgatccctgttgtggccaaggatcggtgcttagcaacgcacccttgggacctttaccctgtcgtattcaatccttcaaatagtacaactgagacttgctgatcctagtttgggaccatcccttgagtttgaacaaggtttggaccgctaaatactctatccgaggtactaggtcagctattgtaatacccaaaaatgtaaaataaaaatatagttgattt

SEQ ID NO: 73994 - DNA, 719 bp, Zea Mays
gcttgcctgcaagtatttctttctgcttctgtaagtgattattcttgatgcgaagggcttgcagcttgagttggtctttggctgaaaggcttaagatttcgccgtcttcgacgatgtcctctacctctggggggtgaagtctggtggggtgcttgaggtactccctcagagctacatgtgcacacgccctctggagtaggcgaattgtcttggtgttgtcttttgctgttgactgcctcatcattgaaggcctcctgagggatgtcatccacgaggggagccttgctcttcttttagcgagaagggccgccttcactgtgtcgtcgatggaagtagcggccttcgagtcgctctcttgggggccatcacatgaatagtttttcgttgcacaaatagtgggcaccaaatgttggaacttgctgacacgttgtcaagctagctcaaacagtgggagaacgaaaacagtttgatgcctgctaacacaaagtattagagaaatagtgttttttccatccgccgcaatggtgatgtatgggggtatttataggtaaccaggggacggttccaccctgtcaaatatggttatgcccctagttacctacgttatcgctagaatattcccctcccaggggttatcgcgggtcattacaacgtgattaagtacacccacggacggacacactagcaactatgcccacacagtggcttacaagtgggac

SEQ ID NO: 73995 - DNA, 781 bp, Zea Mays
caactatggcaggaacttgggctttgggtggattccttccttcaagctgagcttcgagggctgcaatccttgcatgtgcgtcttcaggttcttcatgtatccttgagagatctagggtagaaatgtccagattagtgttaagacctgccagcacacctacaagggtgttgaggcaatcttctccagcttcacctagaacaacacttgtctggctttctccacgaggacgtaagggaaggttcctgtacatcatgtcgtgtagctgctgccgataggtatggctgagggaccacagagctctccgagcagcattgctgaccgaagcagcgtaggtggatagcggcgtcagagactcatgagatgatagagtcgtgaaacctctatctcctgcatccaacactctcatatgcacgcgagtgatgtaataacatgtccaaggaggctcagacactcaccttgtgtcatatagaggtcgaacataggttcccaatgcatgcagcacatcctgtagtaggtttggaaattgtcccatctcgaacattgaagtgtaatgttctgcgacaggccacaatccaatgaagttgtcttcttgttcattgttgacattctcaatgttttcattgttttcttctttttcttcatcaccggaatcatcttggtcatcaccttcaggagccggggcttgagctacttatacaggtggtgctaaagatgaatctcccacagcgaaggcatcagactctaacaacagagtgggtgttgtcaaaatatcctcagaact

SEQ ID NO: 73996 - DNA, 393 bp, Zea Mays
gttgtgtttcagaccttttttaaggctggtcttagattccctttgcataagacggtagtcgcagtgttaaagcagtgttaaagacgtttaacatttatctccatcagctcaccccaaacgccatagtatgtctaggaatttttatttaggctgttcggatttaagggattgagcttgatgttgaagctttcacgatgccttcagttagattcatgagacgcatttccagacaaaggcgacgaggggtctacataacaactttggttgctataactttgcctatcgaaggggttcaatgtttctagctcttgcttaccaaagcaagtgaccgaatgaatgggcgaaggaatggttttatatgaagaatgacttgacgacgcgagctgatataac

SEQ ID NO: 73997 - DNA, 785 bp, Zea Mays
gacaaatcaaagggaggtggcgctggcgctggcgccgcagtagtgcaggaaggaaacggacgagaggtgtgctgcggtcccgtcgtcgttcttcaccgtgccctgctggtctggtcttgcgtcgccgtcgtctgagactcgggaaaacaggaataaagcaaccacggtgtatgtacacgtaggtagagacagaaagggtagtgtgtgagtgagaggggagatggctacagtacaatacaaagcaaaacatgcagtgcagtgcagtgcaggagagagcgggtgagtgagagacatgcgaacctttcagctatagcctcctcggtttgcagaaggggaatctgtgcaggggagggggccaacagcagggcacagtgcaggctgggcagtgcatgctcagggacagcatgcaacaccaaaacacaccaaccgagagatggaaacagggagaggcgtgcgtggcgtgattgggggagctagtgttgcgttgcattgcatcccctcgtcactggccgccaagcaattgccccctttgatcctcctctcggaattgtaattcgcctctcgagaatccaactctcactaatagatagaaactctataaaagaggatgtgaacctatttatgctgacgttttttataaccgtcagtgctatgagctagtagaaatatcagtttccacaaacgattaattgagaaccgtcagtgaaaatcgatttatattaacgatcaacgtagaaaaatcgagagtgaaaatcgattttcacttgctgtcgacgtaataaaac

SEQ ID NO: 73998 - DNA, 560 bp, Zea Mays
cttaactactaacttaattcataattctcttatgatattattatcaaacattgaaatatgtaggatgcatgtaaccataggtatcctagcacctttttgtgtgtgtttgtttgtgtgtgtgtgtgtttttgtgtgttccataggtgatagttgaaagaagccggtgcgaggattttgcaatagccacacatcgacagtgctctagaacgtaactcagatttcggagagagcatcaagcgcactaaactgaatgtgtatggaacaacgactgtagtgtctggcagttgtaatctgaaagaacaaacgacatgttatgaaatagacttgagccttgtgtgttgatgtacacgatgctctgagaagcgtgaggttctccctggagtacacgtcctcgtcggccggtgccgtgcgtccggaagtactccgagtccaggtacccgaagctgcccttgtacctccgtgtccagttgcccacgtcatgtatccaccgccgaggaggatgttggtcggcttctggttggaccggtgatcggagacggtcgcaccgatgcaaagtctcc

SEQ ID NO: 73999 - DNA, 553 bp, Zea Mays
gaatttctctgttttataatctgtctggactgtgcgcgtaatttgcagtgagttcagggttaaaacacaaaggttcctcagactcggcaaacagtcacaagggactgcgggttggttactggattctacaggggctctttaggaaataagccacgcgaaggggtactgaacagttctggtcgtccgatctgtaccgaagggccacgattaaatctgcccaccccaactggtacgcgcaacgctggtgcacggatccaagatcgatggcccagaaggtgccacgctaatgaccagtcccgaccatcggattcacaatctatggctcagattttatttctcgaaaagatacgtggtcatctaatctcacccatgcgattccgatccaacggctccgatcaagttttcccaaaggggtacgccgcctccaatcacgaccatcgctgatcaaatcaacggtcagggcttactccaacctttccccctctgcgccgtcaacgtgccacccaacacgcacggcggagtatcgccggtgtaggttgcccggccatccaag

SEQ ID NO: 74000 - DNA, 775 bp, Zea Mays
caaaaaatgcatggttcggcatgatgcagcaaatcaaagaaattaactctagggtttactattatcacataacttaaagttttgaagacggttgagattttagagaaaagaaatgggaaagagaggtaacgcccgaatttagcgagcgatagaaaaaagaaaaaaattcaactcgaaattcggggcgttacacaataatagctaccaggccagtttgaagatgtcaccgtttgaggctttgtatggcagaaagtgcaggactccactgtattgggatcaaactagtgaaaggcaattctttggacctgaaaatatacaagaggctgaagaacaagtccatcgaataagggagaatttgagaattgcacagtcaaggcagaaaagctatgcagatacccggagaagactgctagagtttaaggagggtgatcatgtctatgtgaaggtgtcaccactccgaggtatgaaaagattcgaagtcaaagggtagttgtctcctcgcttcattggacccttcttgatcttaaagcgagtgggagaagttgcatatcaactagagctacccgatcatcttgcggatgtacatgatgtcttccatgtatcacaactaaagaagtaccttagggtacctgaggagcagctaccaatggaggaccttagtgttcaagatgatctgacctatacggaatatccgatcaagattcttgacactttgactcgagttacaagaaataaggttataaagatgtgcaaagtgcaatggagtcaccatgga

SEQ ID NO: 74001 - DNA, 735 bp, Zea Mays
cgaggagatacactagtgtcaagtcgggtctgtcattgtacccaagtcgtgacaaacctcgtgccaaggcgtgtcaaatggtcttgattcggtgtcaaactttacccgggcgtgtctgaggtaattaggtgccactttgtccatttgaccatttggatttgagttgaggagctaggtgaacatggcaggtttttgaattcgggttggggagacatagagaaaacctggttttcccctctaaggttcttctagttagtgatcgatttggggctatttaagacttgttttggggcaactttcttactatttctgatagatattttgatgatcttcaacttgtgtaattagcccaacttgtgataaggattgtttcatcgtttgttttcacgttttctgttttggttcacatagctcgagttgttagacttagggttctaaaatttttctcttgttatatgaaacatatggtcaaggtaagcatcttaggatcttaaacactacctgacccttttattgttaagttatgttcatcaaaggctccactaatccacaggtgataataggtcagggtgtggctctagagtagaaactctgagtaacacctagggtgttataggtgcccaggctggcacctcggcgaactggctgctctcaggaaaagttgggggcgccgcgactaaaattcaccagactgtctagtgtgccagccacgcccacgccaacggtcgaccgcgc

SEQ ID NO: 74002 - DNA, 588 bp, Zea Mays
gcaaccctgaccattggattgggcgaggcggactctacagggcacggttttgtactctgacccttcgggcagtcagaggtcgagcgagatggggacttggggtcgacctatcctgccctcggacccttggggtcggggatcagtcaaggcagaaacagaagatgcagttgtttgctaggattggggatcaaataggatgtgtcgctcagggttctttaattcctctaacccaccatttcttgttattcctggatcgcgttgtacccatgttatccgccttcgacaagtgccattatcaacaaagggagaagggaaagactatttcaagggtgagaactttgtacatacacaaagaactttttgagagtgcattcatttgtgagaagttgtaaattgtccagtgggtgtatttgattttcttttactagtcgtgatgatctgtgcgtctttctagagggattagttgtgtttttagaatttctggcatctttagcgtttgctctgatttgtgggttgtgttgttgagctgtttctgcctcttcttgagggatagtcattgttgcctggttgtgttaagtcgttgcccat

SEQ ID NO: 74003 - DNA, 537 bp, Zea Mays
gcagattcagaatttgctgtcacaagattaggccatcaaacagctccatgcttgcctaagctcaatgctaatttcagaatcaaagaatgtgctgtgaagcatggtaggtatataacaccaagcataaatttcacctcacacactgacagtgtctcagcactgtttttcatcactcactgctcaatagcctgggagaatttgccaatcagccaaggtagcacagtccatgctagatatggccggttggatttacatcctactggcatgccagaggtactggttaactgttcgagtgtaaaagcgcaagatggagcataagtataacttttgttgaagaaacgacatctaagaccaaagggaaaactgaccataaacccacacacatctagatgtcactcttctaaaggatgcaaacccaccttaactgctctatacgcacgtggcacccaagtatcgaaacaaagtaacaaactgtgtgaaccaaagatgcagtatgcatagcccgtccctcacaaatccaggtatctagaacccatc

SEQ ID NO: 74004 - DNA, 366 bp, Zea Mays
aaacagaggaccctcggctggacaccgcttagccctgtactttaatgcctctgttgattggacttatgcttcagtaaccacatttggacttcctcccatttcagccgatcttctctttttgtcacggtacattcattgcgtatattttgtgggtatcaccacttcagaaaatcttgaagattacgggcgatacacccaatgggtgtgcccaaagggtgtctgccccgtgaaaggtgtttatcacgttgtcctaaagtagtaatttgatgtgacaaagggatgtaatcatttgcgtgagcagttgactgcagtccaaccggtgccgtgttacacgaaacagcgccagttacgtgactcattttcagg

SEQ ID NO: 74005 - DNA, 417 bp, Zea Mays
cacaaacaggagcgtggtaattaacttggccacatgggtcttgagggatgcgacactcaaatgttgccaaggctttcaaatggaagattcaccatctttttttttcctctgaccatatttttgcccttggactgaaattcgctgaagcaaagttccttcagcttagtctccttaaatacacatcataaggtgctaacgtgccttgcctcaaatgtcttaaattttgtttgtacatattaccatgtaattagtaagctatgtaatgtctgattttacaagctacttagatactgctaattaacttatgtctcccttcctattttttattgaatgtgcatcgattcatcttgatgttaacctacttagttattaagaccaatatttcattactacatatctatgtgtatgtatccatat

SEQ ID NO: 74006 - DNA, 1057 bp, Zea Mays
cattcccaaaataccccaaacactgcatctcctgcatgcaacccgagtaaatccttgatgtcccaaaatccatagtatgccccggtaacaattccactaccaccgtcgaatcactaattgtcttctccgatgatggcatgttcaatgacatggtcgcggcagacggtgacgaagaagaagatgacataatgtaccatctgcggcgacgggcagtttgcttcacatgggccagttcacagtttgctcaggtggagaattcaaggtttctgtaagccagtgtgtaaaagtttttccgccccggccgggaacgacttatatagactcgaaaagacgactcgggaaaccaacagtcccacagtgaaacatcacctttcaacggtcacatttcaaaatcccccctctggggaccacttcaacctaatgagggcattgtttcagccatatctcgtataagacttcgggactagctcaccaagttgaaccaaccccttggggggctagtgttggagcaaaggctgtccgctccctggatcagctttctttaacatcaactggacagattctaccgcaggcacaagaggtgaagggtgcttcgaccgttgtcaatgttgaggtctttgtccaagagtcgtcgaaggcattgaagcgaagcggtcaaccgtttatggcaggggctccacatgactttgcgatggctaccctgcaagctcggacggttctaagctatagccttgtcaagtatcgaaggcccggcaccctagggcaaaaggtgccacgcacgggtgaggaccacgccgcccaatggcgagccccatgatgcgtcctactgccatttaggcccatttgtaagcccctccctagggtaggatttactgtgtatttgatcatgcatgttgtacttaacatcgctgtaatgaccctgtagggggaatattccagggctgtagcaggtaaccaggggcataattgtacttagaagggcacacccacccacctggttacctataaatactcccacactgtacattgatgggacacgcctaacgagacgatattg

SEQ ID NO: 74007 - DNA, 536 bp, Zea Mays
aaaacacagcaaccagtttgtaaaattcataactcttaaactgtcaagcctatggttgtgaaattttaacacaagcaagataaggaaatcatctacaactttcttataattgacaaggactgattctaacattaactaaagcaaaaaatgcagtttctgaaatctgtacagaaattggacagattaagttactgaatttgtaaaaagcacaacttctaaacgattagacttatggctgtcaaattttaacactagtaacataataaagttttcaacaactttattatatggcttttctacagaaaacataatttagttcatcaaacatacagtacaccgaaaacagtacgtgcagtccaaaacagcaattaatacatttcagcttctatacaattcaagaatttccgcattttagagacttgacttactctaacttatatcaagacacacttaagcatagtcacacaatagatgacgtgatggctacgtagtcatgtcatcacttcaccacacatcgcaaacatagactaattcaa

SEQ ID NO: 74008 - DNA, 729 bp, Zea Mays
taaaatgttgttcatgaaaaaatatcgttgagttttttttagaccgccaaaaaaatttgaatgcatacaatacaataagaactagaaagatataacaaatttgaaggatcaacacaggcaactagatggacgtaaaatgcaataaaaaatattcgcataagatcttggtttgctcataaacgtgatactcttgagccaacaagtggctaggtattcacggtgctgacttacgaacacaatagatcactcaaaatcaagtgctcgagtgaaactttcaaaatacgaaaattgtgctccctaccctaacatgaacgaacaaagacctagtagatcatagataaagacaccagtgcgccttaggtactagaggaaggactcctaggggaacgagaagtgagtcctctcacagtagagtatacctactagataataacatcataaccctaatgacacgtgggttctatagaggtttgggaagcagaatgcgtactaccctatgtcttcttttgaattgtggatttatgtataaaatgagtgtacaagattacaaaacacaagccagaggggaaatgggaagaactactttgacatagtagtgtaggataaggtaagctaaactaacttttcttgatgcttggcttggatgggtaactttcaagtctcttgtcttgagtttggtcttgtgaatctaaaattgaatgttgttttgccatcccttttatagtcgaa

SEQ ID NO: 74009 - DNA, 478 bp, Zea Mays
tctgtttaattttatagaaataaacgtaggaaggcttgctccaaaaagggctcgacagtttcttacactctcaaacctcttgggacagtctataggtatatgttggggcgttggatcatcttgccctgtagagcaagttccaacagtatataagcattatctttatagattcatgatgatgatgataaatatttatttttaagtgtacctatgtaaagacaacttgatttaattgatcttagagctcatgtcctaccttattgtatatgagcaacacttaaagctatggtggagaggaggtttggttatgttgcaaatgctcaactaatgctttaaataacctcattgtatatgagacatgtcatggtgttatatggctaggtggagaagaccaagacacatgatttagctatcatggatcaggttgcgagagtgaaaggcaagcataaggctcaagagtcgactatgtggttgttag

SEQ ID NO: 74010 - DNA, 584 bp, Zea Mays
gagcaatcggcttaagtcggcaacgacttaagacggtgcaacatgctcacgcttacttaactcggggtgaccattatgccctgctaacggagcaatcagcttaagtcggcaacgacttaagacggtgcaacatgctcgcgcttacttaactcggggtgaccactatgccctgctaatggagcaatcggcttaagtcggcaacgaattaagacggtgcaacatgctcgcgcttacttaactcggggtgaccagtatgccctgctaacggagcaatcggcttaagtcggcaatgacttaagacggtgcaacatgctcgcgcttacttaactcggggtgaccactatgccctgctaacggagcaatcaacttaagtcggcgacgacctaagacagtgcaacatgctcgcgcttacttaactcggggtgaccactatgccctgctaacggagcaatcggcttaagtcggcaacgacttaagacggtgcaacatgctcacgcttacttaactcggggtgaccactatgccctgctagtggagcaatcggcttgagttggcaacaacttaagacagtgcaacatgctcgc

SEQ ID NO: 74011 - DNA, 718 bp, Zea Mays
taagacagggtaaaaccaatgttttatcccgagtgatgccacgcgtactcgcggggctcggagctgcttggctgtcgcgtatttatagtggtggatgacgtgaggtgacaatggtcctaggtgccatcatttcggttacgccgacctcttgcttccgtagcctgggactcgacgcagcccgtcgtgtagtgccctatgggaggtctccgcactcatgcctagtctgatagaccataagtatgtcgtaggctgagggacgcgcgtgccattagtgtgccgcaatacaggggctcgtaggtcatgagagctatgcagcccgaggggtccgtatgtcatgagtggaaagcggaccggcgcccacgctgtggctcgaggctaggtgtggttaatgcagctagtcatttatggtgggtcagtccagggtcaggcacggtatccactcgagtggctcccttcagacacgcccaacttcccttgttaggctctgccacacgcggccttgggctcagtgccgcgaggtctgaccaagggcgggtccttctagaattggtgcacctgcctcttccgactgactaacgcgccccaacgatcaggggctctttcctcagcgcgctcactgaccggtgggtcctaggaaccgggggtcgtgcccccgacaaaaaccgtttaggataacaacgatatttctttgtaatctggatgcacactagttttcatg

SEQ ID NO: 74012 - DNA, 359 bp, Zea Mays
ctatgtttatgtttatctctattcttgttgttcgtcgacttcttcaccgactacttcatcttcaactagctcttcttcttgaatttcatgttcacctggttcagcttctacttctgcatgatgggcttgtccccggttgacagataggggctgactctttcctgccgaagcctgaccttgtttcattggagctagtgtagtgtaggcagctctattgggacagtagttagcgtagtgtcccggttgtccacacttgaagcatgccctgttggtggttgtgttaggagcaacgggtcccgctggggcgcttgcttttggaggagcagttggtgcctgttgagtttgttgtccagaactgc

SEQ ID NO: 74013 - DNA, 518 bp, Zea Mays
gtgaagttgggctcttgcttagggtttaattattgttgaattttcgaaaagcccaattcacccccctcttgggcatcgtgatcctttcaagtggtatcagaaccttgttgctcttagactagcttaaccgctagagtaacgatgtccgatggggatggacctcctcccgttttttatggtgacgattttccatattggaaaattcgtatggaagcttatttagaggctatagacattggtgtctacaaagccgccacacaagggttccccgaacctagagatcccacaaatcttgtaggagaagagtttaactatgagaaatggaatgctaaggccaaaaacactctttttagaggcctttgcaaagatgtctttaatagagtaagaaaccatagaaatgctcatgatttgtggatggatatatgtgctctacatgaagggcctagaagtgagcgtaaggagagatatcatattgctatgagaaagttaaattcttttgagatgcttgctaatgaaaa

SEQ ID NO: 74014 - DNA, 467 bp, Zea Mays
cgagtagtggcccggcgaagggccgagatatttagctacgtctgcagcgatagattattgtgcagtggtgggctctcgtcgatgaccgatctcctctgcacaaaaacctaggtaaaaaagaagagatgcgtatcgatccgggtcatccggcgatatcatatcatcgtcgcactcactatacatgcccttggctagtggctactggcttgttgtcggcctggccttcggtaatggtccgtacgcggttgccggattggtgtatgcatgcatacatacagcatactacatggtttgggtacgtgcgctgcttcaacgagaggagacactccacgttggtctgacaatcagctagcgtgacttggatatatatggcactgcacgtacgtactgccgccgatcagctacgtgtccgcatataatacgtgccagtactctctcctcccattctatgcatatgcatgtcagca

SEQ ID NO: 74015 - DNA, 311 bp, Zea Mays
aagcatgtggctctgcggggaactgcccgaggggatgtcttcgatcccaaaggtacggcagcaggctgcgactgtgtcggacagggcatcacactcggcgcttttctcatcgatggcccaggtgagcatcttagacgtgttaataaactcgagaaggtcattcacgaaatctaaaactagccaaacaacatgtaagcacgaatgaaggaggagtattaggtaaatcacaggcaagcgaaacataccttccgcccgaaccttccactattaagcctcggtctaagacgcctcagccgcctctacgacctcgg

SEQ ID NO: 74016 - DNA, 713 bp, Zea Mays
gagaaattagagaactatggtggctaatcggaggcaggagcgggtgctctagcttcgtgattacctaacggagctagcggtgtgcttaatttatagtgttcaagagcggtggccttcaattttggaatggcgcgctggcggtcggagaggaagaagatcactggtggcgcaatcgtggtgttcaccggtgcagtggtttagagagggtaagcctaagtgtgctacggttactaccgcgtagtgaagagtcacgacgtggcataaatgaggtcgccggagtgtccacgacgacaccggcggtccggccacatcgcaatagctataggcacggtgataagcttcccttgcgaccacatctgcttccccgcgagatcttttacctccccgtggatatccactgtgtgcccagcacaaatcacggcgaccggcgtgattccgggcgcgcggatcaccggtggcgagggggactgaaccctaggatatttcagtgcactgtaccatcagaggcttcatcagttggtctgacagagcttgtttggggcgaattttctctagattttgtatggtgactagatcaatgctctgcattaaagttgtagcttatcaatccatctcaaactttgtcacagaggttttagctaaacatccatttaatcaagctccacaaggccccaaagttgatccaatctactatcttctctgaatatcaggga

SEQ ID NO: 74017 - DNA, 328 bp, Zea Mays
gctgaaggaaggagccacaacaggcgcgaactgagtgttaggctggatcagcttggcaatatgcgcttggttgtcttgagggcaaactctgaggacaccaagaccaatcgtgctagtccatggtgcatgctaggcagatcttgaggccaaccatgaagcaatccatggtggcaattgctagagtccacgaccatcgttgttgtagtgcatgctgcccttgcacccacgccctcgatcgcagtagcttccacaaccatgtccacgagtgtttttgggattaggactaccactggcatcgtggtggggttgactgttgtcgccttacatg

SEQ ID NO: 74018 - DNA, 582 bp, Zea Mays
tatatcggttaagaaatataatagaaaaacaaatcaaaaaaatgttttttttgattttcgtatccgcatgtactcagcagaagcgaagctcacccaccatgtagcagcttagcctgactgggaagggaatcttgcatcccttcagcctggctcaatgcctcatccgaccaaccaaacatgaagtacccttcatccgtcggacttggctgggtcggatgcaaccatccaatcagacccttagtgtactccagattaagagaacgtagcatgggagagtgtatgatgcatatgagacattggatttagagaggtttaagccatcctaaaatagtaccaggggcggacctatggttgggtttaggtgggtcgtggcacaccctaagataggtccaccaagaccctacctcgacactgcttcttccagctcatgtgtttttcttctagcaagatctgcctcctgagtgccccgactgagcatggagcgcctgcgagtctgtgacgcccgacagcctaagccccacaccatgccccctatcccaagcgcctgaacgccgccgctccaaggactacgacccatcgccg

SEQ ID NO: 74019 - DNA, 332 bp, Zea Mays
ccccgccaaagtgaaccaaccccttatcggcttccttgaagtagcctagcttcgtcatcatagtcatatcagcttcaggcacatttgatttcccaaaatccagatggctgggcttcgatggcataataacatcataatcaatctctccttcattagcatcaccctctttaatttctgcctgctcggtttcagcagcgggtgattcttcttctgcagcgccttcagtcacaaccagtcccgatagcctcataacttcggagatcggagcagtttcagcagcttcggcttcgtctccgtcacgagtaactctagctgtcgagcgtaccctggcc

SEQ ID NO: 74020 - DNA, 570 bp, Zea Mays
acttccaccgctggcgatgaactgccgtctgtttttccgagttaaaggagcttcattttcttcctcttcatcttccacagtgacaacataagtagcacccccattgggatcagcaacagacggagcacccacattgggatcagtagcagtttgggtacacccattggggtcggcgtcagtaagtccagtcgtaggcactccttcagtagcaggaactgaggtaccagcgtcctcatcaaaactggatacccgccggaggcgtcttcttttcttcttttgctcatcagcagaaggctcaggctgattggttcggctaggacgcctcgggcgagtactgacaggttttgggacatccaaagttgtatcaacctctggaaggggcaccactgccaacgtaccaacaggagcagcgtcggaggaatcctcagctaacagatcaagcatgtcatttatgtccgcatcactagggttcaggggcacttcaaaataaacctgccgttcatcatcaggaatctccccaagcgaagcaaccaaagtactgacttcttcagcagagggtcgcactctaag

SEQ ID NO: 74021 - DNA, 672 bp, Zea Mays
atgacgagcatcgccaagacctaggctatggaggccaagggttggtgtggcatagagacgataacgatgatgtcgaagctcttcgccacccatgtcgtcatccataaagagcgcaaccaggaagcccagacgactgaggcacctgcggataaccatgactttaccagggtagaacaccccattttaccacggcatcgtagatccttccttgatcggtagtcgacccccaccttggccaataaaaagggagaggtcggccagaagacacatgaagacatagaaaaacacccatatacgaccacactagaagacccagaggactacagaggccgaagccatggagcgaaccaccatgaagcccaaggcttagcagagagcaccagattcatagtccttaggtctaaccacgcataagagacctaggaggtcctccctctctcgcccacttgtaacccctaatacgagcattgagcaacaaaggtgccagtagcgcgtgcgtcaaagactagatgtagagatattctacctaaatcagtataaatcttgtgaccatagggcacaccatctgaacccctaaaacacacacaaacaaatttacttgtcggagctggttcgaaactccaacagtttgtatgataggtaggggccttgcgcgttcttgacaccttcttc

SEQ ID NO: 74022 - DNA, 328 bp, Zea Mays
cacacggacgccgagtaagatttgaagacgaggagtttgaagaccatgatcgtgaggaaggatctgatgagaatccctttgcaaatgatggaatgtttggttggcgtcatcatcaccgacaagctaactttaaagatagagaccgttatcatgggcgttgtcatagaaatgacccgaataatattgcccgagtcaagttggatattcctaaatttactgggaaagaaagtgcagatgaatatcttaattgggctgagcagtgtgatcaaattttcagagttcacaatctttcagatcaacaccgagtgaacttggcttcagtcgagtt

SEQ ID NO: 74023 - DNA, 622 bp, Zea Mays
accctgctttggctttacaattaatcctagctcacagcactggactgatgaaggatcggaaaggcgaccagaggaggaggggtgatgaataagagccactgaaaattctaaatctagagcacacgtgacttcattccctaattcaatccggaccccagggaacaccaaaaacacctcaacataaacaactcaatccagtgtcgattggctgcaccaaatagtttccagagaagcacttcagaacgagcgatagtgccacgcgttagagcgacagtgccgcacaataacaaatggttagaaccccaaattttgtaggcagcaagcatggatgaagaagaagtggttcgtgaagtatgagcatgaaaagatcagtgcatccaaaccagatccaaaaacttggttatgaatgagcttgttgttggggttttgtgagtttgataaaaacagttaaaaccctacccatgagtgagacctactcaaaccagaactttgcaaagatcccagggtagttcccaacatagagagtatccccaaaacctcactcaaccatagtaaccaaagattatctaaaaaatccaagtagaggagttgagaagaagaagaaaccaattcatacacaaat

SEQ ID NO: 74024 - DNA, 403 bp, Zea Mays
gacgatcggactgctaaagtgagtcacggcgatgcggtgaatgtgcccaggtacgtggcgcaaaggccgtgaagcggctgcctccggcgaactcatccgaagcggccgtggcaagctcggtatgatggtcggagtaaaatattggccggagcatatccgtggtgtgatatttactgaccccccgacgttatctagctgacccgagcgcgaatcacggcggcaacagcacgaatccgcgcgcggctcgtcggcggcgagggggctgaacctgatcctatctggttcactgtaccatcgaattgctcttcagttagcctgacaaatcaactttgagtccaattttctcccaattttccatggtaacacaaccaatgctctgcagcaaagttgtagccctacaaac

SEQ ID NO: 74025 - DNA, 481 bp, Zea Mays
cgaaagggtaacttctgttgtgagccaaccgatcaaattttagtggctcagattagatcggcgtgattgcgaaccggtacgccataggggccctcggatctagatccaatagcccgggttttacacgactgagttctaatctcgtccgctcattcggacccaacggcacagatccacccacagaaccggtgcccatacattcaaatccgagccatccctccgagatccaatggcaccgggcacatctcctttcccagctactcagccgacccaaactacggcagcgctcattgttcggccactatgccccgccggagcacggtactgagccaacctagtggcctagaactaagcgaatccgctacatgatttgacgacgacatgatgagcaggttagtagccaacttaccggccattgaagttgtggttggagcttgcccaaatgcctcgcggcggctcggtccaatccaacaacgacgag

SEQ ID NO: 74026 - DNA, 693 bp, Zea Mays
cacccaagtgacaagctaatccgaaggccttgtcgatgtgtccggaaaacatcccatcaagcataaactagcaactagcctctaatggcacaaagggcagactattcatgtcataagtcatttccaataccatttttagttcattagtgtgacaaaacgcataaacgagagttcggtacgtaacttcatcaacgacattcctctccccaccatattgttcttcacctccactgcctcaagaacacgattgtttctgcagagaccatacatcaacacattgtatggcacaacactgcccttaacaccctcactttccatcctcgccaacaatctccttgcgccatccaaattccttatctcacagtaggcccaaatttcggccgtgtaaacatactcgtccaagtgaatttatattgaagcatttcatcgaacaggtcgcgagcaagagcaaattaccggatcttaatgagagcaaaaagtatctgcaaagcggtgtattgcttcatcgcaatgccggatgagagagataggcgcaggacggtggcaactcgcgggtgcggcgaatccagaggtacgaggatgcaagaagcgtggcggcagcggtggcggcgccaggtcggaaggtggcgagtttgttagcgtgtgagagatacgaaaacgaggaggacgcgaacggggtggatgacgcgaggg

SEQ ID NO: 74027 - DNA, 476 bp, Zea Mays
aacggcgcaaggaggctatttatagagggcgggggtgaccgtccacttcctaccacgctcgccgaacagtcgcaagtattcaataagcaattcaagccacctgaaaatgagtgaggcaacagatgccgcttcgtgtaacacgacaccatttggactaaggtcaactgctcgggcgatatgattacacctcacggtcacatcaagttactactccaggacagtgtgctaaatgctctgtgtacctagacgtcccttggtcacacccattgggggggacgaccaggaattttgaatagattttctgaacaagtcatattcatacagtaaacgcaatgaatgtattgagacagaaggaagagattgatggagatcgaaggaaatccaaatatagctactgaactgcaagtctagtcagcagaagcattgaagcacagagcgtggtgaagaccagccaagagccatctaccagacgtcca

SEQ ID NO: 74028 - DNA, 673 bp, Zea Mays
acgacatcctcaagggcctgatcaaaatcttctatggacaactcttgaagactgacaagagcagacagagccggagaaggaatatcactatccccctactacctctgtaacgccggctattcttatgaattagcagaacttcttcttcctcttcttcgtcctcatcaaaaatacgaacaatagccggtgcacggtcacacctattggggtcagcttcaggacggatacacccattgggatcagcttctacacggtcacacccattggggtcaacttctggacggtcacacccattggggtcagcttctgcatggtcacactcattggggtcaacttctagaaggtcacacggattgggatcaacttcaacaaggtcacacctattggggtcagcttcaacatgtacaccaccattgggatcaacctcagtaaggacctctgctggtacttcttcacaaacaaaagcagaagggccagcatcctggtccaagcatgatagtcgccgaagccgcctcttcttcttcttcttctcctcagcaggcgcagttggatagctagcttggcgaggacgtttcgagcgagtaccctcaggctttcgggtgtccactattttgttaacctcttgtccaaccgtaacaaccatcggttcagcatgggccgagtcagaagattc

SEQ ID NO: 74029 - DNA, 774 bp, Zea Mays
tcgtgtgcgcagtcgcactgtccacaaccaggggcggcatcatgaaggatggtttgcaccggcgagcaattccaagcccgtcggatggtaatacgcccacatctttacgcttacaccttctatggggcccagtctaccacccgaaccgagtatcaggttgaagtcgatgatacccccacggatcatcgacgacggatcgattcctcgccacccacaccctcggggattctctcggttactaatgtccattctcctggagctaggcatgggacagactaagagagggacgcgaagcagggcttggtatttattcgctgaccaaggaattcgtagactctggtagcggagatctcacttgatcccaacaactcaaggtagcggccgtggtgaacggagggggaagaggagcaggtggccgggacccacatgtaagtgacttcgagcgaggaactgggagcgtgcagattccgaaaggaccccagagcaggcggattccaaggttgagtttgttagcgcatcctttggtttggttatgatggaggagatgaacccgacaggagggacccaccagccaatgactcaacacaagcgcgcggaatgaacatgacgtgtgaggctagggcgtgggccctgatgtcagtggcggcgatagctggctcaggtgcctgagtgaggctgcctgcagggccgattcgttggtgcctagaaatggggggttgggccaagggttatgggctagaatcgaataacatagcccgtggggctagcttgtcg

SEQ ID NO: 74030 - DNA, 679 bp, Zea Mays
gcaccacggggttacccacgtgatgcttttgggtaggacgacgtcattaattgcgacttgatggttcgtgcagaggcacgtcggaattacccacatggttatacatgttcgggccgcttagaatcgtgtaacaccctatttcctgttgtggtttggtattgatttatggagtacaagggttacaaactgaggtttgtgagggctcagtggttgtagaggaagttgggctggaatggtacgtgatgagatgagatgattccataggggttcccctcggccttatatacacgaccagagagagttatcccattacaagttgtgattattatctacttgcttatctccttctttgtcgcagatagtatcccaacatatctagagtcttcatcgcctagccacccgagttatcgccaaatgcatagcacttcgggtgcttgtaactgcatcacccaatacatccgtgctttagtggcgcttaactcggacgtcagtcttcgtcatctggatcggtctcgtctaaactggctacattctggtggcccatcccataggacgactcagcaggaagctcgtcaggcggcccgtgatatgttttagtgtccatgaggacccgggggatatctatcccccacaaacccccgaggctcaagccaacttttgagagtagttggctcgagac

SEQ ID NO: 74031 - DNA, 834 bp, Zea Mays
tcctcccggggggtgaggtttttaacgaggcggagtcatgtaatatacaagtgaaaaatcccccacaaaaacctgcgtcgaaaaaagaccgcgccgacggtcttcgacattcgaccaatacaaagtcaccgcgaggctcagcgctagccaccctcgcgtgcgacaactccgcgcaaaagtcgcctaagggtgcaaccggactagcacaacaagtgagaaacatcgtagtcttccgcgaagacaatccgtgcagaagtcgcctaagggtgcagccggactaccacaacaagtgcgaaacatcgtagtcttccacgaagactatccgtgcagaagacgcctaagggtgcagccggactagcacaacaagtgcgaaacatcgtagtcttccgcgaagactatccgtgcagaagtcgcctaagggtgcagccggactaccacaacaagtgcgaaacatcgtagtcttccgcgaagactatccgtgcagaagacgcctaagggtgcagccggactagcacaacaagtgcgaaacaccgtagtcttccgcgaagactatctgtgcagaagtcgcctaagggtgcagctggactagcacaacaagtgcaaaaaatcgtggtcgtccgcgaagactatccatgcagaagtcgcctaagggtgcagccggactagcacaacaagtgcaaaaaatcgaagtcttccgcgaagactatccgtgcaacaattgcctaagggcgcagccggacgaagcttaacaagtgcgaaaatgactacaccaaactgtccgcgcaaagaccgactacatgcgcacgagaccaacataacaaatacaccagacca

SEQ ID NO: 74032 - DNA, 400 bp, Zea Mays
gacgagttgaattgtaaagattatagggtctcttttgcatagtcgcacggatgaaagggtaactacgaaccctggccgttggatctcaagccaacaactaggattagatcggatcccgaataaccgaccccctgttccaaccctacgatcaactgtatatggctcggatcttaaataactaagacagattcctacgcgtctaatacttattcaacgacgcagatccaacaacccaaaacgttacgcgtgatttaatctcatgagttgaacctccgattgatggtcaagattggaccacgccgaatgggtatggatatctaatctaaaccgttaacaccagatccacgactcacgctccttctattacccttgacttactcggcggcggcggctgaggcac

SEQ ID NO: 74033 - DNA, 522 bp, Zea Mays
atgggattaacaaagttgccacaaatttctatagagagttatttggtccttctgatatatctcatataaacatgagaaactttaatatgaccaggcttgatgataatgacagatcatttctcactggctcttttttctgttgaagaggttaaaaatgtggttgataatcttaagcacaatagtgcctagggtcctgatggtctccacactgtgtttttccaaactttctgggatgttattatgaaggacttgctagcactttttggggaggttgatgccttctaagatctttattttgacattttcatctgccctttcaagagtctccctatgaaatatcttgggatccccattgactgtaagaagttggggagttcccatcggctgaccaaagaagaaaaattggggggaaatggagatgtggaaagctaggttccttagtatgggtgggagtcacatcaatcaacaacagtctttctaatgtcccttcatacatgctctctctctgcctggcatctaatt

SEQ ID NO: 74034 - DNA, 397 bp, Zea Mays
gttgatgcaacgtggccatcctttagccttctttagcaaagctctgggtcctaagggcagagggttatccacttatgagaaggagttcatggcagtgttgtgtgtagtccaacagtggcgctcgtatctgcagcagggcgaatttgtcattctcactgatcaccagagtttggctcaactcaatgaacaacgcctacacactccatggcaacgcaaggtgttcactaagctattgggtctccattataaaattgtatatcgtaagggtacagataatagggcagcggatgccctgtcccgacaagtgcagcctgaattgtcgtccatctctatagttactcccaaatggttgtctgatatacaggccagttattcccaggaccttgatgctcagtcc

SEQ ID NO: 74035 - DNA, 688 bp, Zea Mays
ccattcatcagcttccaggggttcttccaccttgacaaagagcggtggacgggtctcagagaactctagatatgtggtgtctcgtggcccttgaggttgacctcttcctccgtgttgctgaaattgatttcccgtcatttcacgcaggaagcgtgtgttgtcggcggtagcattgactaaggcagcgatagcatcagccaatttaggaggtacaggtggtgggttgggagtgtcctccccgccgtaggaagttcccttcccatcgtgagcatgagttggcgatggcatctgaggaagaaaaacatcctgaattattacatgccaaacatacaccatctttattacattgttgaactgtaataattatacatactcagtatacaacttgacttccttatttattttacataaggacattacttaaactatactactctaatcctcttcgtccttagctgctccactactcgctttaggagaccattcatctgcaaggttcatggaaggaggggatccaaaaaggtccaacccccccatcagatcctccatttgctgttccagatggtccagctcctgttgctgcaacttctggtggcacgtttgggtgcaggtgcagccggtcatacaatacgtgcacctcttcatgcaggatgttgcaatacgcttgcagattttctagggatgcact

SEQ ID NO: 74036 - DNA, 486 bp, Zea Mays
cgcaggttgaacagtttcttttgtttcggtagccgaagaggccccttcgccaaattcaggaatcatggccggttcgatgtaacacggtcggtgagtcagaaccttcaacttttttcccttcagcacaggcccaactggggtgtctgaagtagcagctttcctctttttcccctgtccccgcagcggatagcggtagtcagggtaaatgaagccaatggcgtcaaaaactctgttcagtctcttttttccccgacctccgaaggctgcggacaatgcattatcttctgccttggaatatgctccaagcaactcatcacttgtagcttcgatacacttcagccagtcatcgtttggctcatcgaacttatccccaaacctaaatgtatacttcagccggaccaaatcaccttcgctagagttagtgatggtctccttcggcatttcccagctttctacaagcggccacaccctgaaggctatatgttc

SEQ ID NO: 74037 - DNA, 556 bp, Zea Mays
agaatcaaatacaacaattgaacttacatgtgaatgcagaatttgaggtgtatccatctccctggagctaatattggacataggaggtcgaaccctttgttctccttcttcccctatgctcatctcggcgatcacaggacccagtagagcaggaggtggtgtgaccagtgagttaccatcaactcctccctctgtctctggatcaagacgaacgccatctccttccatcgccggcgaatctccagagccggccatctccaactccaattagttatgcaggcttagtggtcttttttcgaatgaaaggaaatcacggatactatacaagtaaccgcatccacgtttacagggtctccccattatttccgaaaccgtcccgatattatggcgatgtcaatgtaaaactaatatccataataaactatttacgtacaatgactcaacgttttacgtcaaacggtatatactatttatgcaactattataccgtttcggttttattccatagctttcaacatcttatgctacatttttttacctgccgccattacttccc

SEQ ID NO: 74038 - DNA, 1087 bp, Zea Mays
cacatgtggatcagaaccatgctgcaattccatagcaagctctagaaacaatggcgcattactggaaggaataagcacgacattggcatcaagctctgcagtatgctttgtcttctcgtaatgcacatactctgcaccacatgctagctgttgtcataagccatcatgcgccacttgagttgaaatctcatcccacactacacctgtaggatatatttcctccagtgtagctgcatcatcccgaaaagacaattcatcaaacagctaagtggaagcaactggcgccatccttaaatccttgaacatcaccatattaggacaggccacatcatcatcccaacggggcatatcattgcatactttctcgacaactacttccgccatcgcagtagcagccatatgtctgtctgtcgcccatgacggagtcacgatggctgcaatccacagccaccaaacgccgcctagctccacctgaagaagttcgccgccgcctagagagctggcgcgacaaactggattgaagaaaaccagaggcaccttgtgtcgaacagctgagatgcaacaagtctaccgccgccacacgccaccggaattccaatcactgtcgccaacaccaccaagtcgaacgcccgccggagatcgacgaacgttgatgacacgatgccgacgccgagagtcgttggaggagagagagaaaaatcatgcccaaaaccctagtcgtcgaagcaggaacaccgttaaggaagaacgcgacccgctccgtgcgacaccaaggatcaaaaggctttgataccaactgtcacgcctcgtggccgccggtggtgaagaccgggacgtgaggagatcgagaatcacctggaccattcctccatgagaaagacgacgagaacgagtctttggtttctgattttctccctctttccacccgcccgctggtgcccttgttgttcacgggtttggtttgttcttggcccaatgggttgtcttctgatgggcccaataaaatgaactatgacacttgctgggcatgacaggcgtatgatacaagcatgagggagggagccaaggccgggagcacgtggaggcg

SEQ ID NO: 74039 - DNA, 282 bp, Zea Mays
acataaatctggtctcctctgggacgctttcaagtgcagattgggatcgtctgatttctcaggcattgcttttgacctctcagaacttttaaccagtaatgagcaacttcacgagttagactccccgtttactaaattggagattgacaacattataaaactattaccttcggataaatctcctggccctgatggtttcaatacaaatttcatcaagaagtgttggcatgtcattgctccagatttctatgatctttgtgataaattctatcaaggtgaggt

SEQ ID NO: 74040 - DNA, 288 bp, Zea Mays
acttggctcattaatttaccttcgcttccgcattgttttgcgtgtatccaatcgggggttagctcactgagcgacgaacggggcgtcggcgggggagaggatctccgccgtggggcgcggctctgtgtcccttgtgtctgggcgaggaagaagatatgtgagccgttagatcgaccaagcagggttgagattatgtcatcgcataccccttcgcccgatcggatctgggccgtagatcggtagatgtgcggtgtagagcagagcgcgcgacttaaaaaaatctaaatc

SEQ ID NO: 74041 - DNA, 694 bp, Zea Mays
catttatttctacatttctttcgaatagtctttagacatctctcgattggatagcaccaacgtccctgcatgggcccccccattcgtgcctcataggggagatgaagaatcaaatgctgcattggattgaagaagccgggtggaaatatattctcaagcttacatagtaacacgggtgccaatctttccatgtttgcaaccatggtccaagataactcttttgcacaaagctgacggaagaaataactcaactctgatagcgctagccagacatgctcagggacatagcctcgaaccatcgcaggaagaatccgttcaatccatatgtggaagtcatgactcttcatccctaagactcgtatagtagataagttcaccccctacttaggttagctgcatacccatcagggaacatcaacatcttgatccactgaagtacttccttcctctgggccctacttaggacgaaatcagccttaggccttctccatgtctttccgccacttggcggcttcatctctaggtttggtctatcacataacgctgccagatccactcttgccttcacgttatcctttgacttatcaggaatgtccataattgttgcccacagtgcctcgacaatattcttttcagtgtgcatcacgtcaatgttgtgtggaaggagcaggtcgtcataatagaggagccgagt

SEQ ID NO: 74042 - DNA, 325 bp, Zea Mays
gtgcgacattttgctgtgattactcaacctcttactgccttattgaagaaagggagtctatttgtttggtcccaagaacagggatcttcttttctggcagtcaaggcagctttgtgtgctgctcctgttctggcactacccaattttaatcacactttctgtattgaaacggatgcctgtagaaatggtgtgggagctgtcttgttacagcaaggtcaccctttggccttcattagcaaagccttaggacctaaaacgcaaggtctatcaacctatgaaaaggagtatttggccatccttattgctgtggatcactggagaccat

SEQ ID NO: 74043 - DNA, 602 bp, Zea Mays
tgtaaacacggccaactatggtatcgtaaacggtttgttggtccgcattcaactgtgtaaccaaggaatcagcgtgcatcgacaacattaatggctcagggtcaatttcatcattaattaatctgttctcatccacaaaagcgcattggacatctatatttggcagaccatagtcatttatgttcctgccgctattagcaaaggcatctaagagtttgcgtatcaggagggacatgagttgttcctgcggtatgttgtagttaggatttcccaatgtatctctaagttgtcgaccaatgtcatctgtaaaagatagccagtatgtatcaaataatgcacgcacattaccaacagggcaaaacataactacggtcacaaaaacctgtctaagctggtacgatgacgcagatatgatcgcctcatcaaacaacagcttccactcattatcgctctcaagcaacccacgcgcctcgcacgcatcacgaaatgtgtcatacacttgaccgttgtacatcctaatatcaacatagcttgtcgaacccttaactatcatcaacaacatgtgtaagtagtatagttcgccagcagtaggatgtacatag

SEQ ID NO: 74044 - DNA, 355 bp, Zea Mays
gtgacatataccttggtttgcacacagtgctcatagttgtatgctgctacataggaagaaggtttgcttgatcatatattttgtgctatcaaagatcaagattattagaaggctacttgatgataaattgtgaaagaccaagcaagacatgtattatgaacaatctccttgcctaaacaatgttggcatgcggctggtgttcctcgagaagagattgcccgatgtcatgacgagtgctggtgttccccgagaagagatcgtccaatgtcatgacgtgtggcatcattcagactgtgtatattatattgtcttagttgcagccatcagtaatttgactaacatcaccagggtgttt

SEQ ID NO: 74045 - DNA, 425 bp, Zea Mays
aaggaagtcagaactgaaatgagagtctcctccactggcgggggtgggtgaattcatctgcggaagggaatcaaagataaagattatggcggaaggaaaaagaaaaagagagcccggatggttctaaagaaaaggggttagctcaaattttaattcctctttgggttttataatgcatgcatgctggaagaaacgttgcctctcaaaagaaaatagggtgcctttttagggcatccttaaaaatataagtattggcccatagggcctatttaattagccacctatttctccctctatgcctaaggcctttcgtcctaggtctagcggtctagtcctgacgatccgtaacagtttctaggcaagttttaggttttgaaaattggtattcatggtttattgtccttctctgtggtggaatttgctcc

SEQ ID NO: 74046 - DNA, 702 bp, Zea Mays
gcggttggctgcatgcgagccgaagctctcgctcgggtagacggtttcaggtgtaactacctcgtcgcgatcttcggcgtccggcgaattccatcggtctagctccatgccctacccgtataaaatcaaccgtgtccccaggcctcgatctcgtttgttaagccagtagaagccgtgtagagtgcctccgccgcgagccaccgtagttgagaaagtgaggctgcgggcgggtagcgacgccagaccttgctggtgcgcaggtgaggggctcgccgaacagcatggtggaacatcaaggtctcgacgtgggtcttttgaatccatcgaccgttgccgtgctgctgctgctgtgtcctcgacgttgctggtgagcatctcctccgccgtgatagtttcctctgcttcattggttgcgttcgagcatggcctaatggcctggtgtgctgcgcagtatcgtagctgggtaggacaccaatgtgtttggccgtcacgccgggattagcatgcggtagataaagtgagagtccagtatgcgtgctgttggtggcgtgtggtgaggttgaagacgagtagtcgtcgtgggatctgtatcagatggctagaattacattagttcacgatcgattcgggtcattgatctgcgattcaaaggcaggcgttgcgtattggttcgacgcacggatattttaatctgggtcgctg

SEQ ID NO: 74047 - DNA, 324 bp, Zea Mays
acctccacgtatacaaactagacccccgagtagggatccggaccccctccggtatgggatccgggtcgccaacaaaggctccaagtgctctagagcagaacatgcccctaggccctactccagacccaggcaggggtccggtgacaccacatggccattggacgcatggtgcaaaccttcgcatggaagcaaggcctcggccccgcattaaatgcaaggcagccaaggcatgctctgaccaagcgtagggcattggtaggcttgtgacaggtctctataaccaccccacgcgttaccgagcgcacaatgtagcatgacagcgcc

SEQ ID NO: 74048 - DNA, 346 bp, Zea Mays
gcgaggggttgcttgaccgaggagaaaacttctggcaggcttcgcaggaccttgtgacccgatttgcggcgcatatcattgcgggccagtaaaagccttggcggatcaccttagcggctagggcccttggccctgcgtgcgagccgcacgtgccgctgtggacttcgcgtaggatctggatgccctcggtttcggtgacgcacttaagcattggctgactgacccctttcttgtagagttggccttcgatcagtgcgaagtcttggcttcgatgtccgaggcgtttggcctcactgatgtcggttggatgatagtacccctgtaggaacagggttattggtgcccg

SEQ ID NO: 74049 - DNA, 375 bp, Zea Mays
cgcgactgttttgccgctcaacaccgatctacggcaagaattcaaagtacaaacaacagaccaatcaacatatgcacataaatgataagcagtagcaaaaggttatgacaagacccgcccaaagcattagcatacatgataagcagtagcaactcttgaaccctctcactacagatgcacctcaaatctgcacatttgcataggtgaaagtatgtgaagcaaactaaaaaaactatatatacttatcacattttgaccaattcatatatgatattgcattaagggaaagtatgtgaagcaaactaagaaagatgcaaactaaagcccgtgtgattggttatcagcactacttcttatgtgtcatcgtatttttag

SEQ ID NO: 74050 - DNA, 598 bp, Zea Mays
attcagatcaatgtttttttgctgcaattcattgacaatgttgtttgtaccatggattacgatcataacaatctaatcaattaataataaaaaacaacaattggacttacatgtgaatgcagtatttgaggcgtatccatctccctggagctaatattggacattggcggtcgaatccgttgttgttcttcatctcccatgcttgaagcgtcaattacaggccccagtagagcaggaggtggtgtaaccattaagttaccatcaactcctcccttagtgtttggaccaagatgaccgtcatctcctaccatagccggcgattgtccagagccggccatctccaccgccaactagttctctagtagtgggatatttttttcgaatgcaaggaaatcacggaggatactctaaacaagtaaccgcaaccacgtttctagggtatttccataatttccggaaccgtaccgatattttaacagtgtacatgtattacaaaaaaaaatattacaaacttcttacgcacaatgactcgacgttttacgccattctgtatatactatatatgcaacatttatagcgtacctgttttatgccaaac

SEQ ID NO: 74051 - DNA, 294 bp, Zea Mays
tcctttctctagtgattgcgatataggagttccatagatattgacgcttatgtcctctattgaatttgtgttgtcggtgatgcttgtgtgcgatcaataggagaacaaatgaaaagtcgtatcaaaacaaacaaaatgcacgtacttgtgatgtcgtagttgtgttgcgtaaataaataaaatgttgttgtctttttaaaggtgttaatgttggacgccgataacgtgtagataactaatactagcgtatggttgtttacggtgtcttcccatttaatgtttagttcgccactg

SEQ ID NO: 74052 - DNA, 433 bp, Zea Mays
gatttcaccccattcatgcttttgtatggagataaagctgtaactccagaggaagcaaagacaggttcaatacaaaccatgacttcagcagatgacaaagatacttacaaaacgtcgaaagacgcaatagaagggattaggcttcaggcgattaaccacgtcaataaatatcaaatagaaacagtcatgtggcgagacaggaaagtcaggctaaaaatatcaaatcgggtcattttgtgcttcgaagggtagctaacctagaaacagtaggaaagctacaactcaaatgggaaggacctttcttatttgtatcttcggctagactagggtcctacaggctaagtcgtttctaaggggatgctgagctcaaagaatcacctagtaaaggtgaagagactctgaagtcgtttctaaggggatgaagagtctacgt

SEQ ID NO: 74053 - DNA, 492 bp, Zea Mays
acaaatatctccttcagtgatccatttgatagacgcccgttgcttctaataaattttctgaatatttagtagttcagccatttttgttgcataatatctctgaaattccattcctcaatagaaagatcacgatgttcttcaatattgtctataaactctattagcaacttgatatctctcaccgttttatcaatttttggtaatgatctctgccaatccttcagaacctttcgaacaatcttaaacttggctattaagtttttagctttgtcaggtaggaatggaagtccaagccacgaggtttgaaagatattcatgaatccgtcaaattccagccagaagttttcaaacctaaaaatcttaggtttagggatcttggacttaaaagaaaccaagcaagacacatggtcaaagatgtcacgcgacatcgttttggcacatgtatccggataaacgatggaccattcttgcgaaatgaaaaaccaatcaagt

SEQ ID NO: 74054 - DNA, 563 bp, Zea Mays
cacagctacaatattttagctgctgtagtaccgaaaaaagaacagccgaacaacactcgcgccagatattttctcgtaaatgtattcttgtgttaaaaaaaagaaaaatatcttctcagatttttcagccgtcctcatctcctcgttctctatttctttcccatggagcattagccatcttcatctcttgagcgtacatttcctggaatgctctcgtattcctgatccatgccaccttctgctttctagcatgtgcatgacccctggaaatccacacgtcggctccctggaaggtctccaagactccaaccgctcttgctctgggatatttttcacacgtctcctccatttctctacactggtcgcatcttctccatgtcgagacatcctttgccagcctctacttcccagtgcgtccctctgtactcgaccgtattcctcctcgccatgggtgttgtgcctgtgtgccctctccctctatcacgctcagcctcccgacgcttcttcctctgcaccgtggctgcagcaccctgctccctgttcgcctcagctgccacattgtc

SEQ ID NO: 74055 - DNA, 553 bp, Zea Mays
cattctgagcttcggacggtgttctcggtgggtgcaaggtttatagtgattcgagcagaatgtccctacatctagccttcggtggctcgcactaccgatacctttgttgctcgatgctcatagtagggattataagtgggttacaagtagatgagagagggagggagggctcctaggtctcttatgtgtggatgggcctaaagacttcgggactagagtcctacactaagccttggcttcggcctctaggtcttcaagtctcattgggcgggtgcggttgcctttagtcaagtgtcttctattctgtgtgcctctcccattcatcgtgaccaccctcctccttttatgggccaaggtaggggtcggccttcggtggctcccttgaggagccacaatatcgtggtaaaaccgtgtgttttacctaggcagggccatgttgtccgtatgcgtcttgtcgcctggtcgtccctattcatgctcattatgatggacgacatgggcggtgtggggcctaggtgtcatcattactacctctacgccacatcgaaccttg

SEQ ID NO: 74056 - DNA, 349 bp, Zea Mays
ggccacaacagccatgatgctttggtccatccccaagcaagacgaaccagaggagagggcgatgtactgaaacctccgcaacttagtagagaaagtcgtgatgcagcaagccgaaattgatcggtagttgcccaccggcacagatagacatggcccgcacaaaacctcatcctagagcaggggcacaaccctcccaatccacgaaaatgtgtgtcctcctaaatgattgcctcagggacatccgcggcgcctagcacatcatcgataaccggcgtcgggagcaagaagaggtcaaccaaccacacgaaaggaggcatgagcgtagccctagtccccctgggtcggggcc

SEQ ID NO: 74057 - DNA, 570 bp, Zea Mays
caggggtgttccgtgttcgcacgcactgaaccctagagagctagtgcacatcgatgatgcaatcgacggatacaagtgcagacatacatcgccagatacatatatactatctgatttattattcgcccccggttaacaatgaagctcaggaatggttgttattgttaactagaaaccaccagcttcatatactttcattcacctgtagaaagctacagtacgtattagtgctctctagcctgacaattagctttgcagtagtttttgaaagatcttcgctttgcagttgtacaagtggagacggattcattagttatgttttgagcagcctgcacggctgaccgagccactggataggctgtccgtctcttgtgccctattgatgtactgacatctggatctggatatgggcgaagaggagattgatgccaagctacaaataaataaagctacagccttcatcccattcctccacagatggtgccgctactttagttgcttatatatatgacgataacactggttgttaatttgaccagccaattcccggcgcttctcatgcatgcaaaa

SEQ ID NO: 74058 - DNA, 354 bp, Zea Mays
agattttatggcatcctaatagatctaactcaaccagtagagtcatgatgaattacataatcgaactatccaaacttttgacctacatcatgtagtccatctcacccataacttttgcaaccatatgccccaactttgatgatctaccctgaccccgactcaatgaaaacaagactagaaaaggaaaagatcaacctcgtcaagaaagaagagaagtcaaactcgatcatctgaggcattactacccaacaaaagttctttctcactataaactttcttaccccaggctattcttgccctaacctacccatcttttataacaaaatgactatacatatatatgcccatgccttc

SEQ ID NO: 74059 - DNA, 324 bp, Zea Mays
cgagttcaaacgctcataggttggagatcttcgcgtatttgggcatgatcactgcacaagatttgctttcccgacagagctttgtcgtttatgtgtggaagtcgagcggtttggggctgtgtacagagagttgtcccgtcgctaaggtggcagtgtcacaaggttgagtcccgagataaatccatgtcaagatcgtgtcaaacggtggagagaggtttccaaactttgccacggtgtgttccaggaaatttggcgccactttgctatttggacttgtttgatttatgttttgaaaaacagagaacacggttgatctttggaaag

SEQ ID NO: 74060 - DNA, 421 bp, Zea Mays
atcgcgtgaagctagtgaagctcatgtgctagcttgattgggctctgggcaactggaggaggtggtgggggtctcaccgaagttggggagggcggcggcgcctgatgaggacatcctccactattacccgttggcaaagatgcaattggcccagttggcccaattgttgtcggacggcgaccgtgtgagccttagaattatcccacctcgcttaacttgggaggaggaagccactttaaaagggagagtcacccttcccccatttgactagtcttttggggcgattgggcctttccctgagttgggtgtgcttaatgaactgttgggctccgggcaaccctaacttgttggtcctcggccaaccccacttgggctaggtgtatcatcaggaacatcacttctatacatacaatgaatggac

SEQ ID NO: 74061 - DNA, 357 bp, Zea Mays
cacggtaagtctttgcggtagacttcgatttttcgcacttgttgtgctaatccggctgcacccttaaggcgacttctgcacggagttggcgcacgcgagggtggctagcgctgagcctcgcggtgacttcgtattggtcgaatgtcgaagaccgtcgtcgcggtctttttttcgacgcatgtttttgcgggggatttttcacttgtatattacatggctccgcctcgttaaaaacctcaccccctgggaggaaaagagtgcgggccagaataaaattgtttttgcgaattacaagggcgaatcagccctgatgagtcaaacaaaaaatttgcggaggttgtcaatgttccaggagtg

SEQ ID NO: 74062 - DNA, 557 bp, Zea Mays
acttagatgttagcttgtttccccttcatatccctaaacgctctaccacacccaacatcatatcataaacccctcttggtcgccgtctccacaataatcctaaaaataaaaaaaatcacttcaaaaatgcctggctcctcaaccacgctttcctccctgacgtgctcccgacttggcattccccctgtccaccttgacattgctgctacgttggttgcgtgccttaaaagcctcagacgttcctgtaagcgttggggatgactcctacgttacatggttattgactgcaagtttatcatcaccatgcttgactgcttggaagaggacaaaaacctctctcaagcagaatcctaaacccgggagctatgccatgcttgcctgacacaatccctccatgagtgtgcaacctactggaagcaaagaagcaagcagaaagccatcgtggagggggacgacaacactgccttccaccacgtccatgcttttgctcataaaaagaagtgttccattgcccggattcaagttgattctattgtttatacatgctaggagggaaa

SEQ ID NO: 74063 - DNA, 475 bp, Zea Mays
gttttgagtctgatggtgagtctgggagtttattttcctggacggaggagtcctcggatgaaggcttggattattttgctgcgttagatgtggccgcagtggagtcttcgccgcgtgtggagggtgtcggggatcttcctaatgcgtgtaccgagtataggcgacgaatggtggtgtcgaaacacattgtggatgagttttcgcgaagtggtaggtgccgtcgtatggggatggagcgtgaccgtcttcgagtagaccgggttggtaaacgagaattgttgtcctcgccgattggggcaagcataggtgagggggatctacgaaatctttttgagggtgagaaattgaggataatgttgttcaattacagggagatgggtatcatcccaaaggttgagccgatgtaatatatgatgccctcgccgtgtgtatgtactgtaatttgtattgtaatgtggcatgttggccgtgttcg

SEQ ID NO: 74064 - DNA, 460 bp, Zea Mays
gctaagtgtaaaattggtgcacttttggaccaaagtgcaaataccaaagtattataacaccacaaatcatgtgtttctcacatttgaggatttgcaagtcaaaatgtgggatttgggcttatttgcaaaaagcaccacttaagctatataagcctaagtctgaaattcagtgagcgtgaggcatatttggagccttgtatctcttaatacataaggaatttgcctagggtcaatacatcaaatttgtagagctactaaaggagtataactttgtttaagacatcaggcataagtgttgtacaaaggttggagttaaatggactcaaagttgggctgtcagtcagctcagaatctgaaatcttactgacagtgacatagggtgaactttgggagctcttttgaagataatccagtgagtgtttgagcatggttactatagcaagattgtaactggattata

SEQ ID NO: 74065 - DNA, 382 bp, Zea Mays
aggcaccccatctaaaggaattcccgcctatctgaaggggtagcggttctaaattcttctgctgacaacaatgccactagacgagtagagtcctcctcaatcaccctatcatccaggtcaagcaccaactgatcgtgaacaactgacgcaacgggctgaagaggagcaggatgaggctgttgaggctaagcagtccaaccattagctagacccaagttaagggcatcatttcccaaatagggccaccttgtgcttcttggataccttgagcttcttgaactccgcctagattctgattgaccaaattttccatgaagtcccccatagcctgcagaaaatcttcatcattgtcatcttcagggaatgggtgaggattgccgtt

SEQ ID NO: 74066 - DNA, 643 bp, Zea Mays
gtgacggaggggaaacaacacctagaggagacatcggcgccacctgcacaacggtggaatgtgaggggagaaacatgagatcctggtgccctgctggctcatgctcatcaagatattcaaccacaagtcccaaactcttaccatgattttttagtgcggccaataattgttattccgacgtgtctttgtttcgttctaatctctgttgagatattctgtgctatgctcacagtggattgtttggtgattgcgtagggtagggagagatacggtgtcgcaaggctggaaccatctctgcatctgattgatgagccaacccgtgttgggtctgttcaagcctttcaatgtgctgttgttgcgggttgggtggtgacggatgccttcaatattatcctgaagggcttgactacattgaggtaagcatagcatgttgttttatcccacattgtgtatgatatgatacatagcagattccatgatcccatcaatatccatcgattctgatctatgttgtggcttgtaactaatgcgagctgagttgtatgcaatgcacctgcacaacgactgtagtcttcataattgtagcatcccttgcattgacaaacaaggaaaatttctactctatccaacctagcctaagaga

SEQ ID NO: 74067 - DNA, 464 bp, Zea Mays
gggtggggcagtgctggctggtttggtcgtcttctcgcgtggagtagtggtggacgtggatggcgcaggggggaactggtgctgaggtggatgtcgagcttcgtcctgcaaaagggttagaatatgtcttcgagcggtgtccctgcacttcacgttcagctttgcaagcatattcaaataaagtagtcatatcataatattccttataatcaagtatatcctggatttcgcggtttaaaccaccacgaaaacgtgccatagcagcgtcattgtcctccaatatcccacaatgaatcatacctttttgtaactcctggaaatagtcctcaacagattgagaaccttgctgaaaatgttgcattttattaagcaaatcacgagcataatacgaaggcacaaatcgatgtcgcatcgcagctttcaactgatcccaagtggttggaatgacagtgggatgtttcatt

SEQ ID NO: 74068 - DNA, 292 bp, Zea Mays
tgtaattaagcttgtcccgcagcaagatcgacaccgaaaagctaaagagacaaatagtatcatcatccgtcagtcgtcgtcatcgccggcggccggcggagacatgacgatgggtcgaaagaccgtacctgctgcacaaacttatctccgacgcctttttccttgtctgtgcgcgctgtctcgcagcatcggcagcggctttatacgggcgcacgagtgccctatcctatctgcagaatcaggtacgtagaaaaggaagacgacgatgacccctccggccctccgatccctg

SEQ ID NO: 74069 - DNA, 447 bp, Zea Mays
gcgaaacacaggtcttcgcaaaaatattattatgcctgcgcaggagtagaacttaagcaattcagccaccaaccgagttcgtattgctaagtccgcgccaacgcttataagccgcgccatgtctcctttagtagccagtatggtactaaattgttgcaacacagcaggagagcggttcttcctcggcccatcattccttggacccgcgcggcccatttgctgagtgtcgcgcggacggcccatttgctgcgagggggtgcatcgtgtgggggtgggcacctcggccccgggcgcgtcctggtcgccgtcgccctgcgacgcgaccctcaggcgggaccgcgggagagcggtcttcttcctcagcgcaaccgctcggtcagccactcagccccactctcgcatcctccctccccacgacctccacttccttggcgctggatgatgtcg

SEQ ID NO: 74070 - DNA, 724 bp, Zea Mays
catcttcctcttggtcgtatcctcttacttggctcgcgagtttgtaacctcatcctttgttgtgcttttgtttcttattgcctttacccttctcatctctcaatcttaccttggtgattacgctatgttcgttatctaaaacctccaatctcccaccttagttcaagcgtggtctcttacttatctcacccgtggttatatcctatactttaccacttgcaagacttatcttaactctattcttggttgtacctagattcctggtttttttattcacatttacctcttcctttgtatccttgcctattatcacctttgacccttgacctctctccatatttaccatgatgtttacctattttttagcctctcttattccatttcaatccgagagtgttgttttccctatcccgctcatgttcatttcctttccctttgtcgctttgcaagtcttgtcttaccttaacttcatcctttgttgagcttttgtttgatatcatccttacctttgtaatctgtagatcttgccttgatacttatcttaggtctgcttgttgaaatcccctcttttctatcccaaatcgagagctatgttttatttatctcacccttggctatatcctcttctttactgcgtgtaggcctagacttaactccattctttattgtatttataccacttgctcttctatgccttcatcttttatcttacacccttgtccgt

SEQ ID NO: 74071 - DNA, 712 bp, Zea Mays
gcattattcatctatttatagggtcggcctagtatactactatgtattaaattacaaccatagccttgagccctatacatgtagctacaaacactgatgggggtagcatagtcatttcctcctgaagcggtgacacacacattggtgggttcatccttcatctctaggtcaccttcttcggttctggtaatatgcttcatttgagcacctaagtcgaagcgtcttcctctttacttttgacctgtattaatgtccttcgacaaacatatattagttactcctgaaacaaattgtaaaatggtcaatataaattatctttgaggaccttcggcagagacattcccccaatagtagcctctcgcgggataagtttgtttttccataatgtgatcaaaccacgaaacagacgaaggccttgtgccgaaggtcaaaaacaccttcctcgagcatattattaaaaacaaagttatataaccatccccttggacaacatatgacaaaggaaaaacttgaattggcggtccatagggcaatgagtgaggatgtcatgattcctcggcttttgtgcccacctacctatataactcggcgaattgcatgtgagccacacgatatctactacttgcaccaacctgctgatgttagattctctgcctccaaagctctttttactcttcctattttcttgtgagcttcaggaatttgagagttc

SEQ ID NO: 74072 - DNA, 597 bp, Zea Mays
ttacggcactccacctaagagcaggcctagccccctggctagtaacctaagagaccatgtcagcatagcttgaacaagtaaaagattagggggaagacaaatagatattctcaacataggaaagtagaagtagaagtagtagtaatgtcagcataggaaagtagaagtagaagtagtagtaatcatcattgctagtcaacaatggtatcaggatgtaagtaatgtcatcattagcaactgagcacatcacataaagaaagtgagttcaaaactgtagatagttcatcattgctaatagacaatgttctcagcatggaaccggttcttacaaatctatgagcaactgagcacatcacataaaggaactcaaacaaagaaagtgagttcataactagatataattcatcattgctaatagacaatgttctcagcatggaattagatctaacaaatctatgagcaacttagcacagtacataatgaccactatcccctatgtgaggccctattttgtcacatctgttgagcccaattatccttggtagcagaccaggcagcattgtccatgacaaggtcaaagggagctccgtcatgaaa

SEQ ID NO: 74073 - DNA, 1235 bp, Zea Mays
gttaaaatgaattaaatatgaatttcccaagtttctagaattgtttttgtattaaaaactaatttctataattatttctctatttttattcctctctggactgcgcaccaatacctggaaagcgcagggactctagtgaaaaatgattccagacacaggactcccacaaggcggactgcgggttaattcatcgaaatccgagggactcatttgaatatttgcacaaccgaaggggtatgcgccaatcttgaccgttggatcacagttgggtgcttgagattaaattaagtcccccccgaaccggtacgagatcccggccacaggatcctaatcttacggtcatgattttatgagatgagatccaacaggatctgtctgttaacagatcagtggcccagatcgttcacgcgaaagggtatgccaagctctaatccctaccatccatcgggaatcgacggtcacaaggttctctccctccacgacagtcgaccatggcggcgccgccgacccacggcagaggggtagtcggatccacgccaatcgatggtgcaagacactagtccctattctgaaggtggctacatgatttagagaatacggcgaatgcgtggtatgaaatcttaccagagattacattggtgggacaactcggcgacgacaacggcggacccggccgcaccgagccaacactggtgagaaattgcgggtcccccgatcgacaattccaccgagcgaagcccagtgtgacatccacgcatctagtcgaagcccctagacccaccggttgaatcccgagcagaagcgtgggcgagttccacggcggcggaaccttgacccgcagcaatggcgcccttgcttttgcccatgaccgcggtatgagtgggacgacaaggggatgaatagatcaagggggagcgagttcactttatccgggagttggcgcaatggctccgcacgtgagccacaacagaaatccgaccttactggcgtactgacttcgcgcgggcggttgagtcgtggagctcgaaaatcccgggacaccgagcgggttgttgaggaggggataagcctgacgagtgggccccaccgcgacagaggtagaggcatcgcacgatggtgacaagcccgagcgcgcggtccaggcggatttctctcccggtcgctacgacccaagctcaacaaccagaggagggagaccatcctgacggcttgaccccacaaggcggtgacccaaa

SEQ ID NO: 74074 - DNA, 693 bp, Zea Mays
gcggttgctctgtctttgcctcctgcaacaagaagggtgacgacgggagcttgggcgctcaagagggacaggtgggaggaatatcatatcatactcgatgcctagagagatgaactcaagactcccaaacctaatcgtcatccctagcctgagcaggtggtgaaaacctgccatctagagtgctggcgagaactgggagtgtttcacgtgactgtcccctacctgacacgccaactatcggtgtttggaccgtgggtccttaaccaaccagtaaatgtgtcgcatggccgactctagatggtgtgcgaggagacacaagcgattatcctggtttaggctactcaaggccctacttccagcagagaggatgaggcttatattactcgcatcatggtgcctgtagtaggggtttacaagcacagatggagagggcaagtccctaggtccctagagatgattgaggcaagtgccaatacctaagacagagtgagagtgtgagtgttcgtctacgtgtgttgtgttcgtgttgatgtcgtcgatgttgatctctcgtccgtggagggacccctgtcctatttatacaccaaggggagcgtccttagtgaagccagatcttgtattcgaagaagagatgcctagcgtctggtgtgatggcgtattgtggagcagattcgtgcatgctgacttcccata

SEQ ID NO: 74075 - DNA, 337 bp, Zea Mays
gtttcgcagtctgcgctgtcagactgccagaaatttcgcgcagtcaacacctttttctgcgcgcttttactgcgcagtttgaccaaaaaccggttgaaccggttttagaaccagttgaaccggttttctgtgttctgaccggccgactccccccttatttctctccctctcccctcttatcttcttctcagtttcactttccagccgccgccgcccactcttcttcctctctctccttcacaccttctccactccaaaactcacttgtgccctctcatctttggaagatttgttggagatccgttcatcccggtgttctccatcatcttcctcaatc

SEQ ID NO: 74076 - DNA, 555 bp, Zea Mays
tgaaaaatgacttcttgcacatgataagcttatgctcatctattaatttcagtattatctttctgctctattcttcgtggtaaatatatagcagaaatattagaatgcatgtgaaggctattttgtactgtatgtacatactcaaatcgctctaaatatttgtgttgcattaagtcttagactcatgccaaatgattaaattgtatagagggtacccggtcatgctgatcagactatattattaatcggctaaattatgacattggctaaatattggctgcgccctggcaacacgacgtattatttgtgtcgtacgaacttggttgcgtcatgtgattactatgttgtactctcacttagtcggaccactcccgttgagtcggtgccatcaccaagtcacgtatttttcgcatgccctgcaggcacggttcgtctgccatgatcagtgagccacaattgcacctgttgtgcacgttgcgtggacttatcgtgtaccccgactatcgagccacaattgcgcctgttgcgcttgttacggaggcttattcgttgtcg

SEQ ID NO: 74077 - DNA, 808 bp, Zea Mays
ataacatacacatatttcatactacatcggatgttctgcatgacatcattgcatcgaaatatatttgctagtaatgtatttcacacgagcaacagaagaggaaggacgactcaaggcatcgggcgcagccttaacatcagcgacaatatcgtcaggcaccacgacgtcgggcctcctcatcaagatatgtccagcgcgaatggctttatccatagccttatcgcactgaatcttcaagatagcacagttgtcctctgaagctttggtagccagtcgagcggcctctagctcatgtgcaacgagtttcttggagacacgcaggtccttgatgacagagtccttggttgacaccaactgtttaagtcgcaaaacctcatcttgggatacctgcagctcgtgacgatgatggtctaggtctgacatggtgaagcggtggctcctttccaaaattatcaaggagttactggcatcatggtataacttgtccagattgtcacgagaggccgcgagtgctcgtttttcctcctacaagcaagaaacaacattcaacatccagacaacaataagcttgacaaagtcagctaaggaagtttacctcatgcaccgtcctctcatagtcaagttaggaattgagggaagaaatcaaagaatgcgcgttatccaatgaagcagaggtttgggccaagtcggtttggctttgagaatatttctcctcgaagttagagcactgttgaatcaactcggcccgacttcgagaatacttttcctcaagataagagcaccgttgggctatatccgacgatgcagc

SEQ ID NO: 74078 - DNA, 742 bp, Zea Mays
tttgttttctaaaccatttatccactttaagtggtctctgaactgtgcatgaattagatagaaacgcaggggtctctgcgtaacaagcctaggactcggagtacagtcacgagggatggcggcgggttggttcctagaaatttcagggactctttagtaagattcctgagccgaaggggtattggcaaatctcagccgcacgatcagaggtacatggcacagattagagcacacattgactgaagcggtacacgaccctagccgcccgatctggaagcaacggcttagattttattaaactttacctaatctgcgccatccgactcacgatcgacggctaccatgcttcctttccctattctaatcgcgaccatccatcagcagatggacgatccagagatcttctccctccccacggtggtctggatagcagcgccgcccacccacggcggagcttcgccggcggacgcgcaatccgatgcccggacgttggttggtgataaacctagaggggtgatggcgagcatgaaaagaagattctcacccacgattgaaggagtagcgagctcgtccacggttcggggcgggtccgcgacacgaatagatcgccggtgagggattccggtgacatcaacggttgtttccccaaatcgagggcgcgcatggctccccagtggttcggcgatcgccactgacacgccatttaggccttgggcggtggtgcggcgcgcgacgacggtgg

SEQ ID NO: 74079 - DNA, 657 bp, Zea Mays
atagcacaagccttgttccagtgtacacaggagcatgcttaatatcttcaggcttacgtctgaaggttgcttcaactccaggctcaagcacaaagtgtaccaaatgatattatcatcgaagaaatgattaaagggcttcgtccaggtccagtagcccaaatctttgctagaaaacctctccattctctagagaagttgttacataaaatgaatgagtatatagggtggacaacaatttttgttaaagaagggaagaatgatagaggtatgcagagaccgctaggtgctttagagggagattttaccctaggcatgtctgaagcatccaaaacataggccaaagtgaagataaatctggacatccttagggacaacaaagccatcaacaggattcatctcaaggactaggagcacaacaacaatcttcgcatgacaactttcgcccaccagccccaagaggagggatagggggcgaagcttcggtggaaggtttaacaataattgggttccattgcttcaactagcccctcacccattcattgggagattcaactaacattcatcctagggcccccaccatacgagaaagtgcctgtaggccacccttagtttcgagtataggacatgcttcattaggacaaatgggagccttctgaa

SEQ ID NO: 74080 - DNA, 601 bp, Zea Mays
ataacttaaaccaatcaagaaataaaaaagcaggccacataataatgatgcttttgatagaattagtaggatcaataagtacctttgccagtgccacttttctttttcttcccttttctcttttcgtgggatatggttgatcatttattattcagtatatattgtgatggcaaaaacaaaatatcttttatgttaaagactttaagggcatgcttgcatgatatacctatagattcgaactttctgcacaaacaactaattgtcatatctgcagtgtaaaatcaaactaatgctccaagagaagattgcatctgtgtaaccatgtatgtcaatattgacccctcgtcgtgcaacaatgggccggttaataaaaattgatccttaaattctgtctcaaactctaaaaatattatccttgtatatgattcggtcgcagtcttcaacataggtaatttgggctataagtagccagaatcttttgtcgtgaatgaaaatatgcattcacctcatttgcacgaagactagcaaataccttctcacattctacgaggagctccgaaagacccaatttcctatgaaatcttttattgaaaactttatt

SEQ ID NO: 74081 - DNA, 349 bp, Zea Mays
agccatttttgaactggaaaaatcgtaagatgataaatcggttgggctgttaatactgatttaaccaatgtttctttgcctgcttttgagaggagtctgcctttctaaccggccagtctgttgttgattttttccaatagcggttgcagggagatccttttaatcttcctaaagtggaggggaagaccaagatattttccaggcaagttagcatatttacccgggaacacttcggcaagatttgaccaaagcgactcaggacaacgaattggaaagatttcagttttatcaaaatttatttttagccctgaacaaccttcaaagacttccagaatcgttttgagaactt

SEQ ID NO: 74082 - DNA, 452 bp, Zea Mays
cagaaaaagaaaagaaaaaaatggtgaacaatggtgggctgaaactggcccgagtcggcccaagaatggggaaacgcgcgtccgcacgcgcccgtggtgtttactttgcgcagaggaccctgatcttttaaataacccgtaaagactcttgcgcactgttcctatgtgccactgacattcgcaccaaggccctttcttttctatttcttcacaagttgagaccctcgaccacgaacggcggagcagcagctccggtgagcctgtaccgatcagaaaacataacggtcggcactcaagtgtggctgacacctaattccacccttaataacactaatccctcaagcaatttcgaagttgaagctcaaaaactctctgtccacggtgatggcgcgaactgaggacaaaccgaggtgtccccggtggtctacccaggtctagttctattggctggg

SEQ ID NO: 74083 - DNA, 284 bp, Zea Mays
gagaagcccgaacttttgttcgataacccggatccactcatatgctataagaggatcttcctccttgacaaataatgggggacgtgtctctgagaaatccagatatgaagtttcgtggggtccttgcggatacgctcgcccgccttgctgttgcatttgttgtcccgccatttcccgcagaaagcgggtattgtcggttgtagcattaactaaggcagtgatggcctcagctaatgttggagatactgggggcgggttaggagtagcttccctcccatgggagg

SEQ ID NO: 74084 - DNA, 294 bp, Zea Mays
ccggcagcgaaatcgaccaaatcctgagattttgatctagcggtcacgcgctccacaggaagttgcttcgcctcaacgcatccttcgtgatgacgccatatgctgcctccgattttcgctggaaccacgccaccatgttttgaggcccaaactcagcaaaacccagtagctgggtggttttgaggctcaaccactgaaactgtcctgagtagcgcaccgcatgcgctcccacatcctgggcccatgtcctgccagtcctcgactgtgttggcgacatgatctgctctgccatgt

SEQ ID NO: 74085 - DNA, 490 bp, Zea Mays
aggtcttactcatcacccaaacaaatgttggcagggcatttttcagaccataaggcatcacaacataacagtacaacccatctaccgttacgacaagtaacccgctgattcctgcgaccgcgacccttgtttctctttttcttcttgacaccgtcctgggtgacggcgccgaaactgccggtctgggtgacctcagcttgcggcattgagtgccaagcacggccctcggcggccctggcacatttatcagccagggcgaagagtgtggtgacgttgtccacatcacgtgtggccagcttttccagcatcttttcgtcacgcaccccctggcggaaggcagtgatgatggaagcatctgagatacgaggtattgtcccacgtaccttggtgaagcgggaaatgaatgcccggagggtttccctgggtccctgccttactgcatggaggtgtgcttctacaccatgctgctggtaggcgctggcgaagttcg

SEQ ID NO: 74086 - DNA, 722 bp, Zea Mays
ctgacagttacaaaaatccccccggacttctgtttctttacaaggccaggtccacgacgtcgcacggcggcaggccgagctccggtgagcctgtaccggtcggatcactcaactaccggtgctcccatgcggcagacaccaaattgaattcttaacaaacatttcccctcgctcaattccaccattcgggttcccaaactctctgctcacggtgtccgtgcaattcaagaataacaccgagcgttcccggcgatctaataggtcctagcttcattggctgggtcgggaagcatcagggacacataaggatactaaaacgaaagagaagggggcatgagcggacgtggagcacactgaccacggtgagatcactttgtgcggtgctcgggaccgatttgggggaaatctcgaattagcgagctttgatggatgatttgaggcacgagttgctggattaggtgcttgactacctagcagagccgagggtgtgctcaatttatagtgtgcttgagcggtggccagtgaatttgatggagacgcgcggcggccgaagaggagaaggggcactagcacaaacgattagtggctttcaccgtggcggactcaccggcgacgagccagtgatatagagcggcttgcggcgacatggtgaagcttcaaggcacgtggcattcgatcgatgtgcagccaactccggtgaacttatctgagccggccgcaaa

SEQ ID NO: 74087 - DNA, 370 bp, Zea Mays
gctccgtcaagccgaattcgtagttacccaaactgtgaccgagattttgtcgccggacttgcatttccgctgctcaccgcgggtgaaactcgacccactgcctccactctcggtgagatgctcttcgtagcgtgttacatgttttcccctctgtggtcggcgactccgtacggtgataggggcgctgggactggggtatcgccaagtgctatcgcggattcgccgccggccttgatgcgtcaccatgctcagctatcgttcacgaggaagaagatccattttatcttaaaaaaaattctctcttagtttaatagatccatctcatcttaaaagattctaccttatccttatgaattcatcttgccctaaa

SEQ ID NO: 74088 - DNA, 328 bp, Zea Mays
cttcaacatctcagatttaaataacctacattgattcaccgccgaccgatcggaatcggacgacgcacgatccgtccacccgaatcggtattctatttctaatcagggccgcaccttttgcatccaacggtttgcatgatctcggccaccatcttccccaaccagccgactttgggcacgacggcgcaacccaccgtgcggcggcaagcccgccggagctgagaatccaatcacccagccagccatcttctaattcgttcgctccttgcctaattagtgacattacgagcctgtttcccccaccagttcctgctcacaacaagcccag

SEQ ID NO: 74089 - DNA, 446 bp, Zea Mays
gatcactctagatttgttgggcggcgacctccccttgcatgggtatttaagcagtagtttccctgcctcatctcctaaggtcacgaccgaaggcgccactgggtacccggagcaaaggggcagagcaaccgccgtccgcagagaagaaacagagagagaggggccgccgcatgagcatctcaccgggagcaccgctctgggcttggttgacggtcgaggaaagtctccagagcacaccaaacatgttcgagacctcatatggcgatattggtgcctgggagcatgggaatttctcgccggacttgggtggcgacaccaaaccacatcacgctatggccaaccccctccacgttttcaacaccagtaggtaattctcacccgagttcactattttcgccccgtcgtgtagcactgtttgaatcataggtttgggcacgaaatcaggg

SEQ ID NO: 74090 - DNA, 423 bp, Zea Mays
atttcttctttccttgtttcttgctcgctacatggttagtaactattttcttttctaaaactatgcctttttgtttcacatgggacaagacttaactaaatgtcccttctttgagcatttaaaacaaagtttattatccttaataattaagccattttcttcaatatagggacatgacctaatcaagtgcctcttttcaaagcattcactacacttcttatttttcttagtgtgaaatgtggcttgatcattaccttggatgttaccttgcatggaggcatggttgaggcgtttggcagaggtattgattttcttcttttgttccttcctcttgacaatccttaagtccttgacattttcttcaagggattttgtgcatgccacggttgttcctgactcaagcttcttcaccatgtaatcacg

SEQ ID NO: 74091 - DNA, 718 bp, Zea Mays
cttgttgtcactagagaatttatacctcttgtcatattgattaaatttctctagtgtttttttattttagtcaaaaccgtctattcaccccctctagccggtgtccttgatcctacagcaggactatcacttgtaggcatcagcggcttgagataccctctaggctctggcatgtcctctaggatatggttcgcggcacacttcttgcttggaagtagcagcaggtagtggacaacgctgcgtggctctagcgatggcgatcgagaggggatccaccgatggagctaggcagagccgacgatagagaggcggtggggggactagcgggcgcgtaggcatggggttggggatagggagaggttgagcagcaagcccacaagaactacactgtggaaggggatggggagcgcacactgctagctacgtggaggaggagttgctcagggtggttgggtcggtgctgggtactaggatggggaattagggttagacagtagttgggccaggaggggagctcagaagaatgggccattgggttgatttgtaatgtcataaaaaatagattggataatttcggatatccaccagatacccgcgggcgagaggcaaaacatgtacccgacccaatttaatcacgggtcaggtacgggtgaaacccgcgggtcaagttttgtgcccaaacccgaatccaacgtgtcggatatccatcggatacctg

SEQ ID NO: 74092 - DNA, 626 bp, Zea Mays
tctcttatagagagacttatgtactccatctttatgcatggggccggccggctggtccaggtcggcaaaattcccatcttcttcgtgaatgaatgaaagaaaagaagcctgaaaagaggagaggacagaagagagaaagaatgcaggtagtaggtaagctagcagcagcagggcatggggctgggcctagggatgcgtgagatatataaaagccaggaccttcacgagggtgcaggcaggcgtgcaggagagagagatggactttgttgagacttgagagagaaagagagagagagggggtatgaaagccacgcggggcagcagccatcaatccatggatggaaacctagctcagctgcttctccttcgttgctttctctctcactcccgctgatcgatcagttcctctgatagcatggccatggcaacaagtactagctagtactcgcacccacatcagccttgcagttgcatatgcatgcgtcgcctgctcctgctgcggttgctgtagtttgttgctgcacccccgatcgccattattctattcctctctcatgcatgcatgctgcatcaccatatattaccctatttagtaaccaccttatccatcatatatcatatgggca

SEQ ID NO: 74093 - DNA, 330 bp, Zea Mays
gtgagttgtgggtaaaactgatcaagaaggaaaactaagggtagatttgagtactaggatacaactaagggtatcaatataaataaccccatctccgcctagtgctgggataatggtgaagactttttgaattggtacggacatagtccaaaattagtagtagtcccaaacacgcttcagcacgttaggcctgtcggtgtttcggaccccgggggaccctcaaccgggccgaccagtgaatttattgctgcgtgcccctgcccagatgggttggcgcaagacagaacacaatgggaaatgtggctcgtgttatctcgcaccagggggtgc

SEQ ID NO: 74094 - DNA, 459 bp, Zea Mays
tgaaaacgggacgggattacccggcgggtaccggatacgggtacttaaaatacccggtttttcgggtaccggatacgggtaattttgtatacgggtcggatacggatactacccgaatataaatcagtcggatacgggtaggatacaggatgaccactacccgacaaatacccagaaagtacgggtaggatacgggtacccggtttgcgggtacccagctggtcggcttcagtttctgcttccgtggatcgtctccagtgcaagccgctagacgcgtttttcaattttcactcattcgtcggctagcccatgcacatcgcacatgcgaacaagctcagtcggccagcccatccattaacatgccttgcagtcttgggccaaaacaacttttgttaatttgtttaatgacgtgacccaatagaccaaagcatgttgcctgagatctttagtggctaagac

SEQ ID NO: 74095 - DNA, 585 bp, Zea Mays
gtaccaagttagatagtagcagagaaataatgaatattttctgttggtgttgaaaccaaaggagaatgagggacaggctgtagcggttggctggttcttgcaggacattaggtactaaaaatatgtattttttaaacctcagttttggtgtctaatgtaatagttagatttgttgtgcgccaatgcccaatctttcattgatggcaggaatgtgtcatgtgttgtagaattttccttcatttgttgtctgcgaacaagggtacatagcttttaatttggaaatctaattcatttggactgaaataaattctgaaagaatgggaataccttcaatatcatgtgcttgactcaagtgacattcagtagtacataacattttaaagatgtcgtgctctttagtattccttgagctattgatatgccaaaatagaaaatctatgtactgaatactagatgaaaagctcatgaacctaacaaaatccatcaaaacttgatggatgcagatctttgaggtttgttaatctaactttgtagaatcaccaagtagcatcaacatatgtacatatacagtattttaatgccgac

SEQ ID NO: 74096 - DNA, 419 bp, Zea Mays
gaaacatggtccttcgggtcgaatcaacaatggatttttcaggttggccataaagacgaaggtgaagctctttctccaaggtactcctatgatcagtgtcaactggatttcgtgcaaatcgagaattttaaatgtccattgccaatcttaaattcaaatatgagatctcgtttcagctcgactttgaacaacgaccctcaggagactgctttggttcctgttccagccatctttttctcggatttctcatgatttggatagggcggtgtctcatgggactccgtgcaaaacccgcctctcgtctgctgggcgtgtacgcacgtcgcatgcgcactcggcgctgttgggcccaccatccttcaaggtaaactttgctaccggtgtctctcgaacacccacttcatcaggacctgttctag

SEQ ID NO: 74097 - DNA, 487 bp, Zea Mays
gtttttgttgtggggcgtttgtttcgtgaagcttggggaaaggagtctcctaaaatgcaagcagatctcaccgatttttcttgaggtatttcatgttattgtagtcagtcatattcttcatccctgctgttgcacgctgtgggggagcttgggaccagcatcagctggcggaagaagaggatgtcgacccgcttccagaggtatgtgatgaattttggattataggaatttgttggtccattccatctgatatacagtgaactccatcattctagaattcatttgcatattaaatggtctgtatccaagtgtgattgtgaccctcctcaagtgggtatgattttctggtatgatttcatcattagcatcagctggcggaagaagaggatgtcgacccgcttccagagatatgtgatgaattttggattataggaatttgttggtccattccatctgatatctagtgaactccatcactctataattc

SEQ ID NO: 74098 - DNA, 677 bp, Zea Mays
caataaatcacacaatcctggcccgcgcgcggctgctgtaatagactactctcgttgaaagcgtgacgtgacgtgacgcaattccaagctggaattggagatggaggtgccaacatggacgtgatgtgatcctttgacaggatgctgtacggcgcaaccatgcatcatcaaccacgagtattcaaaggggagaaagcgcgaaaacaacgctaggtccacgagttttgtttgtataccgactcgaactgactagacagtagacatggcaataaaagagagtgcgtactttgcggaggaaaaaaatacaaaaatgattcgtcgttttgctaaaaaaatacaattactgtacaagacatatacgtaatggcttaaattacttagagacggagtagaagatggatcacgttagattggtattgtattaagaagaaactcagcaggtacggtccctcgtaaatcgggaatgtgcgggccacagcaaggagaaattttttaagcaactcagaaatttacccttgacgaagatcaaatcctgtttctagaggtgctactcggtagtcttaaccattacatagaagtcccattcgcaacaccttagcatctgccaacaaatacttaggccctcaaatgaaaaatttactcgaatagtagggtttaaataatgcaatttgaaaaat

SEQ ID NO: 74099 - DNA, 436 bp, Zea Mays
tggatccggtcctttcacttgttccggacatgtaattaatccggctggaatgaatcaagggaagcaatttttatctgtttggtagcaaaggattgaatcctgtcacttcagttgaaatcaaattttttgactgtgttcaaatcgcaatgcaagcgtcgcggaagcttctagtggaattggaatacagcaccaggcagcagctgaactcaacttggagccgactgcatagattagcaagttgttagcaggtagggccactggacattaattgtggtgagctgtatcgttagcacagtcatcaactggccattaatctacaacgccagagtcagacagccctgcgttcttctcttcatcagcagagctgagcataatattccaggatcaagaggcatgtgaaaaaacaagtataacttgtgacatggattgatagaca

SEQ ID NO: 74100 - DNA, 1534 bp, Zea Mays
aagcctaggaaaattggtttcacaattataggatttttctaccattttctatagattttcaaagctttactgaaaaagaaaaaggaaaaggttaaacagtattgggctggaatcaaaccaggcggcccagtccagaggggaaagcgcgcccgcgcgctggcatctttgcagaaagaccctcgggtttttagctaactagagaacgagcttctttactattcctatgtgtcgctgccagattacacctaagccctctggtttctaactctttgcaggatgaagtccacgacggcgtcgcgcggaggatgaactccggcgagcacgcagaccggccggaggaggccaagaccagtgcttagcgtcggcctaaaccaaattcattatctagagaacgtttcccctaagttaatttgaagaatggcactctactttgccctgcccacggtgaccgagaacgttatagagggatgaaggtgttcccggcgagtggtggtgatctagttcaattggacggttcaaggagttcgtgggatgcctacggatgctagaacaagcaacagaaggacgcgagctaaccggaatcgagctggccgcgacgagctgttctttacggcggcagagaccgaatttggggagaattggaaattcgcgcgtgctggtggatgatcgagggtgggagcgggtactatagcttcgggatgacttagcgcagtagcccgagccatcaatttataggaagcttcgtcggtggcgcttaatttggccgcgccgtgcgggtggtcggagataaggaagaacgcgggtgcggtgaatccgtgtccaccgtcgtggcgagctcaccggcgacgattggacagccgtagcgagtcacggtgtcgcggtggaaagcaaagccacgcggcgcaaggccgggaggcggtggctcaccggcgagctaatccgctccagccgcaaagcagacggggcagccacggtgagtcaccggagttatccccagggggtggcttttacctggcggccttatcgggtcatcggcgacgcgaatcctacagcggtggcgtgaatcacggcgagcggcaatcaacggcgacgggccaccggcgacgagcaagggataggatcttctttagtttaacatttactgtaccatggcgtcccatttcagttaacttgacagagcaacttggagcatgatttactctcaatttccaatgacaactcctcccaagctctgcagcaaaattgtagagctataaaccagcaataattcgactatagggcttgaactcatttgagcactagatcaaggttgaattcatactcaaagttggctctgttacactgaacatctgaatttcagagtggatccagcctgacagccaaactttaggcttaattatctccaatattttcttaacaactatgctcacactcttaagcaaagttgttctcctatgattgggctacaattttgatgtggttacctagttcaaatgtggctcttttgcaagtaagtccaaaactcagggtttag

SEQ ID NO: 74101 - DNA, 780 bp, Zea Mays
ccagtccactagactaggaacccaagtggaggcggcacccatcttggatcgagtggtaagttttactcaattttaatactagacatatatcaattgtatgtttgatgcaaattgtgttatatagggtaacacattgagacgctcggtacaggacattgatcgccagcttttgactgtgggcgataacagcatgcgtagcttcttggagataagcctacctgcagcgtttatagctttgatatgttgtaaactaatatgtctttggggtgcagtgtttatgtaggcgtctacgtggagctgctgctcactgtggctgcaggaccaatgttgcacatgacgttcatgtaccgtcgtatagccacacagcaacgccgtccacaggacttggcgttggcttcgactacgatcaggacgagattgaaccttcatagcttcaggggctccttcgacacaagcgttacaactagaacatcgtaggcgacaccgctctccacaatgttacactccaggcaccgacgctttaggcaagggtaagactaggagctataaaacagggaaaactttgaatatttcatctagcctttttagagctattacatagccattccagaagcatcaatatcctatattatgagtatggcatctagccttttcagatccatttcgtagccttttcaggagcaataatatactatagtgtcgctgttacatatagtcttttcagagcttttacatagccttttcataagcaacaatatcctatattatgagtatcacatc

SEQ ID NO: 74102 - DNA, 757 bp, Zea Mays
gcttgtataaacgtacaatgtttacgatcctttacacaacaatttatgctccatatgaacacgacgtacacacaacaatttatacaacgtgcggggtgtggttcggggttaatgcttgtataaacacacagtgtttacgatcctttacacaacaatttatgctccatatgaacacgacgtacacaaaacaatttatacaacgtgcggggtgtggttcggggttaatgcttgtataaaagcacaatgtttacgatcctttacacaacaatttatgctccatatggacacgacgtacacacaacaatttatacaacgtgcggggtgtggttcggggttaatgcttgtataaacgtacagtgtttatgatcctttacacaacaatatatgctccatatgaacacaccgtacacacactaaccaaccgatcgtgcacacactacgggtccccacagtcctgcgtcgcttcccgctagccgactgagccaatgtggtcaacgttcgagacccactcgtacgaacagaaccaacccacgcgtcgtggccccaccaaaaccctaataaaatatgtgccttgccgtcgccgccacccgctcctacgatcgccaacgccgagggccccaccgccccactcgccctaatcgccatccttgatcgtttgccctccaccgttctccgccctggttcgtctcccctctcattgttcgttccatttccctacattctctcgcataatccaacaattgtttacaatatgaat

SEQ ID NO: 74103 - DNA, 474 bp, Zea Mays
ggaaattacagtctaatcctagacagggattggattcatgctaaccaatgtgtaccttctacattacatcaaatgttactacaataggtaggctacgatgtagaacaagtacatgctgatgtatcggcctgtatcgctgtggccgatgcccctgtactttggacttatgagactgctacgtgtctcacaatagtagatttttctgattatcagttcataagtatagataagaagggtttcattcctgtaatgctagagccgatggagaatcaactaaatcctaaataaagtttaaatgatgagtacatgcagaatacatgagtccctggtcacggacagttcggcttctgaggccgaatggtccggtatttcacaaaacagttcggtctttgagaccgaacatctaccacagcgtaaggatagtatcacggatgatccgccccccgaggccggagggtccgccatcacacaaag

SEQ ID NO: 74104 - DNA, 372 bp, Zea Mays
gctgtgtgcaggcccaggtcccagtcgaggctacctcctggaggccattgccaactctttcttaggtatgctagtctacagcctcgacagatcgagcctacatcccaggggggccaggtaccaaggaggaatcagttacaccacacgcaacggggacaagtggtacacagataagtgctaatactgcttgataaatagtactcaaaagtaccttacaaaaagcaaaagtattacatccgccttcaagcggagccctagctccatctttactctacatgtatgaactacctccacaccagtagggtcgcgtggatagctagctccgagcggctcgccagcgaaggcgaccacctctgcaccgacggcagcggc

SEQ ID NO: 74105 - DNA, 765 bp, Zea Mays
ccagtgttcaacggcctgtttggtcgccttagcgtgcagatctcagcaaaaatcccgtgtacggtctcttctctgcatcaaatcctatcttttccatgtgagttccaagcaaagatatggtcggggttgagagatatgggggtgggaagttggctctgaccgagctgtccaaaccaagacaaaaaccatgtcaagtcgtgtcaaacgacttagggttgggttcaaacttttccagggtgttctagaggtctttaggcgccattttgtcaattgggccataaggttttgaggtttggaaaaaggtgaacatgtttgatctttgaaagagggttggttttgaaagtgagaaaagtctgatttttcatttatgtccttctccttggtgacctttttggggtttttttgaactctttttggggtcattctcttactaacttttgtagggtattaagtgtactacaacttttataatttgccccagtcatgataatgtggcttacatagcccttttgccataatcccatctagggctccatttgcctaaagggatttgagcccttctctcctctttaggtgcatgatatggccaaggcatgacctctaagatgggttacaccttcttaggatcttgatccccaagtttggtgtcttgctcaaactaaaccacatgtgatgatgggttcaatagtgtaggcttgggtgaaatccctaagtaacacctggggtgttactgtggcggaactgcccgaattattccaacttaag

SEQ ID NO: 74106 - DNA, 585 bp, Zea Mays
tctcaatcttggcccgagtctggtggtcaatctctatggacttgagcttgctgaagagctcgaccacggtgagagtcttgtagttgggcgactcgatgatcgccgagaccttcacctcccaaaccctctgatctagagcatgtattaatttcaacgctctctcatgatcactatagggtagttgtgccttattggcacacatcttgttcacaatggactggaacctagagaacatagaatcaatggtctctccagccaactgtgtgaagttctcgtactctcgcctgtacatctcaaaaagtctggtcttcacatgatcatggctctcatgaaatcttttgagggtagaccagatctgatgagccatagtcagatgtccaactcgctcaaactcaccaagcgagagacacgagaacaaagcgtttcgagctgtgttgttcgaaccatggaactccatttgaattggagtgatccggtcacttgtagcatcgaaattcgcatcgaggcaaattttccaaacacggtaactgatgctctaaagatatgcagacttgcgaatcttccagtacgggtaattggtcccat

SEQ ID NO: 74107 - DNA, 613 bp, Zea Mays
ctgtaagacctttttgtgcctttggcactgtcacttttgccgaagggcttagaacttctaatattttcgttccctcgactcctatctcttcaatattatcggccttcggctcagctaatttggctaaggatgccttcggcattgcagccgtctcttcaatcctctgtgtaagcgcaggttctttggcttcagtagccgaagaggtctcaccgccaaattcaggcactgtggccggttcaatatagcgcggtcggtgagtaagaaccttcaccattttcctcttcggcgcgggctcgcttggagcagctgaagcaacatccttcccagaagttgcactctttctcttctgcccccatggcgggtagcggtagtcagggtacataaatccaatagcatcaaaaactctatttagcctcttcttttttcggctcccgaaggccacagatagtgcgttatcttcagacttggagtaggctccaagtagttcatcactagtgttttcaacacacttcagccaatcattgtctggttcaataaattggtctctaaacctgaaggtatatttcaatcgaaccaaaccaccttcgttagggttgttgatggtctcttttgg

SEQ ID NO: 74108 - DNA, 484 bp, Zea Mays
gaaagtagaatggatgaaaaatgctctatggaggactggtcggagaaggactcaccggcgtcgtggagcaacgcggcggcacgacggtggcagggtcaatgacgtagatgaagaaccagtggcgatcgtggaggctctgttgtcgcagaagtatttttgagggcggtggctttggagtagctagattaagattagatttatctatatctagaattttataatttcatattaattctataaaatttagatttagggtacggttcaaaaaatgccctaggagccttaaagaaatttgggcaaattcctgcaagtattttagaaccacgtggaatttctttttttttgtaaaaaaggaaaatcctggaaaagaatacaacaaaacttaccgcggacttctacaggatataataacatgtctcaaacataccttacacttagaaacactatacaacaaccaaagtttctctagggttttattttacta

SEQ ID NO: 74109 - DNA, 553 bp, Zea Mays
ttttcgctcgccggtgactgaaaaggagaaaacggtgctgcgacgggtcctggcggaattaggaggtaaggttggggctacatggtcgcaaagggctatggtttcaccgtgcactaccaatttgggagaggtggagaggatttcgtgaatttgtgcttcaaccgaactcacttgtgaagatgtgaatacctcgtcgtgggtggcggggctatttaaaggcgcggtggtccggctagcgatccacggccgcggattacatcgttcatgcatggttaccacataaagaagggacatagtgagggaggagcgaggcatgggtgacacggcggcggaaatgaccgagccacggtggccgccggtgaattatctccggctcggctcgggctaggtccgtgggatcgcgacacgtcagaagctacctccccgcggtcgatccttaccccaattcactcaaacacatccgattctatagtgctcctgatcttaatcctcacttcttcagatatttcggtgccctaaactttggcacttttctgaaccgaccacctttcac

SEQ ID NO: 74110 - DNA, 440 bp, Zea Mays
gttttggattgggttatgatgcacctgggcgcgtgatgtggtagctccaccgggcagtccgccctgaggcttgcgcgccgccgtctaacggtgacagaattagggagagtcacgtgtgccgtcagaaccttgatggacggtgtggattagaagtagtgtatcggttcggcttgggcttgtcccggtcgttggattgtcaatgtggggacgagatcggatcgcgtgcataacagaccgtagcccttgatcattgatctaaccgcccagatcgcgtaccggttcattttatgttaagtctaatctgtgtcgttcgcgttggatcagacggcccacagttgtcgataccccttcggccagcgagttattcaaaagagccctcggattttaatggattcaacccgcagtcctggcagtgaagtctgagtcttgaaatacttgcg

SEQ ID NO: 74111 - DNA, 859 bp, Zea Mays
tcgcgcgcagccgcaacaacctcgttgatgcttgcgcggagaaattgccggcgaaccaaccttgcgaactccccgcgtctctgcgctgtatgagcaccttgcttctcatccgaacccttggaccatctctcgccacccggaaccaggaaccctagccgccatcaccaaagtttgcaagagcaccgccgcggttgtcaatcatctaggcccctaagtggtgttttggtaattaacgacaactgactgtggactaacaattcgtggagaaataagaatgcaggactggaccacaggaaacagtaaagtctttgggactcataaccattgattgtggatcaagtgaaggcaaaggtaaaacataggtttttgcttttgccggtcagcaggtgtttagagaaaaaaatgaccggattaataggatagacagtcgtactattaagaggggtcaataaacttgattggtgtaaaacttagtgcctcgtagagcataaacggtagcatttgcatgaggactaacagcgcttctggtttcaaaattagaattcttttaaactagcgcaaaaccttttttctctgaggtcggcggaccgtccgggacagaaggccggatcgtccgcgactctgttagagaggtctgctggccgtctgtctctgtctccccttagcggaccgtccgagccaggaggtcggaccgtccgcataagatgaattgagtttggatagggacagtgtgttttgtgtccttgtactacggaccgttcggggtttttagccggacgataagtggtccatgtgcggaccgtccgaccatgaatggcggacagtccgctcgaattactttgactgaccagcgctctgt

SEQ ID NO: 74112 - DNA, 436 bp, Zea Mays
gttcttctggcaaaacattgtttgccggtttggagtcccgtccgagctcatagtcgacaatgggaaacagtttgacagccaggacttcagggatttctgcttctccatcggcaccaagcttgcctttgcctctgtatatcacccgcaatctaacggcatcgtcgagcgcgccaacggcaagattttcactgccatccaaaaaaggcttctcgacgacaggaagggtaaatgggccgaccagctacctgaagcagtctgggcactaaacacgaccgaatgccgggcaactggattcactccttttcgtccactatatggatcggaggccatgaccccgcagaaaataaagcatgggtcacctcgaacaagcgcatcagctgtccccgacgtggacgaaccaacgtccaaagacctcatcgacggagaccgcgtcttg

SEQ ID NO: 74113 - DNA, 493 bp, Zea Mays
aaaatagtgatgaaataaatgagaccctactcctataaacatgattaacctaaactggttccctataccagctcagccatatacaatgtacttgacctacgcgttgggttgcaaaatctgtatagactgacataaaattataagcacccaatattttaaactgtcaaaacttatcctacccacatctacctacttgtccctaaataaattaatcagatcttaactagtttaatctagtcataccaacctaatctagattctatctaatctattatgatctaatctagagtgggttacttaatgctggtataaaagataaggccatactcctaattcacatacgcctaaattagtgacttagatcaactcggccacacccaacaacttgacctacaaaacagattacacagctaatcccatctagcatatagttacctactaaaccctctacccatctgttgcctacagatctatcttaacctcttgtcccaaa

SEQ ID NO: 74114 - DNA, 488 bp, Zea Mays
ctctcccttttatagctcaagggggcacgtacaaggatgctgagccccgacatgtgggcccaggggcaaaacggaagggagtaactaatgcctgtcacgccagggtgatctccgagcgccataatgttcgtagtgcatatagtattgatatcctgcgctgcttcctcggtaatgcacgagtgatggtcagcatagtgtacgccgcagcacgggcatactgcctaccaacggaatggataggtatgccgcctgcaggatggcctggtcgcctcccgtcagtggactggacagggcacattaaatgctaaggcggcacatcgcctgccagtggaatggacagggctcattaaatgctgaggcaacacatcgcctgccagtggaatggacaaggctcattaaatgccgaggcagcacatcacctgacagtggaatggacaggcggcgcgccttatccgcaataaatggggcggccgcgcggcccagaggcc

SEQ ID NO: 74115 - DNA, 702 bp, Zea Mays
cagtgggtggcgaagaacattccaccggcgtgcaagtgcatagacgttgaactagcctaattggtgcaaagtttaaatattttctcttactctcataacattcccattgttgtgtgagaagccataaaggcgtcaaaggggaagaaaccaacaatgtttgtgtgtggtcaacatgctgaaaataagaaaaatagaaggatgacgtgtgcgccaaaatggcataagctacgtcgagtgcaaagactattgaggctttgacaagaggcatcagagaaactacatcagtctctccatgctctccaatcatgggggtggttgggttggcccaaagtccttgtcctggctagggatgtcggggtctccgattacgttgtctatggcttatggctgacgactgaggctgaaatgcctacatcgggttcgtttttagtttatgttgtccttgacatgtgaccttgcaatggttttgcaggagccttcattgctgagcgcacccactcctgatgccagagcatggggaaattctgccaatccgtgcgggctagtttggtggcggattctaacctagcagaggaggccctcaaggacatggctacccaccttctacttgagtctacgcatctttgcttttttcttttgttgcatgagtgccgactaagccttgcttaacaattgattgtcattgctgaatgattgacttcg

SEQ ID NO: 74116 - DNA, 595 bp, Zea Mays
acaccatcgaggttctggaagaccagctccaaaccacccagcagcagctcgaggaggcaaactagcacatggacctgcaccatcaggagatagaggccatggaggcagacggggccgagaggatgtagacattgagggagaggaggagccggagcccgcttctagcctggacaatgcgagctcatctcactctggaggaccaccttcccccgagtctagcgttgcctcttttgcgcattgagttttagggttagggtagaagtgttttgaagtagcactcctcaaaatggcttagcttttgcactttggatgtactaggctagagagttgagtccttcaaacctgatgtaacccctggaaacttcttttgggaaaaatgaaagatgaatgattttaatttttaagaatatgaatcgaattttatcctgttggtaccagtcatgaaaagcgaggaagagcatgttgtgaaaacccctgcaaatctcgctacttatttattttatcacattgcgcaaccacggattttgaatataacgacataaacttctaaatttcaaatagcaggaagagcgcgccgtggatagaatgagcgcat

SEQ ID NO: 74117 - DNA, 545 bp, Zea Mays
ttttaggcagacaaatacaaggttcaagtgaaaaaagatgcacttacattgttcttgttaccacactcaaactcaagcaaacctccacgtgcaaggataactagatctccacaatcacgtacacaaagagagttatcaagtcgttcgttggcaaaaaccaaacacatgattataaatgtaaccgatctgcctaaacaactttgcttatacaccaaaatcaaaattatctacctagggttgcaaatttcacataacataagctaactcaacacatataaaatgaggaagagatgaaggataccttgctttgaaaggtctaaggatcaaatccaagcttccaaggttgaatcaatagattagagaaggctggaagaattggggacagggagagggagaaagatgagaaataaatgaggttcgccccggctagtgaactgatgttgattaaattagagcatgacgtcacgagctatgacattgaggtactgccacgtcagagccacaataacgttcactctatttataacataatacctcggtgcttt

SEQ ID NO: 74118 - DNA, 471 bp, Zea Mays
aagcgcttgagagagggatgagaggctcacaaggctctttcggggtggaagtagagcttagaggctactggctagagtcctagctaagtcttggcttgatggggctccgacctcctggtgctcgtcggcgctcctcctcctgttcgtccttgtgggttcatgttcctctgaaggcgtctggttgcctaagagctctctccttttaatcctgtctgatctatcatcccatccccttgccctgagaccagcctctccttttaaaggttgggagaagggtcagtcagcggtggcttcccttggaaggagccacaaggcaagggtaaaactagcattttaccctaggtggagctacacatactcgtggggcccgtggctgcatggttgtctcatatttaccatggtgaacgacgtgagagcggtgatggtcccaggcgtcatcattattgctatatcgaccccttatggtggtat

SEQ ID NO: 74119 - DNA, 733 bp, Zea Mays
cgacgacccggatgactctggtgacgatgatgaatatgacgaagaggaagaaaaagaagatgaggaaaacatcaacgaggaagccaacgaagaacaccaagaccactacgtggggttatggcctgtcactgaacattacacttcaatgttcgagacagggcacttccctaacctgctgcaggatgttctgcatgcgttgggaacctacgtccgacccctatacgagacaaggcgagtgtacgagcctcctcgggcttgctactacatcactcgcattcatgtcagggtgatggatgcaggtgatagagggttcaggactctgtcagctcacgagtctctaacatcgttatccacctactctgcttcggtcagcgatgctgctaggtgaactctgtggtccctcagccacacctaccgacagtagctgcacaatacgaagtacaggcatcttcctaccgatagtagctgcacaatacgaactagaccagcattgttccaggtggagctggagaagatcgtctccacaccttagctggtgtggtggcaggtcttaacaccgacctggatagtgctacactagacctctctagggtacacttggagctggaggatgcacatgcaaggattgcagccttggaagctcagcttgatggaaggaattcctctgaagttcaagtccctgccatggcgttatcccctccccgcaagaggatccgctatggagaaccaggat

SEQ ID NO: 74120 - DNA, 463 bp, Zea Mays
cgaaacaggaagagaaaaagagagtaacgccagaatttggtgaatattggagaagaaaatttatacccccaaattcagggcgttatagaaggcactgcgaatgctttgtctcgcgaaggctgtcggcacttcgaagcttttgaccgaggcaatgaggaccttgaccgggaggtgttctaggtcaaagacgctgtactaaaccggtctgctggggcactgtatgatcggatgtgggggcgcatggtcgcgctgttgtcagggaaagggttggtcaagcgttggagcatgtgaaggcctttttctggtcgggggtagaaaattgtgtttaaatttgagatctctaatgctttgttgttttcttaccgcatgagttgtgggacgaggagattgagaaccttgctggcttggagtgttccctggccacccaggacggtggtgttgccgagatgggtgcgaaggagcg

SEQ ID NO: 74121 - DNA, 383 bp, Zea Mays
atcaaaccatacgtatccatagttgttggggtagcaacggtaacaattagatggctagtgaaagtcgtctagagggggtgaataggcaaaacctaaaatttataaacttgaacacaaaacttcacccagagttagcgttagaatgagtattgtcgggtatcgtaattaggggttcctggattacgcccctaaacatgcttaaccccaaggctaacatcagacacattccccaaggtcaagagagtgtgaaccacgattcgcctgaggctccaatcggcagtcgctcaaaactctgccttgcccgagcatgtccttggacgagggacgtactcaggaaaatcctcgtcccgcccgaggtcccctctccaaggagccattgtttc

SEQ ID NO: 74122 - DNA, 888 bp, Zea Mays
tggggcaccagacctgtccgttgcagcatcagacctaccatgtgtcagctagccattgagatgtccattaaggccgatgtagccattggacttgatagtcgggtgcatcatcagactaggccagtgtgctaggcaacggaaatcgcgtctgtagagctctctggaactttgacccggtgtgccaagccaccgaagtgcctattggcaccaactaacacgtggtcatgtgggcccaaacactcgggaaagagagaactctggtgctcaacaaaatagtaaacatggaattgtagtgtcttgataagtgtgtctcatcaatgtacagtgcgggagtatttataggtaaccaggtaggtgggtgtgccctcctaagtacagttatgccctcgattacctgctacaactccagaatattcccccttacgtggtcattacagcgatgttaagtacatcctgatcaaatacactacaaactctaccccaaggaggggctaacaaatgggcccgaatgacagcagaacgtggcctaggccctgccgttgggcggcgtggccctcgcccacgcatggcaaccttcgccctatgatgccaggtcttcgaccttgccaaggctgtcattgttcggaactgtccgagccggcggggtcgccttcacgaagctacaaggagccccccttttaaacggtgtagcccttcgcttcgatgtcttcgctagttctagatgaagacctcgattccgataccgatcgaggtaccctccgcttcctatatctactataaaacctattcaattggtgttaaagaaagctgatcgaggggtgtacgacctttgctccaacaatgcctctgcaggcctctctagaatttaggtctagtgcacctcagaca

SEQ ID NO: 74123 - DNA, 344 bp, Zea Mays
gtgctaatcacagtggtgtgtggatccacctacacgaatcaatgaaaggtttgatgccgctctcctattatgcaagtctgaaccattaaatatgctagcataaacatgagtaggaaccaactacccgaccagcgaacacgatgctggccccaccttcgtccatcccaacttgacccaccacgtgtgcactttctgtttacgcaaaacataacatatgtttacacatgcataaacgtgccccacaatcgcgcggacatgcacgccccactagcccgaccagatcacgtgtgtgaccactaccctggctggggcttcccatgcctatcggaagccttgggcttcca

SEQ ID NO: 74124 - DNA, 310 bp, Zea Mays
gaacacatgatttgcaccatcaccaatctcattcgcaccctccagtttcaagcctccctttctgtttcttactggattgaggccctccataatccacacgccacttacctcctgaaccgcctcccctccaaggcggtcaatcatcccattcctttctttgccctctttggagtggactacaacgagaccttcagccccgtcaagttcgccattgttcggaccgtgctctcccttgccctctcttgggactgggtggtccaccagcaggacgttaagaatgtcttcctacacggtactccgaccgagacgc

SEQ ID NO: 74125 - DNA, 490 bp, Zea Mays
gcaacctcaaagccctaagtaaggtttgaaaaccttgtttagaattagatataagcaaacaactcctaaaccatggacactgtggacctgagttctatataccgaagttggatttgaggttaaggagtagcttggctctaggtggagggatcaaagggatgaatccctggaagaagctgaaatacaaatagaactcattcggaaccataaaactagcccaaaaggggaattcaagatctagaaggatttagttaaaggtccatataccaaaatggtagagcttggaaaagtgaataagtttattatttggagaattccaagttgtattgttttactgttttacaaataggaccctggtttaaggacttaaccctaaatagtggttagagggggcaaaactgaacccaagttgagaaaaaccttagggctttttgagaaaagtcataaaacatccccaaacactaagtggaatcacatttatacccctgag

SEQ ID NO: 74126 - DNA, 748 bp, Zea Mays
ctcacttaagctgcagggagcgggagcagggatcctcttcattgctcccgaaggggaacaactcaagtatgcactccaattattgtttccagcatcaaataatgcagcagagtatgaagcactgatccatgggttgagcatcgctatatcactcggcatcaagaaactgatggtatatggagattctctagtggtcatgagccaggtaaacaaagactgggattgctcgactggccctatgggcaagtactgtgcagccgttcgaaaattagaggacaaattcgaagggttggagttccgtcacgtggaaagagaccgcaacacggcagcagacgcgttgtcaaagctgagatccagtcgagcccaggtcccgcccgggatcttcatccaagaagtatcatgcccgagtattccctcggatatgacgaaagagtgcaacatcttgagccaaccagagttcgaccccaacgactggagagagcctatcattagatacataaaaaatgaagaggaaccggatgacaagtcggcagcggaacgcatcgcaagacagtcagcccactacaccctcatagggggcatactgtacagaaggggtgcgacaggagtcctcatgaaatgcattcacttggctattgggaagcaactgttagaagaaatccatgttgggcagtgcggagtacatgctgcgtccagaaccctagttgggaaagctttcagatctggtttctattggccaacagtgaag

SEQ ID NO: 74127 - DNA, 405 bp, Zea Mays
ccatgacttccacataattatggaaaggctcatgcctgtaatgtttcgtgggtacatttccgatgctgtgtggaaaatgttagctgaagttagctatttctacagacagttgtgtgctaaagaaatcagaagagatgtgatggaacaactggagaaagagacatcgatgcttttgtgcaaattagaaaaaatatttccactatgtttcttcaatcatatgcaacatctctttatatatcttcatatgaggctaaggtcggtggtcctgttcagtacaagtggatgtttcatatagaaagagcattaaagaagcttagagcaatggtgggcaataaggcaagagttgaaggatgtattgcggaacaatttaaactgaaggaggtagcacacatcacaagttattac

SEQ ID NO: 74128 - DNA, 1058 bp, Zea Mays
agaacatatgtgctgctagggaaattgaagatgtgctttatacttaattccagtggattagcgaagtcattggagatgccagcatgattaaaaattccatcatgaatcactccatgaggttggctatgttcaatgagcaaagcaacctgaaattccttgcaattgctgacacaagatttgcctctgctattgtgatgttgaagagatttattgctataaaagatgctctttcagtgatggtagtaagtgaaaagtggagtgcatatagggaagcggcccccgcggcgggagcaggcgcgatgggcgcagtcgcgccatggggaatgtagaacgccgccgaggcagggagagagggccgcacgggtgcacccgtgccgtctgcgagcaccagggcgctgtgcagtcacgcagaggagagggagggaggggtagaggaagggagaaagggcaggggagggaaggccggcaacgttgatgagcggcgccggcgacgttgatgagcggcgctggcgacgtttatgagtggctgcctatgacagctgctagtggcggttacagggagaggggaggaagaactaggctctggtaccatgttggagagtgaaaccccaaccctaatttagggttgggtgtatattgtatagacgagttaggtgggccaagcccattacaagagaaccctaacctaaccctagacaagattctaacatatatatgcactatggttgtgcaccatttcaaaaattttgagaatttctaggtatgtgtttcaagggatttttcatgattgcattgcaccagacagggcggttggcactttgcaccaaatatttggcctatttttcattccttcaatctaaacaggtcacacagctaatgaatggattgctaaaacagttaaacaagcttaggatacaatgaatcttacagtatcattgtcctgttagctcctaatacaggcaacacggatacatgtatgatcttacctggaatagtttcctaagtatattaaatctgcttaactaccctagagcttagaaggtcttaatggttattca

SEQ ID NO: 74129 - DNA, 388 bp, Zea Mays
atacccacgtgcatgactattttcaacaaactctggaaacattctctcatcttcatgagcattaaggacatcatcctcaagagcttccacatgagtgtttgaattcatcctagttgacaaaaaagagataattgttagtaattagagcatttgtctcaagcacaaattacaaacattacaagacaaaaagtacaaacaaaggagcctccactacctacttaaacaaataggtacaattcgagcacgtggagcactactagcagtggagcagcactaactaggaatccgaggcactgaagcctaattaaatagggattaaataactacacatactaattaaaactacaatcaagaaagtggcatggaccagagccgcactatctactcg

SEQ ID NO: 74130 - DNA, 626 bp, Zea Mays
gccgggccctggaattggggctcatcgcggtcgtacactgtgtgtcagccgccgcgcactggaatttggggtttacatcacattgatcccaggatgccacccacatttgtgtccaatacctcctaggctaagtatagcatttctcggcgtccgttttagcccaggggagcgttgtgtccgatttcgctggcggtgccccatagtgagctgtgagtgcgccgctggagctcggggacagagctgcacgattagcctgagccgtcgatggctagatggacgacctggatttgacagaagctcctggtttgggggggatggatttgaaccgttgatgcatgggcgagcgtatgcgattagatcatcgcatgcattagactcggccgtaggatcaggatcgtggggccgcgatcatgtaccagttcatatgcgtgctggttttaatctggggcatagaactttaatcggatagttgatcggcgtatgacacccagtagcacggctctgttttgcaaaagagccctcgaactttgtatgaatcaacccgacgtctgtctagacacaggaatttgcactgtgaggtccaccaatttatggaaccgcccctggacatgtaaaaaatagcagcc

SEQ ID NO: 74131 - DNA, 723 bp, Zea Mays
atctcggtggaggcaaagaactcgaggcattggaagacaaaaaggtttggacgtgaagggggtgagggatcctctcagggatttgaaaagcgatcaaggctagtgatccatccctttaacccaaatcgccctttttctcgcccatccccccatccttttaagtagtcggtcttcatctatccaactgttgcccgtactcaaatcattcagccgggtgcccctggtactcatttcctagctctacctagttcatctaacagctgctttaaacgtggaaagtctagacagttcatcaaagattgtccttacccgaagcaaaacaactcaaacttccaaaagacttcttgaaatacttctcaaggcaggggaaatgtggcaagcaatcaggcaggcaaaggggaaaagagaactagatgagtttactatactcaagtggctactacactcgaaggagagcctgtgatgatgggtacattttccattgccaatcatcccgtcgtcatacgttttgattctggtgcatcacgtactttcatgagcaaagcttttgttgagaagcattgcatacctagtgttaaagcaaagaaggatcttattattcaatcacttgggggccaaatttttactaaggaagtagtcttccacgtacccgtgatattagtaggatatgacttccccactaatatgattgttatataagggcaagacgtggatgtgattttg

SEQ ID NO: 74132 - DNA, 531 bp, Zea Mays
ggtggcgcgaggtgggagaactggcggcacgactgggtgattgcccgcactgaggtcagcgaccgtcttgcccttccgagtgatgggcccaatctcagccggaagtagtggagggaaaaaaccacgcttggtgccagagttcgtgcccatcctagataggatcaaggaattggcagttggcggcctaacttcaatgcacgtactcggcgatttcctgaggcgccgagtcatgccactgcagggaaggtcgcgtttgtgctgttggttcactggctccagtgatattggcaggatcctgcgcgggcctaggactgacctgacctgggaggagttggaaattttcatgagggggattaccggtgaggctttcatccccgaatccttgatgcctccccagggcatttcgccactcggcgacgacccagggttgcggtcagcggtgctggcctggctgccgacccttgatgagagtggtgtggcggttcgccagaccgacggccgggacccccatcgggggatccatattcctgg

SEQ ID NO: 74133 - DNA, 693 bp, Zea Mays
tctgttctgaatttttgagtttaaaattaaaaacagaaacttaccaaaccttgtttaattaaggaaaattagtttttcttctgtactgaacctaagaaaatttgtaggtgttcaaacctcatttagacactgtttaaaaatagtaggaaccccagcattgaaaaatatgatgtagatattcatttaaagctattttgcccaaaatttaggaaaaatcagaaaggcattaaaaattaatgaaccgtgagtaaatgtttttttcctagtttgcttatgtaatagaaaacctaggaaaaatagagagaccattagtccagatcagttttaaattagaatgctttatttagccttatttgaactgaaaatcaattattagaattacaaaactatacccaaaatggataataaaaatccagtggacttacaaccaccagagccccactataaaaataaagaacacctcaacccaacattttaagtgaggaaaataaatataaaatgctaatgaggcattttccaaataaatcatgaacaacccctaatgatgcaataatgggcaaccaaaaatttgctaagtccataataagataaaccaccagtgaaaaatgcaaccctatgaaaaaggagcaaactcatacctattgctaatgatttaagagaaaggccacttaattcaaataatgcataccaccc

SEQ ID NO: 74134 - DNA, 460 bp, Zea Mays
cggctaggcgagcggccaggctgcaacaaatcacgcatgtgtagactcgagcgggacaggctggaaagaaagccgccaatcacgtctgtgtagacgtgttttctcttcacacgttattttctgccttatgtctgtagggcgagtgccttatctatctccataattttagctgagatggatccctttctatattttctcagctcttgtttccttgaatgtgtggatctctttccttcccaaatttctccattgaaggaaggtgtaaatcgacagtgccctcaccggctacaaatggagcatgacccattgtatgtccttggacctgcttgtttcttggtgggttcagtcctctaatcctgacagcagaagatttcctatacgatgcagtccttgcgcttggtacctggaaactccgctctgaccccattatagtaggctcaggtcccacatcttcattttc

SEQ ID NO: 74135 - DNA, 567 bp, Zea Mays
gctcgtcgttcgtcttcaacgtggtctgtaccggccatggctggctatgactgttatggttaactatcggggaggcataaccgatcaaggataatctaggaacatcctttaatttgacataaaccccactggaaactgtttgcccacgatcatggtggaaaccgggttcacgagtacgcgttcccgccaaatcatggccgaatgaagtaaacgggtgccacggtgagctttaccagcatgcagagccacggaaacaacacttgaattgtataggaacttaccagagcgggctagccacgatcgagctattctcggtggcgcggctgaccgatttggggaaattggtgattctccggctatggtggctaatcgagggtgggagcgggtgcttcagcttcgcaatttagggacgaagaactgtgctcggttgatttgaacgaaaagagtgaggatgcggtgaatttataggtgcagtgagtcactgccgcggccatggtgataaccatcgccggccttagctggcgatcaacgacggcgtcgagcgctaccctttcctacatgcttgcc

SEQ ID NO: 74136 - DNA, 393 bp, Zea Mays
caacattttatcatatttgtttgtttgtttgtttctggtaggcaaaataactatgtgaagaatatatgacgaggagcaacattcagaaaaatattttcatgcaatgatggaggtggagagtggcacaatggttaatgatcttcatgtagcttatgagacgagggagccttaagatcagtggatgcacacgcactggagcaaacagcagcggataacttggattattggtagctcattactgttaacctaacgcttgctgctccacatggttccctcaacctcaaggaccagactcgctttgcttcctgaaagtccaagaagagtcggtacaactgctatggacatttgcaatgtactgcatgtatgttctcgtgatttttgagtcatgtgcga

SEQ ID NO: 74137 - DNA, 440 bp, Zea Mays
aaactgtgcaattagtgccgccccatcgagcacaatgacccacaaaccacttgtcattcaccttctaatcaaccggccctctccgatcagatcaagtacacagttcaaacgctacaccgggcctatggtctcacctttttgcacacaagagaagacagaccacctggctccacaacgcagtaaaaggaaaaggctgttcccgatcagacgtagtagcgtgctccatccgtatcagcgtacttgcacggagggcagaccacccttataccgctgcagcaaagcagcggcacaaggctagtcgcagaccaaacacgacacacacgctctgctgctccatccgtatctgcgtcgttaccttcagctgtcgcgcgtaaatgaaacaatccaacggctcaaggaaaactctgcagcttctgccagatccacgacacgacagtacg

SEQ ID NO: 74138 - DNA, 355 bp, Zea Mays
agcaatagttggctgctggagcaatcttcccgcgttctgacacccgtggtccgcatagtgttggcgtgctggggaagcttgtctggtaatgctcaagcgccggtggacatagcgtatcctacagccagcgcaggcacactgttcggattagacgggcacgccgcctgctgtatggcctgggcgccgtctgccagcggagtggacaggacgcattaaatgccgaaggggcatatcacctgacagcagggtggacaggcggcacatcctctccgcaataaatgaggaggccgcacggcctagagcccttacgtcatgctccagctcgcccgctattgacccgtgacttccgtatttg

SEQ ID NO: 74139 - DNA, 429 bp, Zea Mays
gagctacggattcaccatgcacaactaatttggggagaggtggagaaggcagtgcgaattttgacttcaattgaactcactgaagaagttgtgagtacctcgccgcggtctatggcgctatttatagccacggcagtccggctaacgatcagcggccgcggattgcattgttcacgcatggctaccacgtagagaaaaggcacggtaaggggaaaacgaggcatgggtgacaccgcggcagaagtgaccgagccacggcgaccgccggtgggatatctccggccacgcacagctgggttcgcgggatggtgccacgtctgaagttatctctccgcgatcgactcccttcaccagatcactcgagcacatccagttcaacagtgccttagatctttatcagcgttcttcagatatttacagtgtttggat

SEQ ID NO: 74140 - DNA, 704 bp, Zea Mays
atttttttggcttatgtagagaggtgatgacatgccataagtagtcatcacttcctctatgattataagtcaagtctatacgcgttaggcgttccttaagttgtgcttcgcaaataagtgtatgattgtgtttatgacttgaatagatgtctttgagtgaactgataggttcctaaggcaaatatgtgtaaggtgtttatagtaacactttatctcgaaaggtgttaagcctgcgcaaaaataagagataagtgtacttgttttatgcatgtgatcgatgattgggatagtcgaggcgaatgaggagtatgattaatccggttagagtcactatgatgttgatgccttctgcgtaacctggggcacgtatgtgcgtgtgtgccgtggtgtattatagtggtagttgcgtaagatatttgattgagatgtgcgggtatatgccgtgatatggttatactcgcgacgaggaaggatgtatgccttgggtaacgcgacgcttaggtcgctgttgtataatcgaatgaaggctgtattgttgagcttgaatcaaaatgcgggaactagtggtacgctaggcaggcgttgttccaaataaatagatcggttgatgtggtagttgtcgtgcgtgatttattgttagtgagcgttgaattatgagttatgtgaaaagcatgttagaaactagtgtgcggcgtgaaactgtg

SEQ ID NO: 74141 - DNA, 526 bp, Zea Mays
cttgttgactgaaatatctgaactacatctgatgatgtttatggtgatgcattcggactggggtttgctgcccccaaactctacagaaatggaggtgggcgttcttggttatgatacttgtggaatgacaaagctacattgaaccgagtttaattggtctcagatgaaaattagacttattcgaattggcatattcttcttcagcacaagttcaagtaattgacatgccccagttgctaaattagtgaccatgatgattgattggaaactattaggtaaccatgttaaatcttgacactgcatcatgatattactgaaaaactgaaccatgtacgtgattgagcaaacaaattttataccaacaaaaaccaagaggatagccaaaatagataacaataggactgagctggtggtggccattcttcatccatacagtcaaattcttcttagcaaagttgcagtaaactttttttaataaaaaacagaaaaccaaaaggatccagtgcctagacacattcaggaaata

SEQ ID NO: 74142 - DNA, 645 bp, Zea Mays
ctgctgcgagcgcgtcgccggccacgctgtcgtttgaggagacgttgagcgatttggcggtgatagaactgcagcccgaccacaccgccgagttcgggacctcgaggattttttcgggccgcgtgatggagatgcagcggctaggttattttgggaatggtgtcggacgggctctaggggcagaagaggtctctgagccggaggggaattggttgtttttgaagccttttttgctgctggtctttgcctcccgacgcatcggtttgtagtagaggttttgaggaagttcgaggtacaggttcatcagttgacaccaaatgtagtggtggcgcttgcgaactacgtctgggccgtctcctcatacgacgggcagccatctgtggaagtcttcgctaagaattattttctgcactggcagaagaggaaaataggtgataagatagcccaatttggatcatgctctttcacaccaaggactgggaagacctcggctgaagttgtcgagattgttccgtgtgctaggaataagtggggcaattgatgggacttttgattttatgtagctcctggggatatcaaagagttgtcgagtttgccccctgtcatcctgtgttcacattgttacgtggcatttccacaatttga

SEQ ID NO: 74143 - DNA, 1422 bp, Zea Mays
taaatcttctcaggaattccaaagttaggccaaatcttttccaaaagatatttacccatttcttgttctaagtagctcgcactaataacaacattatctttggatgttgatcccttaagtagtaactgcctatcttttaatccttgcctccttggtaacaacacctcccttaggatgagaatcctggtttgactccaatgatcatgttgatagctcaatcccaacttagttaagttctcctttaggttctcataatccatgtagatgttactcttataatccatgctaatgtctcacttatatctaatagaatcatatttccaagttctgacaatacgaactggtcattccaaatccttgtacttactaggtaaacccaacttgctttggttaatctgatgctagaccatcacctccgtcttcatgcaaagacacattccaaaccaagacaatgtgcataacactagataatcaactcttgcattccactaagctgaacacgtaggttttacttcaacctttcattaactcctttaaacttatccaaaaactatttgttgcaacatacttgataccttctccaataatcccacaacacatcttagtatccatggaactccaagtttactttatccaagagagaacttccttcaaccaaagtccaattatcaagctaggtatagtatggatgcttctaattcttcataaaacaaacttagagatatcaagtatctacttgcatcaaaatatctccttgtccaaagtatgtggaaaattgaactctcttatgataatatcttgaattgaagaccaatcttgatgaaaccataacttccttgtggttgatcccactagctaacaaactttgaataaacattcctaaccttgatagtagattctaagccatagggatttccatcatctccaatagaaaccatacataactttcttagctgtatatgtgataaacttattcccatggttcaaacctgctggtgtagtcttattttgctaacttccttggatctgttcctttatgaacactctgttctcactccagttattgttgactcaggctttgattctcctccgcaatcttacagtaccactattagtgtaatgttccaatatcaccaatatcataacacccttcacttagtaagggtattatgagtcttcttccatataaggaccatatttaattcctatagtggtgaggcttgattctcatattgctactcttgttgctgaagctatagctgagatgaatttagatcttcttggcaattggtttcatgtaccggtgcttgctccaaagcttataaaatttggtcaaggtggatcagaattggtattactccttagacaccaagtaagtcacttctccaaatagcaaccatcttgtttccaatatgttggact

SEQ ID NO: 74144 - DNA, 535 bp, Zea Mays
ctcgagcgaggcatagacgtcgcccgagggtgagcccagcgtcaggcgaggtggagatttgcgtccgagggcgagcccagcatcgagcgaggcggagatttgctcccgagggctggtccgcttcttctgtcatattagatgtcccatcgggggatggcaggcggcgtgcatgcatagtagcgggagcgtaatcatgctattgcatctagacatgaccattgtcttgttagtcactgtgctcatatgcctctgtgtggggtaggtgtgcgcattaaatgcgagtgtcccctattagtcttcagatgcctttatcctatcttcctgggatcggcttgggcgagacagacagagtggtggtggcttcgggcgagacggagatttgcatgaggtgggagaccctcggggaggggccctggtgtctgtagggaagaccttcatggtagtcctcgggctaggaggtgtctcgcctgatttcctttagggcttatgtcttaacctcttctgagtgcgttttttggagtacccctaattatca

SEQ ID NO: 74145 - DNA, 669 bp, Zea Mays
aattcataaggaatttgccctaggtcaatacatcgaacttgtagagctatgtaaagggtacaaatttgattaagtgagtaagccctagtactacatgaaaatggagaaaaggagacttgaaactggcctgttagacagccttagctctgaaaacctaagttcataaacatttggttaactttggaagcagttcatggttaattcaatggagataaggtcagggtcattgtggcaaagttgaagctctaacattagtaaacaactttgttataccaagcttgacctggcgctgaacgatttttggagtaaaacgctctcaaacatgctctgtcaggcgccaggatgggagttcgcgatggtacagtaacctgacgaagatcaccaggttcagtgcaccgccaccggtgatcccgcgccgtgatcctcaccgccgttgcgattcgtgcctggtggagtgcagataactacatagggtgaaaaatatcgcacaagagatgaacttggggcactgtttcaccctatcgccgtacccacttgcaccggcgacgtggttgtgcgaccgtcgccgttgtgccactgtctagctcggttgtgacacgccttaagtaatctccccactcgtcgcaagccatgaagactcggcagtgaccgtcgtagaacgtaaaccag

SEQ ID NO: 74146 - DNA, 343 bp, Zea Mays
agaggaagcaaggccgttcctagaggggggcaaggggtgcggtcgccccggacaccggttccgtgaggccccacctctaataggctagatcaacaacgtattactctacatattcggtatttatttcgatcttacatgtaatctttgtgataaataatcgattcggtgtgattgatccacatagggcacacagtgatttaagtgtctcgtcttgtcgtggcaataattagggacactcgaattatccccataacaaacgcacttagagaaatgaggactaaactcccgacgggtgacagctgagccacctataaaaaccgagacatctccccgagattctccc

SEQ ID NO: 74147 - DNA, 1130 bp, Zea Mays
cccgctcgtcaaccccttcctttcttcccccttgcgcctgcacccgcgccaggagctcaccgtcaccgtgcggcccgcgtctagtcgccttcgttcaattccttgctaaatgtggagcgcaccgagatgcccttccttttctccatgatctcacccgatcttcccattccttaggcatgaatttctttccccctttgctcaccgtttatggaaaccggtcagagttgatctcctcactaattctcatcgatttggagcctattttgcctcaatcttgcctctataagtgtcacccaaacccccctttgatttcaagcgccactaccccctccccaagcctcgctacctctgtccgcactctctgttgccgccgacccaccatcgtccatggccagggacccctggtgtccctccgtccacgccaaggcctccattgtgatcactagagctcattgttgcttccttggtcttctccaagctctcccaatcctttatcgcgcctagccatgtcaccccgacctcgccggagctcgtcactccaccaccggttgtcatcgatgttatcctctaccccgaccccctcagtgaggcactgactgtgttcaccttcacctcagctcccttctaagccttttccctagcatgttaggccccccggagccccattccggtcaactctagtgagctttacagtcatgcaccacgtacgctgtgtgccacctcgtcgcacccccttcgccctgcctcgctggccgcgatgccgcttgcgtgccgagccatgcgatcgggatcaatggatccgaatcggacgaccgacattagcccaatagagacgactcactcattttaatcgaagcgcttagatctggatcgcacgaccatcgttggtcgataccccttcgcctgagtcacgttgttaattttgtaaaggaccccctaagttaatatctttttacccgacatttcttgtagttcaaagttcattaccaataggtccttaatcttatggtttagcccctgtgcttttagttattagtacatgtcgtctgcccttgcccgtttagcacttgagcccctatgttttcaaattaaagcccgcaggtccctgaacttttcacatcaacccttga

SEQ ID NO: 74148 - DNA, 1003 bp, Zea Mays
cacaacgcaagattccctagactcagtggacagtggatgggtacggcgggttggtttcctaaaatttcagggtttcttctataaagtcgccggccgaaggggtatcgggtagacctggccactggattagatctggacggcactggtttacccggtctggtacgtgactcacagcggttggactatggatcaatgacgctgattttatgactggagggttacaacccaatctaatctcatccctcgatcctacgatccacggtctcaattggtccgattgaatcggtacgcagtgtgtaatccccgtcgtccattcttagatcgaaagccactgcaccgtcgtcttcctcccgccggtatacagtcgtgccgccccatcccctgccggaggatgaccggagttggcctcacaccgcgccccaacgtcttaatccaaacgtaataagcccttttacgggaaacaaaacatggtggttcgaattaagggttccataccgggggccgatgaataaccagcgttgtctatggcgtcgggcggatccacggttgaccgaaatcatcgacgagaaattatgaagctggtcgactatcacgagcggcacagcctcggccgcacctccccgagtctggtgaaggccctggacaccaccacgacgacagtcacggtcgaattgaagctcccccaatatggcggcactttcttcccactactctctcggtcgctctctcatcgctaggcagtagagaaggaagaggagaaatgcagatgcggcgttccccctccttattatcccaagcagcacccagttgggtagttaccgcaggagccgcgatcagccctcgcccgcggagatctcagtgactggtacaccatccacgcgcccaggacggctgaaggatcagcggtgatatcaggcccacacgtcactggcacaggcgcacatggagtagtgtcaaagagactgacgatgggcccaggaatagaagcactggtccacacgtc

SEQ ID NO: 74149 - DNA, 439 bp, Zea Mays
ctacaacttgtattgtaatgtggcctgttgcccttcgcttggcagtgtgatgtaaatgtcaggcggcacccttgggcgtttttttgcacggggttgtcttgtgggaaagactttgtgtcgcacattactgtgcttgtccgcctacatccttaggcgacttttgcacgaagttgtttttgattttagtgaaagacttcgtatcgcgcacttgttgtgcttatccggctgcacccttaggcgacttttgcacagggtgtcttttagtaaaaggcttcgtatcgcgcacttgttgtgcttgttcggctgcacccttaggcgacttttgcacagagtgtcttttagtaaaagacttcgtatcgtgcacttgttgtgcttgtccggctgcacccttaggcgacttttgcacgaagtgtcttttagtaaaagactttgtattgcg

SEQ ID NO: 74150 - DNA, 1610 bp, Zea Mays
cgaataactagtaaagaaccccaaatactattcacgtgtctcattgacaattgcacataggccctcagcttccctcctattcacaaactccagtccacggtcgaatcccaactagcgttggccatccaccgcttagacccatcgacggcgaccatctccgatgaaaccgagcctacaaatgtggttcccaagacttatttgctatttcccttaagttaattgaccttaattcatctagggcttcactagccatgctgatggcggatcgacgagctccggtgaggtgtatcgaggtttctagcacgatagggttcaatccaaggtcactacgagtaccaataatatatcagacatacgatgctcacctaggtttgtgtggaggagctacgggttggtcgatcgacgtggacactgccttcagcggcgttcaccgaacgacacaatggtgttccagttaatcctgtgaggtagagttcaaacgggcaagcgcatgagcttcaccatgatctatagactgcgaaacatgagttaaacaactatgactaaccttagaaaaggttgaccacgcggttgcactgcctggcggcgctggtgaccaccgaggaggaaaaccggtgttcttggctatcgacggtggaacggcgaaaacaaagggtggcttgggtgcataacaaagaggcgagactaagcgcatgctcaatttaaaggaagtcaccacgacggtgggcaatttgatcgctgactcatggcggcggtgatagcctgaggagctccacgttagccttaacggtgtccacaggctggtaacgtggcgaacttaccgcgaaccctttatggcggttcaatacgcgagcgtccaaccagttgtgtggatagctgaagcgtctggtggatggcttcggcggcggtggatgattcacggtgaggacacatggtgtccgtggctagagcggtaattcgatcatcgaatctgagccagagatctttttaccacgcattgatccacgtctcggcggcaccaatcatggcgcgagctcaaattatggcggtgggatgttagcggtgagcacacgacacttaatcttgtttagttgactctaccatggcgatgttcgttcaactagcctgacagagcgatttgaggagctcctttctctaatttttatatgacaatatgcttatccgactacatcaaagttattgtccatcatgccagcttcaattttgttataaggttcgtgctcatacctccactcgatcaagcacaattcagctctaaagttgatctaatgccacagtcagtctaaccttcaggccaacatccgattgacagcccaacttccaggccattttactccaatttatgtatatctctagggcttaatcacttaatcaaacttggactactttaatagctctacaaatttgttgtaatgacccatgataaattctccatggaccaagagatacagagatcaaaagtcaacacaatatcattgttttcagagttaagcatttgggtgccattgggaccttttggcaatttactccaaattgttccatagtacatggaaatctccaaatacaaaagttacctagtttgttactct

SEQ ID NO: 74151 - DNA, 520 bp, Zea Mays
ttccgccgtgattcacgtcgccggcgtcacgattcgcgctcgggtatgtggataacttcgcggcgtcaaaagatcgtcacccccccgtgacctggaagccactccgactagccgtagtccatctcccctggctcaccgcccgcggtaaagtgttcaccgccgccgtgccctcgccgttggccaccgcgtgtcccaatcgcgccatcgcattgccgtgacctcctctgaactctccatggctcaccggagttactgccacgctataggacacgtattcaccgcgccaggcttcttccttatctccggccgccaccgcgccatcgtcaattcaagcgccaccgcccgtcctccctataaattgagcccgtgactagctccgtgaggtcgtcatctaactagccaccgctaatcagccacaatcatctatcagcgagcttgaatttccaatttcccccaacttcgtctccgccaccgtgaaacgagcctcaccgtcgccagccatactccggttagctcctcc

SEQ ID NO: 74152 - DNA, 417 bp, Zea Mays
aagaaggcctttgaacattccagctttctgaggtagtgaggttaccttttcttgtgacatgcccatagcgccattcaggtgtagtcattattaatagaaattactggtgcgttcagtttgcttttcattgatatgatgatgtaatacatctgcatattgttgccgaacttgatctttttgctcattcacagattctcatgcctcgattaattgctaacagaagagcactttttttccttcttggcagacatttaaaagatcaatctccgagacgacgcttgaacgtgtgtcgggattgtttggatctctttcaattcttccacaaaaggaacagcccaaaggtgacacctaagcatttaggaaacactgttcagctcatcattgtactgcagtatttggcttggtgctagtagtcta

SEQ ID NO: 74153 - DNA, 458 bp, Zea Mays
ctttaattgcgttatgactgctctatgtatcagtgtatgtgttagctatggtgttataggcctaatgcagcccatacatcctagcatgcaagctatcaaatcaaataggcctaggagacagatcaagaaatttgaagtatgaatgtaccctactctcagatcagccattacatattacaaatcaagaaacaatacaagcagttgcatgcgaagggatcggaacaagtaccttctcggtgctggacttgacgacactgtaggtattgttggtgctctggaacaggcggagacgcggagtcacttgcaggtgtggacatcgtactcaataagcatatgcatgcagaccattgatcacagttggaaactccaataatacaggcaagctgaagtatgtttcatacagttaggtgcccgtgcaatgatacgattttctttatatcacataggtaaacattttt

SEQ ID NO: 74154 - DNA, 641 bp, Zea Mays
tgggggtaggctggtaagttgatggatggggatcaccggcggcatggaccggattattcctgaaacaacgcgtagctagcctgataaaacccatgcatccacgtccaccatcagatggatccatctccactagctagcagagtagcagtacagtgtacgtatcactaccaccgcagcggcaagtgcaagtgacggttcggttgttggttgcattgcaattgcatgcaccgctgggctactatagctacctgctgcgagagagaagagagaacgtgctgctctgctgctccatgcttccaccagccagccagccagccagctttacacgcacgacgacacgagagcagctggccataaactaatgctagggctaatcatgagccatccaactgggttaggtcgaccgagtaggtggctagctagctagcttctagctagattttttgacgctttgcggacggccgggatgcaggcagcgctggccgctgggtccgttccgtggtgcttgcaggcggcgcgaaagactgctgtgctagctgatctcacaccacccccagtccccacactggtaaaataggatcggatccgggatgccgccaaaacggccaccatcggaaacaacgtatagtatatacgtactt

SEQ ID NO: 74155 - DNA, 722 bp, Zea Mays
gattatggcctgtcatttaccaccattgcccgttatttgtgggcttcaccgagggctggaaacatttggtggcagcaaacgacctttgggctggggatgtctgcgagcttgttaaggggccagacgatggtgagccggtgtactctatccggatgtgtggtcacaaaatttaaagccgccccggcttcatctgtgcgcttcttttctcttaggtgggctgctaagagcacttaattgtttcaatatatagatttcaaatgaagagaagaaagaggatgcatgttctacacgaaacacggaggatgctccgatgcctgaatcatccgtttcacataagcggaaacgagggcgacgaggtcccaatcagatgaaagaaggtgcagttatgtacgtaacaaaactcaatctagaggggtttcctgaagaaccacttgacgtggttacaaagtttcgaaatttctgcgagtctactgttagagatatagtgccaatcacacttcagaaatggaaggatttagatgaagacacccgcaataagctatgggctaagttgtctgagtcattcaaggtcccagaaggcatagaggatgcagtaaggaagtcgatgctctctgctatgtccaagatgtttcgtgggtggaagactgagatgaatagggattttgttaagaagaataaggttcctccgcccaagaaaatggggaaaatcactcaagctcagt

SEQ ID NO: 74156 - DNA, 932 bp, Zea Mays
atttttgggtattacaaatcctaccccccttacaaagaatctcgtcctcgagatttaggaaggactaggaaagaggtggggaaagtctatgcgtagttcttcttctctctcccaagttgcttcatcttctccatgatgactccattgcactctacacattttgatcactttactccttgtgactcgagtcagtgtattgagaatcttgataggatactcagcataagtcagatcatcttgaacactaagatcctctagtggtaactgttcttcaggtaccctgagacacttcttcaattgtgatacatggaagacatcatgtacatacgcaagatgatcaggtagttccaattgatatgcaacctctcccactcgctttaggattaagaagggtccaatgaagcgagggaacaactttcctttgactttaaatcttcacataccccggagtggtgacaccttcaaatagacatgatcaccctccttaaactctagcaatcttctctgggtatcagcatagcttttctgcctttactgtgtagttctcaaattatcccttatttgatggacttgttcctctgcctcttgtataatttcatgtccaaagaactgcctttcaccagtttgatcccaatacagtggagtcctgcactttatgccatacaaagcctcaaacggggacatcttcaaactggcctggtagctattattgtaggagaactccgcatacggtaaactcttatcccaactaccaccatgtttaagagcacaagctcttaacatatcctctagtacttggttggtcctctcggtccgcccatcagtttgaggatggtaggccgaactaaaattcattcttgtatccaaggactcgtgcaacttcttccaataccgagaagtaaactgtgatccccggtctgacacaatcttct

SEQ ID NO: 74157 - DNA, 533 bp, Zea Mays
tctgggggtcttagggcggctaggatggcctaggaagatgggaacgggtgcgggaaacctaatggtaggggcactagagggtggaggtccacggtggggcggctcggggcagcgctcggaactccgacgagcaattgcgcacaatagagagcatgggagggaaatggagggggccgaggaggtttcttacctctgagcaagacttgggatcccctcgaaggcggcaatgacatggtggcggctccgggactacatagggaagagggtgagcgagggcatgacaaaccagagggagaaaggggaattggggtgagtctcgagcgcctggtaccgaggcgaagctcaccgtgacaagggcgacgacaggagctcaacgacgacggcagaacgaccttcgtgatggcggcagcgttgctacatgctggtgggggaaatgggcagggtgagtgcaaatgaggagtggggacgctggggtccgaggccttcactttgaagcccgagtgaggtgcttgggacaggtgtcattgggtgcg

SEQ ID NO: 74158 - DNA, 394 bp, Zea Mays
gctcgattatgccatagaacactcattctatgtcaacactcacctacaagctaaaaccgaatgtacccttgttttctatccccacctaacatcaaacaaacttttgacctgcatcatgtagtctatctcatctatatctatcttaaccatatttcccaaccccgataatatacactaacctcgaatcaatgagatcaagaccagagatgaaaagatcaacatcaacaaggaaggatataacagtcaaagcgaatctcgagatgaatcaagacttaaacatattggataagttactttccttgccataatctttcttgcctcaacctgttcagctgatatcctacataataagtagctgggtacctatattctcctaatcacccactaccaccac

SEQ ID NO: 74159 - DNA, 1152 bp, Zea Mays
agatgacaaggctgcggtagagcgcattgcatggcagtcagcccactacaccatcatagggggcttgccgtacagaagaggcgcaagaggagtcctcatgaaatgcatccactcggccaccgggagacaactattagatgaaattcatgctgggcaatgtggtgtgcatgctgcatcaaggactctggtgggaaaggctttcagatctggtttctactagccaactgcgaagagtgacgctaccgagttagtccaaaagtgcaaggcatgccaattcttgtcaaaacaccagcacttgcccgcccagcagctgcagaccattcctgtaacctggccgtttgcatgctgggggctggacatgatcggacctttcaagaaagctcagggaggttatactcatatactggttgccattgacaaatttacgaagtggatagtatacaagccaattgcttccttgacctcagcaaaagcagtggagtttatccaggagataatgttcaggttcggaataccaaatatcatcatcacggacctaggatccaacttcaccagctcagagttcttcaatttatgtgaacaaaggagtatccagatcaagtacacatcagtggcacacccaagagctaatgggtaggtagaaagagccaacagaatgatactggatgcactcagaaaaagatattcaacaagagcgagaagcttgtggggaagtggattagggaactgccatacatggtcttgagcctacgaacccagcctagccgagctctgcatggaaacaccccatttttcatggtgtatgggtcagaggcggtgttgaaagcatagctgaggtagaagcaaccaggctagaggacattgatgtgctgggggaggaacaactaaacatggtaatccagtcggccaggtaccagcagcctttaaggtgctaccacgacaaagttgtgcgacaccaatcctttgtagtgggagacttggtcctccgccgagtactaatgggggagggacgacacaagctatcaccacaatgggaagggtcgttcgttgtagcagaggtcacacggccgggatcctaccgggtcactcagatggacggcaccgaggtggggaactcatggaatatcagcaccttaggaagttctaccctta

SEQ ID NO: 74160 - DNA, 351 bp, Zea Mays
gcggcgtttactcggtttgtggcgttgactcggtttgatgtaaccgaaggagagaaacaaggaagatggttgcggcgcgctagggtttgatgtaaccgaaggagaaaaacaaggaaggtggttgcggtgcgctagggtttgatgtaaccaaaggagaaaaacaaggaagaaagaaggatggtgagaaaaaaacacaatgcgaccagcaacaaatgacgcgaaagcacacaaattcaacaatgcagattattgaaagaaggtgtgaggctcaaaagggtgctggtatacggtctaacctgaatttttatgtggttttgtggactgtaggagaaaaaacactcgataaactca

SEQ ID NO: 74161 - DNA, 520 bp, Zea Mays
tgtagaatggctggaagtcagaaagctatagcgggtcgtgctcaattgctggaacttcgacatcgtcaccgatgcagagggcgtcgagaaggggtgtgccacacacactatcttatcccccatcttcccagtcacgggtatagactattgttgcagaatggttggaagccgaaaagctatagttgatcgtgctcaaatgttggaactttgacatcgttaacgacgctgaggtcgtcgagaagggggcgccacacacaatatcttatcccccatcttccagcgacacaaacaaagagaaaatcattctttttccattccctttacactttactatttctcctcaatttcagttagttagttatttatgcaagatgctccattcgatcaatcttttttgttccaatatttttcccttctcaaatctttaacaagtgctcatatgtgtgggtgttcactttacaaatcagaagcattcgatgtcgtggtgcttgaaaacattcctttctcccattatgtcgtg

SEQ ID NO: 74162 - DNA, 308 bp, Zea Mays
ccatatgggaaaagcgaatgtagtggcagatgtgttaagccgtaaaggtcaggtgaacagtattactgcctatttggtcccgcaagaattatgctgtgaaatgtaacaactaaatcttggtatggttaataatatggaagcaacagttatggaagtggaatctatatttgagcaagaaattcgtaaagggcaagaatcagatgagaagattatggaaattaaaacacagattggtttgggtaaagccccagatttcacagaagaagagcaaggcaccgtttggatctaaaagagaatctgtgtaccgg

SEQ ID NO: 74163 - DNA, 380 bp, Zea Mays
agacaggaacatgtttccttgtcgcagcacgcttcaagtttctgggaccaactgcagttctactcccttgtcgcagcacgcttcaagtttttcctcggagtaattttcttaacaagccacttgacactccttggcggagaactaggaggagtttccacacggactagtgctgcatcaatagtgacgtcttcatggctaccattgtctattacaactgtttctgcatccaaagtatagttatttggtacaatagttgtttcttcgttaggagcactagtttgtgatgtagaagtccgcaactctttcgggatccaatttttcgtcgtattctttcttggcttcctcttcctacaaagcaacaaaaaaattactaatgaaga

SEQ ID NO: 74164 - DNA, 600 bp, Zea Mays
tatcccttaaatccgggtgtgacaaacgagaaggtccctttgggagggaagcgcaaggagaagggcgaggaatcagttagcttgggtttcgtgtcctacaagtgctacaagaggaaggacggcaagaagaagaaaataaagaaagtcatatactatgagaccgaatcattgacgttgccatcaacctcgagtagtggcgaatccacctccaagaagtgccaccaacaaaagacggttaaatcaaactattttcgatcctctttcaattactctcgcattcctcacaatacgactactcccttactatcggctccacttggaaaactaccacattttgatgctgaagactattcttggcggagccacaaagtgaaggtgttcttgttgaattaggatgaagataccaaatagtgacgactactactacaatccagtggaggcgaagcaaatcatacactgcaactcgcaagccaccatgtgtaccaactcaaatacatcaattaaaaagcaattcaactttagttgttaaatatattacagattaaaatgtaaaccaatgtatgttgcattcattatgagagcatgatttttggttgttag

SEQ ID NO: 74165 - DNA, 271 bp, Zea Mays
gcctgggataatctctatggcaaattcaactttcctttcaggtggcatgcctggtaactcttcagggaatacgtcggggaattctgacacaatcctaattgtttcaatcggattggactcattgtcatctactgataaatggtgacaggctccttcttctagttcaggtaagtatagcttggttactacctcctttccggatggggacaccaacttaactgttctcttgtcacaactgacagtggcttggtttctgtgtagccaattcatc

SEQ ID NO: 74166 - DNA, 498 bp, Zea Mays
acttgtagcaaagtcctttagctctgcgataagcatataaggtggagaacttgttatcagttgactgagacttggacatgttgggcactggttccaagcctgacttgaaattgcttggttgccgaggagggggtggaggtagtggcaaagctgtgcgcgagaaggacctcgaattaactgatgcatcgaacttccgagcatctctgcgtgtggcgtccacctcttcctgcaattgggccaaaacaatggcagaatccaatgtgcgaggacgttgaactaatacaacactattaatgtcatcacggagatcatcgataaatcgcattgtatagtatagtgggtcggaaattgtgttgtaagctttgagttggtcaactaattgggaaaactgctcgacataaacaacgacagtggttgtttgattgatatggaagagttggcgaatgaggatttcgtgttgatctcgaccgaaacgctccctaatcagacccccaaaat

SEQ ID NO: 74167 - DNA, 864 bp, Zea Mays
ggtagccatagtgcttcaggaaatcagtattaaggtggaaacgagaacgacggaccgtgactactacgcgtttctccttttttaaaaaaaaaacagagagagagcgagacaagacaacgacgcgtccacggaccatacattggcataaaatgctcctagttgcctagttgggcttgcttttcccgccaaaaacaaaaaaaaaacaaaaaaacaaagggctagtactccactagcaacaacacctgccttgcaaccacgaccattcaccgacggttgactaatgtctagtggagctgtggaggtgtcgcttcagctcattagtcacagcagtccctgggctggcaaacagaggaaagcggagggcagatcagagatcagagtatcagacagacgtgggtgtcaagcaaagactcctgtgctccgcacggctcggtacgctcgctaggtcaacggatgggtacgcgcgaggcccggcccaggtcccacctccggggaaaaaaaaacaaaagacgcagacggggcgggcagcccggagtgtttgaaaataaaacaaaagactcaagcgaggccgaacgtaaagctgggaaaaaggtagagaaaacgctcctgctgccacgaagagagagagagagagagagacagagagaaacaggttgcggtcaactagagggtgcaggtgctgcagtgcagtgcaggcaaccgagccgggaaaagcgacccctcacccgtcacctttgaccctggcgcccaatcccatcctggcatccctctcctatcccgtgggcaggctaagcttgacctctgcacagagaaagcagggacaaggccgatggtgcgccattattgcgcttgtttaagcggctg

SEQ ID NO: 74168 - DNA, 1074 bp, Zea Mays
gtttcatttgtaacaccccctccggaacataatgttcccggaatgccagcttgaattcttcccaagtgacttgatgtccaacaggctggatcgtggaaaaatgcgcccaccaggtactagcaggccctcttaactgttgagccacaaacaggggcttttgcgtctccgtgcatcggattagcccaaacttctgttccattactcgcacccattcgtcagcttctaagggttcctctgccttgacgaagagcggtggtcgagttttagagaactatagataggtagtatctcgtggtacctgaggaggaactcttccttcgtgttgtttaaattagttgcccgccattttgcgcagaaagcgcgtgttgtcggcagtgccgttgaccaaggtagcgatagcctcggccaaggtaggaggtacgggtggtggattgggagtgtcctccccgccgcgggatgtacctgccccatcatgtgcacgggtccgggatggcatctgaggcaaagaaacatttgaaaaatataacatgccaacatacaccatttttatttcattgaggaacagtaataattatacatactcaacttttcttacttattttacataagtacaatacttagactatactactctagtcttcttcatccttagttgttccgctgcctgctttaggagactgttcatctgcaagattcatggaaggaggggctccaaaaaggtcaatccccccatcagatcctccatttgttgtttcagatggtccagctcccattgctgccacatcaggtggcacgttcgggtgcagccgatcatacaatacatgcacttcttcgtgcaaggtgttgcagtatgcctgcaggttttcgagggatgcgctaagttttgctacatgagctagagctttggcttcacagtcccaagagaaagagcgcgagttgacggcccagtcaatggccgtatcacattccgaaatttcgtactgcaggcgactaacttcggctgacagctccgctatacggtggctatctcgctcacgcgccctattcctgtgatgtagttctgaccgaagctgt

SEQ ID NO: 74169 - DNA, 446 bp, Zea Mays
acttcatcgctttctggtagcggaacggtgtcctctcccccagccctcactatagacacatcatgaaaatatttccccttcatcgattcaatttgtccttgcttgatagtggatttcccaaaaaaacaacgtggctaggtctccacggccgatctttggcattctcatcttcactctcaatatcaaagctttcactatcgctggagttctcagacaacccagccagcatctcattggtaattttttctgcattggtcttctccatagcttcgtagaaaccagccaatgcagggtcagtgatcttcttctcctcaaccattcaaacgatggttgcgcagatgttgaagctcaaaagttaatcgagctcgagaaagcaaagaaagctaaaatggcaaacatagtgcaatcagctagataacaggaaaaatactcacgacataggcttc

SEQ ID NO: 74170 - DNA, 312 bp, Zea Mays
gttggcttaaggaactgccagtgaattaacaccgtggctctcctaactcaaccgcctatggaaatcatttaaactggcggttctatatgagaatcgctagtacagatcattttaacacacctcactttgtctgctcactcgtgtctccttgcagtccgccgctccagacgctgtagtgcccctactcatcctccgcccaaactcgtcttgctctagcgccgacgtgccacctcgtgcctccccttcgtcatcgttgccgaatcaggcctcccttcgtcgtcctagcgaagtgaagtaggcggcgggctctcg

SEQ ID NO: 74171 - DNA, 347 bp, Zea Mays
cgcttgcaagtcttccagatcccaaagggttggccccagggtgcgcaaaaactggactccgaggataatatcgaaggagtccagtggaatatcatatgcgtcaattaggaagtcctcgaggccgatagtcatgctaatgctgtttgggaacctgcaacatgagaccttgtcaccgtttgccaccgtggcctggagataaagttgttagtagaacccgtgtccagtagtgctgtgagagcttgtcctttgatagatacctccagctgcattgtgccctcagatcgagttccagtcaaagcttgcagtgatatcattggttctggttcctcaggatcggtctccatggc

SEQ ID NO: 74172 - DNA, 583 bp, Zea Mays
cgacggggctactgcaggggtcacgtgccccaggttgggcaaggcgtggctagtagcaacggctgttagcgccatggccaggttcgctggggatggatggaggtgggctgcaactcggcaccgtgccagcacatagggagagggcaaatgcacttctctttcctacaacaactacacatcacacacgggatcagggaaggtggcgcgagcaaggacaacacgctggcacagggtcgtcgatgatgcgatgctcgacacgaacaaggaacggacacgagcacgatgagcttctcacctcgggatggagcgcacgcgtaggaggatggggacagcagactcaatgggctccggcagtgatagtggttctggatccatgacggcggtcggtggcgcaatgcagatggacgaaaagtgttaggtgttgctgcgatctgagatggtggtggttgtgctgcgcgatttatgggccaagctgagggggaaaagtccaatcagagttgtgctccaacgatcttagcagatctggttgcaacaaccacatacagatgagaaggccctggcaaagtggtcccacaagttggcg

SEQ ID NO: 74173 - DNA, 598 bp, Zea Mays
aataattccagtaggcacaacagggtagcctctgttgccggggggatgtttccacattttcatttagcttcggcacttcggccgtctcaatgcgcctaggtcggagcgtcaaaactttaatcttcttcgaccttgacacactagaagatgtcgaggtaacagctttccttttcttcccttgctttcgcgtgggatagcagtaatctgggtacacaaacccgataacatcaaacaccctattcaatctcttcttgccccaagcaccaaaggtagtggccatagcttcatcttctaccttcgagtatgcaccaagtagctcatcgctagttgcctctatagcatctagccagccatcatttggttcatcaaactggctcatgtatcgaaaggtatacttcagatagactaaaccattttgactggagccagcggcagcttcctttagcattttccatccgtttgcaagtggccacactctgtaagcaatatgctctgggaccaaatctcttatctcgatataagtgcataatgtattaaaagctgattggcttgcttgcacatcatttccaagcgcaatgagtggcctcctgatgccgaa

SEQ ID NO: 74174 - DNA, 454 bp, Zea Mays
ttttttttaaaaaaagtgtgcgatgagtaattaattctattagaattcaggtaatgttggatatgatatgcatatgttttttgataaacattgattcccttctcatgttttttgacaatccattttgtatcgttaggtatatgtaaattcttcggaacctcgaaaacaaagattcattacataggttggttacacttacaccagttcaactacaaaatctacacctccattttgtcggcttaaatgttgaaagtttgtcgcagttgattctgtatctacattacaaatcatcatttcagactcatatcgaaaacagacttaaaggcatcgcctttcaaccaaattcgacgaacctgcacgtaaacacaatctgtgaaccccgagttgccaaccgaagcaactatcgctccaaagatctgactcatgtgggccaaattctttcttgccaaagaag

SEQ ID NO: 74175 - DNA, 1020 bp, Zea Mays
attttagcatttttctatatttttctacacatttctaaagctttcctgaaaaagaaaaggaaaaactctaaacagtactgggccaattcaagtccaggcggcccaagcccaagtggattcgtgcgcgcgcccgcgcccgcgagggagattttgcgcggaggccctcggcgttttgactaaaccagaacagggtcgttcactattgcgcagagtcactgacaccaacaaaaaggcccctgcgtttctatcaatttgcaaccggaagtccccgacggcgctcgcgcaccgccgcgctccggcgagcatctacaccggcctattggggctatggctgggttctccgagcggcggacatgaaattggggtcagcctgaccatttcccctaacttaattgcactattggtgaactatcaagctctgcccgcgtgaaccgaatgggtggcggacagatgagtgcgttcccgacgactagagggcttctagttcaatttagtggttcggtgagtatcacggagctgggagggtactcaaacgaagtagcagaggaccggagctgacctgtggaggactgaccacggcgagcttgattcacggcggcggaaaatagatttgggggaaatccagaattcgcgagttctagcgaaggacggctagcgattagtggtggctgaatgcgtgaggatgtggtgaagctcacggcggggtcaatttatagagccccgaggcggtggcgctttaatttaagcggctagcggaggtggccggagataaggaagaagacgtcgcggtgaaatcgtggctaatggcgtggcaagctccccgtcgacgatgggatggcctagaggagtcacgacggcatggtgtaaagacagagccacgcggcggacgccggtgatggctcaacggcgttgaaatccttatccccgagcggagagcaagggaaggaaagcactacagctggccggagtggtttacagctcaccggcggcaagggttcataccggctgtgcatatccgat

SEQ ID NO: 74176 - DNA, 444 bp, Zea Mays
gccggggtgttacactcgctttgcctctcccctcttctgtttggttcctgtgtcccatctagtgctgatgcactacataatctttattatattgaaacccagtggcggtaggtcccatttggatccgcttttttgcggattctagtggctagaagtttctcatctcaaccaaacgcttagattctcgtgcaacttctgagaaaagcgcttctagtggatgctagatttgaactccgtcgcggaagcatgtaaccatgcacatctcggggaagctgaccgctcatctcccgttaaatgttaaatgttattagtaaaatgcaacattacaagttcaagtaaaccgagaaaaccacgtggtgctccaaaaacacatataggcctcctttggttgagggaaaatttctcgtttactgtgtttttcatgtgaaaatgaaccgattcctg

SEQ ID NO: 74177 - DNA, 342 bp, Zea Mays
aattcaatagaaactatgtcgtttcacgcctgataaaagggaagctattcacactgagttagctcgcttagttttagcagggttcattagggaggtactgcaccttgagtggctagcaaatcttgttcttgtactaaaaaagaataaagttgattggcgcatgtgcgtcgactatactgatctcaacaagcattgtccgaaggatcccttcgggctccctagaatagatcaggtagttgactcaaccgctggctgctctatgctctctttcctagactgctactccggatatcatcatatcagcttggcaaaagaagatgaggagaagacgctttcatcaca

SEQ ID NO: 74178 - DNA, 952 bp, Zea Mays
ttggcagttcggttgcgcacggtggactcagtgccttcaactgatctgacgtcttttgtagttttggctcttcagtcggatttgccctagcttcgactggcatagagcgacctggttctgtgacaggagcaaccccttcatttagtttcagcatgtcggccgtctcaatgcgcttgggtcggcgcgtcaaaaaattaacctttttcgacctcaacacactagaagttgtcgaggtagcagctttcctcttttcccttgctttcgcataggatagcagtagtgtgggtacacaaacccgataacatcaaacaccctattcaaactctttttgcccctagcgccgaaggcagttgtcatggcttcatcttcggccttcgagtatgctccaagcagctcatcgctagtggcctctataacatctagccagtcatcattcggttcatcaaaggtatacttcagatataccaaaccattttggctggagccagcggtagcctccttcggcatttcccatccgtttgcaagtggcaacactctgtaagcaatatgctcttggaccaagtctcttgtgccgatgtaagtacacactgtattgaaagctaccaggcatgcttgcacgtcgtttccaattgcaatgactggtctcctaatgccgaagcgagaccatatagagcgctgaataaccccttttatatcttccctctaactcaggtcaaccttcacataaaaccattcttgcatccaacaacctagccacttttttccgaaatgttggcacaggataactggccttagcgcggggtacgaagctgtagcagccaaaattgttatggtattgctctttcccagtcgccttcgtctgatatgataactcgtggatactgcagaaacacctagcatctggctctaacccttggcttctcatggcccatataaaaacccctactttgat

SEQ ID NO: 74179 - DNA, 615 bp, Zea Mays
catacactggccttgcacaggtgggttcgcctacccctactgacggaggagacaccccttttagcactgactcctttaccctggagggtttcccctctgccttgtgggatgtgctgaggaaggatggctaccccatgccttcccagtacattgtgtagctatacgaggagcatagggtacctcattgcagggtgtgactaacactagagcaccatccactacagccagattgttgtttgttggactccgagactatcgggttctgagccgacgacactacggaggctgcatccttgcacgctccgacaaccttctgtggtttccacccattagagaagttgacacatcccatcaccctctttcccgccgaacgggaggacgatccaatgtggagggacaaggctgaccaagcaaaggatgtatgggcactctaccctagaaagacattgcggcgacttgaccagatttataagagatcaagtatgaaaaccactagcctaatagtgatttagcacacttgagcccatataaacccaggggtctggttaaatcacgaaggatctcaatcttttccttcgcaaccacgatcataataactttgcattcactaaatca

SEQ ID NO: 74180 - DNA, 961 bp, Zea Mays
gatcgtgtttaggactttgaatggatgatttcaagtggacaaaatagtttcctaatgcaattatgtgtaaggtgtttatagtgacacattatctcaaaaagtgtgatgcctacgtataaataagaaataggtgtatttggtgtagtgtggattgattttgggtgcatgtatcgcaagaaatgaattagtgcgcatataggcgatgaatgggtgtgatcaagtgatgagatgctccttttaatttcattcatagctctttttagatgttgtagtgagatggtcgtcggttttgtcgttgtgcatgggtttgtaagtaggtatgggcacgagtatggttttagcatagattaaaagtatgtgggggaaaaagtggtacgcatgtgtatggtagtcgtgattgcgttaacttgaacaaagagtctcaagtgcatgttgtgctatggttgtattgagatagtaaattataagagttgcgcaataggaggttcgatcaatgtagttaatattgattggactgtagtgaggtggtgacatgccgaagtagttatcgcttcctctgcggttaagtcgatgtcatgtgtgatgatgctatttacgtggtgaatgtgtttgttgaatgtatgtggtaattttagtgcactaaatgacacagataaaaattcgtaagtctacttgttagtactaaattgattgttttaactctaacaaacggtaaagtgttagagtaatttcagtcgctagaacatggtaatttttgaagtaaatagaagctggaaactattagttgctgttttagactgcacgcagtgatttcctcgtgttgtatgtttgatgaactaaatcatgttttctgtataaaagccatatagaaaagttgtagataaccttatgatcttgtttgtgttaaaatttgacagccataagtctgatcatttgggagttatacttttcgcaaattcag

SEQ ID NO: 74181 - DNA, 303 bp, Zea Mays
tgctgctgttttgataagtactgacaggctttgcacctctggactaactcggctgcatcactcttcgtcgttggccagtagaaaccagacctaaagaccttcccaaccagagtccttgatgctgcgtgtatcccgcattgtccagcatggacctcatctagcagttgcttccctgtagccgaaagaatgcatttcatgaggactcctgatgcgtcccttctgtatagtgtttccccaatgagagtataatgagctgactgcttcgcaatgcgctctgctgcatttttgtcatctggctcttcc

SEQ ID NO: 74182 - DNA, 337 bp, Zea Mays
gcatccgaagcagctttttgtcaataatatgcttgcctaaaaactttccctagtagtggtctcgatccaatatgggcaccacatatgcctgagtggatttccttcatcaattcttgaccttcggctctggataaagatttagtagagatgaatagactccttgcttgaataattccccttctataatcatatatggccttgttctagcttgcattcttctgatgtatgcttcatcatttgatgggtgattgccctggaggaaggatatgatctctattctccaatcttcgttttatgctggtgatattgtgagcacaactctttctatgaggtctac

SEQ ID NO: 74183 - DNA, 299 bp, Zea Mays
aacaaatataagccatggttgcgcataaaatagataggacatctggttgttaggtgtaaagtggggagaaaaaacagatctaacccatgatgcatgatgcacaaagaaagtccacaatgcacaaaagtcatgcttgctatatatagtagagatatagatgtggtttattaagctttaaagttttaacggagactacaaagaattaagggcctatttgggagggcttcgttccaacaattatagctgcagttttttagttttaccataaaacaactccagcaaattgttgaggtgggttt

SEQ ID NO: 74184 - DNA, 802 bp, Zea Mays
ctgttgagatgtatcttgtgatattatgcttgacttgggaaaacctggttggctcactaagtctaattcctttcgcatctctgtctttttccgtttgtctttcttgggcctcttggtttcccataatttttgcagcagacttttcactggacttgccttgataaccctctttatttatatggtccttccccgccatattctctgctggaccaaaatcgagcttttgtggaactcctcctttcctgctcgtattagcaatctttagagggctagttgacacctcccctttctcacaatcagagaaagcctttgcacttccagattcagatctgattgcgatcttccagctttgtttactcccactaccttggctcttctcccatttgcctccacctgaaccactcccatcactccctctccccctgttttcttccaggaaccggcgccgagacggcactattctgagatcaccactatacggtcttctcttttctcttgagctcttaatgtcacaagatttatctgtatgcccaaggagaccacagatgtagcagaaatttggtaaaaattcatacaccaccggacaccaaattttatcccccttctcgttcaactccattatcactcctctctgaagtggcttatggatatctaggagaactttcactctcaggaaaaggccgatggctacctcatcctcctcagattccacctccagaaaggttcctaaactctccccaatggcaagtccagtagctttgttcatcaatcctaacgggagtttcatcactctcacccagca

SEQ ID NO: 74185 - DNA, 393 bp, Zea Mays
cccctctaggtgctctcatctgtgccagcttttgctcctgttttcgacactcaggccgaggatgctgctattcatcagttcgaagctcaggatgcagcagttgatgatgatgatgatgattttgggattccacctccgcctccgcctcatatgcctccacgctcacatgatcatgaggctgagagttctagtgctacccctgctgcccctcctgctattgaccccgcacttgcttcgattcttcagacactcactcagcagcaggctcacttggcaaccgagcagacccgccaggcagtagctcatcagcagttatccgagaggatgctctcgatgtttcagaccatacaggacaggcaggattctcttcagcagcagcttctccaggatcgg

SEQ ID NO: 74186 - DNA, 473 bp, Zea Mays
tcgagatttaggaaggactagggaagaggtggggaaaatctatgcgaagctcgtcttctctttcccaagtagcttcatcttctccgtggtgactccattgcactttgcacatctttataactttattcctcgtgacacgagtcagtgtatctagaatcttgatggggtactcagcataagtcagatcatcttgaacactaaggtcctccattggtagctgctcctcaggtaccctgaggcacttctttagctgagatacatggaacacatcatgtacatctgacagatgattgggtaactccagttgatatgcaacttctcccactcgctttaagattaagaagggtccaataaagcgaggggacaactttcctctgactttgaatcttctcataccccggagtggtgacaccttcaaatagacatgatcaccctccctaaactccagtagtcttctcctattatcagcatag

SEQ ID NO: 74187 - DNA, 843 bp, Zea Mays
ggcgattgtatggtatggtaggagcaagttttatgcgaccacggtggtggttggctgatgtagtggggcatcatgggtgcgtacacacgctattataattcagcacacgcatgtggcgcactgtgaggtgtgaccgcaatcgccaacttgatctcctccattggaggctaaagtccatagtattcgtgcaccgcgtgagtgagatattgttgttaggtgagtgagatctagctcagtcaaggagaccgagttctatcactatccttaccgcatgtgccctgattgagggcacaaccctatcctctagttgtgccccccaatcatatgtgctatatgaactaaggcaggtcaccgatatggatgccaacacttcttgcctccaccttaggcaccatagtttttcatggtcccgatcacctcctagcgccctagtgactggaatcaacttttctatggcactggtagagctaagtgcaccctctgcatcggccaccgacacaccaccacaattacctaacctataggagggaggaggtgatggaggatcacaaaatgccaccacatttaccctcgactccactacgccgacccccttcgtcatgcacctcggccaaaaggtatggccttccgtacctccccttctcccctctttgagttggtagatctagaggaatatatctatcactaagtaattgcatgatcaaagtgaaactaagtaagatccttcggatcctagaattaacattggcatcagtgccattaccaagtttcccttttgccctagatccataaaacaggttagaagttaaataaaagaaccccttagatcttagtgtggtcatg

SEQ ID NO: 74188 - DNA, 460 bp, Zea Mays
atcgactacaccaacctgaataaggcctgtctcaaggacccgtatccactgccacgtatagaccaaatcgtggattctacctctgggtgtgacctattgtcattcttagacgcttactctggtttccatcaaatccagatgtctagggaagataggaagcataccgcttttgtaacagtggatgggctttactgctatgttgttatgtcgtacggtctgaaaacgccttgcctacatttgtgcgggcgatgagtaagactttcagggacctgattagggacaaagtagaagtctacgtcgatgacattgtagtcaagactaagagaatgtcgaccctagtggaggacttaaccctggtcttcgacaagctgcgggcaacccgcacaaaagctgaacccggacaaatgcgtttttggcatttccgctgggaagttgctgggattcctggtttcgtaccggg

SEQ ID NO: 74189 - DNA, 647 bp, Zea Mays
ataacccaagttgagaaaacctaaaggctttaggggaatagtcataaaatgatcccaagacttaagtggaattacacttagacccctgggataccagaaaccctaattgaaaccctggaaaaccctaaaactaaaacctaggggcttatgtgcaaaattagtccacttttggactaaagtgcaaaaaccaagttaaataagtatcttaagtcatttggttcacaaatgtgtggacttgtaagccaaatattggattttggacttaattgcaaaatggacctcaactaagttctattctaagtctgaaattcagtgttgagggctcaactttggagccctgtatctttcaaaatatagggttttggccctggggcaccacatcaaacttatagacctattaatggataacaagtttgcttaagagtgcaagccatgttcttgtgagaaatttggagataattcagctcaaagtcaggctgtcacgcaatccctggactgaattttcagtagcagtgtgatggggtgaactttgagctcgatttggaatgggattcagtgactatttgatggtaagcattgtggcaaagttgaagattaactatagctctacaacttttgtacagaggtttgatgaagttcacatgcaa

SEQ ID NO: 74190 - DNA, 471 bp, Zea Mays
ttcataaagaaggctggtgcatttgttagaccgaaagacatcacagtgaactcatacaacccatacttggtaatgaatgccgtcttcagaatgttcgaaggtcgaatcctgagctgatgataacctgacctcagatctatcttggagaacacgctggctcctctcaactgatcgaacagatcttctattctaggcaaggggtacttgttcttagttgtgacctcattcagagctcgataatcgatacacatccttctggtgccatctttcttctccacaaataggacaggggcggcccaaggcgaggtgcttggccgaatgtaacctttctctgatagctcatcgatctgcttcttaagttcaaccaactctggtcctgatactctgtaagctctcttaaagatgggggcggtgccaggaagtagctctatagcaaactcaactttccgctctggtggcatacctggtaag

SEQ ID NO: 74191 - DNA, 603 bp, Zea Mays
cgacctcctcaacaccggcgagctcgcggtgagtcttaccacggcttaattgctcggtttcgtcttcaaatttttatgagctgcgtccaatagcacaaattttgaattcccaaatgtttcctgcggcagacctgattaaggagagataacattacagtatctgctttcttaattttgacggaatcaataattgccgatgtgtcacgtttagaaaagcgcaactgggacgatataaaatcattgagatgactgatggattgccaggcctactcaatgatcaagaatcgggcctaatcaaatcgacagaaaagcaggtggtctgaacgttgaattggactgggaattgtggacgcactcgctcgttaactcgttagttagcaatagtaattagaggcgtgatgtggtacacgcccaactaagctatggtatgtctggtgctgcatgttgattctgaagttctgaacagatgtcctgctgcccacctatccctcccaattatgacggtaaacaggcaaagccactctactctaccaaggagaatgataatagtactgcttcctcaatatattacttgtaagagtttaaaatttgtaccaaaataag

SEQ ID NO: 74192 - DNA, 390 bp, Zea Mays
cagaggcgccacgtccacccgatggtgacacgtcgttcggccggtgttctccgaccagttgaccggctggttctcatggccaccactgctccgactccctcacatgtccccttctccgtctgtaccgtgctcgctgatccccactggcgtcacgctatggagtacgcggccctgctggccaaccacatctaggatttgatgtgtccccctatcaccaacgtggtcatcagcaaatggatcttccgtcataagccaagtccgacgtctccctagatcggtacaaggcacgttgggtccttggggtgggggggggggggggtgatgtgtttgatataatagatttcagcggttcatttttgctggtgttggttctcctcagtctgtaacatg

SEQ ID NO: 74193 - DNA, 1382 bp, Zea Mays
tgaatacctcaaaggacaggggcttatttgtgaaactggcttggcgaaggggtacggttaattctcggctacccgattaaaaatgggccgaccagatcggatccaggcgcttatgaagtggcacacgtcatcaaccattggatcacggattagcggttttgattttatgtttgcccgagctgcccataaccaccggatagaagatctacggctatgatcgaatccaccgaatctgtacgaggatcctctaatctggaccgttaacgccgatccaacggtcacaacgccatccccacctcagaccctgattgcgcggcggcgccaccatgcccacgtggtgaagttcgccggagcgcgacgatcaaatccccaggtgcccgactacccttgtaaatgggtgtagcagagagaggaagcaacagggaacacgacagaggggtgtattacctgcaatgaaccgcgcggaccccctggccatggcatcctgcggccaacggtgaacggaccgttccggcgagcaattctcaatgcgccacccattctttttgcccggccatgtagtgtgaactatctggcgatttgcgtgacaccccaggttacccagcacgcaccgaatggccattcaagcgagttactcgcgcggtggaatctcaccccaatcttcgcctgctcgatggcgcgagggagctcaccatgggtctggtttgggttcaagggggcacggccatggatttataggcccgagcgcgacaggattccgacccagttttccccagctcccgcaaccacctccggagatcgcgtgcttctgtttcgagcccaacgccgcgccatccgcaaggatatagcagggctttgttgaggaagacgcctgaaggtggggcccacgcgtcagcttcccacggaggacacaggcgcgaacgcaacatgttttgactgccaagcgggacccgcggcttagtgagaacggcagtgagaagttgggccagggcaaattcggcccaataccagtcccagcgcttttttattttcctaattcttttctattcctcatttgaatgcattttaaactctactgttcaaatttgaattctttggtgagtttcacacagaggttacatgtacaatcatattgaaaaattatatttatttgtctatattttacttatagtgcacatggctttcctttttctcctcttttcaaattcaattctaactcaaaactcttatttcaattttcaaatttcccaatctcaacataattcaaatatgaatataaatcttattattatttatctttcttcctattatttaattatggaagtaagaaatgactttattacaatttcttttctcatttctattttatactttcatttatc

SEQ ID NO: 74194 - DNA, 364 bp, Zea Mays
gcccccaagaccgatttttcgtggctacagaggtgggcgccctacgacctcgacccctcccatcctactgcagctctggcccccatcccgtccccgaccaagtccatcgaccgcatcgtccaccgcctctgcatcctcgccctcgacgacgatgatccctcctcatcttcgacgagacacaaaccaaatggtaataatgttgtttggattactgtgtatcactgcttgtttatttcaatgcgcaagatattaaccatctgaactctactttggataggtttaaagacgatggctataattttcagatttggctccaataatcgagccgcctagggtaatagtgcatccggtgcctccatttctc

SEQ ID NO: 74195 - DNA, 578 bp, Zea Mays
ctcgcaacggacgctgcaatctccttcttcatctttgacaaccaaaactttgatttcaaatcacagtacattgctgcttccgaggtgaatcgatagtttggattggtgagcttcatccatgattttggtccgaagctcttgatcctttggtatgaccagacgttcatcaaaccacattatacccctttcgtcaagcttgaagcagctactgggttcactttcatcatttccttgatgtgaaatatgccattgtcggatttctgcttttggatgatctaatcctccagcgagcaacgaacttgaatgttgagtagcactaccgggtgtaataagttaaatccatcctctagaagcggttgaagaatgtggcaatgttacttccgactcaaagcgtcaaccacaacattagcctttctcggatgatagtgcacttgtaagttgtagtccttgatcagctcgagccacctgtgttgcctcatgttgagctcgggttgggtgaagatgtacttcagacttttatgatccgtgaagatattacatacattcccaagcaggtagtgcctccaaatttttaacgc

SEQ ID NO: 74196 - DNA, 356 bp, Zea Mays
gagggtcgtatggcctctgatgggactatcctaggccggatacactgacacctaatttatcccgaaattgttcgactatttcttctcgaacttcatccatagcgatcgatggtaacccatcggtcctcgggacatggggctcatgtggtcggttatcctgatgcgggccttctgcactaggacgatcaaaggtgacgttcggtataggcccctgaggcatacctgtttcataccccattgtcgtttggtatgaggtgaacctttctggctccctagggatcgaaaaatattcaacctcatgcatgggtgatggcatgctatgactacgatgtgctgtaggtggggtgtagtgtcgc

SEQ ID NO: 74197 - DNA, 374 bp, Zea Mays
ctgaggtgctcgcctccaggtgcggtaaagaggatccccgcatctactccctgcagctttagcgaggcatcaaaatacattcgccatacttctgcagtttctgggttatctcgtacttgctgttcagtccattctgatacgaaatcaaccagtgcttgagttttgatggcagtgcgaggtcgaaattcaatgtcatgagatcccagctcgcaagcccacttggctattctgccaatggcttctttgttgtgaagaatatcccctatcggaaaaccagtgactactatgactttgtggtcgtcgaagtagtgacgtagtttgcgtgcagttagaagtactgcgtataatagcttctgaacttgaggatatttttt

SEQ ID NO: 74198 - DNA, 345 bp, Zea Mays
gctcgggactaaaagactttgttgttgttgttcatgtactcttactgtgattaccaatacattttgaactttggagaaatgatgaagtaatcctttgaaagccttgaaatttgaatttcccatcccatatactcccaagctgatgattattaacagtcccatcaaatagtgtcatcaatggggtgtttggttcgaggaatcaccttatccttgatggggtggtccatcatcaggtgatcctatatgaatttggtgggatgatcccattctccatacatatactaattgtgtgcatatgaggaatgtggtgatgatagatcaccctattccaatacttaaaccaag

SEQ ID NO: 74199 - DNA, 810 bp, Zea Mays
gatcaaccctctacctcatgttccaaagatgatgaaggtacaatccaatgagtcagaaattgatgggaatgataaacaagatgaacctaatgagtgtgaccatccaaacatccttgtagaaaatatatgtcaggggtatcttgagtgtgttgatccctgagaggctggttcgtggtcacaactcggaccgggtctacaacttgagctccatctaggactcagtttggatattaggaaggttgtgatatcatatcatgatggtatctacatatttagaaaactatggtatttacgtatcttggttgtaccaataacacccaacatataagggagttgtcatgtagagataaggatagaatggtcttgtaacttagataagtgtcctattctgttatgagaggggctcccttttgttgtaaccaaatccctccttcgactataaatggagggatgaggatccccaagggggcagaggcatcgcgatcataatcatagctactagcaaactagatgtagggtattatcttgcacgagacccaaaactagtacaaatcttgtgtctcttatgtcattacttctagttcttagatctcatgaagcaccctcatacaaattcattgtcgagaaatcctcgacagttggtgtgctaggtaggggatcgagttgatcataatagatgtgatgccatctatcaaccacacacagaaagaacaaggcaacgagcaaaacaagatgtcagaccatgccatgatgatgatgacctaagaccaaaaagatcaagccaagatctagctagagaaaaccaaagcc

SEQ ID NO: 74200 - DNA, 782 bp, Zea Mays
cacaaattaagcaaaactactaagctacataatcttactagcactagcgaacaactactttactaaataagtaaactagtaatgagaatgacactaatcacttgctcaaatatgaacaagctagggttagggagatgcaaaccaacaaaagacaaatgttgacacgataattttgtcctgaggtttggaagtttgccaacgacttacatcccattgaggcaagcctaatgttaccactgatcctcttgctagcggtgaactagtgacctaaagtcacactcttccaagtggagtgctcataagcaagctttagcacttgatccaactagaccacttggtgctcttcacacctttcttaaatagtgttacccttcacgatttcagtagggtgagcatgatacctaccatttcatatgctacacatacgatattaaattcatcgatctagccaagactatacccctttatctgttacaagcaccttacaaagatcttagttaagcaactaagagcctattttaaagcacctagattttaagaaactagtttgtagaaactggagtggttttgaacataccagtgtatgcctcattttatagaaactgtattcaagaagctaacctccccaactcaaaccagttttttgtctgtttaattacttcatgtcctcgttgatttcacggaatttacatctgttgccaccacttttaacaatataggaaggataggctagtcattgtgataaaaaactagaaactggtttcttaagaaccaggttccaa

SEQ ID NO: 74201 - DNA, 516 bp, Zea Mays
ggaaaatctcattgagcaaatccaatcgtgtattttggagcacgtgtcacaataaaaacctaaggacacaaatgcaacggcatcatagctcgatcgtgcatactctcccaggttcgtcatcaagccctaggtccactgtcgagcatgaaacggtaagttaccatgtattttgaacgcaacgttgaagcaagaacatggtttcgctggaacccacatccaaataaaggaaatgtcctcagtgaaatctcactacatgtcgttgataaacctagatgtagatgtcctcgatatttaaaggaatataaattgactaggtagatgtccgtgcgttgcaacggtatacaaaatattcaacaaaatgttagtgcataaaaaagaacacatatttcaattgcaccaaaaacgatacattccccgcttgcaaggttagggccgtattttcttcctactttgcacctcagcgaacagtaaaaaccaaagaaccatatagtacatagacgcacttgcacactgtgc

SEQ ID NO: 74202 - DNA, 282 bp, Zea Mays
caagggttatataacaatattatggattagaaaacaactacaatataacatcgtccttaccgatctagtcgaaaacttagcactatagaactatcctatcaacctaaccaagaagaatggtaatagatccaagagatctataacgaaacttcttgcggggcggggataagacagagaatggggcatctttcatatcttctaaagggttccttcaggtagacttcacttcaagttccacaatcctaacttgatcatcttgtagtgcttccgagtagagtcttc

SEQ ID NO: 74203 - DNA, 319 bp, Zea Mays
gggggatttcctgaggctcaagcctcccacgtttgccggatctagcaatcccctcgatgctgacgattggctgcgcacgattaaaagaaagctggaagccatcggatgcccagaaaattagtgtgttcaactgactgctcatcaactctccgggatggccttagcctggtgggataccttcaatgtcaccatcagagatgctacctgggcggagtttgaaacagctttccgggagcaccatgtgccccaagggctcgttcagctcaaggaagacgaattccgggaactgactcaagacggaagatctgtcagcgaatat

SEQ ID NO: 74204 - DNA, 477 bp, Zea Mays
cgcaaatctagtatctgggttgattttgatgagatctttgagaaagtgaatgggtccaatgttcgaactactgctatttgtagaatgtgtaagactatattttctactagatcttctgctggtactggacattttcttagacacgagaaagtttgtaggaagaaggttgatcacgctgctagggtctagtctcggcttgctttcaatctgatggttctctacataattgggagtatgatctattgttgctcgaattgagttgtgtcacctgattgctaggattgaccttgcattaggtataggtgagatacaggcatgggaggattacattgctcgtgctcataactccaggtttaccaaaatttctagacataccaccactagatatctcgtcaagcttttcacttaacgacgtaatgtgctaatcaattctatgttgcctgctacttcttcggttccattaacctcagatatttg

SEQ ID NO: 74205 - DNA, 574 bp, Zea Mays
cccagtacagtatgtggctagtgcttgtgacaccgcttaatctcccaccatgggaatgcgtgaatccaacaaactgctttatgtctttactcatcccaggtccaagatgtccaggaaaggattttgatttgttccttgagcccctaattgaagaactgctgaagctatggaagggtgtcaagacctatgatgcatgtactggtaggaagttcgaccttcgtgctgctgtactatggtgtatacatgattatccagcgctggccacgttatctgggtgaacaacaaaagggtattatgcatgtatttattgcgacaagaatccgttgtctccggcaataaggaacaagttatgctacattggacatcgtcgttaccttaaaaggacacattcatggaggaatagcttggatttcaatggtaagcgtgaaaacaaagttgagcctagcaggttcactgtggatgaggtcctacaagagctagagaaggtgaaagatgtcaggccagggaagtaggctgacattactggaaataaaaggaagcatagtgacggtccaaagatttatagccggaaata

SEQ ID NO: 74206 - DNA, 480 bp, Zea Mays
ttatctttaaagccgcacggaaacggcgcatactaggctatccacgtctgcagaatttcgtctcccacacgattattcatcgacggccacgaacgccttcgatccaggcgaacatctcagcatattccagaacccacgcgaccgttcgaccaaatccgaacggacagaactcctcacatcttctctcaggataaggctaaagcctcagaaatggcggcggcggacaccgagcgaagcgctgctttccgctgtgttccgtactccgccgttgtcttgctccctctcctctcgggctacttcgatctcccttccatctcctcgctctccaccccatcgtcgatcctcgccttcaccgcatgcttcccgaacgtactcgactctgtcggctcctgcgattggcaccctttcatctccgtcctcgaggccttcgcctcctgggacgccactgggctgggcctgagctaccgacaccaggcagcg

SEQ ID NO: 74207 - DNA, 601 bp, Zea Mays
gtggcactggcgaagtatgtctgggcagttacttcctacggcgggcaaccgtatgtggaggtattcgccaaaaattattgcctgcattaacagaagaggaaaataggaaataagatagcacaattctgatcgtgcaccttcacgctgaggactgagaagacttcggctgaggttgtggagatagtcccttgtgctaggatcaaatggggcaactggtgggacttttggttctatgtggctcccagtgacgtcgaagacctgccgagcctgcctccggccattctgtgctcacaatgctatgtggcgtttcctcgattctatgacaccccagtgtcacctagggtttctctcaaagtgctaacccatgaaccatcatcttatgtggaccaaaaattgagcatgaacatcaagttgacttaagaatgaagaacccaccaagcctatacttaaaagtatcatgatcaaaacaaatgggtctttcaaaaaggtaataatgttgcaaccctaataaaaaccctaagtgagccctatgagcaaaattcaagaaaatggggaaaagggtatgaaaaatttaaaatcatggcttgggccaattataaac

SEQ ID NO: 74208 - DNA, 528 bp, Zea Mays
cagcagccacttccaaagctgaaggcccttcatccacctccatcggagttggataactcggattagcgtcattgcatgggagactgccctccaagttcgacgatgcgcgagacattactcgagttacctcttgcctggcagaatcaaaaccctgggctcccattgacaaatttgtgttaatttaacccctctgcaacatatatgaagatggcattaagattcgagccttagacacgtcaagtcgagggatttggctagggttcaagccgtgagacaaaccctactagagccccccatatctttggttccagtcaacaaaatccgtaggtcgccacacacaaacgataaaggggagtctggtgatgagatcttacaaagggatcatggccataatcgcaaagatctggagctaatgggcgcctgaaaatgaccacactcaacgcttcctcatgctcgacaccgtgcctaggaggccgaccgcgcactggcgctcctccacgcacgccccgagcacctgtcagagcggcc

SEQ ID NO: 74209 - DNA, 399 bp, Zea Mays
atcattttgcagatgaatggatcagttgttgagaacatttcctgaaaacacaaagttagtaaaatgtgttgcttgaaagaacgctcatctataaccacaccacagtctatggtcatcacaaagaagactcaaataaacagacatgcttcaataaaagtcagaaaaggcacttcaggatttggaattgcatccagtagctggtcaggtggttcttaccgcagatcaaatgaggatgattaaatgcctgaaactcctcgagttcttgagaaattgggatgcacataggtttgagcctttagcatggtttattggtcatcagaatcaaaatcagaaccctaatcagaactcaaacctaaacccaaatcagattcaaaatcaaccaaattagatctgaaatcc

SEQ ID NO: 74210 - DNA, 589 bp, Zea Mays
ggttttgctgactggatcaagagatagagaggggagaagtcgggtttgtctcactgccgaccacagagaaaagatcccgggtttgatgtgtccagagcacgcgtctcgatgccatcttctagtatgaggtagaggggttagttaggcacattttttcaattggagcattaggattagagttaaggatcaaggtgaacgtgctcggttttggttcaaaggctaaaaattcagaaatctgaatttcagatttccccattgaacctccacttgaatggcttgtttggagtttttaacaaactattttggccaagctttcataatctttattgtagcttatttagtgtatttcaattcttataattggcctaagccatgatttcaagtttttcatggtctttcatcccttttcttcttttctacttaattagcttaattagggtttcaacatttttcctctttttgaaaaacctcatttgttttagacatgattctttagatataaacttagtggatctttcattcttacattgatttggtgcttcatgctcactttggcttacatgaaatgatgggtcttgagttagcactg

SEQ ID NO: 74211 - DNA, 604 bp, Zea Mays
ccgccacagccaccagagggagcgcagagtgccgccggtgaacatcgtccctgttgccgcattcgccttcggaatttagagccggagctttgttttcccgtggagaatactcgtgcggcgtcgcagtgatcatagactcaccgaagtgccagcaatcctccactggagctcaaccgacccgccactcgccgtggtcgggtttgtctgcgacaaatcgtgaggtacttgaccgttcactgtattcgtcggatatggggcatcgcatagctaggccgaattagaaaatggtcgcctgacaccgcggattgaatttccgatccggggcgtcgtcgtggccacatggttgccaccgttggtgacagcgcgttagggaagatgctctggcaccgttgatttcgccatgaacggtctagattagacgaggacgtaccgcttcgcgtgagtaaatctatggcgtccaatcgttggtgaacgttgtggattaaaagatgggagagtagatctggggcgttggattcaaatcttgtggttctgggcacgtaccggttcgcgtaggtgtagaatctaatcgatgtcgttcactttagatcggacggcagagatc

SEQ ID NO: 74212 - DNA, 532 bp, Zea Mays
atttgacagatgtatttgtatttcttctagaattttgtaaccaacaaaattctcacattcttcttttgtatgtggcactgtggtaggtatgatattgcctaaagaaccttctatttccaacacacttgaaactaaaaaatctatggcctcatttgaactccttgctctttgaatcaaatcttctaccttgtttcgcactactgctagcttttttcttttttccacttcaatagcatctatgggcttctcgtccaataggttgccttcctcatcatacacaacctctctaatataacatatagaaaaaatatcaagtaagatgtacaaataaaatgtgaaacataatacaaatcatgattgcttatacctcatgcatcttgtttcccatctcttcaaaatataaagatgtaggtagttcatataggttttcacctctcaatgatagaataatatgacgacatggaattcccatcttttcggatagtttgcacgagcaacgaccaaaattatttgatgtgcaccactcgaccac

SEQ ID NO: 74213 - DNA, 747 bp, Zea Mays
ctagctatatgtccagtacataaatatactagttagatctcggtcaattacttttgaattagccgtgatagttagtaattaaatcatgtgtgaatagtggaagccagccagcaagagcgagcttcccacgtagatgatgattacgatatacggttccgagtcacgcagacaaagcgcaaaaggggatctatcgatggaggagaaaggaatagctactagctagctagacactgtggttgccgtgatgatacgaggtggcgtgccacgccctcactaatcagattcccacgcgctaacccaacaaaatcatcccccgcctccccggcccgcaccttttttttaccgctccggccgggtgaaacagccaatccatcatcagggtcgtccggccgatcctgttagttaccagatagtagtacgcactagctacgcacgccgccgtatatatacatataactgcagactctgaatgggacggacgtatagtatgagctttgcttgcttgctagcctagtcgctgtaatcatggcgacgacgtgcaggcagggcacacgcagcagaaaggagacacccctcgcatgtttcgctcctgcccggcaagagcggccggccgccgcggccttgtgtagcccgcccgccccgtgcgtgttcggcggccaggttccagcccctgcacatgcgtgcagacagttattagtatacggcacaagagtacgcgtagctttctcccacgccgaaatacgcgga

SEQ ID NO: 74214 - DNA, 693 bp, Zea Mays
ctaactgacctcaaaagaatctaccttatccctagggatccatcttgccctaattagcatatttatcccacactagtgtaacaaccgcgagctaatccaaaatttaattagatcttaactagtctaatctagtcatatccaagctaatttagattttatctaatctattatgatctaatctagagtaagttacttaatgctggtacaaaagataaggccataaccccaatgcacttgtaactaaactagtgtcttagaccaactcagccacatgcatgagatctaacccaaccaatagagtcatgatgaattgcataatccgtctatccccacctaatgtcaaacaaacttttgatctacatcatgttgtctacctcatccataactatcttaaccatattctcccaactccaatgatatacactaacctcgaatcaatgagacaagaccggagaagatgatcaacttcatcaagaaaggatgagcaccaactcaagtcttcaaggatcaagtgagatcaccaagatgagtcaagatccacgaccttggatggagtcttttcttaccccactccttcttacccaaacctatatatgctttaaagatatctttcatcctgcataataaagtagttatacccgcatatacccaggccttcctaatcacccactattgactataaaaaaatgagac

SEQ ID NO: 74215 - DNA, 649 bp, Zea Mays
gtcaaattgtgactaatccagtggagttaagacttgggtcactgtgacaagattggagatcatatattggagcacaacttcgtcaaaggaaggtaggtgtgctactgcctagaacagggagtaaatgtggctcaaaaatgcattgtcaggcgacttcgaaaggaaaattcagattgaacagcgccctgacgaagaacgcaggtacagtgtacccgtcgccggtgaactcgcgccaagatccaagttttgcctgggagattcgtgctcggtgaagaatggataacactggggatgggtgaaaagatctggggcgggatgaattgcgattgctagctggtccggccgtcctatccacttgccgcacggtcggccgagcttaccatcaccggagctcgccgtttcactcaaccgtgccacgccgcaaagcattctccacgtcgtaaggatcgtggaggatagtcagttacccctcctgcatcgttttctcctcgcgcgccacgatgcatagatcactgtgaaatatccaggtcgccgtgagctgatccccaatccaaatttgtgataagttcgaccgaggcctttaaattgaaggtgcccccagttttgtctttgtgttacgcgcccaacccactctcagccagctcgtttc

SEQ ID NO: 74216 - DNA, 630 bp, Zea Mays
tgaccgcgctttattgaaccggcctcagtgcctgaattttgcggtgagacctcttcggctactgaagcgaaagaacctgctccccccacgcaaaagattgaagagccggctgaagtgtcgaaggcaccctcagctaaattagctgagccgaaggtggttaatattgaagaaacaagagtcaaagggacaaaaatattagaagttctaagcccttcggtagaagtgacagtgccaaaggcacaaaaaggtcttacagtgacccccaagaggaaaagaatggccagcgtactggatgtgttggagaggataaaaacttcaagttctcctcgagggaaaatagccgaggcttcacaagcgcagactgagataaagctgaccgaagccgaagctacaaagagccaggccgagaccgaagctgggccttgagagcccgccaaggagaaatccttggaaaccggagaaaaggcaacggaaaaagaagctacagaacaaattctgcctgaagaagctgccactcctactcccgaagcaccttccaaaattcttgattatattatacgacatgcttcgggaaaaagattatctgaggaagagatttttgaagctaaacactatgcccgagaactaaag

SEQ ID NO: 74217 - DNA, 550 bp, Zea Mays
ttgtgatgggatactttcggggagagatctctggttggtcctgattgggttcagcagacatctgagaaggttcgggaaattcgttagaaatattttggccgctcagagcagtcagaagagttatgctgatgtgaggaggcaggacttggaatttgcagtgggggatcaagtccttctcagggtatcacctactaaaggagttgttcggttcggcgtctccgggaatcttagcccaagatacattggaccgttctctatcttggcctgggttggcagcttgtcttaccgcttgcagttgtcggattccatggtaggggtgcacccggtatttcatgtctctatgttgaggaagtttttgcgggatccagaccatcaaatcgagttggaaccgattgttgtgcagcaggatctgactctggagtgtcgtccggtgtgtatcttggagtcctcggagcgtgtcatgagaaggagatcaattaagtatgttaaggtcttgtggactaatcagtctgagagcgaggctacttgggaacttgaggagctgatgcgg

SEQ ID NO: 74218 - DNA, 815 bp, Zea Mays
gaggaccctgctcttttaaataactcgtaaagactcctgcacactatttctatgtgtcactgacgtttgcagatagccccttcccttttctatttttgcacacgtcgagacccccgaccatggacggcggagcagcggctccggcgagcccgtactggccggaaaacgcaacgactatgcttctccgttggtcaacacctaattctacccttaacgaccatttcccctccatcaattatagagttctaactctaaatcgcgctagcacggtgatggcgcaaactgaggaaaacctgaggcattcccggtgatctaatgcggtctaattcaattggccgggtcgagaagcattaagagcatataagagagctgaaacaagagtgaggagggcaagatcagacctgtggagagctggccacggtgagctcacacactacggtgttcttgacagatttgggggaaattcaaaattggagcgctctagtggataatctgaggtacgggatggtgcgttgggtgtgtgattacctagcggagctgatggcacacttaatttatagggcccgagggcggtggctcctaatttgggcatggcgtgctggcggccggagagaggggagagcactggcgcaaaggattcgtggctttcaccgtggcaaggtcaccggcgatgaccggacacgcttcagtggtttactacgacgtggtaacgccttaaggcacgtggcgcacggtcggtaggtggccaactccggcgaggaccactttgcccgaccgcagcccaagtgggtacggcgagctcactgtcgaccggg

SEQ ID NO: 74219 - DNA, 632 bp, Zea Mays
aactatgccacgcagaatgttattggcttcttgtcgactttattgctccattagttctgtaggctttaacccttttgtggggtgcaagaatgtgagattacatgattatcttttcatgatggcaagaacaaggtttaggaagattagtagttttgtttcaatagaactacttgttttgtggtgctttgaggtgaggtgttggatcttcttatacattcatctggtgtggatgtttccccattgaattaaaattaattgttgatgcttgtaagggttgtgcttagtgcatattaccccttcataaaagagtgttgttttaggacattgatgttgatgtatagctgcaaccaaattcgatggtgtgaaatcgtagtgttgattgcatctatgacttgctttgagcttcattgtatgttgtttcatgctgaatatcaagttgtgtagtttccttagacaattagtccgaggtagaagttcttgtgttaattaagactaataatggacccatgttttgaatggtggtgctatatggggtaccttggatgctttgcttggagtggtcgaattcgaggatgaattctttttaaggggggtagagtgtgataacccaattttctgaaaagaagttaagc

SEQ ID NO: 74220 - DNA, 366 bp, Zea Mays
ttcttccatctaggccccgggccacctttttcggaatgttgggaccgggtaactcacatcggcgcggggcacgaagccataacaaccaaaattgttgtgatactgctccttgccagtagccttcgtcttgtacagtagctcgtgcatattgtagaagcattttgcgcttggctccatcccttggcttctcacgcccaaataagaacccccatcctaataatggcttcgggagtaatttgatgcaggaaaatcttgaaggccttcagcaccttagccaggaatttgctcaatgggaaccgaagcccggccttcataaaactcctataaacaaccacctcatcctcttcgtgagcaggtgcagcacta

SEQ ID NO: 74221 - DNA, 284 bp, Zea Mays
ctttctcttaaaataccgtgcaatggtgtgtaggttgtacatgcccttaaactattgtggttgtagcatttccagccgattggttgatgctcttaaagtgaaatagtgtctagactggcacagatactactaggtgctagtgtcatataatgacgaccctacacaattaggtattatagtgtcatgcctaatggaaaggcactagtgctagcataacacgattactaatagtaccaatttcgtgtcgtgtggcccatttagccatctatacatgagactctttg

SEQ ID NO: 74222 - DNA, 440 bp, Zea Mays
gctgcacccgaacgtgccacccgatgtggtagcaatgggagctggaccatctggaacaacaaatggaggatctgatggggggattgacctttttggagcccctccttccatgaatcttgcagattaacagtctcaagaagtaggcaacggaacaactaaggatgaagaagatttgagtagtatagtctaagtaatgtacttatgtaaaataagtaaggcagttgagttgtataatggagtatgtatagttattactgttctgcaatgaaatagagatggtgtatgtttgacatgttatatttccaaatgtttctttgcctcagatgccatcccggacccgtgctcatgatggggcaggtacatcccgcggcggggaggacaatcccaatccgccacccgtacctcctaccttggtcgaggctatcactgccttgctcaac

SEQ ID NO: 74223 - DNA, 582 bp, Zea Mays
gtagatacaacatggttcttgggctggacccacaatatgctcactttgaattatgttgagttgagtgtggcactattaaatatgtcgtgactcaaggtgctcgctagacacgattcatttagtcatttatagtgcagttcctccgtcatcagcatcccttatctcgcgagcataaaaaaacaagagaaaaaacttcatctcgtctcacccaaaacaacacacattgtcgtttgtggtctccgcctctctcctcagccctcgtcacatcaccgcttgtcgtctctaggaagatatcctagatgcaccacgataggtgtaccgtcatcacacgtttaaatccacgtgaggtgtatccgtcgggtccactgtactaataggaaggacaccgctacacatctaacttgacattggtttggtttgatccagaggtgtgcagactatctgtgcattggtccatgtttgtctccctttggtatgatataaagatctatgattttggatcgtgtttaaataaataatgctttaataatgcatatcttttaccgtcagtctacaaccacatcgacgtcacgtcaattattt

SEQ ID NO: 74224 - DNA, 474 bp, Zea Mays
ccttgaccatcggatgtcgagtcatcgatctagcgcctcaacttgacttttggtgaatcgtcgtcttaatttggtcaacacggtttacacttccatgtagtacttatgggtgtcccaggtgtcagcaacatatagtcattgctttagcttctcctttccctcagtccaatgcggacagtggcggacccaggaataggctaaagggggcgattttctagtgtggaggcagtagtctcttctttttcctcctcctcacttatctaccctccacctcttttgtccaatggagttttatggatgtagggggctagatccacccctaagtatgggtgttcatcttccatcgctcctagtctatcgtcacgaatccacatgatcttcaccttcggatcgactttcgtttatgtgctccacacctatacaccataaactaagagacatgcatgttgcacgacatgtcgacactacactcac

SEQ ID NO: 74225 - DNA, 452 bp, Zea Mays
gcgcgagttcctatttctcgtccagatcacccgcaatacgagtggtctgggtggaatctgcagcgagccggatggctttgacggggacaccatccgctccggatggttgtacctttggcaccttgggggtgccttggtaccgaaggttgagggattcctccctccttcgtctaggcgagcagtctctgccgccagggcgtgcagcttctctacggctgcaagtgcggcggcacggtcaccttgcacggtgaggaccccagtcggggatggcatcttgaggaccaaatacccgtaatgggcaatggccatgaaccggtacagggccggcctgccaatgatggcgttgaaggggaggttgacctctgcaacgtcgaaaacgacgttctccgtgcggaagttctcctcagttccgaatgtaaccgggagtgcgatgctcccaaggggatacaccg

SEQ ID NO: 74226 - DNA, 984 bp, Zea Mays
aaaattgtgcctctctgatttaccgctagaaagcgtgcggtgccagtcctggtgggctggggctgctctcgtgcctcctctcgcgtggctattcaactttctcctgctcccgacgcctgttgtcaaagatgtgtcggacgtcacggatgtccctaaggcgatcttgcatggggacatgtgtcctcgtggattgggtgagttttgcccccttgctccaagacgaggtcgtttgcgggtcgtagtgtaacactccatgtgttactaagggtttctactcaacaaactcacaaagccctactatcacatgtgggttagttaagcaaaacacacgatacttgggaaccaatgccctaattaagtattgaccatcttagaagacctaccatagccatatcatgcgcatcaaagggggagaatacttaaaacctaagttccccgccttttagcaaattaagcaccaaaataaactgagcaagaaagttatatgaattacattatcatgacttggaccatttataaaagttatagcacattaaatcacctaccaaagttagtaagggagatgtcgcatataggttttacgaaatccccaaaaaggtcactcaagtgagggaaacaaaagaaaatcagatttttctttagatcattttcaacccctctaacaaaaccaaacatgttcacccagtaccaaaactcaacaccacatactccaattgacaaagttgtacctaaacacttaatctaacccataccataagatggcctcgggaccaaactttttgacatatcaaaacaccagatttacctcagtgttggcccttgagacaaaccgaccttggggatgtgacaactccttatccctgccaagaaacgcttgggtctccacacctatgagcatttgaaagggataaaacgggttgtcgccacgtgtttggccagggctagcgtccagagcgtggtcgaacacgcgcccgcgctcgcccc

SEQ ID NO: 74227 - DNA, 521 bp, Zea Mays
gtttatcttaagtacaccttccggtacagaagtcaatttaacgagccaaatgatgattggctagacgctatagaggcaacgagtgatgagctacttggagcctactcgaggacagaagatgaagccatgacagttgccttcggcgctcgagggaaaaggaggctgaacagggttttcaatgttattggatttgtttaccctcattactgttttcctgtccgaaggcaaggggggaaaggaaagttgttgcttcaacctcttccagcacgccgaagccgaagagggccaaggtcttgacacgtaggccgaaacctattgggacgaccgaggtgttgaagcttattgaaaatgcagagggtgtcccctcagccacagaaacagctcctgcgatgtcgatcgaagctagtacaggcccgacaaatgagccagaatcagaaaagccagtagaatagccaaaggtgctgagccctccagctgtaacagggctgtcgaagctatcgagtcctacaacagcaactcca

SEQ ID NO: 74228 - DNA, 527 bp, Zea Mays
tgtagcgccggcgaggctcaggaggtggaactcagagtcgctggatagcatactggagcaggaggcgagagtggcggcggcgaggagcacgaggtggggctcggaggtgatggacgccatgccggaacaggaggcagcggtagcgccggcgaggctcaggaggtggaactcggagtcgttggatagcatactggagcaggaggcgagagtggcgccggcgaggagcacgaggtggggttcggaggtgatggacgccatgccggaacaggaggcagcggtagcgccagcgaggctcaggaggtggaactcagagtcgttggatagcatactggagcaggaggcgagagtggcggcggcgaggagcaggaggtgggactcggaggtgatggacgccatgccggaacaggaggcagcggtagcgccagcgaggctcaggaggtggaactcagagtcgttggatagcatactggagcaggaggcgagagtggcggcggcgaggagcaggaggtgggactcggaggtggtgg

SEQ ID NO: 74229 - DNA, 286 bp, Zea Mays
tgggcctgatggctttcctgctgaattctttcaaaccttttgggatactattcagttggacattgtgcaattattcaatgacttttataatgatagtctcaaaattgagagactgaattatggggtggtaacattattaccaaaagtggataacgcagctgacatgaaaaatttcagacctatctgtcttctaaatgtgtgctataagattatttccaaagttttgaataacagactggcgagttgtatcacaaaagtgataagtgattctcaatatggtttcatc

SEQ ID NO: 74230 - DNA, 1393 bp, Zea Mays
cgtgtgtaagtggccgtgttttgcctaaccttctctcttaatgaaatgacacacaactctcttgcgtcggcaggcttgggacatagttatctgttatgggcattgctgctacaagttaggaactggggagtaagaataagagattggttagcaggtctgttagtgtacagctggccattagggaatataactaaaggccagctaattatgggggagaagaaacagagtattgtcaatcagagcctccaagggaggacggtctggctctgatgctgccattgcttagtttagccattgttgaataatctcaaatcatcaataaatcatccagttccctagccttatcaccctggtatcagagccagctgttgctacaagttaggatctggagagtaagaataggagactggttagcaggtttgtaacgtttgttagtgtacaaccagccattaggggacgtaactatgggctggctgattgtgggaggaaaggagaagcagagtactgtcgatcggagcctccaaaggagggcgatctggctctgctgctgccgatgcttaggtttaaccattgttgaataatcctatcatcaataaaccatccagttccctagccttatcatgagcagataaacaaagctacagtttgtcaaaggaaacctgagagtccttagttgcacttgatgtgaaaaagaaatcattgttaagacgcatgggccaaccaagcttaaagcaatcagcagacctgcattataaaaaattcattatatcttttagtcatttgaaaaaatatcttttaatcaaaagctatacaataagaagcatagtatctaaccagaagaattcattgaggtcatcatagtttctccatgttgagtgatcagatgccccgttcttgttcttttgtgattccttcattaaataaatagagaaagcaatcaattgtaactacaaacattaaagctgtatggattgaagattgaaaagaagctaatgcggacctgaaatatgacattgtatattggcttcactacattgttaagaaatgattcatcatctcctccatatgcaggtcggactttttccccagtaattaaacttacagccccagagagcactccatatagctcatatgacatctgaaacaaaaaattgtcataactgttttcttaacgtgagttccacttaaagcaaagttagtataaaaagtaaccaggttatgctatctggaaaaacatataaacaagttaatcaacttcatgtttcgataatactattagaaacaagaccttagcaaacattcagatttcagtaggaccttcacttatatttgattttaacatcaaaagttcatcccaataccattcatatttttgaacgaaatggcaggagct

SEQ ID NO: 74231 - DNA, 794 bp, Zea Mays
aaaaaatgctactagtcaaaatatggcaggtccagcagcaaggggaaccgaataacatggcaatcatcgtgggaccaattgttcgttggtgcctgaaagtagagagtagtgttggtctactctcaaatgacgcgttgatcgtcgtgtctgatctcactgatggagtagcccgagatcttccacatgcccgcgtaaaagcaggtttccacggctttggccagacggagtgcaccccatgatgatgtcctttggtaatctatgatgcacatgaagactggagaacctacgtgcggtcagtgagcgagtgaggaccggtacgtagacctttgtttctgaaaacgaaaaaggcaaaccgcccccccccccccccccctgccgtgtgcaatctctagtaaactacttactggtcactagagcagagtacatgaccatcacgcatctgaagctgctagctaccagtgatcatacgaacaaagaaaaggacagcgcggacgacaggcccgcctgccccgttctcttccatgcatgcagggcagggtagcgtagcgcatcagttagttgcgaagcaaagcaaagcaaagcgtccgcagtggaatacgtctccttccttaccgggccaagtgttgtgttggttgcttgccgacctgtggcgtacagtacgcctttcaagtttgaacacgtacacgcgctggacgtacgctacttccccaggcgggggcggcatccatccatccatccagagtcactaacattggtgtcagattattccctacgttaatcccgaacgaccccca

SEQ ID NO: 74232 - DNA, 661 bp, Zea Mays
gtctcggtatggctcgtcatgttgcgggtcctatagatgactagtgcacttagttctaggtttgataggtcatgagtgggccgcatgcctaggggtcgataggccatgagtggaaggaggattgattctcccgttgtggctcgatgctcggcgcagttaatgtggtcattcaattatggtgggtcagtcctgggtcaggcacaaatccactcgagtgtcttcctcttggttcaccctaccccgcttctgacttcgcctcgcatgatccaggggtgggtccttctagggtggacctttccctcgtcctcctactaacttgtggacctaggggcttggggatatttccccgatagtttcccttgagtccccaagggatagtgtctccccttggtggcttcccccgggtcaggcttagattgctccgtctctctcagcgttcgagtccagagggttggtaggatttgtgggacccgtcattggtctttcagggggccagtcagtcactataagtagagggtctctccgctatatccttaatcggctttgtccaatgcatttttgcccttcaggaatgacatcttatcagaaagttgccctgcctgagtcctttaggggaccacttggctaatcatggatcatggcaagtgtcctgcctcacagt

SEQ ID NO: 74233 - DNA, 396 bp, Zea Mays
cccggcctcgtggtgatgccaaatgttatggcgcctgttccaacgtcggcatgcctcacgctgcgggggctcctcccccagtatagtaggctcatcgtcggagacaggtgtgtcctctattcttccctggataaacaagacatccgggaagaaagagcttggtgcggtgcttcgtgctccggccatatcccttgagaacagggcagtcagaacaatcgtcggtcgtgtccccgcagctacgcagtgtcgaggttattcacttccttttgtcaattgatctgagtccatgcccgagtgggtgacgtggacaaaggggttcgtcgcgatagaagtgcagcctcagtcggccgagccataggtgccacaatggtcctgggcccacacgacgcgggcgca

SEQ ID NO: 74234 - DNA, 795 bp, Zea Mays
cagaaaacttagagaagtctggtattctagttccctgtggatatggcacggtgtcgaatcggtggctataaggcttccgatacgattgccctgtacctgacacactaacaccgagtttgtccctgaacatcccagctacttcgtctctgatcctctccgccatggctggcgaccatccattgagtttgtgggtggaaatctcaggttgcctgacatcactctgtcggctttcctcccagggatgtttgaggtgtgtgttaggtgtcctattaatgtcaccaactcctgccctatacctctcaggctctcttgtggtcgaacagtattcagccctatgtccatgaggtggtatggtatgattataatgtgttgctggtggggcaccataatgttgctgcgatgaatgtggaaactgtgcatattgcgcagctctcggctctgcgtacgcatatccggacggtccggcgtaagaggccggatggtccgcgacctggccaaacggtccgaaggtatatccggaatgtccagccgtataaggtgctacgtgggtagtctcgtacccagatcgtctgtcgtaaagaactggacggtccacgatcggtccgaatggtccagggctgtacccggacggatcggtcatatatggcgcgacttgagcagtgtgcacgtggactcgtgtagagtcggatggtccggcgtaatacgtcggtcggttcatgccatatccggacggtccgacgtaagatggcggacggtccgcaacatatccggacggtccggcgtgatgcgccggac

SEQ ID NO: 74235 - DNA, 347 bp, Zea Mays
ccgaggccctccactttctaattcttcacatcccgcgatccttgacagtgaatggccacggaccgagctccggcgagatcgtactagccggaaagggcaacgactagggctctagcttggcggacacttaatttaactcctaaccaccatttcccctcaactaatttcaagattcaaggtctcattctccctgcccatggtgacagcgcgatcaacaggtaacaaggagtgttcccggcgatctgatgggtcctagcttaattggatcggtcgagaagcatcaggggcacataaggatactgaaacgaggaaccagagaacatgaacggacctgtagcacactggcc

SEQ ID NO: 74236 - DNA, 1247 bp, Zea Mays
aactgccgctttggccaccactgttgtgccgaagggcaagaaaataaaggttctgacccaccggccgcgatatattgaaccggccatagtgcctgaatttggcaaagggacttcttcaactgtcgaagcaaaacaagttgctcccgtcgtgcagagcgctgaagaatcgattgtagtgcctacagtcgggccagccgaagccaaggatgatacggctgaagagccaaaagtggaaaaaacagtgaaaatgccagaaattctgagcccaccaacagaggcagaattgccgaaagtgcaaaaagctcctgccgcaactcccaagagaaggaggatggctagcgtgctagacactgtcatggagaccacaaaagccttgacccctgctcctatcaagaaagttgccgaggctgtcaaagtccaggccgaagccgaagctgggccttcagtggccattgagacgaagcctgccgcgcctgaggataaaaccgagcaacagacttcggataccggcaaagcagcagggcagatcgtaatagaaaaagttgaagctcctgctcccgaagctccgtctgaagatattaattacattattcgacatgcttcgggaaagagaatatccaaagaagaagtcttggaagccaaacattacgcccggaaactgaaatatccagagggggccttggtgtttaatggcacagacgaagacgatttcctgtactgtctcccggataacaaagaaatatccgtttgccgggagatagccaaaagtatgggatttccgaaacttgaggaaggccttttggccatgtcgaaggatcatcttgctgacagccttgcatacaacagtataaaggtacagaagctgttaactttaaagttggaaatgaagtatttcattgtcatgcttaattctttcttttccttgcagggcctaattcttagtaatgccttgtgggcacaaaagaacgtcgaagacgaaagttgcacaatagctctcatcaaccttcgctcagaggtaattgagctgagacatgaaggtttggagaaagacaagattttgatttcattggtgagtaaaatgaaagaagatgaagctaaatacaatgctcaggtcgaagcccaaaaaggcaaggtcgaagaacttcgaaaaaaactcaccgaggctaatgaaaactatgcagttgcaaaagctagcaaagagatcagtgaatggacacaagctaggctagagaaaaatattgaagagc

SEQ ID NO: 74237 - DNA, 617 bp, Zea Mays
ctgcgacgggatagcacgctgagtagacgcggatgcgagtcgaggtggctggcctgggagtgggagaggcggagctgggactcaggcttggcttttatgcatcacgggtggagtccgcgcgggaaaatcgcctggtgtatcaccccgaaatacggaacggtcgcagcgcttggtcattccaaatcacggtgtttgttacgaatgccggggagcagactcccagatacgatggagatagaatttggcttgcatgatgatgtaagttgtgatgtcatccgcggcaaggggaataaaataatacaaaatagagatgtgggctggctgggggaatgtgggagtgggctgcaacgcaagtgaatcttccttttttttatttttttcatttattttcttccctttcttttctttaattctaagatcaatttaaattttgaattcaaacttgtgcctaattcattctaaatccatattgtggaatttaaataccaattttgggattatattatttatatttttatattatttctcttcttattttaaaaccctaattttgattgcggatttaatccaacttttagaattattattttattattattattcttattattttattt

SEQ ID NO: 74238 - DNA, 674 bp, Zea Mays
gtttgctgattgtcagtgtaaataaactgggggaaaaaactatttctaaatcccagtgcggcgccttatataaaaccaaacacacaggggagcacgtattgtagtgattcgaagacggcagaaaaagacaacccgtgccctgttttcgtccacacatacaaaattctttcccacatactacgtctatatttcttacttcaaatgtttacggaaacttcattcaatcattccaacaaagattatttctagctgaccccctcctcacccaaaaaaaacacaatttgcatatgctggtcaaaaataagggtccgcatttgaaatcaaaatcccagtcccgctttatgaaagtggaccggtagcgcttgatatgttctgacaacacattgcggccttgcaaagttgcaagtgtggaacgtggttcccaccaaaaagaggataatcccgactgatctgagccccatatctgatatcttcacactttcactgattggggaatagaatctgatgccatgtcgacatgaacgatacatataatatatgtaaagggacaaaaaataaaataactttcattgttaattaaagaaacatgtccatccaccaccgatcgctcccgctgccgacgctgcaccaattatactgttgtttggttcacgaaatgtaacgtaactaataat

SEQ ID NO: 74239 - DNA, 310 bp, Zea Mays
agacgtgccgatctgttaaaagaccagtttaatcttcgccgtgagttttagatccgacggccaagatctctcgataccccttcgcgatggtcatttttctaaagagtcctcgggaaataagaaaatagaacccgccgtcccatattgatgttcactgtgtctaggataagttaccagtgagtccctgcagttttcagtatttgatgccccatccagataattataaaatcaggaaaatgaattagaaaatgagtttttaatataaaaacaattcatagaattggtataattcatagaaaatgcatataaa

SEQ ID NO: 74240 - DNA, 712 bp, Zea Mays
ctaattccaaccccgacgaccttaatccctcaaccaattgcacaaatctgggtcggaaactctctgctcacgatggcgatggaaaccggagataactcaacgtgttctaggtgattcaaggcggtctagttcgatcgaatgggtctgtgagcaacaggggacatgagggaggctagaacatcacatagaagagcatgaactaacccgtattcgtctggccacaacgagatgtcacgtggcggtgttctgaccgatttgggggaaataagaaattgagaggctctggtggatgatccgaggcaagggctggtgcgttggatgcgtaaatacctagcggagttcattggggtggcaatttataggttccatcggcggtggcgtccaattttgcgaaggcgcgctggcggcaggagagagggaagatcactggcgcaagtgattcgtggctttcaccgtggcaaggcctctggcgatggacgggcttgctacacaggttcactgcgacatgctaatcttccaagacgcgtggcacatgatcgttaagcggctaacgccggtgaggatcatcccggccagccgcataccaagtgggtacgacgaacttaaccatgaccgagcccgagccaatccggtgccaagatcttaactccgccgcaaatatctcccctccagagagcacgaatcgaagcaatggcgcagatcacggcgcgag

SEQ ID NO: 74241 - DNA, 436 bp, Zea Mays
tgttgaccagccgacgccgcccctttttctcctcccccttcctcctttcacctcttaccctttcacttctttcagccgccgagcctacatttttcctctctcttcctctcactttcaccacaaaccaaagcccatttgtgccatcaaatctttgggagcttgttggaagattcgttcctctcggcttcctccatcacctccctcactctagttgggatttctgtggttcaatcttcggatcgaggtattaccttatttcatcttgtttttactcgatctcacccgttcttgattatctagtgtatcgtttcaaggatacattttttagtttaggtgcttgtaacacttagactatcctcttttgtctcgaacactatttgagtttagttgtttggtattgttcgttgtagttgaaccgctcgcatgaacggttgaa

SEQ ID NO: 74242 - DNA, 454 bp, Zea Mays
aacaactctaatttgagaagttatcaggcgctctaggctggttattcaagaggaagaagaagcttttcccgagaaggataacactaatgtcgaagctgaaaatgttattgccgtagctggaagtgatgacgaagaagatgatggcatactgagtccaagcaagcctagccatatcgagtttggcagatccaccgtgaaacctgatgacttagttttaatgaagaagcttggttatttcaaaaagaatgatgataacttgataaggttcgcaggtgaatagaaaattccagagtcgaaggatgatgaggtggtggttttcaagagcttcttccgtgtcgggcatcgattcccattgtacgagatgattggtaaagtgttaaaaagatttgagatatatcttcatcagctgacaccaaacgctacagtcaggctctgtctacatgtgggctctccg

SEQ ID NO: 74243 - DNA, 571 bp, Zea Mays
cttttctctgacagttaggcagtgaactccaccctcttgcaaatccttccaatctctgtgaaatccgatgaattcctttgtgaaatgtgttcccctatgtgccttaagcatccttgcaggttcctagctccttcgggagggcattcccacctcaaatggccatttccctaaaaccctagatccccgcacaccacgtgctcggtgaaatgcccaaaccagccaaacttgctcaaattgaacccaaatttttcaggctccttcaccacacttccagtaacctacttgccaaatttcacgccaatccgagatcccaggcttaaatttcatcaaaattcccgttttgcgcgatcgtttccgagtcgagtgtccaaaaccctatttcttcgcctaaattcaaaccaagcacacacttcactcatattgacctatataaacctattcgtgaagtatcggctcaatcccatatcgttttgtgcctcaatttgaattccaatcaccctatgtctctatttgtccgtcaaccgtcgttttcacggcttttgacttatcgatcgtcccgtctcgtgccatc

SEQ ID NO: 74244 - DNA, 452 bp, Zea Mays
gaaaaatgaaactgaaagtttacctccgatggatatgctgcactcggcttcgtatcctagcaaaattgagccacaaaagaaagagcagctcgttagttcttaatcaaatcatagccaagggaggaaatgagtgtaaggagatgtcactaccatggtagataaagaccagagctctgcactccgatttcctcggtgtacacctgcaggtgaagagcttgtttcctcgtgaattcacaaagaagtcttgccaaaaataacgcagtaatgtgttagcaaaaactggcttatactacaccgatggaatcaaaaaagatttttgttgttggaaactgaaccacccaagagaatcacagtaggactaacctcttcataattgataacttctttgtactgaacctgcataaatcagaaaaccaaatgctaagagtcaaggaagcaaaagaaacatgaag

SEQ ID NO: 74245 - DNA, 970 bp, Zea Mays
agtctgtctgtttaaaatactaacaattctcttccttttcaaaccttcggcacccttgtcaaatctttcatagtccggatattcaaaatttagcgcgtccatcatgtaattcaaccttcgttttggccgggtgctgaaggcagtagtcattagttggtcctccttcttggtataattaccaaggatttcgttgcacatagtttcaatcatttccagccattcttggcatggtttcttgaactctttctcaaacttgaaccggtagaggagccgaacaagttcgtgcttcttgcccacattcttcttcttgggcatcccccagccactagaggtcgggaatactctgtttgccaagaattcctgcaccaaatccctagtactgacctcggccgctaccactctaaactccacttcggctacatggcatggggagccaagctgcatgtggcacaagggcctcgtcattccgaagcttaaagtcaatggactcataaccatactcatcagcttctctatctttttctcgtctgctttcatgtaaaaccattcactcttccaaccagttggccacttggtgcagtagctaagaactggtgcctttgtatcctttcgatacgcaaaattgtagcagccaaaattttcatgaaggccatctgccctagccttcgtctggtaatgcagcttgtgcacccagcagaaagcttcggcattaggactcatcccctggcttcggagggcccagatgtagacactaagtctaacaattgcattgggtgtcaattgatgaaggtatatttcaaaattcttcaaaacctctcctatcatatcatagagagggaaccgaagccccgccctgaagaagcttttaaacacaataatttcatcatccttcggctctggaaccacttcttcgccatcaaaacgaacaagcctactctcgacttctccaaagtaacccaatttttcattg

SEQ ID NO: 74246 - DNA, 661 bp, Zea Mays
cggaggtcgttccacaatggctcactgatgtgcaaaacagctataggcatgatccggctgctcagtccctgatggccagattagctttggatcttttggctgttccaaggttcactcgtaataatggtctgattcgttacaagggtcatatctggttgggtaatgacaaaattctacagcaatggttggtggctactcttcatacttcactaattggaggccattccggcatccctattacctatagtcgcttcaagcatctcttcgcttggaaacatatgaagaccacagtccaatagtttgtacaaacttgccagacctgtttacaggccaaacccggcgtacccagggaaacttcaacccttgttccatttggggcctaggaaacaatcacaatggattttattgatggactgccttcctcaggccatgccaactgtattctagtggtggtggataagtttaccaagtatgctcagttcattcctttatcacatccttacactaccagttctgttgctcaagtcttcatggtaaatgtgtacaagctccatggtcttccgtcagccattatcttagatcgggatccggttttcaccagcatgttctggcagcttctcttcaaaatcattggcaccgatctgaaactcagctcatccta

SEQ ID NO: 74247 - DNA, 628 bp, Zea Mays
ttgctgctcgacgcaaaagtgccatcatacacatcgcaaaagctactgctttgaggctgccgtgaggtcacctcgcgtgaggagtgtgagtaggttattgaaattctacatcgagaaattactgcttcaccaggctccatctccatcggcaagaaaactcgccatcaagcacctctctctaaggcataccttagagagaaactggttccaaagacctcaagggcatacccttgaggaatatcgcgtcattcggtcatacacagtattaagggcatacccttaagacagatcacgctgcacgattatatacgtcgttgtagcccatcggaaaggtctattgcaaggtaagaacccccatgttactgcagtattccctagcttctttaccatcacagaagaataatattcctcgactcgtgttgttgatactaaatcagaaacaagtgctaaagtcgacatcatgccaaaaataattatactccacacatatgtataaattatccccggaaatcgaaattctatgttaactactgtaaaaaaatatttgtgtgctccatcgcaagaaattctccgtcaagcacctttctctaagtcataccttagagagaaactggctaaagaaacctca

SEQ ID NO: 74248 - DNA, 527 bp, Zea Mays
ctagcggagctcattggggcggtaatttataggtttcattagcggtgacatccaattttgtgatggcgtgctggcggccggagagaggggaggtcactggcgcaagtgattcgtggctttcaccgtggcaagaccaccggcgatgaacggacatgctaaggcgattcactgcgacgtggtagggcacctaggcacgtggcacccgagcggcaggcggccaactccggcgaggttatctggaccggccgtaaggcgagtgggtatggcggcatggcgaaacagtgtcccaagctcatccccggcgctagatttttcacccgaggatcgttatctgcgtttaactgggtgtgaatcgcgacgccgccgagaatttgggcgtgagatcaccggtggcgaggggggctgaacctgagatcttattcagtttactgcactatcagactttcatcaaagcgtctgacagaccgatttgcagggcccagatctcagatctttttgtagtaactacttaatccatctgtatcaaa

SEQ ID NO: 74249 - DNA, 1092 bp, Zea Mays
aagtagccataactgaatatgagtggtagcctctctgtatcccatcttgggtagaagtgtacgtctcatcagctcatataggaacttcactgcagtagtgaagtcagcaggagatcgtcgcgacccgtctgtgaaaggaggtctgaacagggctacgacgtgagcttagcgggtgcaactccaccgtgagggcgacaaggaggatccggagtgctgtagcatagactatggagcctagtcgatgactctggaaatccaaaaagctaatggatctgactggcatgcaaagtgacatcctctcgctcgaaacagaatcacatccactgatggtcaggatcaatccacacggtagcatagacggttaacagtgaaagcagtcctggcagataagtaagatgaccctctgaatcggcaccggtggctaacagaaaagcaggcagatccagaatcggcaccgctcgcaaagtgatctaagctgtcagctgtgcccggaaggactcctgagtcctgataccgaaaagaggcgcagctgtagggtccctctgagctggcaaccaagactccacgggtacatgtctgaaccgatatacccgggctacagtagcacgctgaagatcgagcaaacacggatcaacagccagtggtcgcacctcagtctcgttatgctccctaaagcgaggtggtggaatgagcggagtggaaatgggagcgggaggggtaaaaatggaagctggagtggtggaggtggtgggtacaacagaaataatggatggctttggagcgacaggagctggtgaagtgggaggtggagtagagacagtggtggaaggtgtagagggagcagtggagcgaggccgtgatgcaaggcgacgaactcgataggctatctaatctgaggagatctgcagctgtcctccttgctcagcctgctctgcagctgctgccgctgcaaatgctgcacgagcggctctatccgtacgacgcttcttcctgccctcctgctgctcaaggtaaactgtcttccctttgacctgcctgaaggggtgaggagggtcctcgtcatctcctccccctgacgatgagacattcttc

SEQ ID NO: 74250 - DNA, 564 bp, Zea Mays
gtccattgtttctgatcgagactccaaatttgtatccaaattctgggagagtcttcacagtgcattgggcaccaagctttctcttagtgttacttttcatcctcagactgatggttagttggagcgaatgatccaaaccttggtagatatgttgtgtgcttgtgttctatcttggaagggtagctgggaagatcatcttgcattggcagagtttgcttataacaacagctaccaggctagcatcaagatggcaccatttgaggctttgtatggcaggcggtgtatctcccctctgtgctaggagaccttgggagagagatccctggttggtcttgattgggttcagcagacttctgaaaaggttcgggaaattcgtcagaatattttggccgctcagagccgtcagaagagttatgctgatgtgaggaggcgggatttgaaatttgcagtgggtgaccaagtccttctcagggtatcacccactaaaggagttgttcggttcggtgtctccggaaagcttagcccgagatatattggaccgttcactatcttggcctgggtggg

SEQ ID NO: 74251 - DNA, 509 bp, Zea Mays
taaagccctaatgataattctgtatcattagcttatcggataagtctcaagtacaatacatctaaagccctaacttcgtattcgcctccttcacctcatgtgcccaccagtgtcggaacacccattatggccaactatatcttgagccatacctaaaaatcatgtttagtgtagtggcaagttcatactgcttgtgatcaataggttctaggtttgagtcctatgtgttgcatcatatttttctctttttttgtctttcttcagccatacctcattattattttgtcctccaccactggtgcctacccttaccgaatcctatgtgttgcattgtatttttctcttttttgtctttcttcagccatacctcattattattttgtcctatgcctaccctcgccgtctagcaccctcgccgtctagcttgcccgacatccttgaccatggtggtgacgcgctccgcctcctctacctcctccactgcctcattccctccatcgatgtcacac

SEQ ID NO: 74252 - DNA, 359 bp, Zea Mays
ttaaaagaccctagatctaatctaatgcgcacgacgccagatcgacggcttggatcttaaaacggtgaagggttatgcattctctaatctgagccattcgacaccaatccaacggtcgcaaacagctgccccaatcccccctgccggacgacagcacagccacaccgccacggcggcgccatcgccggcgaccggccaatcggcaagccagtggccccacacaccgtacaagtgatgcaaaatgaagttagggacctaaggaagctagtagggtcatcataccggagtattgtgcggcgcagagaattaatccacgacgcggagcagctccacggcggatggagaagtacggcgagcaa

SEQ ID NO: 74253 - DNA, 523 bp, Zea Mays
agaagtaaagtgtgaccttttggagagacatgaacaaacaatgcaggatcatgttcactagaagaaaaacctgcagctgtgatgacagagatgaatctctcaaaccaagcacgaggagcttgtttcagaccatacaatgcgcgacaaagacgacaaacgtgtcctgagggagtatcaacccccggaggaggatgcatataaacttcttcacgtagatcaccattgagaaacacattcttgacatccatatgggagatagtccaagaagatgaggctgcaactgcaatcaaggttcgaacagtagtcatatgtgcaattggtgcaaaagtctcatcataatcaagtccttgagtctgttggaaaccacgagccacaagatgagctttatacctctcaatggaaccatccgattttgtcttaactttgaagacccatttacaagtgataggaacaacatgcgagggtagaggaactatatcccatgtactaatgcattcaagagcagccaattcatcaatcatag

SEQ ID NO: 74254 - DNA, 751 bp, Zea Mays
gaatggccaatcctttgttcaaaagggtccataggaaaaaattccaatagtttacaattttataaggttgcatcatgaatcctatcctatatatgttccaaagacccccagggtccaaatgggtcaaatccactctatgcactgagtcaaccacacactaccatcaacgtacttacgctttttaatttatcctcatttctcgtaacaggattaagccaaggttgggtgtatgaactagaaaccttatatgttgttctaatccaacttaacaactaaggtgagatgaaaccctacaatctcaaaccaacctacacacggatcaatatataccaaatcagcaaatctaaattacgtcagatatccagatataacccctcaaagggcacgatgtcctcgtcattccaacacactcataactatagatgcccaactgggaatggaatatggattggtactaggcacatcacgacacgtagtgctttggcatgacacaagcactatgtaaatagtgtcagtgctggtatgacacgagataagtgtcatgcatgggccgtcactccatcacaattgactcgcacaagcacgccatgattaagtggtcgacacgattagacacagtttataggaccttagggcaactggtggcctatagatacgattgtgatatgttcatgtgattgtaaattgttattgtttcaaatataataagttcactctatacatatgtaagtgcaatcaaccctaattgagg

SEQ ID NO: 74255 - DNA, 538 bp, Zea Mays
cgatgtccttcgccgcccaccgacgtcggctgctggccgtagagtgatgcacgcacgcgagcgtgccccaccggcgggagcaccccaacgtgggcggccgatgtgccgccacctcccactaccggtgttaggggctcgaggaagttgggcttggccttcttcccatgcacgaccctcacatcgttgtcgtatgcacaaactccctcctttggagtcgcgtatgagccgaggaacaacaggaggatgccctcgtcgtccatgatcttgtcgacgtacaagtcgtctcgcctctaaaagccagcgtacatatgcacccgagaagcgagagctagagcagacgcgagttaggtgctagatagagggggtaggtaacaccgcctaggggagggagagaaggcaccgtgacgggcatggttgcgaggcaccgaatcaagaactcatcagctagaccgagccaggcaagaaaatgcccctcaagaaggaccacaatgggggacataacccttacctacacacccgataagcgagagccagattg

SEQ ID NO: 74256 - DNA, 780 bp, Zea Mays
ggctgctctttgctctccttcctagactgctactctgggtatcattagattagtctggcaaatgaagacgaggagaagattgcattcatcacactgttcagagccttttgctatacctccatgtcgttcggcctcaagaacactggagcgacttaccaaagggccatccagacatgcttagccaaccactagggcaagcgagtggaggcttatgttgatgatgtggttatcaagacagaaaactcagaaaacttcatcaaggatctgcaacaagtcttcaacagcttgagacgctactgatggaagctaaacctagagaaatgtgtatttggagtgccagccggaaagctacatgggtttattgtcaatcatcggggaatagaagcaaatccagaaaagattgaggccattatgaggatggaaccgccaagatcacagaaaagggtacaaaggctcactcgatgcatggcagcgttaagcagattcatatcaaggctaggcgagaaaggaatgccattctataaatcgctcaagaaggtggataaaatttggtggaccatagaagcgcaggaggccctgaatgcactgaagaagttcttgaccactctgccagtactcaagccaccacgccgagctacgtccggttagccggcagaagatctgctgctatatatttcctgcacgactcacatggtaagcaccgcattagtagtcgagcggacggaagaacgacatgcatacccagtacaacatccagtttactttatcagcaaagtcctc

SEQ ID NO: 74257 - DNA, 518 bp, Zea Mays
ctcactttggctcctttatcgaagtatgcacacttgaaagcccttccaggtaatgacttgggtactttcaccttgatcttgtgaccctatccttttcttgagctagtatatattgagccttatgacttgaaccaaccaaatgcatatgaatcactttgatggtttcaagtctcatcttcttatgttgcggtcttcaatatcacacaactcttcatagcttgatcagctttgatccttgcaagaagtctcttcttcactttagcttttggtacctcaatctttttgaccttctcccttgcttaatccctcaaattctttcttgccttagtccttggtataccaaactgactcgaagtcatgttcattgattaccaacttaatcaatgtccacccctcatcttcataaccttcttcaacaaagatcaacttccttagcatgacctatcttaagctttactggctcttctacttaatgtaagtacttgcttcttcaccttagctttggtaccaaagtcctc

SEQ ID NO: 74258 - DNA, 1136 bp, Zea Mays
aaaatgtatagcttgatctactgattgtaaccagaatgcagctgaccccacaaaatgcattgtagcaattttaacccaccattccttaggaatggcaaaaacatcaaaataagattcacactttgccttccacattttaggatggcggccatcaaattagggaaaggctaattggggtaatgttgcagccaagtgagattggtaggtagttaacataggatccacaacattaagcatatgagtatgtgatgagtgggtatgcatgaaattgggagtacctgtgaccggaggtggagtcagggtagtgaccaccccgaaaccatcactctggtgtgaagtagcatgatccagatttaccaaaggatcttgtgctgacgcttgaactaatagcggcaaatgatcgaacgccttcagtttaggctgtggagtgcctcgcccagccagtaattcatccaccttgtcagagagatgacccaaatcctcccatagattgctcatgtcagtttcaatccgaggtttccaagcagagagatcacctaccactgcggtattcttctccagagccactttgatggactcattttgcgctagcaaggattgaaggagttgggataaatctgctagattcttctccatggcttccgtctgcttctgactccttgtcttgtactgaggccgcaataagtacacctacggtttcgccaggattgacacaagaatctgataccaatttgtgagagcacttatgtggatttaggtagagcgccactctcggcactcgatttcctctcacgaagcactagattcaacaatggtgagtttacatggcaaggatcgccgccacccggacacagctggttctaccttcttcaccaagtccctcctcacacccactcactccaagatacataaaggaacgcactcactcccatgtaagctttactgggtccactctagcccagcaacgagcacattgggctttctcacccgacgcgccctgttgttaatctgcatgtccatctgcttgttgacacccaccttggtcgcatcgcgcgcaatgtttgtaggttggtgtttagagctttaattattctgcttgtacaactcactgtaccgaaacctgaaccgaatccgaa

SEQ ID NO: 74259 - DNA, 402 bp, Zea Mays
ggagattatcagtagggagaagacgatggtgcagaccagattctttgtaatggaggcatgtgaagtgatcatggggttgcacagcgaggggctggtgttggggtgcctcggaccctcggtctggactgtttctgcctcgttcgctttggagtttggacactgtctgcttgatttcaatcaggcgatggccttgtactggaatgtgttttcataatgattgctcatatttccttgtgtcattgtgccttttgcttttatatctaatacaaataacagttatgcccattttttggcttccatatattttttactaagtttgttgtcaattcaatactcccttatgtaccaaaataaaattcatttcaggccaatggtggattcaatggatgtattttatatatg

SEQ ID NO: 74260 - DNA, 514 bp, Zea Mays
aacatgtgggtacccgttaagcactgcagtccggctggaccatcgatcgaggttgtccgttgttggtgcacctaacgtgtaagcgtgcggcaatatggccctgtttggatccgctttttgcggattctggcgatcaaaagctgcttatctcaaccaaacgctcggattctcgtgctacttctgagacaagcgcttcttgtggacgctgaccgcggaagcaggtaaccagccgcgtctcagggaatctgactgctcatctcctgtttgccatgcgtgcccatcgtatacccgagtcatatgtttatttattcatattcataatttctttgttttgttttgtaaacatcattagcgtgataattgacatatagtagaggatcattgataattacgaggttgcatgcatcattatttgtgaaattacgtaataatgtgttgcttgtgtgtatttatctgtttcctttttaatcagaatctacaatctcataatctgcgtatccaaacacctagattc

SEQ ID NO: 74261 - DNA, 287 bp, Zea Mays
aggcgcacagattaaatcacccacagtggcgaagcggtacgctgcgcaggccactggatcaggaatgcacagtcacggtttaatggagtcggatctaatttgagtcgtgggatcgcagatctacgctcctgattcgatcacgcgaataggtacgctctcgtctaatcaccgccctctatcaatagatcgacgacggagtggttatcttcttcccaccgatgtctgagcgcatccgcgcgagccagtcgcggcggcaccacaccggcgacacagtgacctggcgccct

SEQ ID NO: 74262 - DNA, 1095 bp, Zea Mays
cgagtgtttatggtcagtttgtgacttgcaccatcagatcggaccttgtgattttgcatgtgtgtcgcagtcatttggttagtcgacaaaaggaattaaatggtaaaacaattgaagttcctagtaaaaatactcttaggatttttttgtagcaaatagatgttattttttggtgaatagaaaatgctttaaatgtatgatatgcacacgcctaggtagcacgtgtaacaagttgttgtggcccgatcttctcgtaggatctgcgaatttgataaattgtcgctacgtgacctggtgaagatgcagcgcaccacgaggctatccacgtgacgaactaccgagacaatcacccttccacgtatcgatgaaatagcccacacattcacgccctatagatgtgaaggcatgaactgggtgaaccgcagttcgacgttctacaactccctcaggaatcgaaagaacaaatgttgcaagcctctcaagactcacgcaaaactccacgagtttgtgtattctgaattcaataaaataagatctgtctttttaatgtctagtacaagatatatatagagataggggcgttcagctttgagtaaatggctacatgctcatgctctagaggatttcatggctggttcacgcttctttttaacttctcgcagcaattactaaaatgagcataactccttattgtgacgtccaaataatgaactgtttgatgggctggaaagtagacttgaagacgcttccatccacttatagaacaccatctaactccttgtattctgtacgcagggattcttggaattcgtaccatgtgtcagtcatctagcttctggttgcattcccatgctaaggtgatgaaccaccattttattcatgcacaccataggcttcttggttcagatgtccagaggcttgaatccatcttgatcccatgctggttcatacattccatcattcctaagtacattgaaacaagaactcaaaagcataggctcattcaacataggctgattattaaacataaggttagcgttcacctgagaatgaatttccttctgcaattgtttagctctactccttgtaattgga

SEQ ID NO: 74263 - DNA, 395 bp, Zea Mays
cagtggagagcggggcctgcatctccatgggaggctgtggagaggcgccatgcaccaagcagagggaggcaagtgccgagcgccatgggtatggagctccctgctcttgcacttcaaacagagaggagccgtgtggggagaagagggagaacaaaatgaaaatggctgggagaggaggaatgactgctgcttgatttaaagagacgtccttgccagccattgggcgagatgggcggcattgctgcagagctctgcacatgacagtctgcttgcaggtgatggcaggacgactttgaacgcccagttttggcattttctgtttggattcggacccggatcactgcagaagatttgttccttgatgtatactctacaaatcgtgtataaagattgag

SEQ ID NO: 74264 - DNA, 369 bp, Zea Mays
ggatgaggagtataaccagagcctgaaggtctagagttacctggaataggtcctagagcggcgacatgagcagactgaaagaaggaatcatcaaacttttttgcttcatcctctagagtcacaaagggcactccatactcctgctgatgccattcattgaggttctcagggtaggcaggaattggaggaggaggctgaggcatggggtgacccattgaggccgtgaagctccttatgtcatcatgaagcgcctaagtatggcggcggtgcacagcttcctcaacagcacgactgcgacacatggcgaagaccccggtgatacccttagccaggcgcacaaacaaaccctgaccatgaccttgacctctg

SEQ ID NO: 74265 - DNA, 802 bp, Zea Mays
cttgcctaaggatttgctggtaggcgtttccatccaatgagttagggaggtcgttgtcgatttgggccagcacacctccgacttgacttggagtttgcatgaatcgagcgaagtcaggtagcagcttacacagaaggaataattggccacatggttgaaggtcgtcacgctcgacatgcttgtgctggtgctcatgctcgtgcatgaaatcttgaacatcatgtcgtctcttccgtctagaattcatttgcttaaggaatcctcgctcgtctggggtcggatcacgttcgctggcgttatgatgacactggatgttctagcgtcggttccggtcatggcgcctgttgcgctactatgagtcttcccctgtcatggtggatttgtcatcagagacaacatcgtcttccactctcctgttgatgatgagctcatcacggaagtagagggggttgttctagcaccgtagccatggtgaccacattagtagaattgttgatcacgatagcttcataaagcttggagatcttgggtagccatgatccgcatgagcatgaatccatgtgggatgcggcgctctgggctccgacggaatctcactagcccaccaaacgtcctttgagggtaatgatgatgacgagccctaattggaatctggtgggggaggtcttccctttgtcgacttatagtggttgtcgtggtggtggtgttggtgtatgagaccgtggccccaacgtatttcgaggtgactattaggggcccactttggtcaaatgtcctcaattaatagtttatcagttatttc

SEQ ID NO: 74266 - DNA, 740 bp, Zea Mays
tgcttcaccgtcttattctttagttggtctagacgcttcttgggcacattggcgaataatatgtccttagttcttgcagtagtagtaagcacatcttgctttgagcaccttgtgagccaactttgtttgactggcgacagataatggctaattgggtatttgcatcttaaacagttgagcctaatttgattctcttatttgggtataggaaggaaagagaggatgaaaaggttgagcaaagacaggatatagagagcagataaaacccaactatctaaggttttacatagctaactgatgccattgtggacaaaagtcacacaatacaccaacaatcatttcaaagaagcaaatcaaacaagaacacaaaggacaatgaactcaagcataccaacacaacacaatccaattctactcattcaaccaaaacaaaaggtgagacaaggattgaaataagaaagatattataacatcaaggagttgggtaagaattatcaaggagttagacaagacatatttgttgatggccaagagtgaaataagataaccatgaaatattaaagtgaggataaatgatacaaccaaggatatgaagtgagttagggagaaagcattatcgaggagacaaaatagagaggcattatcaagtaggagtagggagacaaagaattcggtatatccaggtagttattgcgcaagggtggcaatacaatggcaagaaagcaaaagtataagaagtc

SEQ ID NO: 74267 - DNA, 765 bp, Zea Mays
aaacaataaggtcattccgcacaatcggccagcaaaacaatcaaagtcgtctgtaggaaagaagtgatccgtgtgggggcaaagaattgtcatctactcatatgtccccagggatatcgtggtactttccacctgtctacttatcgccgatgttttgtcctactcacatgtaggatagtgcggcgatgaatatgtattacgtgtatagtctgtttgtttattcggccatcaattacgtgtatagtcacagcgaagaagatgcaatcataaagggtctttatgcattagatttctattagatggctattgtgtttggttgaaagaggttgttgcttgcatcgacctagagttcttatttcaggaacaagatgacttgtgaaatctattttttcttgaaagacgttggtagtataagtgtttttggttcatgaccttcaccgaaaggtaggggcatatgttgaacactaaatttggcagcactaacattgtgggacattccgcgggcaagctcggacggtccagcccccggacagtccggcttgttaacccaaaccgttagggatcaaatcagttcgagtgagagtcctgatgtgttgcgagatcttccccatttattgcgttatcttgttagacttcgcttataatagggtatgtacctcctcccctataaatatgaaggggtatggccgattgagaacacacattatattcatgacttaggtctagatatagcatagctttagttgtattttctcaatctcaatc

SEQ ID NO: 74268 - DNA, 671 bp, Zea Mays
catccgaggctaagcccgggtagcaaacgcagtcacgactcgcctaaggccactttggcagaactgtccgcacccggcctcctccacctcttcccgcctctcgctctaaccgcgccacgttccacatgtcgtggcctccatccacctaatgccctccaatctgcctcctgatgcaattcacggtcccacacacccgacgccccgccccgagcctgcctcccaatgtcacctccctcgcatgtcgatccgaggtgtgaaatttggttgataacatcactaaacaatgatctatacatacacaagtgtcaccctgctggttgattacctcactaaacaatgacatatgcctgcataagtattactcgttgcaacgcacgggcatatacctagtataatataatatagcttatagattataatcatttagtaacctatggattattataatctaggtatttagatttagattatataatccaacatattatgtttgtttgttccttaacttatttaagtttaattatataatctagggtaaacaaacaaggtttaaaccacagtttacaataacacactgaatgccactgtcggtaccctggattaggggtaccccttactacggtataaaggcacgatgcctgcgcggctacccttaaccgcacggagaacaa

SEQ ID NO: 74269 - DNA, 557 bp, Zea Mays
cattgcgctagagcattcttgcaggaagcctcaactgcaggagtagcggaagaagatggtcgactcacgacatcaggcgcggcaacaacatcagcgaaaaagtcttcaggcaccatgacgccaggcctcctcattaggatctgcctggcacgaacagccttatccatggccttgtcgcacatcacctacataatgacgcggtcgtcctccaaggccttgatatggaggcgagcggtctccatctcctgagtaacaagcttcttggaagcacgcagctccttgatgatagaatctttggtagacaacagcttgccaagtcaggacacttcatattgggatgccctcagttcgtcgcggtgatggtccaagtctgacatggtaaaacggtgactcctctccagaatggtcaaggaagtgctggcgtcacagtatagcctatccaaattgtcatgagaagcaattagtgctcgttttcctcctgcaagcaagaacaacactaagcatcgaagcaagggaagcaagacagaagcagccaagagagtttacctcatatatgc

SEQ ID NO: 74270 - DNA, 749 bp, Zea Mays
gtttaaagaacagcttcgctaaggttggagcctattcctctaagcaaagatttatccgtggtgaccccgatggagttatccagtggatcagcggggaagccaaagcatttgaagaaattcttagtgatagaggagatttctatgcctttgctggttcccggggagccacatccatcttggagaaggctggttgcgatcatactaaggttttaacttaatcaaacttcgccttcttagttgatgatataaaaaacccttcagccgaagctactgccctaggtggaaaattttactccgaggtatgggctgaagggcgtaagagaagtgactgatgaagccatcaaaaggagagaaaaggaatcacatgatgcttcagaagaggcgaaaagggctaaagaagctgtcgagcgggctaggcttataggtgcatctattgtgttttagcttcggaatctgttttagcttcggaactaacaaacatacttcggtgcagctgaactatctcctcctccagagccatatgatccagaagtcgaccgtccctgaaggaggcgcttgagactattagaattgccaatgaagctgttgacgaagcagtcaataggctgttaaacgaagctgccgagaaggtcctgaaggaagactagaattttttatttttgctagtttattatcattgcaagaaacacttgtaaactatttgtgtgtatattgatgtaatatatttctttgtgatgcatgaaactttc

SEQ ID NO: 74271 - DNA, 725 bp, Zea Mays
ggagcacaagcagcagctgatcaaggaggccaacgcgaagtacctgaccattttcaaggtggacaggaatcagaaagtcgtctagcaacaggagactaacctagcatctcaatgatctactgcgactacccccaatgtaagtaacacgaatgatgtccaagctcttcgatcttacctagatgaacatcgggaacaaatgcaacaaatattagggggtatgcaagatcattacagtaggctagtgcgtgcatttgataaatcagctgttactaattttccatcgcacgatgttgagactaaagaaaacacataagattcatcggtcataaatgggcacgcctaatataagccgctttatggtatgccgatgaactcctactataccggacaatcacatcctccaccacccgtgtgggacaagcccacacccctgcgtatgaccggacatccagacatgagtccggaccgtccggcccagtggaaactgatccgtcctctgcgaccaaccaccgaggtccgcaccagggacaacatacatgatcagaccatccggctatacacgcaaaccgtctgagtatatcactgtatcgtccggatattacaccagactacctacgatggggtatgctgaacaaaatgcagattgttaccagaaatccgccttccatccccaaactagcttctctctagtacccatggaccctcaaggtcatggaatgatccca

SEQ ID NO: 74272 - DNA, 446 bp, Zea Mays
gtgaagttgaaataatgtatctgaaattattcacatgtgcttttcttttcgagatagcaaaatgttgtgaagagatttcacccaatcactgaaagaaaacatgtttcttgttgatggctacaatggtttgaaaacaaatcgtccataatatgttggtttagtggtttgcctgcttgtgtgagggcaggagggggggaccatagtattagtagtaattcatttcaaattcacataagtttttctacaaacacaaggaggatatttgttttttgatttgttttgtgcatcgtagtagtggccaatgcctcattctttcagatctctgcctctctggtgtctgacccgtgaatgcctaggcagtaggcagtaccatgttaaagaaaatgtgatattctccatgcctttggactaaagttaaattttattctcattttattcaacaaaac

SEQ ID NO: 74273 - DNA, 805 bp, Zea Mays
ggggccaaccttcgaattcttgatcagtaacaggcccagagcccatgtgttagggcggtctcctgagccttgccaaggctcgaccttcaaacccctgagcagtaggtgatgtctctcctcttccttctagaggaaggaagcccgaggtgggacaccctcttctgctacatgcgaagtagtggaaaaaggagggagaggggcgcaccttttgatgtgtttgtgtgaagcgacgctggttggctaacattatttcgacaagaagagtgggcatttaatgagacaggacgctttggctcacaggccaactattgcggtgcacgtgcgcgtggaatttgaagtgacccatccctctcttggtcttcactcgggacagctcagcccacgcttcggtgactctgcccgcccctataaattcgcccgagagggactcttcggttctttacctcccgctcttgctttcctgccctagtcgccttcttccatagtcgcaaaaaactcctgcgctcttctcccttcttcttcctcagcttcgatggccgagaagttgagcgttcttcctccctgcgacccgtggcccatttccttggtcaccgacgaggatctagaggcgttggtggatgtcgggctgcttcgcccccgctcctacggaccatagcttgagtggtatgcactgggcgacgagcaagagccggccatgcctacggggtatgtggtgagcttcaccgccttccacgagcagggttcggggttttggcgagtcgcttcatgcggacggtcccgcactactacggggtggagctccaca

SEQ ID NO: 74274 - DNA, 547 bp, Zea Mays
ggattgatgaacttgaaaatttgttgaaggaaaaggacagcctactcaattccaccgaaggctctcttgctgaagctcgggctcagaatgaaagattaagcaaagagctaaaggaagctcaaacacttttggaagaaaactcaaatcggttcagccgtgagtctgaagctttgaatatgacaattaaggttgaagctgaaaagaatcttaaaatgagtgaaacacttaaagctcttcggaataaatgctttagctttgcaactcaatgtacttctcggctaaaaagtatcttcaattctatcggagccatgtctaaagaagccaatctttctactgaggatatccccgaagcacttggatatattaagaaagaaattgatgttcttcacaaagttataattggtcatggtgatttttgtgcgctagtggcttctcgtggaacagctgctgcttttgtcaaggctgggtgcaatcacgtaataactcttaatagacaaaactttagcctctcatcgtccgacttagttaatattccagccgaagccag

SEQ ID NO: 74275 - DNA, 615 bp, Zea Mays
aaacagttgtgtgacaatgtactcaaagtctcattaagaccaaatatagataaatatcataaataccatcgaggatggattttcaatctagccttgctaaactcgccagaatgctatgtctagaacaaaccaaaataaccagaaccaaaaccaaagtaaaatcggttcccaatatgttcaaaccaaaataactctgcccaattcagttcctatgtttggttaaccgaaggaactgaggcccagtagataggaggcccgtgaatgaagaggcaacccaaataccatcataaacaatgcacacttcaaaccctagagacatgcacatccacctcaaactaccatacacacccatcaccacactagttcccccatccgacttccccatgcaagatgccactatggatcccttcctagttctttgtctatgggatcttaggagcatgtggtgttgggctgttggcttgacactacaacaggaaacacagcgatatgaatagacctcccaagagcacgggcggtggacctcccatgagcatggaccgcgatggaccgacgaccccctttgatatgtagggtggaggtctagcgaccccttgcagaatcggtgagccaaat

SEQ ID NO: 74276 - DNA, 482 bp, Zea Mays
attgtatgaatatggatgcaaggatcaccaccctatgtgatgagttgtgcaagctgaacctagaagtcatttcctccagtgctttaagttatatttcagtggagcccacattacaagagcaaatagtcatggcacagattggagacaagggtgttcaagtcattaaggaaatgatcacacaaaaggtggacaaatacaaatgcttctgttaggacatcaaaggaatcctatggtttggagacagattggttgttcccaagaaccctgagctcagaaagaagatattggaagaagctcacctttcaaaattctccatgcaccacagcagtaacaagatgtatcatgatctcagattcctatactggtggaccagaatgaagagggaaattgctaagtatatatccgaatgtgacacctgccagagagtcaaggccagtcatttgaaggtagcaggcactttgcaaccccttcccataccatct

SEQ ID NO: 74277 - DNA, 664 bp, Zea Mays
ttgacccttcgtgtttctgccactcttcgccctacagctcacatattctttcatgaggttgctgaactaaacatattgctgcggtcttggtgtgaaagcaacgatcctttgcgcaaggaaatggcaaaaaaaatgttggcaaagtacaacaagtattggggtgatcatactagcttcaacattctcatctttgtggctgttgctcttgatccgaggtacaaactttcaaactacaccaagattgctaccttagagatgtttggtgaggtccatggagaagtggtttggattaaaatgaatgaaacactcacaaagttgtttgaagagtatgggagaatatatgctccaagtgaaaaggatggccagaccactaaagcaaaaaacccacaagaagaagaagatgaaggtagtagcttgatgagaacattggttgctaaaaggatgaagtcaaacaattgtggtgtcagtgcttccaaatcagagttggagaagtaccttgctgaagagaatgaagaacatactagcaaatttaatatcatggactggtgtaaggtgaattctacaaggtttccaattttagggtgcttggctcgtgatgttctagccattcccatctccacagtcgcatctgagagtgcctttagtactagtggacgcattttag

SEQ ID NO: 74278 - DNA, 749 bp, Zea Mays
cgcagagagagaattacacagtgatcgcccaatccgcaaaaaggtactttatgcggggcactgttcacctatttatagggaatcatacagctccatataaatttacacttatgcccttaagaattacatacaagatttacaaatggcacagggataacattgtcttttgtcttcggtgttcatgatgacatcttctccttgcactaccttctcattgttgttatgacgaagctaccttcgttactcttccatcattctatactgaaggtagtttgattccgaagctccttcaatgcttgacaaatatactgatgaccaatggttagtccgtgttttttaggaccttcgaaggacgaaggcccccaacactgaacccttgggcacactagcggttacctcatggtggaatccttcgcaaagtctttttcaagtatgaattcctcttacgaaacctacggtcatttgttatctacttaaaactagagctacattagcataccaatccatacttgagtacactctacaatattaggttacatatgtgttgaaagtttcatggatgaacttagtagtataactaaaattgagtatatatcttcactccctcagctctattggttttctaacacaacacctatttagatgcactatatataatatctctatccagttgtgataaatttatcaatcactctgtggtagctaggtatttcaagttttattatttatattttttctaatagatcata

SEQ ID NO: 74279 - DNA, 294 bp, Zea Mays
agaccctagggggttatttgcaaaatgtgcacacacttggactaaagtgcaaaaaccatgaaaatagggtatattaactcatatggttcacatgtttggagatttaaaccctaagtttgggtctatttgtaaaaagccacatttgagctttattgggattaagtctgaaattcagagaattggctcaacttggaagctttgtaacttccaaattaggaggagtttgccctaggtcagtacatcaaattggtagagctatgtaaggagagtaactttgctacatagattatgctt

SEQ ID NO: 74280 - DNA, 395 bp, Zea Mays
ctcaacgaagaggtagatttccttatgaaaccgaacttcggtaaataaacgtttgtgtctttgtgctgtattgtggttgcggtttatttctcccttccctcttctagttctcttgcttatgcttgattccaaaatcaattgtgtcgctcgcaagtaattccaatcatgttgagcaacacttgcaagaagaaatcctctccctcatttcgatcaacttgtttctcgttctaacgcctaaccgggggttgagtttgtgtgcaacctagcactagcagtcaccttcttgatggagatattgtttatggaagcgctcgctggacgacagtcgatgcagtagattacaaaaggttcacaagcatttgatcctgctggaataggatcatagtttgtagctg

SEQ ID NO: 74281 - DNA, 1378 bp, Zea Mays
atgtagttaagagacaatatagagagagactcgtgtagagatggactcttcgcgaagagttcgtctcttgatttctttcacttatccccttagaggcccctcaagagaccccaaaattaatcagattgtacatgccctaaaggcaacaagtatgttttcagaagttatggcatcatgcattaaatttggatgtgttaattgacttccaactggaaccacgtaccattgatacaactagtgtattatttgtatatacattatacatgcatgacgtgtgcaacccttttgtacatatactacaatcacataacggggagaaattaagtgaaaaaaaagtgaacgtgcatgagatgtgggaattagagatatcacaagtgtctgtgcctgttgactgttgcagatttctttttcttcgtcctagtacggtgggaattagagatatcacaagtgcctgtgcctgttgactgttgcagatttctttttcttcgtcctagtacggtggaagatcaagtctagttcatgttagaccatgcatgttctaatttgtcgacaagaataaacagaaggaattggagggggaggctatccaaatgatgcacagatctgccacgcatgtgctattgctctggctgcccgatatctggatcatagtcatcatatatgtttttagaagttatggctttattaaatttggatgtattaattgcctttcaactggaaccacacatcgatacaactagaatatgtgtatatatattatacatgattcacttgtatatagatactacaatcacataacagggagaaagtggaaaagataacgtaagatgtcacaagcgcatagggcctgttgactactactggtttattttaaatcgtcctaataatacttagtgtaagaaagtctggtccacaatagaccatctcttaattagtctgtgtgacaagcatatacacacaagttaacgttgatgagaaaaggaatcagaggcatcggaaaatatgaacctggttatattggagaggtagtctctactgctccgaatgatgcacacatctaccacgcacggtgccaatctggatcgcagtcatcctagaaacgtagataagatgaggagtccgataatggttatgcagtttatagaatatagtagaacgtgggttcaagtgcacggtgctgtcggccttggcttctgtgacggaatcattttgttatggcgcattttgaaagggtaggatacaagtacgactactatattaagtgctaactctagcaaattaggaagatagatcatgcatgttgtggggatagcttatattttttacttagccaactcggcgccctagcgcatcggactgttcgggtgtgcaccaaacc

SEQ ID NO: 74282 - DNA, 880 bp, Zea Mays
gtaaagaatcctctccactgtttctctgtctcactgacatctgcactaaagtccctcccctttctgtttctttataacccgagatccccgaccatggacggcagagcaatggctccggtgagcccgtaccggtcggataactcaactaccggtgctccagtgtggtgtatacctaattcgacccctaatgatcattacccctcaatcaatttcaaggttctagcccctaatctctctgtccacggtgatggcgcaaactgtggatgaaccgaggcgttcccggcgatctaaggtggtctagttcaattggccaggtcgagaagcatcaagaggacacaggaatgctaaaacaagagcgaggagggcatgatcggacctgtggagagctggccacgacgagctcacacacgcggtgttcttgacagatttggggggaattcaaaattggagcgtctggtggatattctgaggcatgggcttgtgcgttgggtgtatgattacctagcggagctgatggcacgctggcggccagagagaggggagagcactagcgcaagagctacgtggctttcaccgtggcaggcttaccgacgacgaaccaactatctagagcggcttactgcgacgtggtgaagcttcaaggcacgtggcgcccgatcggcaggcgcccatctccggcgaacttatctagaccggcctcaaggcaagggggtacggcggcccgccccgagtctcatccgcgacgaagattttttcaccctgaagcgttatccgggcatcagtgagcatgaatcaccacggcggcgcgaatctaggcacgggggtcaccggcggcaaggtgcactgaaccaaggatcttcttcagttcactgtactatca

SEQ ID NO: 74283 - DNA, 762 bp, Zea Mays
aaggatcaatcataagaaattataggagcaatcatgggaaaattcacgagcgtaattacaggagcaatcatctcgctaacacctcccatagtaggaacaacgttagagcggacaatcatgctagactgaaactccaagaacaccatgaactacatctctttggcgaagatatagacaaactaggtggtagtcaagagtgagcacctagaccgcaccaacgatgactcgcccgcgaacgaagtgtacatcgaatctcatcatgttggtacgctagtgttacaccgacttagtcgagagataaactgcattgatgttgtcatagtagacgagggtggtacactataggtgttggtgaagttcatgcaagagttgttagagtcaggcggcctcagcaatgtcgtttgcaatggtgcagtacttagcccaggcactagagtggaagaccgtatgctaacgcttgttggaccaggagatgaggttgtcatcgaaggacatcgtatatcctaacatggacatctggatgtcggtgcaaacgacctagtcactgttagtgtagatggtgagggtcatagctgaagagcaaccgataaacaacccaagatcagtaatgtcatgatggtagcaaagaatacgcttcacgatagtgaggtgaggttctcgtggttcatgcatgtggagacaaacctctaaaccatgtaggtgatgtatggcctagtgaacgtcatgtactatagtgccccagccaagctttggtagtcagtc

SEQ ID NO: 74284 - DNA, 580 bp, Zea Mays
gagtcaacaaaagccggtggatagaagtaagcataaccaacccttcaagcaatattcatgattgagcatcacagaagaacagtgaaacagaattctaagttatcagacgacagaccatgttttaacactaggacatgggcgggcggacagcacttctatcagaaactgaaaagaaaagggttggtagcatgcagccatacaaatgaaagcaagatagtgatcctgctgtgaacgaacccaaactcctgttcctttcctataggctagccatgagatatacaatggataacaaacttggtggcgtaagtgtcaacatcaaacccacgagaaactagctgagcaccttccgcactggaacagtgcaaagggattataaaaatcaacgatttgagttctctgggccaaaagaaagcaggcgtgcaatgcatacatttgagctggaacaattgagtccagttgatgctgctacgcaacaataagcagcagtaatgataatgccctcaggtttgaagtgcggaatttaaggcgtgaaggtgtgacagctgaaagggccataaataaaacttcgcataaattcgtt

SEQ ID NO: 74285 - DNA, 551 bp, Zea Mays
ttggaatttgaggaaggtaatcatgtgtaccttaaggtgtcaccacttcgtggaatgaggagattcaaagttaaaggcaaattatcccctcactttattggacccttcagagtttttaggcgagttggagagatggcctatcaactcgagctacctgataatctatctgatgtgcataatgtattccacgtgtctcaacttaagaagtgtctccatgtccctaaagaacaattaccaatggaagagcgcagtgtttagggtgatttgacttacacagagtaccctatcaagattcttgatacattgactcgagttacaagaaataaggtgataaagatgtgcaaagtgcaatggagtcaccatggagaagatgaagctacatgggagagagaagaagaacttcgcatagattttcctcatcttttccctagtccttcctaaatttcgaggacgagattctttttaagggggtaggatttgtaatacccaaaaatgtaaaatggaaacatagttggattgcatacatgttcttacatctatttattatcaca

SEQ ID NO: 74286 - DNA, 491 bp, Zea Mays
cggcagtactcaccaactggcggccgagggacaagctagcagcatccagatggggaacgacgatgtggacagatttgctcgtagatgcgcatggtctacaccagcgtgaaggcatgtgtaaagtactactataggtaaatataatgccatgtcttgtagagtttaggtaaacgataagctcgccgccaccgatgcaagcccctccgtcatcgacgacctcacagtcaacgcgcgtcaccatcgagcatcgctccgcgtggcttaaagcattgtcaatctcgtgccagcgagttggcccacagctcgtgtgaaggcgtgcatatggtactactataggtaaatacagtgtcttgtcctgtacatttccagtaaacgatatgctcgccaccaccgacacaagcccctccgtcctcaacgacctcatagtccgctcgcctaaccatcggacatcgctgcgcatggtctaaagtgttgccatctcgtgccatcga

SEQ ID NO: 74287 - DNA, 363 bp, Zea Mays
cccgatgtattccctagagatttaccaggcatgccacctgaaaggaaagttgaatttgccatagagcttatcccatgcaccacccctatttccaagagagcctatcgagtatccggactagagtcggtgtaactcaagaagcaaattgatgagttgttagagaaaggctacatcggaccaagtacctcaccttgggcagccctagtgctatttgtggagaagaaggatggcatgaagaggatgtgcaattgtttatagagctttgaatgaagtcactatcaagaacaagtacccactgccttgaattgttgacctatttgatcagttgagaggagccagtgtgttctcaaagatagatctgag

SEQ ID NO: 74288 - DNA, 745 bp, Zea Mays
aaaggggctggagggggcaaaaggaaaagggttgtaagtattctgggtaggcaagctacaccatctgttaaggaggaccataaagcttcgacgaaacagaaaactcttccagggccgaaggttcggctcctgagaagcaaaaactccacaggatatcttctgttgatacgaaggtataggatgtgccagagaatactatgagacctccttcaccctctacttctgaagtatcgaaaattctgaaggtaatgactgaatccataccatttgcactgctaagtcctctaaggttagatctgactaaccttttacaatcaaaggaaaccgctctggctgcggaggagaaggtcggggtgggggtagaagaaacgatggatgataaatgtgatgcaagcgattgagcagacgccgccatcagcttcggcggcaaaagcagcaatgcatgtcaatacaaaagatgtcgccggagccgaagctgaagaactcgcaaccataatgtcggaaatcaacatactcatatcagatgtggttgccgaggaaaacatggccgcagcgcctgataagggaaaaagaattgaagatgcctcttcagaaaataaagaatttgaccttcggcacctaggtggccaagaactttccgaagaagataaattagagttaaaagagttctctatatcctgtgcttaccagcccggatccatactcttcgacggggtcgacgaagagattttgggatgcattcgcg

SEQ ID NO: 74289 - DNA, 571 bp, Zea Mays
cgcttcttgagggatcgcgccaccgaagtacaagatctctcgcatcagcttgctgtcacgaggcacttgcatgtcaagtctggacggtccattctgccgccactgcctctacttcctctaccaccaccgtcgccactgattcctctcccaccgacgccacctctgcttcctctcccaccaacgctgctctccactccaccgccaataagagcacgtagtcgaataaacgcaggaaacaactacgaagcgcgggaacgaatagaccggggaggaaatcttgtcacggaaaattgcgggatgctaggactcaaatacgggacgcgtgaatatttgggagaagataggaaaactgttggatgtggtatttctgatttctatggctaaaacgagttttggggtatgtttatgtcgctttttagacttgctctaagatagataagtctagtggagaaaaccaacgtggcacaagacggtccccacacaaccacctcggcccgacgcttctaacgacctctgtcctcctctagtgacctttgtcctccgttcaaagtactctcacaaacactggcgg

SEQ ID NO: 74290 - DNA, 596 bp, Zea Mays
aaagttttttgcacctttggcagttttgcctctgtcggagggctcaaaatttttggcattcttattatttcttcagcttttggctctttagctttatcaaccttatcttcgattggctcgactgcatgcgtcttcggcattacggtcggctcttcagcgctctatgtaatcggagcagtttgtgttgcttcggctgctgaagtggaccctgcgccaaattcaggcacggggaccgattcaatataacgcggccggtgggtcagaaccttcacctttctactcttcggctcaggctcagctggggtgactgaagcagcaatcttcctctttttctcttgccctcgcagcgggtagcggtaatcagggtatacaaagccaatagcatcaaataccctgtttagccttttcttctccaggcctccgaaggctgcggacaaagcattatcttcaactttggagtatgctccaagtagttcatcactagtagcttcaatgcacttcagccagtcgtcgtttggctcgtcaaacttctccctaaatctgaaggtatacttcagtcggactagaccaccatcactagagtcggtgatggtctc

SEQ ID NO: 74291 - DNA, 408 bp, Zea Mays
tacacatctgaatgggagagagcccccatcttacccggcgcatcaggatgacaggtgaaccacgggtagttcgctgttacgaactccatgattcgcacaaacacgtgactgcgcattcagtacctatatttagatttaacttattatgcaaacgaatagatggacgatgcaaagaaagtaaagattttttgttattcatactgatggcagaaatgttgctccttgtaaatggggttgggcccgagtaatctgccatgattcaccagtgaacggtggtgtggtccctattcacgacgatatggccgggcacaaaccctcgcctccttcatctcctcctttgggactcctcttcgtggatgtggtgctctaaagcatccttttcatcatcgaacatgaactcgtcacttt

SEQ ID NO: 74292 - DNA, 330 bp, Zea Mays
ttttcttgctcgaagctttctgactttaggaggagttcactgtttaatctggcaatttcggcttggacctctgccaatgaaccctccattgtttgaagaacaaaatctttcttttcaagagaagcttcatgatctttgattttactttccaagccttcagttataacctcatttttcttatatttgaggtcctgttgcatcctcaaggctttacttagtagcatactttgtgcaaaataaccttcatcagaaatcaccttcatcgcaaaacaataaaaagttgagggaaaaactttaccttaaaattagaatagaataagctgtcgacga

SEQ ID NO: 74293 - DNA, 784 bp, Zea Mays
cgctggatctccttcgtctcatgtggatttgtatggtacgaggcatggttgggaagagaagcgtcggggatgagatccatctaatgctcgatgccacggagcagtggaagacccggtggtaagtccatgggaaagacatcagcatactcttgcaaaaggttaaccacagcagggggaatatctaaagacgatgcatcatcaagaggaacaagcatacgtgagcatacaagtgcataactgggcatatgagcctcatgtaaatcatcaaaatcagcacgtgtagcaagtaaaacaggagcattctactttatttcagatgtaacaggtgcggctgatggagatttgacttgttgtgcagttttagcagccctactaagatcatctttcagaatttggttaggggtataactattttttggcctttaaacatgaaagaataatgattcaaatgaccatgatgtaaactatcagtatcataatactaaggtcgacccaataacaaagagcatgcttccatagggataacatcacaatcagcataatcagaataagaccccatccaaacggggatacgtaccgagcatgttacctttattttaccaccgtcattaagccattgaatgtgatacggatgtgggtgtgtgcgagtgggtaaggataatttctctaccaaagctgtacttgccaaatttatgcagctgccactatcgatgatgatacaaatcgaccgttctttcacaaatcacaacacccttggtatggaatagagtgtgtcgcagatttt

SEQ ID NO: 74294 - DNA, 438 bp, Zea Mays
atttatgttagtgataccctcatcaatagttcttctcctgctgccacgggtcggttacttggacaactacgagatgattctgtggccaaggatctagggccggtgagctacttattggggattgaagtgtgccatcacactgctgggctcactttgactcagcggaagtatatacatgatctcttattacgcacaaacattctctcagctagcggcgttaccactcccatggtaccgatcgacaagatttcatccacggatggtgactacttatctccagatgatgtcaccaaatatcagagtattgttggcagacttcagtgtctatctttgactcaccctggtatttaattatgtgttaattgggtgtgttaatatatgtcatcaccaactacggtttattggtccacagtgaaacatattcttcgctatcttcgc

SEQ ID NO: 74295 - DNA, 1039 bp, Zea Mays
tatcccgcttacttatacaccagcatcagtgattccacccgggtcacaaacagaaagattcccaatgaggatttgctgagccgattggatatgattctaaggggcagggtttcgaatgctggtgctcctttagcttactctgcgtgtaacctgcctccaaataggccattctctgaatttgcctccaaccctcctgctcgtgatgctagctcgggccatagagtgcgaccctcccctgaggatattaaggcctcgattgccccacttcggagtcttcccgaggctgagaggcaaactcactttgaaatgcctgatagcaccgatgatgctgagatggacgccgtgcttagcctgttggctagggaatcgtctgactctacctgtactgagccgatggccatcacgactggacaagagtttggcaaagatgtggagatcccaaaacctgaaggtgcccaccgaaagcgttcacgccgagtgaaccgcccggctgcacctgtcgaggagaaaaataaaaagaggcgacttcggcgactgtcgtgcctggatcaggatgctggtccttgtatgccgatccttggcgatgttctggtggacaccattcccgaggttaatgctggaggttgtgatgatgcgcgggctgctggcggcgtgcttgacgaggatgaagagaaagaagaagaagaaattccgctgatccacaagaacagccgtcactatagaggcagtgacaggggcagtgatattccctcccaagctttgtcggcactcgtcagccttcagggactttcaatatcggactttgatcagacactggaagaggtcattcctgaagacatcttattagagcctcctgaggctgacatttcaaccatctgttcagaggtcccagatggtggactttcgctgcttgattctgccgggcaagaggtaacccgggtggtgtctcgtgcatcgtcgaccttggagggcagtcttccatgcaaaaacattgatccgagccatccaactcctatggaggtggctgaggggccttcag

SEQ ID NO: 74296 - DNA, 2206 bp, Zea Mays
atccttcatccaacggcccggcctgtggacctggacggctgtggaaatgcctgcctggtcaaatgcccgccctattgccgcttcccctatggccttggcaagtcaagccacagaggaagtgcagacaggaatcttgcaaaacgatttgatggatgatataaaagcaaaacagcaaaagtaagataactgaaactaaaacaaccggggtgttgaacttatactctggaaatatctacgtggatgcgtcaggcacctgaagaatatcacagtgatgtaagtacaagggtaactcactagctcctatagttcctaaactgcaaacatgtcaaaactggcacccactctagcagtctctattgactacaggaacatttccctcccctgaaaatgtggaacccagacgagtccctgaccgagatcactttaccggtggcagcagaggcgtgctccaagaaagagtgacagtccccacacatgcggatgttcttcacgacgcggattgtctgcccagggcctgccatcagaagaccgtacattgatgctagcttcatgctgtggtacatcaggaagtgcctcttctggtactcctcgacgtcgtgcagaacaaaggtggtgtctggctcgtacccggccttgatgcactcgaggattagcacatccaggccagcgtatatgtccctggactgtgggtgtgatttatcccgtgcgaaaaatgagtggaccatgttgccatgaaacgtccagctcctggccgggatcttgcgcatacccttttcatacatctctagccttgtgttctcagaggagcgccaccttgctgattcagatagtaggtttgaagtcagcacgtacgtggacgggtcttgtggttccaatgccagcagatgcttcatggcccgcctccgcacagccatgttggagtgcttgctgcagctgtctagcaaagaccgccaaactaatgcaccaggctgcaatggcataccacctataagctgctctgcctcgtcaaaacggccccagcagccaaggacataaacaaaggctgcatagtgctccatggctggttcaatgccatatgtgcttggcatagaaagaaagagttttctgcatttgtctgtggagtctgagcttgtgtgactgcaagcagatatgaccagaagaaaggtaatggaatcaggcctgaccattgatctctccatctcagaccatatcttcaatatatcatccccctgatgaagaagaagatgggcagtgatcattgcattccatgacaccaagtctcgacaactcatccgctcaaacaaactgattgcatctttcaactccccacacttgccgtacatactgataattgcgttaccaactccacgagcgctcagaagcccggattttgcagcaaaagtatgcatttgttttccaagttcagcaaaacctagactgccacatactccaaggacagaagtcaacatgaactcatcaatgaattctgcaccactgcttctaaacatctgaaggaaggtcgaaagtgctttctcatactcaccacctctgacacttgccagcagtagagaattccaggcaatgtgaaagctctcctcatgctgccattgctcaaataacagatgcgcgtctccagatcggccacatttgatgcacatgtcaatcaacgcagcatcactccatggactagacacacatccacacttgatcacaaacgcatgaacctgctcgctcaccttcctatccgcagcaatagcacaagcattcagcacgcctgtcaccgtgacatctgagatctccagcccatcctccaccatttgcctaaacaaacccagccctcggagccccgccttcttggcaaaagtggcgcgcacgccttccttgttccgacaaaacccagtgagaaccgcattgtatgtaacgaagttcctctgcggcatccgctcaaacacatccagtgccatgtcaacgagaccaaactccatgtacccattcagcaaaccagtccacgaaatcacgtccttcacgggcatcctctggaaaacgctcaccacgtcctcaacagaggcaccatgctccgcgtagaacccgatgagcgcgttgcccacactcaggtccgtctccagccccgacttgaacgacagagcatgcaccgcctccccttggagctgcccaaccccctcgcctgctgctgtgaggagcgctg

SEQ ID NO: 74297 - DNA, 1115 bp, Zea Mays
tgatttcttctcaatattctttcttgtctccgcatgtaaccgcttgataaggtttgatctttttgtggcatccaagttaacttgttctagtaatggtaaaggcaaaagatccatgggagtatgcggtttaaacccataaactatttcaaatggacaagtgtttgttgtggaatggactgccctgttataagcaaattcaacatgtggaaggcagtcttcccagagcttcaagttctttttcaacacagcacgcaacatggttgacaaggtacggttacttcagtttgcccatccgtttgtggatgacaagtggttgaaaataacaactttgtgccaagcttagcccacaatgtcttccaaaagtagctgagaaattttgtatcccggtctgaaacaattgtctttggaactccatgtaaacgaacaatctccctgaaaaacaaatcagcaacgtgtgaagcatcatcgctcttatgacaggggataaaatgtgccattttagaaaagcgatctacaacaacaaaaatagaatccctccccctttgagaccgaggtaaccccagaacaaagtccatagatatatcttcccaaggtacatgtggaataggtaatggagtatataaaccatggggattgaggcgagacttagctttcaagcaaacgatgcagcacccaacatgccgctggacatcacgtcgcatgtgtggccaaaagaaatgatcagagaggatgtccaatgtctttttgacaccaaaatgaccagctagtccaccttcatgtgcttcctgcaaaagaattgggcgaatcgaacaagctgggatgcatattttgttagtccgaaataagaagccatcatgcacataatatttatcccaaccttttccatcaatgcaatgagagaaaggttctttaaaatcagcatcagcagcataaagtgttttaatggattccaaaccaagcacttttgtatctagttgtgtaatcaacgcacatcttctaaacaaggcatcagcaacaatgttatctttaccacgcttatgtttgacaacatagggaaacatttcaatgaactcaatccatttagcatgtcggcggttcagcttgccttggctttt

SEQ ID NO: 74298 - DNA, 665 bp, Zea Mays
ctcagtataagtcagatcatcttgaactaagatcatccataggtagttgctcttcgggtaccttgagacacttcttcagttgggacacatggaagacattatgtacatccgccagatggtcgggtaattccagttgataggcaacttcccccactcgctttaggtttaaggtccaataaagcgaggggacaacttccctttgactttaaatctcctcatagcccggatcagtgacacttttagatacacgtaatcaccctccttaaactctagcagtcttctctgggtatccgcataacttttttgtcttgactgctcagttctcaagttcttccttatcaatcgtacttgttcttctgcctcttgtataatttctggcccaaagaactgcctttcaccagtttgatcccaatatagaggagtcctgcattttctgccatatagagcttcaaacggggacatcttcaaactagcctgatagctgttaatgtaggagaactttgcatatggtagactcttgtcccaactgccaccgtgtttaagagcacatgctcttaacatatcttccagtacttggttggttctctcggtttgcccatcagtttgaggatggtaggccgagatgaagttaaatcttgtatccaagcactcatgcaacttttgcc

SEQ ID NO: 74299 - DNA, 454 bp, Zea Mays
cttcgttgaactaagaagtaaggtaagaattttcctccgctgagacctggggaatatcgtgaaccaggctctcgtcaagagtaatctcagaaatcggctccggtccaaatagccccttgtagtaagaagtgatatacctctttaattcggcatcaccttcaaccacttcattcccgttcctgagctggaaaattctagactttctatgctttccacttgcgagcaaatgaaaatattttgtattggcatcaccctggagcaaatgagtcgattttgctctttgataccacttaatctcttcctccctcaacaactcagctaatctattttgaaggcactgctttaaatctaactcatgtgccagcaagctgtcacactccgccttcttatctaacgaatccagcgaatttaaaatttccttcttttcctttttataagcaccactggtgttttt

SEQ ID NO: 74300 - DNA, 1250 bp, Zea Mays
atgatgttgatctatgcaaccagctgcccctaacttaagtttctcgttctaccactagcaaagcaatactctcaaaggtgtactcaacaggttgacatgtaagtagcactcacattcttgatttctctcttagggcacccgtatcccgtagtgcttgtttgaaccaaaccaaactgcactgaagggccccttcatatttggtttggttacaggttcaacgcctctagaagtctagagtcgcgtttagttcatgggaccgcagcagagaaaaataaatgaatccacatacacattctttattctccaattccctctttccatactactgttgccacagaaatcaaacactaccagcagtcaagtccactcaaaatagctagctggcccgcacaacctcacagacccaacagtgcaacttcagactaaggcattaggaggctcgattttggcaattatgagcttgattgtgccagcacaacctcaatttcctgtcacccgccctactatctccactaccagtcactaatcaccccacctccatggccaccaactcttagtccgtccttgttaatcttcctcaattattattttattattcatttctgctgcccagaggtcaaatgaagtttgagatgcaaaatgagaaatattttccctcagtacaatagacagatgtatccaattgttaacactatctaaaatttgaataacaaatcaagtggcgagattctggtagatacaaacctgtgagaatataagcacacgatggttagtctcccgtagtctcaccaatagtttgtccaacaagacaagtttaccactactcataacaatccgttcaactttattccgatcgccaatgctatctccaccataaccgtgatcggcactttcaaacaaaaatggatggttgcagcatttcttcaattcaacaacaatgttcaaaagtgatacctgcatatgccatgatcaagtcagtttggtagccaatggccaagtgttgccttgtgcccatgctccagtttgctaggtaatgcacagtgaggtgaggaactgcttgcgctagcaatagcaggtgagaaagaatagtaacattgttccaagcaagataatcctggcaaacaccacagcttttagcaagaaaaacggtcctagactaccagcaacagtatatattcatgtatgaacataagggtcaacttgctacatactgagacaaccaaattacattcaattccaagataaaaaag

SEQ ID NO: 74301 - DNA, 426 bp, Zea Mays
agcggagttcttgagtgatttgggggaagtaagaaattggagctctctggtgaacgattggaggcaagacttggtggcttggtgcgtgattaccctacggagcttgcagtgcgttcaatttataatgggcaagagcgatggccggtgaattagacgacgacgcgcggcggccgaagaagacatgagttactggcgcgagactcagtggcatctaccgtggcgacctcaccggcgacaagccagtgctaccgagcggtttctagtgactcaccgcgacggagtaaagcatcaaggcacgtagcccggtcggataacggcgaacgtcgttgatgccagcgcgactaactacggtgagacacgacgacggtgagaacagtggtcggagtttatccccaacgtgatactttacaccgaggagtgtttatc

SEQ ID NO: 74302 - DNA, 972 bp, Zea Mays
tacactgcaagttaggtttcactacaatggggagttcatagcagggaaaaagctacattactatgagggtagtgaggcattttcttacattgtccgagacaaatttcattatctaaatttgttggacacttgaaggacaactacattgttggggaaggcacactaccgcactggttatttcctataaaggaggttagaaatggtttgtgagcagtagtggatcataaggcctgcatgggcataaaaatgcacaactgacatatatgtggaggttcaagtaggaatgtaaagtcagatgatgaggattcataaggtgaagagtgttactatgaggcatatggaggaagggatcaaggatggctctaaggaaggtagtgaggataactttgaggaacaaaatgatggattaaacattgataatgatgttgttgaagatgctgactttgtcttaggtactagccaattagacataagacggcgtagttaaaagttcataatgtaactaagactgtgaggaggttttgtagtcctagaaaagttcaagatgagtgtaatacaattgttgccaaaggtcttgcaactagtttaggtgctagttttgagtacaatggatttattcctagggatgatgagtcctcatgagaagatgatgagggaactaatcaaaaagtttaaatagtttaataataaaatgaaataggggagtctacatagttagatgatgtgattgttgagggtcgtaaaaatcaaatagttgattgaactattgtacatgatgaaggacattaaaagtctcctagagggggtgaataggcgaaacctgaaatttaaaactttaaacacaaactcaaaccccaattaggcattagaatgagaaaaaggatgatcggagtgaggaagaggtgtacttcttgcaagtgttgcccaatatgaatgtggaattacttgggagcaacactattgattttggaa

SEQ ID NO: 74303 - DNA, 518 bp, Zea Mays
cttggtcttggtacgctcgtaccattggaatctggcatattcttatatatgcttacctttatatcacagagactgttcaagacatttcagttaacatatccttgaccacccttgtttcttaatgatccaggagcggtcattttattttgcacatccttgatgatctcgttaattccttgtaacttccttcagtaatgaattcttacttcaactcttctgccggaacctcacttatcttatccttgattgttttctccactttgtcactttgcgagtcttgctttaattctgtccatggactatgattttcatcattatcactattacccttatcacctctatatattaccttgatgcttatcttatactgaccctttaaaatctcctcttttccatctcaatctaagcattgtactttacctacttttcccttggtcgtatcctcttcctcatcgcttgtgagtcttcaactccatcatttgttgtgcctctatttagcgttgccttgacctttccca

SEQ ID NO: 74304 - DNA, 310 bp, Zea Mays
ccactataccctactaacggagcaatcggtttaagtcggcaatgacttaagacggtgcaacatgctcgcgcttactcgacttagagtgacaactataccctactaacggagcaatcggcttaagtcggcaatgactaaagacggtgcaacatgctcgcgcttactcggcttaggaggaccactataccctactaacggagcaataggtttaagttggcaatgacttaagacggtgcgacatgctcgcgcttacttggcttagggtgaccactataccctactaacggagcaatcggcttaagtcggcaat

SEQ ID NO: 74305 - DNA, 322 bp, Zea Mays
gttgtattgagcttgagagtttgtatgaacttgtgagtctaagagtctaagtgagcttgagcctaagttgggtctgccttgtaacgtcgtgtaccctcccttttatagctcaagggggcacgtacaaggatactgagccccgacatatgggcccaggggcaaaatggaaggaagtaactactgcctataacgccagggtgatctccgagcgccataatgtccgtagtgcatatagtattgatatcccgcgctgcttcctcggtaacgcgcgagtgatgatgagcatagtgtatgccgcagcacgggtgtactgcctgccaac

SEQ ID NO: 74306 - DNA, 448 bp, Zea Mays
gtttagagtggttcaggctgccgaagcataataccctacatccactatgagttgtattgcttgagagcttgagagtcatgagtctgaatgtggatcctccaactcccctgcatcacatgtgccttcccttttatagtccaaggggcacgttacaagggagttggccctaggagttactataatatgaagcgtgaagcgtcgggtagagctagcggtgctagatcttttgggcgtgtatctcctcttggttgctatgctagcccttggtgtcctatcctcttgccacatctaatcgaaacacaggcgtaggcctcggtgtagattgtggcatagtctgatacgctgtcgtgcgtaggggtgcatagacggtatcttcctgtctcttcatacctcactaacgcacgaggaacagtagagatcataatgaagggcacccaagcaatatatt

SEQ ID NO: 74307 - DNA, 475 bp, Zea Mays
gataaaagatttaaatcgtaaatcacgcaatgggattatactatataggttttaaattttagaaggggcttgaaccccatccactagaatcacacatgtctcctttcacatggttccacatgtcgatgtggtcgtccctgagtatcgactgaagagatcgtattgtcactctctactaacgtgcacaatagtagttgttgagtatcaatggaagagatcgtattgtcactctctactaacgttcacaatagcagttgttggggcatgtacacgttgttattgtgcctctgtaaggtcccaaagtgcaaagatggccccaccatgttgctccgattgggcacgtaacaattgtcagggacgatatatcagcaaaaaagtcatcgtcctcatcgttgttctcatttacaacgagcttaaaggtgaaataatccctatgcccaatcaattgtccctggactacaaacctcaatctaat

SEQ ID NO: 74308 - DNA, 744 bp, Zea Mays
gaaggcagcgcgaattttggcttctaccaagttcactggtgaaattgtgagtgcctcgccgtagtccatggcgctatttataggcacggtggtccggctaacgatcagtggccgcagattgtattgttcacgcatggatgccacgtagagaagaggcacagtaaggggaaaacaaggcatgggtgacaccgcggcggaagtgaccgagccacggcaaccgccggtgggatacctccggccatgcacggctgggttcgcgagatggtgccatgtccgaagttatctctccgcgatcgactccctccaccagatcactcgagcacatctggttcagtagtgcctcagatcttatccgcgttcttcagatatttacagtgctttgatcttcagcgttttactgaaccgaccacctatcatccccactttctcatgattcttgttaagaacagggtaacctcccttaataaaatttgttccccaaacaacagtctttaagtttgttatagggttcatggatcaattctgtatagattctcagatttggtgctctcaaagtgactgcatttcactgggaccatacttttctgaatccagtgttcagaactgcccaattggcttctgacagcgcaacttcacacttatttatctccaatttatattcagcaccagtgcttagttacttaaccaaaattgttctccttacatagctctacaaacttgatgtgttgacatagggcaaaatcc

SEQ ID NO: 74309 - DNA, 625 bp, Zea Mays
tgatggaaatgtatgtgccacaagagcatattgtaggggtccattgagtccttcaataaaatgatcctgctttctctcatcctcagcaacttcaacctgtgcgtatctggagagttgaatgaacttgtcgcggtactcgctgactgacatgcttccctgcttcagcgataggaattccttcttcttaatcttcatcagtccagctggtatatgatggttcctgaactgcgtagaaaactctgcccatgtgatagtgttagcagcatcgtgggcagcagtgtatgaatcccaccaatcagcagcaggacctgtcagacgaccagaagcatatagaaccttctcctggtcagagcattgtgcaataatcaacatcttttccacagatttcatccaatcatcagcgtctagtggatcaggagagctagcaaatgttggtggcttatggctcataaactcccggtgcttatctcagggtggaactggtggtggagatggaggcaatggtgcttgctgatgttgttgttgttgttgcagttgctgttgcgcccttctctcctggcgtatctcctctcgctcctagcgcatctcctggcgtatatcttctcgctcttagcacatctcctgg

SEQ ID NO: 74310 - DNA, 299 bp, Zea Mays
caaggctcaatacaacgtaggcccatcatggcacgacctgtttagggcatgacccgtttggcctagttattattcgtgttaggtaagcgcgacactagtgtccaaccccagatcgaggcaccatactcaggcgtcttggtcgtgttgtcccacacgatggccactccagcactacactcatatgtccacacaacaataaacaaaacagttagaacattgaaaaagcaaataatgagttgtttagtgtaatggaaaccctagataggaaaaaagagcacaacctagttcatacaattttc

SEQ ID NO: 74311 - DNA, 444 bp, Zea Mays
cgtgtccgccggagtccaccgaccagctgagacttccggtatttcccgcctcaaatctgccctagatcgaatggttctcttgaatctctggcgctgctgtctcggcggtaaagggtcgcttgggatcgtatttacagtcgcttaatgttattagatcgtgcaggcaaaattactgaaccaggtgctcgattcgaacccaccttccaaagctggtgtacaggtctgaagctgtttgggctttggtagggttggttctattgtgtcgtagcattcaattagtgagctaatttgaatctgtattggtcatatgaaagccaatgtcgaagtataactaatatgagtaatggccattgcactgctgttgcacctgtgaatctgaacttttgcatgtattctagtggccatttgcgttggcagttcatttgttgtctaatccagattttc

SEQ ID NO: 74312 - DNA, 416 bp, Zea Mays
gatgttatgaccttgtcaattcatgctatccaaggaacagaagcccctcaaaccattaaactcactgcaaatctattttctaagtcggttatcatgttagtcgattcgagcagttcatcttcttttgttagtcagactattgctgcttatggtcctgagtgggttcttttggaacagcctctacaagtgagagtggcaaatgggcagctcattcagtgcactcatcacatacctcattgtaaaattagcactcaggaacacaccatcgtaatcagcctcaaaattttgcctttgcaatgttatgttataatactgggaattgattggttatattcgtgcagtcctatggaggttcattggaaggaaaattggttagcgtttcagcaaacacaaggaagagtggtgctgcatggtct

SEQ ID NO: 74313 - DNA, 338 bp, Zea Mays
gtccaggggctaaactaaaaagatccccgagactcagagggctgtggcatgggacggcgggttgattcttaagtcttctagggtctcttctgcaaaatcgccacagcgaaagggtatccatgaattctggccgttggattagatccaaacggtccagatttaatgcaccgaagcggtacaccgcttctaatcctagccatccatctacgcatcaacggcccaggattttatacgggcgcggtcgatcggatccgcccgatcaacatccaacggccacgagtaactccgcgaagcggtacgcgaagatctaatcagggtcgttccttggacatcggacg

SEQ ID NO: 74314 - DNA, 350 bp, Zea Mays
accaagtcaagacaaggggaggaagcagaaggtgcaagtcagacaagggaagctcaacttcactactctggaggaagtacctgagggagcccccatcatgactggtaccatttcagtttttaatcaacctgcattaattctgtttgattctggtgcagcttatagtttcattagccagaagttcagtgctaaatgcaaattgcccttctgtcatgcaaaagggtcattcatgacaaccacacctgggggtaaaactgtaaccaaccaattaatccgaagtgtgcatattcaactgggaagccacattatcaaaaccacccttcttgtgttggtttggaaagcgtggatat

SEQ ID NO: 74315 - DNA, 464 bp, Zea Mays
catattctgttggggaacggctaggaacgggtccagacctttccctatatatatgaaggggtaggaccgattgacacacaacactatcaaaccaatcaatctacatatcattttctttactttcttgtcctaaaagtagcagcaattagtctagtattagtctttcttgacctattatttcatctataggcgactctacgccgtctagggacgtctgggtggcctgtcgatcacagagacccctagaactctcctccctgataggtccctcccggaagacgagatctagggttctatgccaccataagacgctctacgccaacacggatcgttcgagccctgcgcgcggactgtccgaggtgacgcagagaagaggcgatcctgcagtgaggtcgcgagccatcctgccccatgtcgcagaccatccacgctcatgcagagggcaccaccaaaaggtacacccc

SEQ ID NO: 74316 - DNA, 838 bp, Zea Mays
ttggtagtttttggttgtgtagatcatgattttgtggtatttatgcggtattatgccacattttcttagatctaatataacttcatgttgatgttcttatctggttaagcccagcctgcatcaatcagacatttccccataaaagatgttgcttgcttcacgttttattatgcaatgttgtctttgttagatctggtataacttaaaagttcaagatgtgcaagatgtaggtctgaattaagacataattaactttgttctaaattgttcttgtgtattctgttactttgttctaaattgttctttgtaaattgttctcatactttgttcttatattctgttctcatattctgttactttgttctaaactgttctttgtaaactattctcatactttgttctcatattctgttactttgtttcctctattctcataccagtaatgaacttttataatttgtttcctctgttctttgtaaactgctctcatattcggttactttgttctaaactgttcattgtaaactgctctcatattctgttacttcttttctaaagtgttctttgtaaactgctctcatattctgttactctgttctaaactgttaatactctgagctatgtactattgttgcaacatgctgttgtcgtacttgtttaagtctctaagctgtcgatcaatggtatgtgatggttatgcctctgggtggcacatctcttgtatgttgcagccgtggctcatgtaacaatatgttttcatatatttgcaactagcacatcaattatattttctgagctatagatcaatgttctatgatgctagtgtgcctctgagcta

SEQ ID NO: 74317 - DNA, 387 bp, Zea Mays
catgaacaagatcgtgctgggaagaaacggacctggtcgtcgatccggtgatgagcgctcacgatagaatctcaaataccccatcgtgatcgaaaatcgtagctgttgatctcggatttgttgaccgagatcagatcgtgggatcctgtaatctcaagcattgattttagatccgaccactgtgatagaataccggttcatgtgagataagtctctgatccctgccgttggatttggatcccgcagcaaacaatccaccgtaccccttcgccatgtccatatttataaagaggccctcgggttctttcaaatcaacctgccatccaaccagtgaggaaataattaaaaccgagtccccgatatttatgaatttaaccccaagttttc

SEQ ID NO: 74318 - DNA, 1932 bp, Zea Mays
agatgtaaaacgagagaagcaataaacaacaaaaggaagctgtagacccaataaccaaagttcgaggcctttagatcatctatttgccactggagcaggagaagattccactacatcaaggacaaaacttgatcggggataggggcactacatgatttcaactgggccgacacagagttgaggacattctgcaagctcaaaagttagcgagggaacctatttgtcaacataaataatgcgaggcaaagatcagctcacttggagattagaaaggaataagggaaattccagagccggaggcatcgatgcactgtctgatgatggagtataggctgagacaatgttgagagcttcacttaggaggacctcagctccgatagcaggtggttggttcccagcatccgggtcactggcctctaaagtgaccggaccgacaagagcagtagaaggactcatcatcataggttcctcagattggaccggtggcgatccgacatgaacgtccatggaagcagccgaagaggaaccaagctcggcacccttgggggctgggtcatcctgagcaccaccctcgggggctgggttatcctcagcggcaccttcggaagctgaagcaccctcagtcgtacccacaggagctgggtgaccctggccgcaacgtcaagagccagtgtgttcttgcgagctagaccgccctccaaggttgaagaagagtgaaaaactgttcgggttatttcttgcccgataggattacctgccaaagggatatcatcctagacctctgtacggacgatagaactttcagtttcaggaggctccaataaaaggtcttcaggaataatttcctctagtgcatgattaatggcagacatcgtcaacccctagagattaactagtcccgataaagcctaaattgggacgtcattgctactatggctgcggctgttcttgcgaatcaaagggataatttcctcttcctcctcttcatcctcatcaagcataagaccaccaactctagcaccatcacaattttcaatatcatcctcgaggttggagctcgccgagccactgccaagaactaagacggtagaatcagcacccagttccaagcaagatgaccgccgaagtattttctttcttttcttcccctcggtaggcgcagttgaatgggtcgttcaatgcaatcatttgtgacggacacttttgggactgtgagctccttcatcctcgccatggccatgtccagctacagcactaaccgactcagtatgggcagagtcaggtgactcacccgccagcatagtgagagcagcgttcacttcagcctcattagcagtcatctgcatctagaaatgggtctacctttcttcttcatggacatttcgatatggatcaatgaaggcctcaatatcctctagggagggtcgcactctatgacccggattgccatcttgaataggaggattggaaacaaaattggaaaaaggactttgcgagggagattccaagcagaatatgataagagagcaccagcattcgaaatcttgcctctcagcatcaaaccaactcggctcaacatatcttcttcagaaatccgtctgctggtaattcgtgtagggtcatatgatcccaatatacaagtaggcagggtatactctatcctttagaggttgaatattcttgaagaaaaattcaacaacaatagctttagcagtcaagcctctatccttcagcgcacatatctcagcaagcaacactctggactcagcaagctctaaatctgtaggggcctctgtctagctaggcatttggacatcaggctgcctccccgatcgagaagcgagggacttgttgtggttctccatggtaaaccactcgaggcgccatcccttaatactgttcttcaaagggatatcaagatcctcaactttc

SEQ ID NO: 74319 - DNA, 554 bp, Zea Mays
cttgtcccctgcttgacttttctcgagaaacgtgccccaggtacctagctctttccttttctattctcatctcctgctttgctacacttgcttatctctctggttcttgtgtagcgtgtcaatgttcagtcaggatggtgaggaccaagaatgtcaccccagtagggggaggcgatgaccaggaccctatttgccccttcagactggacaagggaaagtatgtctaccttgagcagcagggaggcaagaagaagagaaagatggatagagctagtcgagcagcagtagcagcagcaacaactgagagagcagagcagggaggccaattgaggatttgctctaatcagatcaccttccgtgtctgtcgcctctcgtctcagactcgctccactccagctcggtttgacccctcatctccagtcaccactaccactccaccttcctccactacgccagcttccgccactccagtgcctatcaccacaatcgctacgcctacagcctccaccacacctacttccaccattctcactccctctaccactccaccaatt

SEQ ID NO: 74320 - DNA, 1377 bp, Zea Mays
gcaagctgatccttcgtcatcacagacaagcctagttcaagctttgtatacctcatgttgcccatcatttcacggcaaacattgacctcgttactgtctggtagacagtagaggaagtcatcttcgttatctcctccgtatagcagagacccctggggtatttcagctccttagcataatattgtgtttcggcaagttgctctgctgataactgttttcccgaagcatgtcgaacaatgtaattcaaatcaccatggggagttgcttcgggagcaggtgttgtaggcttttctggaagattttgcttccagcagctttactggcgcagcttctgatgatctcgcttcagcatgaacagaagaagcgcttgtagtgaccacttctcttgcatcttcaattttcttgctagaagcttcggtagaagcaggagttggcgttttcacggattccgaaacaacatccaaaacactagccatcctcctcttcctcggagttgttgttgcagtggctgatagctttggcaacactgtcaccagcacctttggctgctgtgctgtcttctctgattccggctctttgatcgggtctgcactagcttcaatcggcatcacatgagccgtctctgtggctaagggggcagtttctaccctttcaaatagcttcagcacatcgaccgtctcaatgggtttctgtgtacgtgtcaagaccttgactctcttcgcctttggcgcaccagaagatgttgaagcagcaactttcttttttcccccttgcctttggacaggaaaacagtaatccgagtaaacaaacccaataacatcgaacaccctgttcagccccttttttccgcaaccgccgaaggcaactgtcatggcctcgtcttctgccctcgagtacgctccaagcagttcatcactcatggcctctatagcatctagccagtcatcatttggctcatcaaactagctcctgtactggaaggtgtagttcagataaaccaaaccatcttggctggagccagcggcagcttccttcggtatttcccactcatttgccagaggccacactctgaaagcgatgtgttcttaaactaaatctcttgtaccaatgtaggtgcatatggtgttgaaagccatttggcaggcttgcacttcattcccaagtgcgatggatggccttctgatgccgaagcatgaccatataggacgttgaataacacctgtcacatcctccctctgatttagatcattttcacgtaaaaccactgcttcatctaagaacccggccatttctttcggaatgttggcacaggatacctcacatcagaacgaggcacgaagctataacaaccgaagttgttatgatactgctccttcc

SEQ ID NO: 74321 - DNA, 1035 bp, Zea Mays
acggcgttcatgcccagccgagctccggcgagcggctgcaccggccgaatggatctatgaccggcactcccgagcggcggacactaaattggacccaccctaaacatttcccctaggttaatttcaccaatagcgcactaaaacgccctggccacggtgaccgtatgggcaatggatgaacacgggcgttcatggcaacccagggcggtctggttcaatcagaggggtcgtgaagcttgaggaggacctaaggacgctattacaattgatcaagacactgggcctaacctggaataggctggccgcggtgaagtgttcttgcggtgggttcagaccgatttggggagaattagaaattcaagctcactgatgattgactggaagcaatactggtcggggtggtgcaggataatgtggtggagctggccgcaggctcaatttatagaaggagcaagcggtgacgagcaatttgggcagattgcactggcgccggagatgaagaagaaggtgctggccgcgtgagtgcgtgtccacagtcgtggcgagctcaccggcgacgatgggactgctattggagtcacggtgacgcggtggaaagactcggacacgcggcgggcacagagttggcacgacggcggcgagcagctttatctacggcggtgagcaagggggaatgaattacggctagccggagtggcttccaaatcaccagcggcgaagatattttgaccccgcgacgttatcgacttaccccgagcgtgaatcatgacgccggcgacgcgaatcacggcgggggggggggggggtcaccggcggtgggatttctttgcgctggcaatctgatccggttcaggcactgtaccatggcaattcccccatcagtcgacctgacagagcactttggagcaccattttctcccaaatttctatggcaacatccccaagtctctgcatcaaagttgtagtgctacatagcagctacaaatcgactatagggattaaacttagttgagcactggatcatgctcaaaattg

SEQ ID NO: 74322 - DNA, 903 bp, Zea Mays
ttcgaggtacctttgagtccaagtgatgcagagataagtgccatgctggatatgttagctgaagattcttctgatgcagcccctgctgaaacactggttgtagcacccatcccagaggctggcaaagctttggatattcagaggtctgatagtgttcgcccgaagcgtcctcgccaagccaatcaaccaacttctcctgctgagggaagaaaaagaaaaagagatgtcttcgccgagtgtcatgcttggatcaggatgccggtccttctgcttctgctgctgaggaagtgctagtgccagtttttgctgaagctgatcccaatgggtgtgactcgactgatgctgaccccaatgggtgtgaccttgatgatgctgaacccaatgggtgtaccatccgcattgttgatgaagatgaggaagaggaggatgaaatccctctaattcggaagaacagccggcgctacatagccagcggggagagtagtggtgttccttctctagctttgtctgccctcattggtctgcaagaactgtctctggcaaactttgatcagactcttgaattcatggtcccagagggtctgttgtcagagccggtagatggtggaatgatggaagtttgcgctgatgtgcctgatgccgggttggagttatcccgagtggcgtcccgtgcctcatcgaccttggagcgcggtcttaagggtcaggaggctggtctagattgccctgctcccatggaagtggttgaaggtccttcagccttagaggtggctgttacagagagcttggccctcaaggatggcgctagcgcttacccggcccccgagggtgtcgccggggatgatccggctcggatgggtagcgcgagctatgacctagcccccgagggtgtccaagttggtt

SEQ ID NO: 74323 - DNA, 655 bp, Zea Mays
tgttgtcaagaacgctctttgccacaagcacggtaagtgagggagagagcctcggtcgtaccttggtctcccctctcccatttttttcctattttcctttccctcctgctcgtttcccattggtaactttcgagacagaccaggaaccagacgaggcaagacgaatgaacaacgaactcaatggagtaacgagcggaagcttcaatcatgaaaccaactatgtcgttttcccatattctataacaacgtgctttgagtctttgcaactttctgtcgaagagtcctaagcaacaacatcgcacctctcgtgcttcccaagggcaccctcgatgggaaggggacctcacagcaatgtaaccagagaccccccctgtggtcaaaccttgggggaaacatcaagcgggacgacttcgttcccatcttcgctagaaacgaaccaatggggtggggaacgtgaacggaaggcactaacggggaagctggtcaggactgcgaatacctatgcctcaaaggctatggtaatgtcaccagtggaactcaagggaccgaaaatttgtgaacacctgtcccggtggaatggtcgctagcaaaggcgaacaaaaaaatgcgacaccaaggaccctgacgacgtttattaaacatatcgatgttttta

SEQ ID NO: 74324 - DNA, 562 bp, Zea Mays
cgtgccacccatggcaccccgtgtcttggtgaagctcccaggctgactgatgatgcagacttccttacgagggacctagccaacatcagtatcacacccagagtaccaccagcggcacgggcatcccccgtatcaactctcctggtgcctcctccttcggcatgggaagtaccaactcctcacgccattaggcaggatgtgccaaccacaccggccctcccacctgtgggttgggaggagccagtcactccttggcaggacatgttaagggctgggggagaaccatctgtgttcaaccccatccctttccagccaagctttgacaccagctccatcactagcttgtacactggtcttcctttccccttcagatgtcttgactccgaggaggaaggcggtctgaatgttggcctggacttctctaggctgtgcgatcccaagtccatgctgcagtcctatacacgtgcgatgagttactctccgacggctcggagggctacaacaccgacgaagggagctacgactcgataggggagtgcttccatgcagaccatgagagccc

SEQ ID NO: 74325 - DNA, 301 bp, Zea Mays
tgtcaatgcaatgtccaatagatgaaatgaaattttgggagtgagtgatcacacccatgatggatttctatgatgatatcttatggatgagcttgtagtagtcatgtagtagtcatgagtttattccttcaactacttgaggaggggggtgtggagcatcaacatcttttgtgtatgccaccatttgatcttgagagacgtgtgtatcttaatttggttgtttatcatctttgtcatcatcttcattttttggcttcatatctcgagctgccatattcttcatcgactctctcaatagttc

SEQ ID NO: 74326 - DNA, 961 bp, Zea Mays
tcttttcgtgacttcatccatgtagacggtagtggcacggtggagtgattcaacaattccttaaatttcttaaacagtttagattaaatcatcctctgtttagtctcatacaatttgttgaacatcttattctccataactgaggactcgttgttacttgatgctggcccatttcccgttccgttgagctctttgccacatcacggccaataggatgtggtgcgtccgtattgtctaacgaggtggagctataatcgttatccaagttgagatgatatctcttacactactgcgtccggtagaaattcaatttttctctaatttagaacgaatcagtcttgcattaattgattgataaaatacacttggccgttcttgtaaaaagatgaaaaatcctagaggatctaattgattatttgtatggtgtctgtacactgtatactttgataattgttgtggacctacggtttaatatattgtatattgatatagtgatttgaaatgaaatgccctgctgtaaaattctggctctgccgctgacctgcaactgatccaaacaaagattataccgagagactttgacgtgctgaatgatatggctaactaagataatatgaatgatgcgcgtggcaaggctcagacaaacttgtgtctgatattggcaggcggtggctgctcttgctgtagctatagcagtcaagtttctttcatctagtgtgacaaagtccatgaagcctaccaatgcaagagaaatttttagagggttggtaagtctaacacactaccagactacctgctgctgcacgggttggtagggccagtaagtccaacacaaaaccgtctcctgcctggctgtgctgataatggtatggatgtggagataaccaatactttgcgaggtatctctttttattctattattattattattatcgctgatggagtctgtttttgtttcacc

SEQ ID NO: 74327 - DNA, 555 bp, Zea Mays
ctcgaggtaaaactcctaagacacaggctaaccacgcaggggaccgcgggttagttttcctaaaacagaggggctctttaacacttttgccggggccgaaagggtaccgtgcgctcacagccgtccgatcataaacgtagcgcccagattaaatcaaatcatacgcgaaacggtacacaacgccaaccgtctattccgagatctacggttcggattttaatacttctcgaccgatctggttcatccgattgtgatcgaagggacccgaaccaatcctggtcgcatcttatgctggacgcgatcatggccgtcgcagacggatcggacgacaatcgttcatcttctccccccccccgagctatctcgtggcagcacaacaccctaaacgcgccggagcaccaccatcgcaacgcgaatcccttccccgatgcaccaaatcccgatctaactagccctacacgatgcagggaaagaaacgagttgcagggagagggtggtaccaactagattggctcgcagttctccgctcgcggcgatggtgatgtaacggcggag

SEQ ID NO: 74328 - DNA, 651 bp, Zea Mays
caaatagaatcgtggtgtcgggaggtgttgggcaattccacaataaaatccatgcaaatctcctcccatttccaagatggtacgggaaggggctgtaaggtaccggctaccttcaaatgactaactttgactctctggcaagtgtcgcattcagatatctatttagctatttcccttttcattcgggtccaccagtacaaggatcggagatcatgatacatcttgttactgccggggtgcatgaaaaatttggaaaggtgagcttcatccaatattttctttctgagctcaggattcttaggaacaaccaatcggtcttcaaaccatagaactcccttgctgtcctgacgaaagcatttgtacttatccaccttttgttcgagcatatccttgatgacttgaacacccttgtcaccaatctgtgccatgactatttgttcatgtaacgtgggctccactgagatataactcaaggtacctgaggaaaccacttctatgttcagcttgcataactcgtcacacagagtggcgatcttggaatccatactcacacagttgcactggggcttccggcttaaggcatctgccacaacattggccttgccaggatggtaatgcacttccaagtcatagtccttgattaattccaac

SEQ ID NO: 74329 - DNA, 788 bp, Zea Mays
gctgaacgtggcaagctctaagagaagggcagcgctcgatgtcgtcgttggccgccagcaaagtccggtgatggttatcaccgtgaccgtcgcgatggctcactgggcctataaattcacatgctctcactcccttcgtcccaaatcaaccgagcacagctcttcgtccctcagttgttaatccaaaaaatcactagcctccctgttctgtccgccatcctctgtgatcaacggaattcccttgaaccggtttcttccgccgctgtgaagaaccccttcgtggccagcacttctcaggtctgtacatgccaaattacttcctgttctagcgtgactctggccttctattgctctcggagtcaaccaattaaactttactaaagcccacactccgaaacaccccatcatcccatagaacgccgccgcaaccccctctccgtcgacccatgctcctattcttgtttagtccaaattcaagtgcgtgcatcacctctggtgaacctatgaagctaacccatgcttcaatttcagcagccatgccgttagtcgttcggaacgcgatcaccagggtcgtctcgccgccatgaccatgagcaagctccaatatgggttgaatccctcaaattgagcgagggtttttgaccaaataggttgacacatcacatttatgtgcttattacctcaggttcgggccaccttcaccgtagaatcgcagctccggtctgtgctcgccgcagctcagtcatgggactagagtggagaaggaatagaacttgagggaccttttt

SEQ ID NO: 74330 - DNA, 414 bp, Zea Mays
gttctactcagcctgcatgtgcacgaactaggtcaagtgcaccatagatccgcactagacctcccaatggctagttccaacacactagcattactgcatagtgattcggtgtgcaaacaatgcacgacagacttggtattgtgtgctaggcctaggctacaagatccaaagataacttttctgcgtaactagtttggtggcagaccgaaccggtgtagtgtgcacaagaaatctatgcctaaaaatactctctacgtgaatggtatggtgccacaacagatcgtccagtgcgccttttgccggtttgtgcatagaaacaaggcctctgcggaaagggtccggtccacccaggcttggtccagttcatctagaaaccatgaattttgctaagtgtatttttatttggttttctct

SEQ ID NO: 74331 - DNA, 519 bp, Zea Mays
acataagatactgtgttcttacatggagccatatgcccaaaggatctaaccattgctgagattgactctagctcgccagctttaacaagtgcacgtgtgtcgtggtttcggaaacctagagacaatagatttgtgttcgacaaagatgctagcgcggaaccactctgaatggtgaatcgcgaagactcgtacgatgaacttgggacacaggagttatactggttcagaccggagctctaatccagtgtagtgttgatcgtggtattgctttaaacatattataactggcgtgcttgtgtcagaagaagtaagatggccaaccctttttatagttcaagggtacaaccttacatgggtgacctgctctctacttgttataaggtcgatttgttgcctcggcttgacctagtgcccctggtgttgtgttgttcgtaaggtcgtgcgtaaccgtactcctggttggacgtactgtcatgttcattcgtcatacgagtccctgttgcgagtccactgcttccg

SEQ ID NO: 74332 - DNA, 431 bp, Zea Mays
gtttgtatgaaaaacttacctgttctgatactttcttatcatcagtaggaacatgtatttcctgatcgtgttgctgatgatcaggggttcgaataggaggagtggatacaggagcatttgtcgggggcattaaggtagagggtgggatatctacatttggacaatagaataataaattagttgttgctgaaatgaacaagaaatataaatgtagagtaataaaaataatggttatacatacatattagcacaaactacatcaatataatatcggggtgcataaaataaatgagagttttcaaaataaaatcaactgaaaggtgttgatgatgtattagtgcaaatgaatgcataagtaatatatactatgttgcataaaataatgtatttgaaatcgtatacctaaatacaactttagtttgaattatccg

SEQ ID NO: 74333 - DNA, 475 bp, Zea Mays
ccttggaaggaggcatattccaggctgagtatgcaacaggagcaccgatattagacatcttgcctctgagtatcatctcaagccggctcaccaaatccacagcaggaatccttctgttggtaacccgggttgaatcagcaaggcctcgatacagataagctggatacgctctgtcttttagtggctgaatgttcttgaaaacaaaatcggcaaccacagcctcggtagtcagacccttctccttcaacaatccaacctcggcaagcagagcccctgcctcagctacctccaggtctgtgggggattcagtccaactcggagtatgaacatctgcctgtctccctgactggggggagagaattcccgtgattctccacaataaaccattccaggcgccatcctttgatgctgtccttgagtgggatgtcgaggtactcggttttcctcccacggcgcatctccaaacttgcacccc

SEQ ID NO: 74334 - DNA, 599 bp, Zea Mays
ctgcaaaccagtagccccattattccattttctcatccaaaatagacacaacaagagacatataatatatatccaacttaaccacatacatcataaacaccattcgcaactcacaagcatcacatacatcacatttcaaattcatcaaacctcaacataactcacatgtccattgaaaaccacaaacacattacaagttaagtcatttgttcaccaaaacacatgaaaccgttgaactcatatcatccatcatacataaccaaaataaatcacaagtttaaatgtaacaatagagtacagtggttctcatgcaaatggataaccacttggatgattagagctttggccactaccgctaggaggaggagggtatgcgaagagggactccacaaaagctattccgactggtttagtcccactgaaccttggcccataagaattaaatagctcatgtcggctactaggttggctgacaagagttaatgaaattctcgtgggctcaatactaaccgatgatagctatgtaattcctgtcagtttggtcaaaggtcaacaagaattaaccaagacgacgagaatgcccttgatttctgttgtgc

SEQ ID NO: 74335 - DNA, 440 bp, Zea Mays
caagtcttttgtttgtgagccattagaaaagatggtgactttctttcgtgccaataagatgtgatcagcggagcgtatatatatggttgtgcaaaatattgttttacattgtagactacactatttataaatgagtttgaaatagaaagtgagatatgatataagatatgaggctcacggagacacgtaaaaagttcaggagactttccctcctatactcccacgctcatgttgccatcgccactaaccacgacgacgccctttactattgaccaccagggttgtcacctcctcatgcggagtgccatcatgccactgccttgatcaagcaacaaccaatctcgcgattcgtagggtcgtgtatgtctctttcccccttgtcattaactggccccttgctagttgctccacctactctattagtattaggaggtgtctag

SEQ ID NO: 74336 - DNA, 750 bp, Zea Mays
cgattggcagcctcgccggcgtgctccgttgggggaaagacgaaatcatcgccgtccgatcctctatggacggtaccgattagatcaagcataccccttcactcgatcgaactgagacagtagatgcgagatccaatggcgcggagttgattcgcaactcattaaatccgggccgttcaccggtgatccaacgacttagcgcgcgttggatttcataaagacttagattcaatctgagacatccacgtctgatccaacggcccatcgtggccgataccgcttcgcagtgctcttttgcatatgaaccctcggggttctgaagaatagaactcgcaatccaccctgtgcagtgcattgagtcataggtactcttgcacgttggcccctgcgcttaccagaaattgacacccactccagggaattataaaaccagagaaaataaaccagaaatgtatttttagtatataaataattgcagaaacttgtttaaaccctagaaaattcatatgaactccaaattgatccattccaattcctataattttgtaataatgttgtttatcaccctgtgtctctgttttaaacatgaaaatggtattaaaaatttatctcttaattaatctcgtaccaaatacataaaccctaggaaattcgtatctccttcgttttaactccgatttgatccgttcaagttccgttagtctcgtagcaacgcatagattatttttacgcagtgtattattatgtttg

SEQ ID NO: 74337 - DNA, 858 bp, Zea Mays
caaaaatgtaaataatgaagatggagttgaatcacttatatgtttgcctctatttaatatagcatgtgaataatctcatttcaggtgattaattagctaataacatataaaatatatcatgcatcatgctggagttatgtgtgtgtgcatttaccaaaaatattgatcacatcaatgagaatcattaaggttcaaaattagaattaagacttaatttataggtgagaaagggaaaataataaagaaaataaatactataaaaatacaaaataaattttataaatgcaattaatactggtatgttcaaagaagatgtttaattgggaaaaacaaatccacaacaacatttgaattgaaattcaaagttataaatcaaaagggaaggaaatagtggagaaaggaaaaataaaaacgaaactgtgcaccattgggccgacagaaaccaattcgacccactttccctttttctccacgcatgcgcacggcccagaaatcttcctgtgaccgacacgcgggcccgtgtgggcagtggtcgcgcccgcgcaccgtgtgacaccgccgtgtgggtcctctctgtcggatctatcctctcccctctttgtctcctttcaacagaacgcgaaatcgcgcgggtgtatcggtgtcgcaccgtgatcttcggggaaaacgttgggattcttggccatggggcataaatagcagtgctgcatcccattctcggcctccaagctaatacacgggtctcatggcagaccgggggatcgtggggaagaagcctggcgctgagaagaatggcgggccgccgcggttaatcccagtcttggctgccggttcgccgtcggggcctccaaactccct

SEQ ID NO: 74338 - DNA, 1218 bp, Zea Mays
cacagccccgcaacattggcgcttcgcgggtgttcgatgtaatgcccgagtgaagctctatgtcatgaacagcagcgaagtcaccgtcgccgtgacctcgccttcgtgcgcggctcgcattgctctgcatcgtcgtcgccttgcaagcttgcggtttagccaaaaccttgtttgcgtgcgagtggggaacctcgacgaagtaagtaatgaagagtaagatgtccctttttgttttccaactaatattaggcgatatatattgtaatgtgttgaatgttggtagagtttgttattcatgtgtagtggcgtgcacaagtgtgcgaatcggagaaataactgagttatgttgattggacgtgatgtgtaaattaaaaaattgtaggtttgtgtgtagggtgtactattgcacatgtatgtcgatgtattataatagtgattgcgttagagtcatttgaagtattttgaatgcatgccgaatatggttgcattccaaatagggaaagagtcatgttgtgcgatgaaaaggctagattgattttataggtcgtacgaaaatcgttctattaagtgtatacgtcgagtgtgttaaaaagatcctatgtaggcagaatgtagtgtattggttaggcgaagagttttataataaacaagtatgaggcgtgcaattaagtcgagattgaagtgcaaatcctatgcacaatgtgatgggattcgtgattatgtaggagttataattgttgatgtgacgagtagtttagaaaatgctcgtttgcgtggaggatgtatcgttaagacatgagtgtcggagttcatttatattagtggtcgcgccacattgcttgaagtgtctcgagtgcataccgcaatatggttgtattcatgccaaggatgtataggttttactcaattagaagtttggttgatatggttaggaaattgtttcggcttgggtagtgaggtggtaacatgccgaagtagtcatcgcttcctctacggttaaatggaaatcatgtgtgatgatgttacttatggggtgaatacgtattgaaatcttttatgttgtgcaatatgactagaaatgtgaaggatagatagggtgtttcagaaatgttagccaataggtcggacaagcatgatagaggttgagtcgcttatgttagaaaattgatgctcgacatgttaggtcccctaaaagctgatgttttaggtgacttgtgt

SEQ ID NO: 74339 - DNA, 577 bp, Zea Mays
gatcttctcttggtcacggaaggcgtcgccaagattttgccaattatgggcgcgggattcgacgcccccccactcgcaagagctcctacatgcagatcgaaacaaacgaacgaatcatcatctattgccaaaccgagcgcggcttgtattcggctttgccaattaattttggtgaaacgtgtcaagctattagattcatgttttagaatccgacggtgactgtatattcttttttaacagtagacgatgtgcacgcccaaaacgagacgtcgtctacggtgaggctttttgtcgcttttggagattttaatctgtgcgtatatatagacaacacaatgcgacacgtgcagtacactctattgattaggagtgtgagattttctaggtaccgctcactctttcagcaggctgggagtgcttatatggatgagtaggggtatgagtgcgtgtgtgtgtgtacctagaaaacaaattaatggatttatgttactgtacaaggctatacttgctgcatgtaccggccggttttggacattcggtggatgagactccaattcgtcgtgggcttggattccag

SEQ ID NO: 74340 - DNA, 576 bp, Zea Mays
attttgcaaagtggcggtcgaaggggtataggttattcctaaccgtccgatccataatcgatgatcctgattagatcgaagccccgtgaatcggtacgcagcgcgggccgaccgatccagatccgacgaccccgattgaatcgatccagtacattatgtggatcaattcgatgccgcccgatttcagatctacagacgagacgacattgcccctgagatcaaatctcaatcgccccttaacgatctaacgaccacacaccactccctcacaacaacacttacccacggtggcgctgaacagggtctgtggcggctcatgcgctacggtgagcgattccggctatcccagactccaatctctcctgccgaggccatgatcacccttcgaatgacgccatggagcccccagaccaacattcttgctctgaaagttgatgcaagagaggacccgcagcggcgcgtgaatccgcggcgccacattgctctggtgagccattgctggagcttcgaccgcccgttcaccgaattggtggtgggaatagtttccccgtgcctaagcgacactccacatcagct

SEQ ID NO: 74341 - DNA, 494 bp, Zea Mays
tattgagcgataaaacaaaatttcttggcttatacctttgccttgcatcttgcttttatgtcttccttcatgtctccgcttctacaacatcaatgacctacagagacccaacaattttaatcacattgtttgccttacttttgtcaattatcttcctcgttgagcaattgatcatctttgtagacttgaacatatctcatttgcaacacttggaatataggttagttcactagttgtatctattaccaaaactacattgatcgtttacccaatgcctagaaattttacggatgggatcgcccgagcatgctagcgaggaagaagaggagacgtgcgtagagccgagcgaacgatctatggcctacttccacgttgtcgagctctagaggtcaaccctgttgtcgttgtgagacctctagccatatcgaccgaggcggcatctgacagacctcactagcatagaatgcgtggaaccatgcccactggcaaaggag

SEQ ID NO: 74342 - DNA, 398 bp, Zea Mays
catgcgattactcaactacagagcgactgtcaaccatcttatagtcatgatgacactgaaagacatacaactcatgtccaacattaaaggcaccatcgatagcccctatgaactctcttgcactctttatgctcatttacacatcacaaagcttaccagatagcacacttaatatgcatcctaatgctatcacattatctttgtcatacttcgactatttttcactggtcagaggacctccacaaggcttcacaacctgacttgtccatagcagtgagccacaaatcaagttttatggaccacatttaaaatttgatccaccaaacaagttttattgcatcaacaaagttgttatatccaccttaaggcgtccatcaggtttatggattgttaatgaa

SEQ ID NO: 74343 - DNA, 325 bp, Zea Mays
caagggcacattcccttttaggggattagcaagatagaaagtataaaactaaaacaagatataaagacaatagagtttacatttgataattagaacaacatagacaacaaaatttagtacattgtgcatttttcattcaagcagacaagagagttcgcattgtgcatcttcagttctagcacaaatacaaatgactaatacactaccagaagagatacaaggacatagggcacagaagaaacgactgaaaaagtacttcccatcctccatagacacatcaatcaccacaatgttatcagatgattttgccattacaacctctcgc

SEQ ID NO: 74344 - DNA, 562 bp, Zea Mays
agtatgtgcacatcttcgggtcatgagacaccattgacttcatgacttggtcgacaaccaacttggagtcgcctctaactaggagccatcgtgccccttcggccgtgattcggagcccgttgtaatggccccatattcaacgatgttattggtggcattgaagtggaggcaaatggcataacagagcttgtgtccctaaggtgatgtgaggatgatacacgtgtcgcttcagctcttcagataggaaccattaaagtacattgtccaatactccgggtcctccaccagcggtggctcctacgcttccgtccattctacgacaaagtcagcgagagcataagacttgatcacagttttggagacatagacgatgtcaagttcgttgagctcggaccacttcgcaacacgtccggacgcgtcataatttcgaacaatctcaccaaggggtgctattgacactacagcaaagggcactggtcgaagtagaagatcagctttcgcttggcgatgaggactacatagagcagtttctgtatctaagggtatcgtgccttagaatttg

SEQ ID NO: 74345 - DNA, 464 bp, Zea Mays
aaagggggtggaaaatgctatggcagatgctctgtccagagtgagttatctcatggccttatcccatgtgtctgagtacaacctctttgggttcaagaggttttaaattcatatgaaattgatatggaggctcaagagttgaagactcagcttttgattcaaagtcctaatgagcatgctacagtttgcatcaggggattataaggaggaatggggtgatttggattggagataactctgatctaaggactaagttgatcacagctttgcatgacagtgctgttggagggcattcaggagtgcatgctacttatcacagggtgaaaaaatgtttcggtggaagggacttaagaatgatgttactcagtttgtgggccagtgccaagtatgtcagcaggctaaaagtgaaagagtgcatccacaaggactgttacagcctctgcctatccctacaggtgcttggg

SEQ ID NO: 74346 - DNA, 426 bp, Zea Mays
agcaagtggatcccaggagcttctgcagatgataaagcccgacatccacatgggcaactctctctgagtctaaaatccctccccaataaataaagcgaaatattccctcaaattctctggacgaccagcatacagctcattgtatgcattgcgcgtatgcagctgcgacagaggccgcaacaactcagctttctttacgcgatccgattgctacttcccaaagagaagccgagagagtaaacactcaccagcctggcagtgcttaattcagctgagtgatgcaccaatcagtggccacccaatgctattatatatagatgatcacagatctatcaacaccaccaaacccaatccctttccagcacactgcaaaacaccaaaaggaccgaaagcaatggcatgcgttgcaggaacaccaaacctgcg

SEQ ID NO: 74347 - DNA, 420 bp, Zea Mays
ctcttgtgctcattccccataggagattcatgaaaacaaccttgatagaatcataacttgttggagtgacacttttgtgtggtttttatgaagtcctaattataggcctaacatgtgatgacatttagcttgtgaatcatctaggttggacttatcacaacgatgacgtaggttatcggtgagcaaccaaactttgaggataaatcattgtgttcaatcacttgccccaatttgatttgatagatatcacacttacatctactacacctttaaagtgcgaatattgtcatgtgtcatccttgtatccctcatgcgctcgaaaatcctcccgcgtaatccctccccgtctcctacgcgtgcctcgcttgaaatctcgtctctcctccgcgtgcatcgaaataaccaaaacatgcagctgtc

SEQ ID NO: 74348 - DNA, 489 bp, Zea Mays
tttggtgccatctttcttctccacgaataggacaggggcggcacaaggcgaggtgcttggctggatgtaacctttgtctgacagctcatcaatctgcttcttaagttcaaccaactctagtccggatattctgtaagctctcttaaagataggggcggttccaggaagaagctctatggcaaattcaactttccgctctggtggcatacccggtaagtccttgggaaacacatctgggaactcagacacaatcttgatactctcaattgggtcttcttcactgctatcgacagccatctgataacaacttcctttctttggctcaggcgggactaactcggtcaccacttcctctcctagtggggacaccaacttaattgtcctcttatcacaactgataactgcctgatacttatctagccaattcatccctaggatgacatctattccctgggtacccattactatgaggttggcgggaaacgctat

SEQ ID NO: 74349 - DNA, 566 bp, Zea Mays
ttttacgacattccttaagttttttgatcaaaatttatgttctttcttatcattaatggctttaatcaactcattgcactttggcatttgttttctatctaggcccttgaaaatcatggccgcttcctcatcatcactagattcatcattggacccatcactagatgaagtatactttagaggggattttggatatgccttcttttgctctccttagccattaggcatgtgtggtcgaccttagggaagataggtaaggtgagggtggtgacgacttcattgtcgggggaactttcattattcaaatcccactctttcctgatgtgaggtttacatcccttcttcttcaagaacttcttgttcttctcatattgcctttcattcttttcttccctatcatcattcttagagtatggatagttagcaataaaatgattggttttaccatagttgtggaatttcttcttggcccgtggcttgtagtcatttcctttatcctttcgagccctcatgatttgcttgaaacttttgatgaggagggccacttcttattcatcgagccccaa

SEQ ID NO: 74350 - DNA, 604 bp, Zea Mays
gttggatttggttcatgcaacaacttcgtaaggctataggagaccctcctgttttagccatttgctcagatgcatgcaaaggattgacatcagcagtaaatgaagtgtttccaaatgctgaaaaaagagaatgcttccgccacctcatgcaaaactacattaagcacttcacaggttcagagcacatgtatcccgcagctagagcatataggaacaccattttcgagcaccacttcagtaatgctagggatataccaggtgtgaagcaatggatagatgagtggcaccctcttttatggtacagatgtggtttcaacacggctataaagtgtgactacataaccaacaacattgctgaggtatttaacaactggattaaagactacaaagacctaccagtttgtgaactagcggacaaaatcagatgtttggttatggatctcttttttagaaggaaaaggatcggggacaaattgggtggtaaaattcttccaatagtcatcaatctgttgaaggctagaacgaggggtttgggccatttatctatacaaaaaggtgactactatcatgctgagatccgtgataacaataacattcaatgcag

SEQ ID NO: 74351 - DNA, 460 bp, Zea Mays
cagatccttctgaatctgaactgactcctctgcgatgtgactctctggtacttttaagcatttacggagctgagatacatgaaatacattgtggatatttgacatggattctggtaactaaaggcggtaagctgctagtcctattctgccgatgataggatagggtccgacgaatcatggagctagcttcccttttgcttggaatcttttgactccatgcattagggagaccttgaggtagacaaaatctccttcctcaaaactgagttctctccttcgattgtctgtgtaactcttttgccgactctgagctttgagtagtctcttgcggattagggcaacttcctcttctgcctccttgatgaaggtaggcccttctaggatcttttcccctacgttagaccacatcagagcggtctggcacctcattccatacaaggcttcaaaaggtgacatcttg

SEQ ID NO: 74352 - DNA, 705 bp, Zea Mays
gcgacacccacctagtgcacctattaaaacacgatgcaaagacggccggccggttcaagacttcatcagagggcaagtttgcattggcaacgagcgtgtagtacgcgtggactctgaagcagttgttgttgtaccccaaaaaagagaggagaaagtgacattttcttttctttgtttttacgtagccatgcatgcgctcaatcagggaggcagctcaaacatgcctctccaacccatcgccgtctgctcacggtcctttcaaaaaaaatctaaaccagtacagacatggctgattgagccagcacccctctcatttataaagactatttcacattcccaatataccactaactaaactacttaccatagaacacaatcttcgaactccacacttgcatgccacaactcaaaagataagttgtataaagtcatgtctccgttagtccatcaaactcaatccaagatgttactctattgattttcactcatcgcaagctcaaactataaatgttcatattaaccttttgttcgtatttatttttgtctctaaaaaaaccaaaagccaacaaaaatataggaatctaagctgtttttttagaagtagctgcttttagaatagtacagatttgaagttttgaaagaaccttgaaccatgcttttgactcctggcttctgaatttaaagtagtgaaatatagagatgttt

SEQ ID NO: 74353 - DNA, 637 bp, Zea Mays
taatgatcaccctgagtcgtgtaagcgtgagcatgtcacaccgaattaaggcatttctgacttaaatcgattgctccgttattagggtatagtgatcaccctgagtgtgccgtgctgatttcgagttgagtccgtcctaggtcagttgttgatcaagaacttgtatgccttggaaaatggaagctttattgataatgaaaccttctgcttacaaagtacaactcgtcctcaagagttttgaggcattgctaggggtagaatttccctgagctgctcaatattccatgaatttcccacttcggtgccatccatctgagtgagacgataggatcccggtcatgtgacctccatgatgatgaatggtccttcccacgatggtgatagtttgtgccgcccctcccccgttagcactcaacggagttccaaatctcccactacgaaggatcaatgttgcactgctttgtcgtggtagcgcctcagggtctgctggtatctggccgactgaattaccacatttagccgttcttcctccagtacatcgatgtcctccagcctggttgcttcggcttcggctatgctttcgaatgttaatctaggtgctccaaagatcagatctgctggtagcactgccttcgat

SEQ ID NO: 74354 - DNA, 536 bp, Zea Mays
tttattcagcgcgagaattcatgagtcgttctttcgagctcacatgtcagcctagatagctttgtgtgcacactggctattggatctccctgcttttctgctagtagccagtgcggattctaaggtgcacctctcctatctgcatggtctactcactttactgactaccaacggcagatatgttgaggagtgggtccgagtgttttattcttcagtatggatagaccccgacaaccagtggatgaggttccgttttgagcgagaggatgtcactattcatgccagtcagatccgccagctgtttgaatttactgagtcatcgactcgccttcacagcctgtgttatggcacttctgatactccttgacgccctcacggcagagttgctccagccacagctcacgtcgcggccctgttccgaccgcctttcacagatgggtcgcgacggtctccagcagatttcactccagcggccaagtatctctatcagatcatgagacggacgctactaccccggatgggttatagagaggcca

SEQ ID NO: 74355 - DNA, 565 bp, Zea Mays
tacccatacagatgtcaaaccttggaatgtcaactacaagtgatgtcactaaatgcaaagaatgtggtgtgttggcaaatcaaaacaacactataaataaaacagctgatgaacagacattcaaggcacagaaggatgcacaaccaaaccaatagacaagtgaccttggaacatgttgttgttgtgagtactatggaatttcttatcgccagatcagtacaaatgaaagtgaaactacaaaacagaagaaccagattttattttctagcattaaaagatagatgtctccccgagaacaactaataacagagcctctcatacctaatgcactatcagttgatgaactgcaaagtatttcaaaaagtaaacatcacaataatgcccagccccaagaagaaacacaggagtgttacattgatggatggactattacttgcacgcagtttcagcctcatcgtcgcatcaggtccaagaaacgaaaagggaaacatggaaaaagtcaagaaataacttcaagaaaagcttgctatcaatgtggacgtgaaggtcattacttctgtaactg

SEQ ID NO: 74356 - DNA, 955 bp, Zea Mays
ctcttgcttagctcttgcttaggttttaattagtgttgatttttagaaaagcccaattcaccccctcttgggcatcgtgatcctttcaggaaccactgtgtcctatatggaaccaattcaagcaacaataaattggtattgaagcggttccgtttcaccaaacagttacccgtgccatattttttagagcaacgactttagttcacttagtggaataatctgtggagactagcacaaactgatgtcccttcgacaatgaatgatgaatctctcgtataaagtccaaaccccatccctaaaggtttgataatatgatgtagttcagtgtcagatactaattgcaatcgccgaacttttgacatactagacaacatctatattacttaaaataatctgttatcatattaggccaacagaatctagatcttctcaaaagccactttatttttggtgccgattgatgagtaccacaaatgccttcatgtacttcagccatagctaatgtagcttcatcgggggcacaagcatttaagtacaacgtcgctagaagttcaacgataaagtttatcatcaatgagtacatacttaaaagccattcaccgaatattcctatcgatgctaatatttggatcacataggtatgtaaccaaaggtgttctccagttaactgtatcagttgcatcattagctgaatcaaccgaggcgatgattctgtcggcgtcgaacggtctgatgatcttgaccggacggtacgacacacacatagacggttcaacgacttcacccggacggtccactacctgagaacctagcgtggatctgattatcgggattgttagaaacgtggaattttccttgagttacccaataactcaaagcttcttgtgtcaagttattatcagtcccagatatataccgaatgtcaaatttgtcaaaagaacatattatgtcccaa

SEQ ID NO: 74357 - DNA, 510 bp, Zea Mays
cggcacctcgaacccccgctcgtggaaagcggtgaagctcaccacataacccgccgacggggtcggctcttgctcgtcgctcggtgtaagccactcaggctgtgggccgtgggagcgggcgcgaagcagccaagcgtccaccaacgcctccagattctcgtcagcatccgaggaaatggaccacgagttgcgaggaggaagaatgctcaacttatcagccataggggctaaggaagaagacgggagaagagcgcaggtgtttacacgtctaaggcagaaggtgactaaggcaggaaggcaagggcgggaagtaaagaactgaagagcccctctcgggcgaatttataggggtgggcggagtcaccgagacgtgggccgagccgtcctgggtccaaaccaggaatgagctgtgtcgcttcaaattccacatgcacgagctctgcaacggtcgtcctgcgggccgaagcgtaccgtcgcattaaattcccactcttcctgacgtcagccagc

SEQ ID NO: 74358 - DNA, 922 bp, Zea Mays
gatttgaatttttgggatgctacaagtggtaggacgattttttgaggggtagggtggcttttcctctaaacccgaatatgagttgtccggtggctggagctgcttcaaatttatgcccattctttcgaaggtgtggaggaaaatgatgtcggcctggctgccattgtcgatgagtgccttgtgaatctctcaacctgctacattgcagccgataaccatggcatcggtgtgagggtcattgtggaggttgacatcgtttgagtcaaaggtcagtgggatgtgcgaccactttgtctggacgaccggttctttgacagcaacatggtttacacctcgatgatattctctcctttgtctcttcgtatcgaagtatgtgcttgagcctccactaatcacgtttatgatgtcgtgaactggggttgtgggtaggcctcttcttcttttggcggtggcagccacagctgcctctgatggtggattggttgcagaggggcaagggtagttgtaatctttctaggtgcactggtagatgttagtagtttggttggtactatgggtagcagttatatgtttcatgctgatgttgaaactgtggtaggaaagtgtgtgccatgaccttcgctggctgttttgggtagtcccttttccatttttctgtgtccatcctctctttcacctctttatatgctcgacaatctttggttgaatgactggagctttcgtgaaaaatgaggtaaggcttatactcacgaggtggtcctcgctctcacccccttccccttggggccctacctcctcttgctggttgataaccctggttgtaattgtggtggatgtcttcgggttgctacttctgctgaatttgttgatttgggtctgcgacagaggttgttgcgttcacacccacttttggaactccctg

SEQ ID NO: 74359 - DNA, 468 bp, Zea Mays
ccatgaacggatacagttttttacaggtatgattttatcttacagatatgggtaaaggctttactatctaagtatgtacctattgatatccctagctataaggagtgacttaagcgagccatgtttaaggaagcaatagatgtgcactgggccctggaattggtacataagagtgaaggcctaacgaccaatgtttaacttggttgttcagtttagacaggccgggctgcattcgcgctcgcggctgcgcggtggttggcttggaccgggtggtcggcttgctgttcctgctagaggttcttttctttttatatatataaaaataatcaaaattactattttatattctgattttaaaaaattacagttacgtgtgactaccgcctgatggaggcgacatgagcctaattttttttacagacggtccccgctgcccgtggggctcattggagaggcgataggccgctg

SEQ ID NO: 74360 - DNA, 455 bp, Zea Mays
cgactcgttcgaggccagtatagggtgagaagcacatttttgattcacccgagggtgtcccaggcgatgctccgggagctacccacctcgaccaaccactccgatcctagaacgtgcgtccgtacgatcacttgccccgctgagggtgcaaaagtcaacaaaggacgacacgactattgtttaatctacctttaccgcccatgacgatgcacagggtgcgaatacgtggcaccattcccccactccgaccacagtttcaaccacccagagagtggctacatgcaacgttcgatcccggcctcggcctcgagagaaatctcctcctcgtccgagctcggcctagccaactgccctaggagacatgcattaaatgccacctactctcccacgaatcttgtagaagaccatgccaagcactatttcaactactctaactcgatacttctgcgccccta

SEQ ID NO: 74361 - DNA, 611 bp, Zea Mays
gaaaagactactcggtgactacacctcgactcagattgggaaaaaaacatgtgttttctgcataactatgtgttttctacattgtaaacaaaactccatccagtctgtaggaagggaaaaaaaaccgaatgcataactgctggcaggaacaaactttctgaaaaaggcaaacggactaggataccaatttcgtcgccaatactaatacatcgtcgaaaaaaacaatcagaacaaacagggacgacctgtcctcgacctcataggcgtattcattggttcattgtggttcagtctgatcatttctactccactttgacccttctatatataccttcagcgagacttgccttaatgaacaacacggacatctgttgtttcaccatccatccatcaccacgcaattgctgttggccgattcatggggacaaggcttctctattttgctcacgtgaagaaaaacttgccaccaaccaagcattttctcgtcagtattggtacaaggtatattttcgcgtgcactgtctatgaccatctgaccaaacgagatagccggctcagcgcgttgaacaaaagatggttcagctttgcagccctgctcgcactgaaagaac

SEQ ID NO: 74362 - DNA, 704 bp, Zea Mays
cttcattcctctggtggaggacatgaatcaacatgttctcacagttctgatgggtagtagtcaggcgaagattctccaaggttgtcatctcatgctgttggatcgcctgatctctttctaaagtcatttgatccaagtctgcttgaagcttctcgatctgttcatcatagtctcactgcaattgactcttctcttcctgagccaagctaaggaaagtagataccatccccaagcttcactccacacctcggtatgctttcatcactacaaacatggcactcatcgtggcgttgtcactgtgcaggtgttcgctagtgccacctcccaaggcacttcccgtggtttgctcccatattgaagcatagggatcacctcgtggaaagacaccaggcatagcagtagctaactcccctgaaaacctctccatgatatcctgcaatattgtgtaggcagctcggtctgctccttctctgggtgttctgcccctgccttcaaagttccaaccattccaatctgactcatcaccccgggcacaaaccacagccgtcacatagacaagtgtcccatctccacgcggctccctatcccaaaagtaatggggttcctttccctatggataacccaaagtgaatagaatccgccacagtagggtaggtaaccaaattcggacagaaacttgctgtggcagcgagagtcctgaggtg

SEQ ID NO: 74363 - DNA, 287 bp, Zea Mays
tgaaggtcagatactgaagagcaccgataaggctccggtaggcggtgggttcactgacagaagcgcctttgctagtgagcttggcctgcatgtcgaccagggtcacacaaggcttgtaattgaccatgccagctcgttcaaggatgtccagagtgtactgtcactgctggatgaagaggccccctgagacgaggctcaaccacaatccctagaaaatggtgaagggggcccaaatccttcatggcgaactcatgctgaactacggtgatgatccgaaacaggagagc

SEQ ID NO: 74364 - DNA, 276 bp, Zea Mays
tttttgggccaagtttgttttgtatagagatgtttttcaggatcacctattcaccccctctaggtgctctcacgttccccatcaatacacttgaaatgtacgaaaagaaggtcctgatttggtcagaaacgaccgataaaagtaaaggcaaaaacattatcattggcagccctcacacgccaaatctatcacgaggagtggttactcgaaaggctctagacaagagaaaagctaataagattggaggcatcggggggcaagcacattttggtaccc

SEQ ID NO: 74365 - DNA, 416 bp, Zea Mays
tttggatggttattttctgttgtattgatgattggatggatggggtggctagggttctaaaaaatcgcccctggatggtcgcggaccgtccgccaggatggcacggacagtccacccccctggcgcagacagtacggccccctagcgtggatagttcggtccctgacagaaagttacaccttctttctctatgttgtggtgtcatcaactaataactattggatattcctcatatatattacagtggtctgggtggtcttaggaagaagcttgcaggtcgtttcaaatcaaagcgccatcgtgcagatgatgcagattataacccaactacagactcggaggcccaatcttcagctggggcagcatctctatggacacagaggatgttccacaagctcatctagactatcgaattg

SEQ ID NO: 74366 - DNA, 556 bp, Zea Mays
aagcagtgtatgaatcccaccaataagtagcaggacctaacagacatccagaagcatataaaaccttctcctggttagtacactgagcaatgttcaacatcttctctatggacttcagctaatcatctgcatccagtggatcaggagaactagcaaatgtcggtggcttatggctcatgaactcccggtgcttatctctgggtggaactggtggtggaggaggaggaggcagtggtgcttgttgctgttgctgctgttgctgttgttgctgctatgccctcctttcctgtcgtatctcttctcattcttggcgcagctctcgacgtatctcctcccgctcttagcgcatctcctggcattcctgctgcatctgagcatgcatatctgccatagtgtcagccatttgttgcatcatcttcatctgagctgcaactagtgggtcaactcctactggtggaggcagtggtggaggatccatctctgctggttgtggttggggttgtctaaatatcctctgagtgtgtcgattgggaggtaaatcaattccaccatcctt

SEQ ID NO: 74367 - DNA, 368 bp, Zea Mays
gtcaacaaatcagccctaatccaaatcagctctaatccttccaattcctcttgctcgcaaatatgccctacgtcagatttcagtcccctagtctgcccatctgtgatttttggacttccgttacctctcagcccacaaaaacgttagcaactagcatggaccaaggataggaagaatggaagattggaggaaaaatctgggataggcagcagagagtggggagatcggactatgaatgcctagagtaattctgggttccatgttcgatatcctcgcgtcacggactgggctacgctcacttcaccgatagcacacggacccagtccagcccaaagacgcgatcattctgcttccttgagcgtttgccg

SEQ ID NO: 74368 - DNA, 962 bp, Zea Mays
caaatttcgtttaatttattttggccagtttacctagctaacccatatcatctatatcttgatatatactacccgcagtcactgagctctccctacttgaaaaatgggatccccatgaagcaattccagcacaaggtattagtgtgtgtgtgtgtcaacttttgtttctagctagctagttccttaatgacaacaattggcagccttttgtactatattctcgatcggcgcatatgctcatatcatttttctcctcaactagggctctgaggattccaaagataacggcgacacgaagcaagacctgcggagccggggcctgtgccttgtcccagtggcgagcacatacacggtggcggccgagacaccggagttctggcaccctacatttggaggcacattccggtagacaaacaaacaacctcatgcaaagagtgttctgaagctaaagcaaagcaacaacctggctcatctgttcttatcaaactaagttttgtacacagatggtgatgatcgtccagttttagtagcaagctaagtagcctgctgagacggaaagcaagaaatcatgatgccgcccaaagcaatcgaaggatgttttgcaagggaaaagacgtacgatgatggatatgataataggtttccggtggtctcttctaagacatgcatacatgctggatcaggtgcagaagagagaatgattaattgaggccgtgtgtatgtgtggcacctatactcatatatatgcatgcatgcaactttgcaagcaaataattagtgacagctatatataattagcactgtgtagtatgcataggttggcgttggaaggggaaagggtgggggcaggtgccaaaattatttcgaaggaaaagcaggagggtattggtgcagatagatggcaacagtcatggcagcatggcaatgattctttatctcattataagctcctattactggaa

SEQ ID NO: 74369 - DNA, 586 bp, Zea Mays
cgagagggatcgagctcccaagtatctgcagtgtggatgtgcttgccgttgcaagtgctctatgttttgacttgtgctagtggtgtgttcgcgtgattgctcatgtcttggatcgtggtcctttaccttccctttataggctaaggtgggagaagcaccctcttacaaaagtctaagagttaggcgaagcatatgaaggccgggcattgtcgcgtagcccattgtcctttagggttcctactggtcgagggacgtcgtgagtaatgtctccttcccccgtcgacatattgtagccatgcctaggccacttcgaagcctatcgttatgctccatcacttcccgcaatggtttatccgaaatcctttgtccactccctagccattgagtggttgcgccggtgtcttcctccatgccgtgggggatgacgtatgttgggggcaaaggtgtatcgccccctcgctcaaccttttcataagagggacaaaacatggaggaaaagcggaagcaaacgaagactgaaagagcggaggccctaagacggagggagcgtgcagagcaggcgaaggccttgttggtccctgtcgaa

SEQ ID NO: 74370 - DNA, 545 bp, Zea Mays
ggaaaatggcgccgcgacggctctgggtggaattgggaggtgaaattggggctacacgaccgtaaggaactatagtttcaccatgcacactcaattcgagaagaggtggcagatgcaatgcgaattttggggctttgattaaactctcaggtggagatgtgagtaccccgccgtggatcacagtgctatttatagccacggcggtccggctatctatccatggccacggataacctcgttagcgcatgcttaccacgtagtgaagagatacagtgaggaaggagcaaggcatgggcgacaccgcggtggatttgactgagtcacggcggccaccggtgattatctccggccacgcacgactgagcttgcggaattgcgccaagttcaacgttgtccttctcgcgatcaaatccccaccgtttcatccgagctcatccaattccacagtgcagtagatcttttcccctatgttcttcagatatttcagtgcacgggatcttcagatgtcacctgaaccgaccaccttccaacctcttgatctcttg

SEQ ID NO: 74371 - DNA, 871 bp, Zea Mays
ttttgcttgagaagaccaaggtataacactgattttaattccagatattttcatttttaattctggaaagttcacaacctcatctaatctttcttgagaaggaaactgcattaaaaaaccagaaggacatttggtggctttccaagttctaccccatggaaaatggaagctaaaatcctgttccagatcttcacacttaacctcaccctcaagcactttcaccaaacctaagaaactttttctaggttttttagcagcatttttagcaaactgagaagcataaaaccctaatccatcagccgccatacccacaattggcatagtaggtttgctttgcttaggccagacacatttagcagtgacatgagtttctttcctacaaatctcacaccaaagaggcttgaaacaatccctggcgtgatgcccttcatcgccacatttttggcaaaaaagacgacgaccaatatcaagatccatagcagcaggatgcgtagggggatttttgttacctggatcagcaccctctcccgatgaagagatctgagaatcattcttgatctccgtcttcacgtgcgggggtctcaaacgccaacttaaatttctgtgccttccccagggaggtgagttttgtctctgcggcttggggtttgggcgttcccacttcgtgttcttccctttaggatccattacagccaagtctctagggatttgggaaccaatccctactctcggccacggatcagtggaaggaagaggacgaataggggcaaatctccaccccccacagaaactggatttctttttggtaggcagccgccaaagagcagagaggaaagcagcaagatgaggaagggagcgagcaccaactaag

SEQ ID NO: 74372 - DNA, 445 bp, Zea Mays
gatttctgcatatttctctgtcttgtgggtagtatgcactggcaagaaatgagctgtcttggtcaatctatccacgatgacccaaattgaatcgtggtgtcgggaggtatttggcaatcccacgataaaatccatgcaaatgtcctcccatttccaagatgatatgggaaggggctgtaaggtgtctgctaccttcaaatgactggccttgactcttcggcaagtgtcgcactcagatatatacttagcaatttctcttttcattctggtccaccagtacaaagatctgagatcatgatacatcttgttactgccgggatgcatggagaatttagaaaggtgagcttcatccaatattttctttctaagctcggggttcttgggaacaaccaatcggtctccaaaccatagaatccctttgctgtcctgacagaagcatttgtat

SEQ ID NO: 74373 - DNA, 433 bp, Zea Mays
gacgaccgtggggagctgcagggaaggagctcggctgggcgagcgtcgcgcggggaagagagtggcctgcgtgaagggagcagcggccatggcgaggtagagatccggtcgtctagggagagagaggagatggacgcgagatcgtggagaaggatgaggctgaggaaaacagtggcggatgaattttctagagacgcatacgtgcacaagataaggattagttggagatggacatgtagaggcaagaaaattcagattttcccttctctcttttctatacaaatatacacagataaatacaatttcagcaaataggattttgaagatgcattgggtgtgagacggcctccggcggcggtgattcttggggttcggagtccatgattattgggcggcggtggtcgttcccgagggaggcattgggtgtgtatgg

SEQ ID NO: 74374 - DNA, 622 bp, Zea Mays
ttcaatgcgtgcattgaatctctcaacctaaaggaacttgagctttcgggccgtaaatttacttgggctagctcgggttcaaaccctacttttgaaaaattggatagaatcctggtaagcacagaatgagaacaaaaatttcctctttccaccgtggaagcgttatctagaaatatctcagaccacacaccgttattggtacaaaccggtgagccatctcatagaggaaataatccaaggttcaaatttgaactgggttggctctatagagatggatttcatgatatggtggtagatatgtggggaagagaaactcgaggacgctcacctatggaaagatggcagaataaaattagaactttacggcgccatctaaggggttgggctaaaaatatattaggtgaaaagaggaaaaagaaaaaaaactcttctaaatgaactagatgttattgatagaaaatctgaaatttcaatgctatcgccacaagagtgggaatacaagcattatctcaatgtcgaattatctaagttgcttagagaacaagagatttattggatccagcgttctaaagcaacaaatgtgttaaaaggcgacgataatactaagtatttccatttacta

SEQ ID NO: 74375 - DNA, 645 bp, Zea Mays
gcgagatagaggcaggtgaagggggctgcggtgtaggggaggggctacgggatagcgttgaagacagtgtgtgatttggtggaggggaaggcacatctatttatttgggtcaaccctaaacgatctaaaatttttagcaacctatagttgaatgtctacctctcaactgtaagtcgttaaaattacatagttttagcgaccaacataccgtggctaaaaatatctttagcgaccaactatcattctagtccttaacatttatcaaccaatagttcttactaaataagagtcgtaagggtcactaaaagtgaaccgtggtcatcgttcatgttgacaatgtctgcccctttgcatcctccttgtgttgtcttaagtgctgatcaacgtgggcccatagatactcctcttctttctcactgtgatcaaaattaaaatcaatggaattttttgtttaccgaaataaattgtgttatatttaaatttgtaacagctttctcactttgatataattggttgttgcttctttatttactatcgtaactcgtcagttgcccatgtggcttccccacctcatcgtttctacccctgccctctcctccttccgtggcgacagcttcccttccacagaaccttcttgacccggac

SEQ ID NO: 74376 - DNA, 800 bp, Zea Mays
gacgctagcagtggacaatgtgcaaagcaaatctacttgtgaccatttatcacgctcaaggttaggtaattttggccatcatcacaaagtgtgacaaaatccccttccattaaattggaccccacacgtcaaattcacagcaaactaaattggtcatgaggcgaatagattcctaaaaaaagtatcgcaaagtctctactgtggttccatgctacgaacgactgtttcgccttcagtgttcagacgacgaaccgaagcagtactgcatacaggcggacaaaggcgtcgttgcaccacgatctgagtgtagtgttgccatcgtattatcgcaagaaccgacgcataataagcgatgcagcatggaggacgagctaagcgtgcagagcacctgagtggatcagggtgtgatagctgcgcatggatgggaaaaccaactgtgttgttcggagagatagaggatgatgaggagaggagcggttaccgtggaacaccggcgctgcgcacggttgctccttcttcgtcgccgacacagcacaccggtgatgtacccagagcacgcattggcgccacgtggagagagcacctgcgacgattgtggacgcggagtgcacaacacttggagagaggaaggggcatatttggtgtgcggagggagggagagaggagggggagcaatggggggaagacagccgcgagatctttgaggggggatgggaagaaagagggcgcggatggagcggctgccatggatggcagggggcggatggagcgcggctgccatgggcgattcacggcggatc

SEQ ID NO: 74377 - DNA, 492 bp, Zea Mays
attgagacctctcatgaagcaatctctcttcttgatatcagtgctgacatgatctatagcataccaagagaggtgattaaacttcccaatatattgcataacaatatctgccccttgtctaagcctcagaaactcttcaagtttcttttgtagaattccattagggatatagtgagctcttaaagcttctttgaattcattccatgtgatttggtgctctaggggctatatggcaacaaaatttgaccaccaggtactagcagccgcacgaagttgttgcgctgcagacaatgacttctacactttagtgcaatgaataaacccaaatttttgttcattcacctgcaaccattcattatcttcaagaggctcctcggcctttgcaagcactagtggacgagtctccatgaattccatatatgtagcattcctttgctgattctagtgggcatgaaccccaccctggttgttttgattgttggcaagctctcg

SEQ ID NO: 74378 - DNA, 894 bp, Zea Mays
cttaaaaggaatctcgacctcaagattaagatgcaatagggaaaagattaggaaattctactcgcaattcttcttctctctccgaggtagcttcatcctaaccatgatgagtccattgcactttgcacattttgatcactttgttctgtgtaacttgagtcaaggtgtcaatgatcttgataggatgctcagtgtaggttcgatcaccccgcacactaagttcttccataggcacctgttcctgtgggacacgaagacacttcttaagttgagatacgtggaacacatcatgtacatctgacagatgatctagtaactcaagctggtaggccatctccccaactctattaaggattttgaagggtccaataaagcgaggggatagcttgccttcaactttgaatctcctcattccacgaattggtgacacctttaggtatacgtgatcaccctcttcgaattctagtggtattctttggttatcgacatagctcttctgtcgagtctgtgctatcctcaagttctcccggatcatacgaacttgttcttctgcctcttgaataatttcaagcccaaaagttttcattccacggtttccaccattgtcatgtccccatatttaaatagtaaaaatgctaaaattatatacaaataggaatttgatcgatgattgttggatcaaacccatattcacactaacatacgtcgtgttcgctttgacttaaagccagttgttcgaactaaagtcggtatggattaaagccaagcgaataggctgctagtcaactgaatacatatattttgtgttatatattatatgcttagcataaatgaaaaccgtagcaacatatggacactttgctagtagagataaaaatcggcttcataactttt

SEQ ID NO: 74379 - DNA, 359 bp, Zea Mays
gtcgcagatgcgctgcaggattttttgggtggagtcgagcgatttggcctgagctttcaacgacttggactgttcttccaacgcggtggcgatgctcggatccgccacccctgccatccgtgctcctctcgtgtagtggtgcactggctccaggctcagcgatcgtgggacctttgataccagttgttagcaaccagtctgctaacagggatacgcacacaaactggagaagaggaagagagggatacagaggaattgggaaccttcccccgagatagattagggtattcagatagatgtttcttacatgacaagtccaactctctccccttacagcatataagaacgttacagttaac

SEQ ID NO: 74380 - DNA, 408 bp, Zea Mays
ctggatgctcgtcggcaagtcctatgtgcccgagctatccaccaatcgtgcgaggaggaggttggatgccaaggagattgtccattttgcctttcctttataagggaagatctatgatgggttaaagatgactgccaagaaggcgctggctctagcacagtttgttcacttctccaccaaacgagctcgagaggttttactcaaatcatcttatgatgcgcgtttactcttaaatattgttcaagcgaatgaattctttgttcgaatttgctctgtctcattctctatgatgtggttgtagattgggaagctgcccccaaagtggacgcaatgccttgtcccgcttgtcaactcgtccactgtgaagattcaggggaagctcgtgttcccaacgatagctcgtgttcc

SEQ ID NO: 74381 - DNA, 284 bp, Zea Mays
aacaccccaggtgttacttagggatttcacccaagcctatactattgaacccatcatcacatgtggtttagtttgagaaaaagacacccaaacttggggatcaagatcctaaggtcatgcattggccttatcatgcacctaaagaggagagaagagctcaaaccctaattcaaatcccttgaggcaaatggagccctagatgggattatggcaaaagggctatgtaaaccacattgtcatgacttgggcaaattatagaagttatagtacacgtaatatcctac

SEQ ID NO: 74382 - DNA, 586 bp, Zea Mays
gaagacatcaaaatgactctttgattggtccaccatagcgagcggaggctcatgagtcgacattgcaaaacaagaatgaaagcacaatcaaagaacgatgtcctcgagcaaaacatgtaccacaccctagttgaaggaccctcaaaacaaacccactgtcccttcgaatgctcgatggctagactcactgagttcgctcgcatgtcctcaataagggtgctggggcgaaggctgactgccccctcacttggttcattcataacgagagcaggataaatcaagacggagggaaagcgaatctgctccaaccaagcgaaggccctatgatggagggagagtccaagataggcgaaggctttgacgtttcctagtgcggccatgaacgacgaaggccttgccgacttccaaagacccggctcacgctacacgaaggctactgtcactacccgcgcgttgttgttaaagcgggcctgcggggaactgccctgggtcgcctggccccacttgtaagtcacagtgtgggtagggttaacggtgtgtccatccgtgttgtacttaatcacattgtaatgatttgtaataaccc

SEQ ID NO: 74383 - DNA, 1195 bp, Zea Mays
aggacttgttaccacaacatcatcaatccaaggcattggcaacccaacctgaacttccattgaagcgatagaagaagagccaaccacgacacccatgggggctggagcaccctcaggggttggggtgccctccagggtcaaaactagattggtgatatgtctgactaatacaggaactccttaaggaactagcaagtttacttctagcctagccaacaaactagcagaggacacctcatctgagcgaactatgtcaacatcaatagcattaatctcaggtaattgacgtagcaacacttctagaatggcctcttcaagaatacaatccacaactgacatggacaaaccttggatgtccaccatcctcacttggatagcaagattcaaagcatcactccgagccttagaacgccgctcatgaaggaccagtgggagcacctcctcctcttcctcatcttcccccatttcctccacaacataactagtcaccttcaccacgcctccaccttccatgtcatccaccaaaccagcatccaccacatcatcgttcatgtctagctcagcttagacagacactagttgcatgtccgacgaacgctaaagcttccttttcttcttaacctctagatcggcggttggggcatccggctgaccgtgtcgtagactcgcaaggttatctaccctcttcccactagtactcgactactcgagggcaacacaccctgactcaagtcgcgtcgactcagaggacttctcggccaacatgccaagaacagccttaatctcagagtcactggcatgtcgttgtatcaagatatgggtctatttatcctcctcagggagatcccgatgcgcagcaactatggcttctatctcatccgaagaaagccacactctatggctagaaatgctaccctcttcatggatgagggattggacacaaactaagtaaaagtactctgcaacaatgaagcaacagatcagtatgaagcatacaataattcggcaagtgtcaaatgagaaatcaagtggttagaacatacaaatgaaggaaggttccaggtagagtaaggtcgaggagcgccaacatttacaatggtaccctcagcatcatctctactcggctcaagacgtcctcctccaaaattcgcttgtttgtcacttgggaagaatctctggccctagtatacgcata

SEQ ID NO: 74384 - DNA, 324 bp, Zea Mays
cgactcatacgtacttcagaacggagggagcaggtgttaggttcaacgcgtgcaagctacctaatacatagatttaaaattggatcttatggcaacgtgcaaattttcggtactcatgtagttcctcgaggatccggtgaagattgaccctgtctgcgtataggtcaaatctatcgcaggagtaagccgaaaatacaaacatgtgacgagaatcaaggatggtgacatcgcggtggtggggggtgatgtggagcgctagtagcttgacaggtgttgattggtacgtgaaaccatatcaagcgttagtatcttcgaagagtttat

SEQ ID NO: 74385 - DNA, 430 bp, Zea Mays
gattttgttcaaaactgaaaacctgaaatttcgtaaatggagcaaagtttggagcctttagtgaccagatcatggggttttggactaaggatcctatagcaaaatggaagaccatatcaaggaaaacaaatttgatgcaaagagttggcttgctactgtatagaattgtgagtaaaatgcctttgagtatgatatgtcatacttggttgtgctatagctgtttcagttgtctgaaattggcaaatcagtgtaagtagttgatcttcgagccctgtagcttgggatccatacatcattggcccaaggttgctatagcaaatttgaagagctatgtatggtgaacaagtttcttgtggagtattgagtctggtgctgtgtaaaacctgcagtaaagtgctctcaaatttctgctaccaatatgtggttattt

SEQ ID NO: 74386 - DNA, 704 bp, Zea Mays
tttaagcaaatgaaacttagtaggaataattcatgtaagatgttttaccataatagttattaaagaaaataattcaaacacatagccacattttagaagtacaataaaataaatctataatcttcacatatttatttaaaagaatataatttcttatgtaaaatctatattaagagatagtttaacttaattcttttttagggaatagatctttaacacaaagaatagttcacataaaaatcttttagatagcctattatttaaaaacacatttatttaaatcacgaaatgagttttcctaatttatcgagaattggattttagagtgttacagccatgggccaggatatcacacagtccactcaggctaggatatcacaatccacgcccttagaaggtcgatgtcctcgtcggtcaacactaagtcagaaaccttccctcttgaacatatttatgtgtctagtgtcgtcatatatgatgccatgtgaccattctggacccatatatacctgaacccctaacccacacatgcccataaaattgtgagggttggctctgataccatttgttgcatcccgtcctattgggggcccattctatcaaaggtcctcatttaaccttcacttcggcgtaaacaaatgtgtttcaggtacactactatcaatgggcgaagcttgctttcgactgaagcaacatataaagaa

SEQ ID NO: 74387 - DNA, 465 bp, Zea Mays
ctcggggttcagaagaactcgtgaaggaatacacgatgaagcggtttgcaatcaatttccgaaactggagctgagatgaatacaaagtttgcaaagaaaggcctagacccgacaaaaaaatataaaatctcagcaggtcagtgggcagtatttgtagagcagaggagcagccctgatttcatatctctaagcgaggcaaattcggaactatctaagaagaacaagtaccaccaccacctaggcacaggtggttacaagcgtcaagttcctaaatggagacaagaagacgccgagaagaaggccgcagggttgtcgacgctgtccgagcaacttggtgaaaggacggctaattggatctagaaaaccaagggaaaccgagtctggtgtatcttttgatgatcccactatcgaagaagcgacaaaaaacatatatgcaatggcagctaagcagagccaaggaacatt

SEQ ID NO: 74388 - DNA, 440 bp, Zea Mays
tcttcacatgagcaatacacccaaatgtcctcaggtgatcaactctgggtcttttcccatgccatgcttcatatggagttttcccatccaaacttttagttggtgacctatttagtaagtaaactgctgtattgattgcttctccccaatattttgaaggcacacctttgctcttgagcatgcacctgaccatctctaccacagactggtttcgacgctctaccactccattttgttgaggagaatagggagtagtagtgtagtgcttaatcccttgctcattgcagtatacagtgaaggcatttgagttgaactcaccacctccatctgttctcaaggccttaagtcttccactataatcaacttctgctcttagcttgatcttctgaaacgaagccaaagcctcatctttagtctttaataattccacccacatgtac

SEQ ID NO: 74389 - DNA, 488 bp, Zea Mays
attatcacttatcttaattttgaatctttagcacgatatgaataaatcaagacaagtgaatggctcaaggcatgagacatagccacctagcatactagtaatagcaaaaaggatttcaacacatcctacatatgctaggtgcaatcttaatggtgaacaattttagattgagcaagtaatagtcaagttcacaattatgaaaacaacttagctcaacaatattgtatcaatatgagcaaaaagagcctaagcatgccatagcattatcatgtacacaaagaacatactactagaaacagaatcacattctagcagttatacaagtgaagctcaatatgacatgcagatataatacaaaagaaagtgaaagcagaaaataagaagaaaagacaaaaagggagccctctaatcaaaaagggaaacaaacacccaattcccctcgcaaatgaacaaaagttttttgatcaaggggtttggtcaaaatgtct

SEQ ID NO: 74390 - DNA, 539 bp, Zea Mays
tttggttgcagtttcttctcatccctctagtcttgactcttgagacaactatgtgataattttatcctaatctctaaccttaaactaaacaataactttattgaggatcgtctcatcttgtcttatttcggctgattggttccttgcacctgtgcagacacgctcgtgcgaagctgtctgatcggatatagtcgtttcgaccgtacaaacggatgtagataataaatatcaaactgacttattttacattcactcaaactgcgcacatctttaaggtacatacgtttaagtcaacgcatccagtgattcatgacttggacaagacgacagttgccagcaaaggctgcagtccgcaaccatcccgctgctctccgttccatcaccttgcgtcttgcgctcggcagcctcgtctcccccctctttcggcgaatgccacgccgcctcgaatcgcgcgctcatggcccgagcgatcagcctcttaccacctctccacccccaatccatcagcgccaaaaatagataggggatgaggaatcgcc

SEQ ID NO: 74391 - DNA, 394 bp, Zea Mays
gcaccaaattgctcgcagtaggggttacaagcacagtgggagaggggaggaccccaagtcctaggaagtgattgaggcaagtgccaataccatgtggaggagaagactgatgaagtattcacccgccgtgtgtcttatgtcactcctaaagtcgtggactatcctttttataggcccagggagagttgcctcgtagactggagctgtctacatactgtgaaggggtgtcttcataccttgtagacagtatgggcttgtactttgtcgttgacttgtgcttgcttgttttctgttgagagccgaggccgaggcggagggctcggtcacgtacccaagccccctggcatggggttgcccataccgtagtggtcgacacagtgcccgtcatgggaaa

SEQ ID NO: 74392 - DNA, 515 bp, Zea Mays
ggtgccttgcgtccctcccctggtcgtggatctcccacgccacgtggtcgtggtcgaggtcgtggccgagggatgggtgcccgcttggcccacgggtttgcggcatttttctccatgtgccggaacaatgctgcggatgtccatgaggtggcaagacgacagcgggagactgacgacaaccttcgtcgtcaagcttcctctttgggtactcccttcgccccccggtcgcctgacgtgcctctccatcctcctcccccggagatcaacgagtggtaccagcaggcatacggggtgccttttatgacagcagacgacgtcgacgaagaagaagcttattttgatgatcgtgagcagtttgtctcgcctccgtatcacggggatccgggccaatcatcctctcaccctccgccccaggatccttctggcagtgctcctcccccagatcagtctggggaagaacactttgcctctcacctggcgcaccacctctttgctcctcatcagcctcctcccaa

SEQ ID NO: 74393 - DNA, 650 bp, Zea Mays
cattagggcagataatgactttcggcagtgccgataagaggcacaaaagtatatgaaagcgactaggggattaaggggaagatttcaccccggacatgtgcaaaacatccaaaacctaagccaacataatgacaaaatgggtcaatctcaagaacaacacactcagtcttaggacatgactcaatcatcaagaggacaacaacatttgcagggtagtttctatccatcagctccaagaggaggaagaggaggtcgaagcttttggaggttgtcttcaaccaaagcacacaacttcagaagccgcaatgtatcttctatggagaaagcaaaggccacacagctaaaacctaccaaatcaccataaaaagcaaaaagaacttgtcgtcgcagcacaatatagccaacccaagaaggttttcctcgcttcatcatattattcaccttatatccctcaacatgttcaacataaggaaccaaagccacaaccttcggtctccactgcttcggtcaacccacaaccaagccattggggagctccttaacctttcatcttaagacctccaccttatgagaagtgtccatagtccacccaaagtttctagtccaggacatgcatcagcaggatagaagggagccctccaaagctcgca

SEQ ID NO: 74394 - DNA, 374 bp, Zea Mays
ttcaacttgttgagatgatcttgaaatcttttctgacaggtggacaaacactgccctcgatcacaagttgaaccgatactttgaagtgtgatcgttggagtgtgacattgcagatgtgacatagggggcaccttttgatgacgggtggttgcagcatttttgaggagccgaccagtcactataaaatggttagggtaggctagggtttactttctttcggcttggcttttactcacaatttgatgccgcatttcttcacgctcactttgggtttccaccaccattctcatcgttgttgtcaccatcgctatcatcgcatgctctggcggatcaagcagacttcacatccccgccaatagtatgtgtcacttccc

SEQ ID NO: 74395 - DNA, 307 bp, Zea Mays
agaagctaagaggacctaagtcagacatatggaactacacactaagtcgtgccttgacaaaggcaatataatcaaggtcatcaccagtgatcaacatagcatcaacatatagaagaatgagggtgcgacctcgaggtgaagtgtgaacaaagagagtaggatcatgttggctagcaacaaaaccggtattagtgacaacagaggtgaagcactcaaaccaggcacgaggggcatgtttgaggccataaagagaacggcgaagtcgacagacatgaccatcagggacaaggtaactagggggagggtg

SEQ ID NO: 74396 - DNA, 893 bp, Zea Mays
gatagattatcaggtagctcgagttgataggccatctctccaactggcctaaaaactctgaatggtccaataaaacgagggaacaatttgcccttgactttaaatctcttcattccacgaagtggtgacaccttgaggtacacatgatcaccttcttcaaattccagtggtcttcttctattatcagtgtagctcttttgcctggtttgagctaccctcaaattctctcgaagtatacggacttgttcttctgcttcttgaattagtttaggcccaaagaactggcttcctctagtctgatcccaatatagaggagccctgcacttcctcccatataaagcttcaaatggtgacatcttcagactggcctgataactattattatatgagaactcagcatatggtagacttttatcccaacttcctccatgctgaagggcacaagttctcaacatgtcttccaatacttgattagtccttttagtctgtccatcagtctgagggtgataagccatactaaagttcaactttgtattcatattctcatgaaagcttctccaaaatcttgaggtaaactgtgaacctcgatcagacacgatcttctttggtactccatgtaaacacacaatccgagccatatacaactctgctagctgagaacctttataagtagtcttgaccggattgaaatgagccactttagtcgatctatccacaatcacgcatatatcatcatatcctttctgggtgcgaggcaatccagtaatgaaatccacaccaatctcttcccacttccactcggttatcttcagtgggtgcaataatccagttggcctctggtgttcagccttaactctttgacacacatcgcacatagccacatgtgcagccac

SEQ ID NO: 74397 - DNA, 350 bp, Zea Mays
acatgcttaacatgaccatgaaagactggatttactgtgagataggtagctccaatattgtcacaccagatttttgttgtagggggataagaaatttttagttccttcaatagagactgaatccacatcaactcagcagtggcatttgcaatagttttgtatttagtctcagtactagatcttgacatggttggttgtttgcgggcgctccaggataccagattactgcccagaaaaacaacaaattcccctgtagagcgcctgccatcaatatctccagcccaatctgcatcagtgaaggcactgaccagcagagaaggtgactttgaaatcttcaacccatggtgaag

SEQ ID NO: 74398 - DNA, 674 bp, Zea Mays
cggacatgacggggcctggaggagggccagcggcggtaacctcaagcgtcgtgcttgaggtttccattgccttctgcctaatggcgttggcacgcctgttgaggcaccgcctgagatcgatggcgagtatcttgaggcgtgtgggatgtcattagcaaggggccaggctaagcgctcgacccctacctagcacgccaaatgtcgaatataaaacttctccggctgggtggcggagtgcacccgccctaatcctaggatgaggagagtggctagggttttgcctgactagctagttgaactcgagaacacaagggtttatagtggtttgggccgccggagcgtaacaccctacatccaatgtgagatgtgttacttgagaactagggagtcgaaggtctgagtgcgaattgacctccatagaagcatgagttggctctgtcctctaccgtgtgtgtgccctcacttttatatcccaagggaggcatgtacatggtgaccgagccctgacaagtggacccaataacctattgctagatatggagtaagtggagcgacagtctgtggagaacagatatcttctcttggttttcgtgtagatctcctagcttgttgtgcccttgtcccatctaatcagagtagagtgcaagtgtaggctacggcgtaggctgacgcac

SEQ ID NO: 74399 - DNA, 328 bp, Zea Mays
attacatgctgactttggccagtaagaaataaattattttcaggacagaagaaaaatcgaggctgatctttttggggggaaacttcatggagtcgctgctactaatgctcttgagctaggaattgatgttggacatattgatgcaacattgcatcttggatttcctggtagtattgccaggtcggtgaagaatgacatattcaatgaagctcaatgtttatcttgtcaccctgctaagatacaaaattttaactgcagcttgtggcagcaagccggtaggtctggaagaagagctaaacaatcactagccatttatgttgcctttgag

SEQ ID NO: 74400 - DNA, 614 bp, Zea Mays
gatcaacggtctaaaaggtcgttctcctacctcccgtgcacatgcagtggtgtgggctggcaacggcggcgccatggccgcaaccacccagacccgagcaggggaccgccaactatgcttattgtcgagctacacgtggggaagacgaaggcgagcacaatagtatgcttcttacctaggtttggcgtgccagggtatgcagtcgtcggagagaagcggccaggtggtggatttcaaggccggcgaggaatcgccccagcattgacgccgtacttctcaaattgatggtcgctgtgtcttacatgcgctctagcgaggctacccgaccacaattgaagccctggcgctagcgtggatgggaaatcagcccacggcggtagtcccttttctctcccctccgcctatggttcaattggtgactgggtactcggcgagatggataggggagctggagcggccgggttatataggggcggggcgagtccgagctcaagaatcccgaggatccgcaacaactcccgccagcgtagggcacggagcggtagctgcgggattgacgaagttcgtttcggcgtttggtggcgatatgcggaaggtgacgtgcctgacacccg

SEQ ID NO: 74401 - DNA, 607 bp, Zea Mays
gatggttcttggctagtcttcatttcgcttcatgcttcaatgcttctgttgattagacttgtacttcagtagctatatttggctttcctccgatctccatcgatatctttcttttgtcttgatacattcattgcatatactgtatggatgtgactgcttgggaaaatctattgaaaattcctggacgtcccctcccctataggtgtaaccaagggacggcttggtacgctgagcgtttagcaaactgcccttgagtagtaacttgatgtgaccgcggggtgtaatcatatcgtccaagcagttgacctcagtccaaatggtgtcgtgttacgtgaaacggcgtctgccgcctgacttgtttccagacgatttgaattgcttattgaaaaattgcgattgttcagtgaccgtggtaggtgtaacatcccaaaatctcaacccaaggtttggaaccctaatctcctaaccccccttatttctattttctccctaaactccacccttaggtcatctcatcatatgcatacacttgggttgttaggagcacctcacatagattattttcaacacttaatattatttagcaaattgttgattcaaaagaaaa

SEQ ID NO: 74402 - DNA, 774 bp, Zea Mays
aagagatgcctcacgacttgggaatactcctccaccccaaattttgcattgacatctctagagaattgcatccaatttcccaatccatgcttcatcttgtgcacttgtagccacatcacaacattgccttccatgtacatggctgcagatattgcccaaactgccttaacaacttggtagatggtgaagtagtcttgacatttctctaaccaaattctaggatccgcccttggaacttggggaaagagtacttgggttgtgctggttatccatgtcctcctgcaccctgatctccaacatctctgaaccagttggaatttgctcttctttctcctctttttgatcaccctgatcaggcccctcctaatgacctagagcctatttcttccaactctctagccatcacctccaactataaacgcgccaccaccttaccaggttcctctatctggctggccaggatggtgtgttcctcctctgccttttttgccaccgttgctgcaagttcagcttgaccttccagacattgttgaccagcttccaccccttccaacttcttccccaaatggtccagcaccttcatcatctgctcccacttctcctcccctcgctgctctatagacaccattgcctccagcattaaccgggtttgagcagatggtttgaaatttggcatcgtcttgatgacttccagggatcaaagactttgatactacttgttatggcccttggcccacggtatcaccaaccgaggtgtgagctctcttctcctga

SEQ ID NO: 74403 - DNA, 308 bp, Zea Mays
tctagcctagggatgggatgaagatatctgattgttatgttattaatcgctcggcaatctacacacatgcgccaagatccatctttcttaggaaccaaaaggacaggaacagcgcaggggctcagagacttacgcacgtaacctttgtcgagcaattcttgcacttggcgctgaatttctttagtttcctcagggttggtccggtatgttgtatgattgggcaaggaggccccgggaataaggtcaatctggtgctcaatcccatgaattggtggtagcctcggtggcacctcgtttggaaaaacatc

SEQ ID NO: 74404 - DNA, 494 bp, Zea Mays
atcgtggtcggtgggtcgggccccacgcgcattgaccgctcggcttcgcgcggacgttcctttcggctcgctgtagatcgcgagcggatacttggtcctcccatggaatggaacgaccactgcgcttgtgcgtcctgccaaagtcgcatactctgttctcgttctcaattagcgcacgcggtgtgcttcgtgctggactagacttttgcgggctcgcgacggtattcaatcaggtactgggaatacagtacctgtgtttaaaccaatgagaagggagcagatgtgcagctcgtagatcaatcacatcgagacaaactgttacatttgtttgttgtggagggttagtgtgtgcgtgattcgggctatctaggacatacatgccgaaaggggagtggatcagcctatcatttgagttgtttacaaaaaagttatgtctttaattagaattcagacggctggactttactttgtaagtttctctcggccaatagttt

SEQ ID NO: 74405 - DNA, 388 bp, Zea Mays
gtgaggttgtttggatattagcatgttgtcttccccaattggtttgggttttgtggtgtattactacttgtcctatgtggctcataggactggccattcctttcctaccttctaagcgggaccggaaagtactcgcccccatagttttgggattctatattatggtgttgatatgttgtatgatgtgatgggaggttcagctgaggcagatgcagatttgggtaacaatcttcctcgaaaaactctgcgttggaccgtccggttagatacgcggaccgtccgaccatatggccggcccatccgttgttgtaggcggactatcagtcgcagtatgcaaacggtctgactggtggtttagggtttgcatagtatgtggcgactcgggtgc

SEQ ID NO: 74406 - DNA, 453 bp, Zea Mays
ctagatgctagcatagtcacgcagaagctggtgctcgtggggcgagtggttctcgtccggccgataggaaacggcaagatttccgagtagaagcagcagcagcaacttccttgggtgcagaaaaaagcggccggtcgacgaagaatgcttccgcagcatggcatattccggaggagcaaggatgataccccttgcaaagcatgcacgcacgcacgcgcatccatccatcttttttgcgtcgagcagtaagcagaagcacaagcacggcaaagtcgtcgtcctaaagggcaccaccgcacatctcacgcacgcagctgggactttgcatctttggcaggcagccgcagcagcacaattttgatggttcagcttgtgccagctgggcttttgcgatcaagatctatttattattcgacccgtccaattttcccctttaatttggtcgcctatgat

SEQ ID NO: 74407 - DNA, 432 bp, Zea Mays
agaagatattgaaatttatggtcgcttgaaagaaataattcagctgcagtacaatgcagactctagcggacatcggtcagtgcttctatttcggtgtgattggattgatacatgtagtaacagggcaaggatgaaagatgatagattttttagaagcatcaaccatgcatgtatttggtataaggatgatccttttattctatccacatagacgaccaaggtattttacttggaagacaccaaatatcatggtgactagcgagttgttcacaaattttcacgtaggcatttgtggaatgtggctaaaatttcaattggtgaaatatcaaagggtgtggagctgttataccaagatgatgaatgtgttgattttcatattcaagattatgaagttaatatggacaatgccacgttggcgggtgaaaattcttt

SEQ ID NO: 74408 - DNA, 590 bp, Zea Mays
taacgcaccgacccaggcgcattgagacaaccgatgtgtcgaagctaagtgaaagggtggaaacaaccccctggccatagaggttattcctgttgtgcctactggaattattgaagacctagccagaaagctagtgcctgtaacagaaaaagtaccagagcagccgaagatgaaagtaataatattgctgaagctgccaactaccacaggcactccaaggaaaaggaggatggcaagcgatttggaagctattctagagtatgtgaagacgccaccttcttcttctgccgaagcctctaggagtaaaactgaagaagttccaaagatgattactgccagcacctctacccgcaccgaagcggggccttcggaagccgcagaaaatcacacggaagagaaccttccagagaaaccttcggtgccagctcccgaagcaccttcctaggatgacttggactatatcgttcgacatgcttcaggaaagcaactaacagaagagcagattgtcgaggtgcaacactatgccaaggatctgaaatacccccgagggtccttggtatatcgtggaaatgacgaagatgacttccttt

SEQ ID NO: 74409 - DNA, 1108 bp, Zea Mays
ggattctgagccgcatgatctaacatcggtggcctagattagacttaaccctatatgacccggtatgcaatctctcccacacgacttggaagagacgaccctgattctatttggttggattcgatctcacccgtgcacccatgatccaacgatcccggtttactaacctaaatcgttatactctcctgttaatccactcccttcatcggtcgatcgacagccccagtttttcttcttcctcaacgcctagtcacattggtggcctccacaccgcgaccgccattaccggtgtgcagcttccgccacctaagtgccccgctaacagttcgactagatgctacttaagatagagggcaagacgaacaacatggagacactcaccggtgaccgaaaccgcggcgacattgaccccgacccaaagcggcttgccaacgaattctagactccagtacacttcggcgagcactgatgcacccatccgagcataggcaagatccgccaagatccttcgtgagccggtggacgtctcgagtctccacataggcaccgaacgatggaggaagtaggggcgacggcggcggcaatccctcaccaatggaggtggcgctccggttgtctttcttggcactagagtcgagcgcatgaaaggtgggaggtgaaggatatgtgcggcaggtagatatacccgcagccgaggtccacggctggcgaatggatccccttggattcctggccatgcgaaaaacgcgccgcgagcagacctcaggagttcgttgcagaggaaggggagagtcctgacaggttgaccccacatgccagcgtgagcaaggaggctaggcgcccggcgtgcgatgacgcgactggtcgccccgggcccacgtggtagtgagatgatgcgtgcatgcgtgtcatgagtcagccagccgtggcccgcatgtcagcaccgggtcacgacctcggtaacacgactgcggtttagtgggatgtgcgcgggaggaattggtgggccgagcgcagggtttcagcccaaaagtcgttttttccttttcttttatgttttgcatttctttctccatttcaaaatttactatttgaatttgaatttgtt

SEQ ID NO: 74410 - DNA, 527 bp, Zea Mays
gatcatgctcgggtgagcgggattagatcgcaatcatgtccaatgccaaccactaatctgagatcctgcgcgccatatcgagtacctgttagatttaggttggagttaatcctggccgtgtgcaatcgatcggacggctcgcatggcgcaataccccttcgcgaagcccaatttgcatataagcccctcatcttcattataatgaacccgcagtctacccagttcaatagaaatagcacttgggcccttagatttgataaatatgtccctgctacttacaatcaagtccctgggagacattttaggcgtgaaagaaatagtagaaacacgtagaaacttggtaaattcataacttttgcattttatctcctttttatccattccaattgcattagattcataataatattgtccaaacagtatggtactattttacattatattccccacttttacaattggataataatctaacctatgtttaaatatattaatcacttttgattacaaactaagtatgatctttt

SEQ ID NO: 74411 - DNA, 573 bp, Zea Mays
cttcgtcagaagaagagcttcggaaaaaaggttattaatttgcaaggaatttttaagaaattcaaaatcaaatggcgagagtgcgctctactgctagagttgagcgtgatggagatgaggccgaagctgctgaaactgttccgatttctgtagcgatgaagcgttccgggctagttacagcagaggacacacctactgccgaagcaacacaagctgatgttgaagaagttggttctgaggatgagttcagctgcggggtaccaactaaacctagtcatttggactttggaaaatccaccatctctgaagctgaccttccaaaattggtgaagctgggctacttcagcgaagcaaaaaaggagctggttcgttttggcggagaggaaactactccgaagccggaaaagaatgaggtagtagtgttcaaaagcttctttaaagcaggattaagatttcctttgaatgggatgatcgctgatgttttgaagaaatttggggtttaccttcatcagttgacccctaatgccattgtcacattaagtgtttatatttgggcccttcgtagtcaaggag

SEQ ID NO: 74412 - DNA, 775 bp, Zea Mays
ctaaaaaggatgcctatgtaagttatataaatatttacacaagatttgtctatcaaaactatgattgttatttagtccaatgtttaatatagcttcaggttgttcgacgactaccatgatgaagatttttatgggctaccgcggaaatacagtattgtcgcacgggtagaagttaaattcctgattgaaccacattatcgtgacagacaacatttccttttatttgacatcaatgtaagacaacaattctttaagtttcatttacaaattttcctgatcttcataatgtcactggcttctcctattgaaatattattagggagccaagatcgaggccatgacatcttggtatgatactgtcaaacacttcaacaatttgctccatgaaaagcatgtttacaaaatgcataacgtaaagtttggtcttcatctgggtgaatttaatttttgacatctaaatggtccaatggaattgtatctcaaccaacaaactatcgtggagccatatactgttccaattcaaatgccgccattcctaaaacatatattcttgaaccttgctgatattgcctagttgccaaacgggactttagttggtaagaatatttcgatctcttaaaattatgaaaacatcatttacacaaaatttagtattaatccatttgaattgttatttttgtagacattatggctattgtagtccacttggatacaattcatcgcacaatgtggggtccattcagaaagattgttataatggatgttaggtatattt

SEQ ID NO: 74413 - DNA, 289 bp, Zea Mays
tgatcccatcgatgaacgccatccctgtacgtcatgttcaagtgcataatgtgcacttttgcatgatccatggatggacaatggtagtgtcgctgccggtggttgaatgcagtctccccatctcgcttccatcatcgctggtgccgatgggaaatgtggagtcgtcggcaacagtgccgatggaggtagagttggcggcaccaccgcctcctccacccactgtcgcagcagttcatcgtcgccgttccccaacctcgccggagccggttgtcgctgggactatcgctgc

SEQ ID NO: 74414 - DNA, 1050 bp, Zea Mays
ctttggcgcatctacccattcagccacacatacatctgtctcttcatcactgtcattattgggctctaacatgttaaccccctgcttctctttctccctgccattcgtatctctaaatcggctatactgtttattgtccctagcacgactttcatgggtgatagcacgctgcatgacttggtttatgtcagtaaaatcttgcccctctagtttctccctaagataggatgataaccctgcgaaagctaaatcggccagatccttttcccctaaagctaagctataacatttgtttcttgtttctctaaaccttctgatgtattcagaaacagtttcattatatttctgcctaaccatggtaagatgtgatagcctgagttcagtatcaccacaataaaaataatcatgaaatttctgctctaaacatgcccacgtagtaactgaatttggtgctaaagatgtaaaccaattgaaagcggtactagataatgataaaggaaacaatttcactttgtgggcatctgttataccaatttcacttacctgcgctaggtattgtcctacatgctcgtaggtagtttttgaatcatccccagaaaatttcacaaagtccgggattctaaaacctcgaggatatggcacagtgtcaaaaaattcaggatagggcttcctatatgacctagtatgccctttgggctcaaaaccaaattccctgagagtccttgccacctgttctctaacaccctcagatctctcaccctcagctgttgtatgtgtgactcccgatgctgataacaacgctctctgctctccaatcctgtaatcatttggaacaaatccttgtgggatcttgttccctataggtggaatagatggcccgtatgccatactctgataatatggctgctgtaggttaaagttcattactgaatccccactcctctcattaacagtttggtttacatcattatgcgcaactgctctgttataactaggcgcatatgaaagattttctacacgcttaccctgcaattctccttgaatctgttg

SEQ ID NO: 74415 - DNA, 473 bp, Zea Mays
gaatgggtcaattcggagttaaaatgaattagttatgcagtttctatggtttttgaggattacttttgtattaaaaactatttttgaactaactttatcaataaaatggaatcaatgaacgacggccactatattaaataagttcagggtcaaaactataaagtctaggacctactttaaactgtctttcaataagtcaggatggagggttagttgtttaagaaccttaggactcttttgtaagtttccacccctaaagcggtattctcagcgctgagccattggatcttcatcacgcggctacggttaaacggagcgaaggggtaagcggcgatctaatcccacacgtcagatttgaatcggacggacgacatcaaccttggccgaaccgatacatgagatttaatcccgaccgccaagactcgatcggatggccgtggctttgtgggacgaaggggtaccttctacttccg

SEQ ID NO: 74416 - DNA, 304 bp, Zea Mays
cacacatctatgaatgcatgtgcataaatcgtattcatacgagcgggtgtttgattcccacctcataaaaatgagacattcttaataaatatttagggacaaaagtttagtctctaaactttagaagggtgactattagaaccaaatacccccggtctgttagagagtgtttgtaattcttacaattctttagttaaatactcctaaatatagagtagtgttgttcaaaacaaggacaaaaacacgttttttagtgcgacgttaagagtcgctagaaggtgacatccgcggggcgcggtcagcg

SEQ ID NO: 74417 - DNA, 468 bp, Zea Mays
gtttttgcactcaattctcacccttgccttttaaaatttgaaagtacgtgcaatttgtgtgtagtagtaatttgcatgctgggggtgtcatgatagtaggatgaggatggggaggaacgacgaagaaatggagcactgtaggcagcagggcagtgggagttgcaaaaaggtttctttccagaaagataggggcatggcctcatagagtcatggggcacaggcaaaagtttggcctaccttttctcgagctaccaagccaagaatggagcttaaaatttttcatgtcgtcagcaagaccggtacttgggctcggattattattggaacaatagccacgtcatcaatcatcatggtgatcgaaggcttcttagtttcgctatatttatgcataagcataatacagcggatgaggtgaatttgaatgctccccctatcccaaaaaacgagttatcttctcatttttcgatt

SEQ ID NO: 74418 - DNA, 761 bp, Zea Mays
gaaagatgaagccgtccaggtcagagatgtggctattttggacaatgtgttgtggattggcgaatgccaggactaccagaccttgctggtggaaatcatcagagaaaggaatgcaactttgactgaggtagcacaactcagggcaacatgggtcaacctaatgcagcagccgaacaatgcagaagcttggaactctagtctacataaggaggttcaccaactgtttgcccagctcaatcaaatcaaaccgtcagaaccagaagaagcaaatgccgccgcagtcgacgatggaggtgtagtctccaagaccggcagcgtgcaggtgtagttgttagccgtcgctagaggataggctaacccttttggatagtgttcctaggagtaggaacatgactcatggtgtaaggctgaagtaatgatggcttctgacgcaggtgtgcgtgtgtgggaaaaacactcttttggtgggttgtgcatgtgagcggaacaattttcttgtatgtgcattttcatattatgaagtatgtgatgatgttgttgcgcatgttgggatgtgattcttgccttgcgatttttcacatgaagttttcttctatgagatattgtacgacatgatttccttacttcacatatgtgcaatgtgactcgccgcttactcataatgaaaatgtgcagatggtgactactcgccgcattaacccaggagccgctagagcttctggtagtggtaaccaggagggtgaccaagaagcatcagttcc

SEQ ID NO: 74419 - DNA, 493 bp, Zea Mays
aagaagggtaccatttttgggtaatcgtacctattttggtagaagttgtaggctgtggaaaggagtttgtgatggttccaagctctgaggtgacttgcaatatcaggaatgaacagatcaaatttgtgccgaggattcatgggaaaaacaaaaaaataatgttgtgtcaatgtagtatgaccagaataaaaatgtaaggtgttgcctttttaaagaaacatacaacaaatgtgtttgttggtttattagcatgcatagtctttaagtaagcaactgaaaaattatgagtaatccttggtttttgtacatatatcggtatttgtacagatagactcgatcgtcaaactcaactttttgtatgtgtgtcaatgtagtatgaatagttacgttgtttaacagtaaacgacctaggaggggtgccaggcgtttaagttagttgatcatacctgttaacgtcattgtcagtatcataatatttgaaagattgaagatg

SEQ ID NO: 74420 - DNA, 817 bp, Zea Mays
cgaattcagagaggtggtataggaatccttcgttcgaaaagctatcacaaacagataagctcgaaaacctccctatacttgagcaactcctccccgcttgtccctttcacgtaggattctcacacactagcttccttaattaattagccaagacgaaactcataatactccttgtggttgcaccgtttttccgggtggtcgctccatatttcaattaaacaaaggatcagggttgtacatgtaacattatcatgatcagtggtcgctccatatcatgcctaagtaaaccatcaataataaatcatgatcagtgttatacatgtaacattatcccataaccaaatagagcaatagcaaatatacccaataatagagttgtggttcgttggtggtgacgtttccttgcaccaagtctccgatgtatcctcaccatcatctcatggctaaggaactttccaaatacttcttcgggagtcattttcttgtacctgggattctcacgaaccaaagatacaagagtagcattgcgagaagtaaatgatcttaacataagttttaccacttcatgattagagtattagaccacttcttgctcccgagattgtagatttgattcactaggctcttaaggcgattgtatatctcttgcatgccttctctcttgaggatggcaaatctcccgagatcccattctaggagcccccttttgatgatctttgtaattttgtcaccttcatgcacttttagtgtcccaaatatcttaggcgctttccaagccattcaccttattgtattcttccctgcagagagaaacaag

SEQ ID NO: 74421 - DNA, 833 bp, Zea Mays
cgtgctgactgaatcaccgtgttcaatcgttcttcttctagtatatcaacatcctccagtctggtagcctcagcttctgctatgttttcaaagatcaacctcggtgccgcaaacttgagatcagcgggtagcactgcctctgaaccgtagaccatgaagaaaggagtatttccatgcagagctcggctaggttgagttcttaggctccaaacaacatacgacaactctctaatccactttcctgcgaacttctcattcttgttgaaaactttctttctgagcgcttccaatatcatcccgttggctctttctaccttcccgttggctcttggatgcgccaccgaggcatatttgatctgaatgtttttttgttcgcagaaatcaaaaaattctgagcttgtgaaattggatcccaggtcggttatgatgctattcggtattccgaacctgaatattatgtcttgtatgaattccaccgccttagctgaggttagagaagcaatgggcttgaactctatccatttagtgaatttgtcaatagcaaccagtacatgagtgtatccttcttgagctttcttgaagggtccaatcatatccagtccccagcatgcgaacggccaggttacaggtatggtttgcagttgctgcgctggtagatgctgctgtttaacaagtactggcaggcttcacacctgtggactaactcggctgcatcactctttgctattggccagtagaaacccgacctgaagaccttcccaaccagggtcctggatgctgcgtgtatcccgcattgcccagcatggacctcttctagcagctacttccctgta

SEQ ID NO: 74422 - DNA, 558 bp, Zea Mays
gtcaagcagacgtggatcagcgactagcggtctcacctaagtctcatcacgctccctgaagcgaggtggaggaaagggcggagcggaagcgggagcaagagcgggagcagtggaagctggagtggtggaggtggtgggcatagcgaaagtggaggaggactctggagtgaccggagctggcgacgtgggaggtggagtggaaactatggcggaaagagtgggggagtagtggagcaaggccgagacacgaggcgacgaactcgatatgtaatctgatcagatgaaatctacatcttgcctcccctctcagcctggtctgctgctgctgccgctgcaagtgttgcacgagtggctctgtccatacgtatattctttcttcgctcctgctgctcaagatagactgtcttccatttgacctgcctgaaggggcgaggagggtcctcgtcgtctcctccccctgacggtgtgacatttttcgtccgcaccatcctgacctgactactgcaaggtagtgtgaaaagataagcgagagtagagagcagccgagaagatctcaaa

SEQ ID NO: 74423 - DNA, 484 bp, Zea Mays
gttatgaatgtggttctatttatgatgaggtagctaaaagatctaaagatggataaaaatcagaacctggcctatgagatatattatggctctaatcaaggccaaaaccatatttgaggggcagtgtgagactgctcacactccatttagaccgttcaaaaatgagattgattttctcactaggcatctcaccccttttcctgatgatgagggagttcctgcagatgacttcgccgctcagcctgaggcacatccagctcagcagatgccacctcctcatgagcaaggatagtactggcagcccgcacctagttattttgatccgtattttcagcagatgcatcatgggctccagactcatatggatggatgatttcagggcatgatgacacatgtggatggccgctttgatgctatgcaatctcattttgatgtctaatattctgctctgcacaatagattctctgatgttgacacccaactg

SEQ ID NO: 74424 - DNA, 514 bp, Zea Mays
ggtctgagatgaatacaaagtttgcaaagaaagacctagacccgacgaaaaaatataaaatctcagcaggtcagtgggcagtatttctagagcagaggagcagccctgatttcatatcgctaagtgaggcaaattcggaactatctaagaagaacaaataccaccaccaccttggcacaggtggttacaagcgtcaggttcctaaatggagacaagaagacgccgagaagaaggctgcagggttgccgacgctgtccaagcaacttggtgaaaggacagctaattggatccgtgctagaaaaccaagggaaactgagtctggtgtatcttttgatgatcccactgtcgaagaagcggcaaaaaacatatatgcaattgcagctaagcagagccaaggaacatttaagccgcaaagggagagagacattctaatggctggtctcggtaacactaagcatcctggtcgtgtacgaggaatctcatctaaggaaggatggaaggaaggattcaaacc

SEQ ID NO: 74425 - DNA, 274 bp, Zea Mays
ggaatgtatcgctcgctgccgaagaaatttggagggctctgcctcttgaacaaaagcacctttgctttccaaggaagggctctccaacgatggtcgtcatcggtacgctacggccgatggtgcggcacgctacgaccgacggaccgacggtgtggtaaatgctatcaacacccataacaaggtactacgtatggtccaattttctgatcacaagatgaggacagaactagtgtgttcgtctacatgtaatgcgaccaaatgaataagtaagatc

SEQ ID NO: 74426 - DNA, 692 bp, Zea Mays
cctgcatgcaacaggcgtgggatgtgatgactggcggtgaagaattggtgatgggccttgaggaaaaaaaaaaccaacatgctcacatgatctctgcgaggaacggtgagcaacacatgaacagtgcagtctagaacacaaaatggttgcccgctgtacttgctagtcccagcaacgaacgagaggccatctgtcacagatgagtttgttcacgcgatcttggcacgccccagtactgtacagtactgtacgggaaggaagtacgcgtagtacatgattgataacaagaacgtgaacatgatgatcctgatctgcggggtacaggtctcgccgcttgtaagtactcctactgggaactgggccggtcggccggaaaccaagcccagctgttcatgttcccttcgtggctgaaactgaacaccaaaaatacatttcctccgtactgaaagacagtctgagacagtgagaccaagtgaccaaccaacgttcggtccaaaggccccccttgtctggaaagtgggacgcttttgcgatccattatccggttacgttacgttgttatcggccagaggcacctcgtgcttgctcgtcatcaggcaccacgcgcgcttgcgattgggattggcattgccattaacaagcctccagaaagcaccccccacgtccccacccaatgcatcgttcattttgca

SEQ ID NO: 74427 - DNA, 604 bp, Zea Mays
atttctgttctcaaaaattcaggtttgagcattgggtatttttgaactacccaaactgtcgtgccaccttcacaaaaacacatacccctaccaaatcagtaaaatatagattgaataatgatatacttgcacataaaaacacatacactctacaatcacaagttcacgactcaatactggcatacacacttatacatacttatagatacacaaattgacaataaacttgacatgagtcttgtgagttcacgtacttcggatactggagggtgctacctgaaataagttcaagtttggcaagttgccaccagaattcccaaacaaaatttagacttttgtattccatgtttgaattcgggtatccagttacatgtttttccaagccctattagtaggtatgaagcactcaattaattgggatttatttagtgtcccgtctattttctaggtccatgggttgatcgatctggtctatgtgttgttgcatcagctggagttagaattgtgcaaattatgcactatgttctactcaatataccatgtgcacaacccatgtttggaaaaaaggtacaaaagacaaactatatcaatttgtccaatatat

SEQ ID NO: 74428 - DNA, 917 bp, Zea Mays
attcaccacacattattttaatagtgcccataaatgtccaaacttcaagctcgtgattttcattttgcgattattggttcagcctcgattgcatttatcaatgacccaataagagagcttcaagcactcatgcctaggactttgttttggatccctttgcaatctatagaggcaagataggtgtcgacacatttgtctcccatatttaataatgatcttcgtcatttcccaaaacaaaagattcattgttccgtattcctagcacaatgatattgcgcgcattgctataaatttcatcatcaagatgaacctctcagtgaggaaaatcaccatcagggtgaattaatcgaaggagagttatcacagaccacgtgaatctgcaatcagaacgtatgctttgactaaggctgatggatcatattcgcaggcatccccgcagaatagatcaaatgcaaataagtcaaatgtgaatatgatattaatcccgggtatatccacatctacatcaggtagaagcattcaaaccaatatggttaatcctcaacgatttctagcaaactccatatacacaggagtacacactgaacgacaggttcagtttggcttttgtgtgttttatagaatattgaggcattacactagatgaacattcctccccctaatgccgagatgttctaaaagcatacatataaaatcaccaacctcaatcatccagttgtggccaatttatgctattatggtgatttatttgggaaatcttacgcacattacagataggggttttatgcagtgagctttagacttagattaatgtagtggcatgaatactacatatttgtccttcaacatgaagggttagtctcaacatccaacgagacacgcaacaacaagttgcttcatggttacaattctgcaaa

SEQ ID NO: 74429 - DNA, 1921 bp, Zea Mays
aacatcatgtaaaccctaacacacatggatatatagctggattcggatcttgctctattttcttgcgaatatatagatatatagatggatcggaattgaaggtttgctttttttttttttgcttgcttttgactcctttcttctgatttctgaagcatatggtggattatatatactgtggcgtcaatctcttctctggttttcatcagatttttaattttccacggtggatttaatttaactgttcaacatagaatttgctcgatcggaaattttgtctttacataaacttattttttttattggtagcatttccagtatatcattttagtaactgaccaaactaaaatgatgattgataccagcctaatttataattttgcgtgtattgatttgtgcaagtgcagcagaaaggagccagctggaggcggcggatacgacgacatggccgagttcgatcaagcgctcttcctctatcttaacagcagccaggatcaagcatcagttattcaagatcaacctcgtaagccacacacttaactcccttagcttatgcatgcatatacatgcacgggctgtatatataaggggataaactttattgcatagtataggttagatcatattgcctccattttttatttatttgacgctaattagtccaattttgtactgaccggcgacaaataaaaacaaacaaacggagtaagggagtacatggcagattaattaattaattaaactcaaacatgccattctgtgatgcatctaccctgattggacatggctcaaaacaagaatgagagcaaattaaagatgcgatacaatggcgtgaggatcagacctctcaatcgtctttccttcttttttgtatgcaaagcttgttctctctgagtccgacaaaagccaattttcagagaaggaaaaaaaagaatctctgctagttcaaggagagtgacatgtaacaaacacttgctcgagtatgtgctcatttcattccagataggtcattttctttctgctgaaataacgcagttgggcagagatgtgatttctcatagtctagatagctctttcccttcaccacgtatccacttccaacaaccatatacacacgcatatatacgtgcatacattattcccattctccgcccttatatgtgacaatctaataactagttcaatggactaattagcttagagcttgtttgatagcaactaaaattagtactagcggattcaacctgcaaactattagctaggaattgctaataactgtttaggattgttaatagtttataaatatgtacctttgatttattatccaaccacctattagcagattaattgaaacaatcttcatttaaaatcatctatagctaaaaaaatagcagctaccaactcttaaaaactatattagattgtattttaagaatatattacatctgttcttcaatatttgtcgtctgttaggtaatttttgaactaagaaaccgcgacaaataaaaaagaatggatcggtcatttgttagcatcgctatgccatctctcgtacatgtacacttattagcttctagtttaatcgcagaactttgtgcagaaactctcaacatcttcccttctgaaccaatgcatgtcgtcgagcctgctgcaccaaaggtacgtacgaaaaaaaaaagattagcgacgacgaccacatgcattggctctcgatccagtctccatttagataccttttctcactttcctgccctcattatatatatattgatctttcgtcttatcgtgagctactttaattatttcaagcaggaatctatgggggctacgactaacaacacggcgtggaacaacgccggcgcaggcccatccaagcagccgccatccaaccttccgtcgaggacgacggcgactccggcag

SEQ ID NO: 74430 - DNA, 587 bp, Zea Mays
tgttttttcctttgatttgactggtgttcattgtttgctgctatggaaggaaaatatggattagtttgtcaatgtactaacttttcataatacagtgagtaatagatatattaatatatttgtggttgttattttttatacaaagtggaagatacgtacctctgtaattccttctccgccatcagacttgggagtatgttgatatgtgagagggttactgagcggtggatatattagcttccttacagcctgaaattaaacattgtataacataatttagttgtgagatgttacctaggtagcaggaaaaataaggtgtttgagtatggtcatatgataacctgtatgggtggtggagtacttgtagataaattttgaaaagaatttgatggtgagttctcaattaattgcagttgtaacttgttctatggtgttgatgtaccttctatgatattggttggcttcgatggtagtgcatgttgtctaccatgcgctgtagttatagagatgatgtgaagggcaatggggacctgatcttggttatcgaaggaactgtcatctggtattactctaaaggtgaatttgag

SEQ ID NO: 74431 - DNA, 782 bp, Zea Mays
caaagatgtggcggaaatgtgaagtgcagggatgcacccccacaaacatctcgcacaagtggacaaagatggccacctggaggatgtagtgggggtaaggtgttgaagctggaggcaatactcatccagtagtagcataaaggaggaaattggcaatgcaagctcagaagagatgcaggagacgaaaaggacaaactcccatggctacaaggcatacagtggtagcatccccgcatagatttcgctggcgcactctagcaaagtccacccaagcatacaacacatcttgtcaaggttgccttgggtttggagccggcgaggatgaacgagggaagccatggcactggtggcgccgcaagcaaagggcgaagaggcacgattgtttggagatgaagcaaatgcggggaaggtaaccgcagtgcacagtgtgggcccttatctaggtagactctcccgcacacaccctcggatcaccgcgcaaaatcccaagtgacgaccacctataattatcacagttaggtcgctagaagcaatattgtcgttcacatgcaggttagaaacctcacctaaggtggtcccatgggccactatcgatatctcatatctggggtacccactactactgcctcaaggcagactcctgcacgattaactctaaactatacgctaagaaactaagtaggcatgccccatgtctccatgtgtacttagttggtgtgcacttagggctacccctacgggtctagacccccatggctgaggctcgtatccccgcaaacacc

SEQ ID NO: 74432 - DNA, 674 bp, Zea Mays
ccatcgacgccttgccccaaactctaaattcttgaaatcggatctggttcctaaacttggtttcaaattctttcacgcttgagttacacgtgtctctctgtggcctggcatcgtggcgcgtggctggtgctgaccggtgcctggacagtgcacaacctctcgcccagacgtcgattccgaaaggatcacaatttcgatgttgtatcaatctcgcgtatttattttgtgaaatatcgagccttgtgtctgtttaaaatttatcgattaagtgaatacgaatttggaacctcgacccactcttgtgatttttgacccgagtaaattttattagatactcagcaacaagagtgttggtgcgagattaaatcggaccgagataactagaaccgaactgagtactcgtaattaatctgttccactgtctataattatagaacccgaaaatacctaccagtgttagcgtagtctaaaaatattaaaatttatattgttttaatgggtctgtttacatatcgcgcggatttaatctgagaacttaattatttgtgtagtcttttgtaacgaaaattggagaaggaaaaacctgaattatctttattcttcccatcgcctaactctctccctttttctctctattgatttatctctaatcggtgcacaagctactagaacag

SEQ ID NO: 74433 - DNA, 1084 bp, Zea Mays
aatttttctaatttcattgatccctgggctgggcgtcaaaaacagagaaacgcaggggctaactcgaaatatttcccagactcaggcttcccacagtgtggactgcgggttagttttgtaaaaccccagggtctcttttagaaaattgcctgaccgaagcggtaagattgattctgaaccgcacgattgcagatagacgactaggatcaaatcctttaataaaccgaatcggtacgcgctaagagccggtggatccaagatccacggcttagattcttccacgtcaaactcgcacccgagcccaccgatctgatcgctacggtcacgatttaatgccctgaatcggtatccagagatctaatcggagtcgttcgtttgagatcccacggccacggcttcgtcttcttcatccaggatcggcccacggcggattagagcggcggcgcagggtcacctgcggtctacgccggtgtacggccaactggcgattccggcccaaacctagctaaactggtgatgctacgcgaccctgagtatgcggagaaaacaaacgaggacttaccagcgttagctatggcacccagaaggttgcccacgacgatgggcgacattgcagccgcgatgaacgacgatgagcaataactcgacccatgcctggtcccccggcttcgctggttggggagtcataatcctcgtgctttatagcgtcgcggcggaatccggccagaggggatcacggagtgggggtcggagtttgtttcgaagctcacgattgttgcggtcgagtttgttgcggctcacggtgctcaggattcatggtgccgcggattccccaagggcaggcgagcgaatcgctccatcccggccgagccgttggggtggttacgccagctggggatttctacggagatcttgtgctcatttggttaagatgacggatactgggcacctaatttgttgccgagaaagcagggggagaaggagggtaagggggcctggcgatgggcggttgtcctgccctgtgggcccaagcggtggtggacaggagtgcgtgcgtgcctgctgcgccctgagaggccccgct

SEQ ID NO: 74434 - DNA, 619 bp, Zea Mays
cgctcggtttactgaaaccatcgatcgacgggatcggtttaccaccggtttaccattcttgcgatttgcattttattgagatgtattgtgagatgttatgtattgttgttattagttgtatgatcggtgcagctttgttggaggtatgctggacattgtctgggagcatggagagaaagttggcacgggctttaagtgcaaatattgtagagaaaccaagagcggaggggtggtaccggtttgaaggagcatttcgcacatagagggaagaatgtgaagaaatgtctttctgttaatccaaacataaagacatatttccaatgtgacctggataagacaaagaacaagaagaggaataggtttaggcaacagctgaagacagatgaggcatcacgtacccattttggtgaatcaaatgatgatgagtaagaggatgaactttaggcagttctacattcgtgtgaggagcacgaattcagacagagctagtgcaaggtatgataggggtggtggatctaggtctagccagagggcatcttgagggccacttgataggatgttgggaaggagtaggaaacacgtacctaagcatgttagagactacaatcttggtcaagct

SEQ ID NO: 74435 - DNA, 665 bp, Zea Mays
gccccacacactcatcacgaaccgttctcaattcatggataaactcctgcttaaaaatatcctgatgaggtccatacacacctgtgaaccaccaggaagaaccagactcatcctgaaaatggacagagacaaagattcttcatgactgaagccacagagacaaaagacccgtcacgctaagcaattaacactcctctagtcccttgggcgggactagaaacaaaattgctgaaaccagacccgagaatagacagaatgtcaaagtccgagatagaacacaatttggtctcctgtagacaaacaatggaaggcttgatatcaaggaccagagatttaactgaatccctcttggcacaatcatttagacccctcacattccaaataagaaaacaactattctccattggaaacaaatcagatcgcccccacctgaggaacctcccagccaaacaaagctgccaaaacagcaacatgcacactcgaaagcgcggaatcaaataattttgcataattgctggcatcttcgagagaaatattctccatgtcatcacaaaaacccagatgcctacacacctgtgcagccgcattggagctcagctccggagggaatttggccaccctcctacttctccttggtcgaaaatcacttagcatggcctttttcc

SEQ ID NO: 74436 - DNA, 854 bp, Zea Mays
agcatgttgcaccgtcttaaatcgttgccgacttaagccgattgctccgttagcagggcatagtggtcaccccgagttaagtaagcgcgagcatgttgcaccgtcttaagtcgttgccgacttgagccgattgctccgttagcagggcatagtggtcaccctgagttgagtaagcgtgagcatgttgcaccgtcttaagtcgttgccgacttaagccgattgctccgttagcagggcatagtggtcaccctgagttaaataagaatgcaagtcgatcatgaacaaactgagtattcttgaagccttttttgatgacatatttcccattttacagagtacattgtcatcccgatagcttttgaaatacagctagggataaaacttcctgaggtgttctatgttccaggagttcccaatttctgtgccgtccatttgagtgagacgatatgatcccagccgagtgacttctgctactatgaatggtccttccctataagggtgataacttgtgccgtccctcccccgttagaattcggcggaggacgagatctcccactgaaaaggatcgtcgtcgcacgaccttgtcatgatagcgtctcagagtctgctggtatcgtgccgattgaattactgcgttcagccgttcttcttcgagtatatcaatatcctccagcctagtagctttggcttctgctatgccttcaaagaccaaccttggtgccccaaacttgagatcagcgggtaatactgcctctgacccatagaccatgaagaaaggagtgtttccatgcagagctcggctaggttgagttcttaggctccaaacgacgtagggcaattcccttatccatttt

SEQ ID NO: 74437 - DNA, 578 bp, Zea Mays
tatggggaggctacaatagcgcaaaacaaaatttacgaccccataaaccaagaactactactgttataggtcatgtaattactactagatgcacagggcagcgaaagtcatcttgatgtagacgtacgcgtcgagcagtcatcggtgtccttcatgtccttgcgcagttcgtcctagtgctccatatgcagcacctccgaggtatccacacgtacagggaagaagtgccacgtaccaaactgctaggttcgcgacaatggcttgacgagggccagaggggtgtgactgctggtttgttggtcacgaattagggttaaccctaagcgcgcctcacccctcattatattggtgttctggtgggtttttgactccaaggccaatcaacaaccctaacgcccactctaatttcagatcaatccgagttaggattctgtggggaacagatatccccatgtccagtagaaggcgaaaacccttgtgtggggccacaaacaagtcgccccgcaaggtcgtctcatcgtgggccgggcaaagactacaattgaaatgggtcgacccaagaaggcaatgggctcaca

SEQ ID NO: 74438 - DNA, 960 bp, Zea Mays
tcaattggtaaccatcggtgtgaatttgcttgcagagttaggcctccaaacaaagcatgatatctgactgttcaagtggtagcacaatcccactctgatgttggcagacaatgccagatatcacatgaaaccaataaggcaagctttcagagcactggcataccactataccactaacgaacaacaaatctacgctaccagagaacacgtcttaagattaatattgtaagttattaattcacacatgaaacaaaagcatggtgtcgcagtgtcgctgaattaattatgtgaggagcatgcgactccattgttcaaattggtcaaggtgaatttaacttataaatttactggacaacacaagagaggaacatccagccaaaaagccaacactatcatttgtacgtccaaattatcgaccaacactctataggaattcgtgacgaccgtctggtgtagtggagctttggaatggatggggtaggtaaggtagcaagcttgcaggttcgataaaagaggatgatagccttcagacaaaaacgtatggctgccctgatcgcctaactgcgccctgaccgtgtctctgatgcatgtcgtgaccatgccctgaccgcgtctctgcttggccgccctgaccgcctccacaagcggggataggagaggggaaggaagagagtgcagggccttaccgtgagaaggcggcagagagagtcttcgtcgactttgcgctccgccaccacatagttactccacgtcgcctcctccgtcgttagggctgcgccacatctcgctcttgcgtcgtcgccatgatccgatctggaggatagttgatcggggttcgaaccgggccgtcaaggatgggaaaactccaaaccaggcggtggaggaggccacacgtggcgaggcagaggggggtcgtgcttgtcggcttgtcgccgtcactatcgcggtcgagaaaaaggc

SEQ ID NO: 74439 - DNA, 1123 bp, Zea Mays
ctagacacagggaatagtactggtggacggcgggttggtttatagatattccaaaggcccttatgcaagttttgcacagtgaaagggtatcgatggttctccgccgttagatcatcgatgaccggcccggattagattggtccatcactgtcccccacactcacccgcagacgcaggatgccagatcaacggttatggttcatttgaacgaaggggtatgacacgttttaatcctggccgctgaactctgaatccatgccgaggtgctatcgggaccggagtcaaatctgaccgcccgctacggatctaacggtctgagtctttcttcctcacctcctaacaccgacggtgaagatgacccaagaacccacagcggcgccatcgccgtgcacaacctaacctcgatactacgcgtccaaactccaatcgggtgggatctacacgacaaggaagtaatttcaagtgatcgggtgaggttcgtaccagcacaaaggcagcgggcagccctgtcctcgacgtacggcagattcgaagcttggtcgaagtccggcagtgaattaccaccggtccaagtcaccgtagtaccaaaattttccctggctacgccgaggtgcaccagcagatcacggcccaccccccaatttgccgacaacggcgtcgagtcaaagggctcacggcggcgggtccgctagatctctcagctcaccgaattcctggttcccttcgtcgaaattcgaggcaagaattggagcaggcgataggatgggtccctatataccccctcgtgggagacatgaagcattggaggtggtttgttacgtactcggagtttgcggaggggagagagacgttcggttgaacgcgcacgcgtcgtgtgggaggggaagaagcacagtaacaggtccacgcggtggagaggctgccagtgggtcccacggaccagcggttgcggggaggaacggcgagcgcatgcgcggctgacagccatggcccacaagtcaacgccagagataggtggtgggctgcgcggttcaaaagggaaattgtgccgaattggtggctttgggcccaacagtgggatttctctttttcttttattcttttctcttctccttttcaaatt

SEQ ID NO: 74440 - DNA, 2477 bp, Zea Mays
tacgagccaaggtgataggagaggcgaagggactggaacttggttgtatcataccactctggagtagttctaaaatctgtcgttcgatttcattcttttgcgcaggattgtaacggtagggtctcagcctaaaaggtgaagcccccggaagtaggggtatagagtggcagtgagaacggggaggaggcagacctgatggtttgtcaaaaatggaattatattgttgaattaggcgttgaatctcgtctgggacagcaattgggacatcggagttgacttttttatgtagttcaactgtacaccaaagttcatccaatctttctaaatgatagagatgggaagctgaaatgtgatccattgtgaataaatcagggattagaccttgcaacaccaccctttgttgtccaactgtgaaagctagccatttctcttcccagtgaacttccatcgaactacgtgaagttaaccaatccatacccaatataacatcgtagcactggaggggtaacaccttgaggttcaagtagaatgtgtggccttgcagtgttatcttgcactgagggaggtaatgggtgcagctaatgatctgaccatttgctacttgaacttggaccggttgggaaagaggaattaagttaggacccaatcttgccagaggttggctgatgaaagacgaggagctgccagaatcaaccagcatgataatcttttttgcaaataagtgagccatcagtttcactgtttgtggagcttctgttccttgcacggcatgcacagacaaaaccataaggtcgtcaccagagtcttcaggtgttgtcttgttttccacaggagcttccttagtttccaaaagttgccaaagttcttccactatgtggagagggacagttgcactgcactggtgagttggattccaacgtaatccacatttataacataatcctttcgccttacggtaagccataagagatgccactttacggtcatcttgacccggtttgcgaagatcaggtgatgtttgtttcaacattccttgtcctactgcagccggtggagacgaggttgtgttaaattgccgatgaacaactttgtgtgttgaagaatgattcattcggcttgaagatggggacactagaggttgcaccaattcttcctgtaacaaagcgagagagacggcagtatccaaatcgaggggacgatgaataaagactatggaacgaatttcaggggcaagaccatctatgaatctattcacaatggcagaaatactaaattgaggatcatgtgcaagaatttggtgtatgagggtatcaaactgttcaacgtattcagtaactgtatcactttgtgtaatgtgcaaattttttctcataagagagttgtgttgatcccgctcaaagcgagcacacactgcagcacaaaacttcggccacggtgccacacgtaacaccgaatcagatgactgtaaccaaaacgccgttgaccccacaaaatgcattgttgcaattttaacccaaagctcccggggtatggtgtacacatcaaaataattctcacttttagccttccacattttaggatgatgtccgtcaaatgagggaaaattaagttggggtaaggttgcggctaaacgtgactgataagacacccaataaggatcttgcgcatgaatcacaggggaatgaaagacatcagacgatgggattttagatgtacctttgaccggaggtggagtcagggtggttaccaccccaagtccatcgctccggtgcagagatgcaaggtgaagatcgtgattccctggactcgcctgttgcagagataaacccagagaggttgatggtaaaaaccccgactccagagccccggtgtcgaacaccttctgagtagtggtgttcgcctctttactcgccatcaattcatccaatttatccgacagagatcccacatcttgacgaagattcaacacctcagtttcgatctgaggtttccagacagaaagatctctcaccactgctgtattggcatccagggattgcttgatagactcgttttgcagttgcaacgcttgcagcagcgccttgagatcccccacgctttgctccatgttttgaagatcacgttgcaggcgagtcttgtattgcggacggagaagatactccggaggatccgccaggattgcgaccagaatccgataccaatttgtaagacccttgacactgcagaataaactctccaccgtcagaacacaccaggaaccaaatctgagataacgagcaccgttcccggtactctcctcctctcacgaagatcaaatttaactggggtttccagagtacagggggaattcgctattacagagatcgagcctagctctctctcaccagatcgccggacgcagacggtattcagacttcagttccaacccaaaaaccctactcttcccctggctggctaaaaaccaggtctactcctcg

SEQ ID NO: 74441 - DNA, 642 bp, Zea Mays
caaccttactatcatggatgtcacgtcccattgtcgtctttcggggacggctggcgccccgtcgcgttcccattacagcgaacgtacgtgaccacgttcctatttgaatatgtacgtatcattatgtacttgacgagagggaagatgcatgcatacagttaagcagaccgggtcagcgattctctcctcgattatcccgcccacaagacaacagactatttttcttgtgtacgtcaatggtccagtcgtggaagtattaaaaaaattacaactagcgatttttttttgttttttgtagacggtccacacgtacggtgaacagttggcgagaaacagtgtacatgcatgtagaccgtgtccgcggtacgtacgtattacacaaattacgcatttttgtacttttttaaaatataaaacaaatcacagtatagtaggtgccagtggcacaaacaagaatagtagtagctagcaggctgacaccaccaatagacagttgacacaaacaaaaacacatatatacatgcagcatcacaccgtctagttctcagcttctgagttctgacacaatgagttggagtagatcataaacgacagtagtgcggcatatatatgacatcacaattcagttcaaagggttcaaac

SEQ ID NO: 74442 - DNA, 281 bp, Zea Mays
aggacattgacatactagaggaagaacgattgaatgtggtcattcagtcggccagataccagcagaacctgaggcgctatcacgacaaagcagtgtggcatcgatccttcgcagtgggagatttggtcctccgccgagtgctgatgggagaagaacggcacaaattgtcaccaccatggaaagggccattcatcgttgtagaggctgcctcgccaggacctaccggctcactcaaatggatggcactgaagtgggtaattcgtggaacattgagcacctca

SEQ ID NO: 74443 - DNA, 440 bp, Zea Mays
gctttgcccgccttcattaccatcattaataatggtagtgctccaccacgccctggtcacgataatgtagccataatataaggtcagtgtctcacaaaatcaaatgtgtagaagtgaccatgagcttaaatcttgagtacttgtccagctcagtgtaaatataaataagctttcacagtatacacttacgattgcgatccttaccacaccacatagaatattaatacaaatatcccactatcctcctgtctgcgatattccacccccatatccaccctctcgtcgtcgctagagctttacactagtggatccacacacgtatgagctagcacagtaaagcatcatgacctcccccgtgtgatcaacatgacaagttatgaactgcttggaatgtgtggtactcaggaacaagacataacgagccaaaaaccttgcacaac

SEQ ID NO: 74444 - DNA, 1204 bp, Zea Mays
gggcaatccatttctcgcaccctttctaagaagagtgtcatattcctgtggagtggggtcccttgatcgacgccagaattcatgaagaaattgttccatgtatggcgtcacctcttcaaggttggtcaatacatatagcatgatatgccgccactcttcatgtgtcagggtcttggtggtcgagccacttgcgcttccgagttggcctcgaaatatgctaaggttcgattcattatcgccatcattgtaacgagggggtggattatgcacgctcggcagtttgtcaccataataagttgttgtgaagtttgacacctcctctagaatgtatgcctctgcaatggaagcctcgattttgcatttatttctacatttcttttgaatagtctttagacatctctcgattggatagcaccaacgtccctgcacgggaccccccattcgtgcctcataggggagatctagaatcaaatgctgcattggattgaagaagccgggtggaaatatcttctcaagcttacacagtaacacgggtgccaatatttccaagtctgcaaccacggtccgagataactcttttgaacaaagctgatggaagaaatagctcaactctaaaagcgatagccagacatgctcagggacatagcctcgaaccatcgtaggaagaatctgttcaatccatatgtggaagtcatgactcttcatccctaagactcgcatagtagataagttcacccccctactcaggttagctggatacccatcagggaacatcaacatcttgatccactgaagtacttccttcctcaaggccctgcttaggacgaaatcggcctcaggccttctccatgtctttccaccacttggcggcttcatctcttggtttggtctattacataacgctgtcagatccactcttgcctttatgttatcctttgacttatcaggaatgattgttgcccacagtgcctcgacaacattattttcagtgtgcatcacgtcaatgttgtgtggaaggagcaggtcatcataataggggagccgagtcaagctagacttatgtgtccacatatgctgctcaccatatcccacaaaaccaccttctgtattggccacgagcccatctatctgttaacgaatttcgacaccagtcatcgttgcaggagggcggtctgtcactatgacacctttcgtaaagttcttg

SEQ ID NO: 74445 - DNA, 385 bp, Zea Mays
ccggacgactctgtacagggcggcgccattgcagactgcgccgctccctaagctcagagatagcgtgaaggggctcatgttctactgctgatcttatgatgatttttagtggtggttatgaaggggccggcgttctctttgcccatatatcgcgtgcgttctatattctggtgttgtattatttgggaatcatgtatagtgtctgtggagcggcatgtgcaagactgcgagtctgcgatgctcatgatactttgctagtggcatgcaaaaaattccgatccctaactgttaggtgtactagagtattggtagggacccgtgtgcatgtaggatggggcctcgcattttgcaccgtgtgggtaggcacgctggccttggaatgcaa

SEQ ID NO: 74446 - DNA, 547 bp, Zea Mays
gatctgcttcagttttgcggcaaattatattagtcgggaactcgggattgatgccaagactaacgtgtgagggtagtgttcgtggattgtgaagaatttgaatttagaaccatgggtaactttgctgagataacagttgaacagtgtagaactgggccagtcccaacccccaagttctcaagtcccaactgctcattatgctgatccatgtgcctgtaatttggactgttgtgtatagcagattagcagttagccagttactttatttcagtgttaatcatcaaagctgaaaatctttggctacataaacagcggaaattcaatggagatgtagctgcgtttgtgcgtccagccaaaatgctcattcatgccactcaatcgtgtttatccacaatcatagaataggttttaaacttctgcgatgaattagatgtgctcagatttcttatgctccatccactatgttgttgtgtgagatttcttctgctccatccaccatgttgcgtgtaacactaattccagtttcttcctattgcgatataagata

SEQ ID NO: 74447 - DNA, 926 bp, Zea Mays
ccggatgtgggaggagcattggtggtaggatcttcattgggaggagaggcatggatggaagattggtagggatacgaaggaggatgatatgggtatggaagtagagattgtggagtgatggaacgaggaaagacatgaacattctcctagcaacgatgcatgggagaaaaatcgtcgaagaagatctctccacacaaatagatgtgtcaggaagttgtggagattggtcgttgattgtcactgaaggtttgtgagtctagagtccacctaagatccatatttatataaagagtgagaggatacaataagagagaggaatagaaaatagagagtcaggggtgtaaagactcattttgtaggccagattttagttttttaaaacaaaatgttttattttacttggaacaattcaaaataatgtgaatcatttagaaagtgtcatatggctaaagatggtcggtactgaccaaatcattcaacgtactacttggtattgaccggtctagctctaatgttgtcattatcgatatatcgacggacattggagccgaatagggtgatatcagtcactggcttgctcatgtcaccccacccatcaccggtctataaaagcatagttagaattagcctaagcaaaccaaaatgccatgcttgttttgcttggctaaggctagaaagctagccatgtgacaacctttcacacacatatccccctgaaccctatcacacctaaaacctaaaccctaatcttccccacatcatcgcctggctcaaagcatcatcaccactaacccctacaaaatgaatttgtaactatcacacatcaaataaatttctctagcatgtgactcgtgggggtggtcacatggtcgttggccatcttgaatgaatctcttggtagtatttgagacttgtgatgggttcac

SEQ ID NO: 74448 - DNA, 929 bp, Zea Mays
tgttcacattaggtatgagaagtacacaattgagtgagagtctaaatagtgagctgaagagacatttcaaatctgattttgatatcattcgatttcttaagcaatttgaaagggtggtggaagataagagaaaaaatgagctaaatgctgaatttgaatcaaggaagaaaataccaagaatcaaaatgaggacacctatgctaatccaagctagcaagttgtacacgccagttatattcgaggcttttcaaagtgagtatgaaaggtccatggtagcatgcacctcggcattggacgacaacaatagctatcttgtggcaattggcagtcttgatggaaattttacctttgagaaggagtacaaagtttttggtaattctttagagcaaactattacatgcagttgtgggttattcagtagaactggaatattgtgtggccatgctttaaaagtccttgatttgatgaatatcaaatctctgccatcacaatatgtactgaagcgatggacacgtgcagcacgttgtgggacagtacaagacaaccatggacgaaatattatagagaatccaagattaaatgagatggctcgctacaaagatatgacccgcaaatttctcaatttggcacttcgagctgctagccatcaaggatctaccttgttagtaaacaacacacttgacatcctgaacaaacaagttgaagaagaaataaatgcaagtactgataaaactgtttcgatcactactcccacaaatgttagtcctccaaatgatttggtgagtgcagcacgccttaagaaaaaggaggtggaaacaaaaacctcgaagcgcaaaaaaaattggcttgacaagctgcacaaatctggaaagaagggaagtaagaagggaggtaacaaaaagaaaactgctgcaaaggtatgtgataac

SEQ ID NO: 74449 - DNA, 403 bp, Zea Mays
gaatatgttaggtctggttccaaaacaacatcttctatcttaatggttcgatcaggaacccaaagacacttcttcaattgggatacatggaacacattatgcactgtagacaatgtttcgggtagtaagagtcgatatgccactggcccacatctttcaagaataggaaatggaccaatgtatcggggtgcaagcttcccttttacatcgaaacgagatacacccttcattggtgatactttcaggtaaacataatcttcaacttgaaagtacaagggttggcgtcgtttgtctgcataactcttttgtcgagcttgtgcctcttttaagttatgtatgattcgttgaactttttcttccatcattttaaccatatcaggcctgaaaaaccacctttctcccg

SEQ ID NO: 74450 - DNA, 837 bp, Zea Mays
atctcagcgtcgaagtcgctatagtgacctgcataccgtaaaggacgcaacagatacatcataccgtgtgtatgtctacgcacgccggcaagtgacacaggcccatgacgacaagtgaagctgcgatacgcgctaccactccatggaactgacccacgggacacaccacaccacgcactactatagagatgccagcgttggactcgctataggagtccgtatgacgaacgagcgagatagtacgccatacgaggagtatggctacgcatgatcctacggaggacccaccacgacaacccagaggagccgatctctctctctctctctctctctctcttgtagaaaacaaatctcctttgtaaggtcccttgagctataaaagggcatgccctacttcttctgaggacacacaagcacacttgttataacatgcccaaagcaatactacgatcagcactatactgcagtagggtgtgaactcgaaccagtataaacctcgtgtcttagatatctcaccgagtcccaatgattcaccattcagatcgaatccgcgctagcaccccccactaaacacaaatcttattgcccctcggtttccgaaaccacgacaggcgcagatagagatgagactagtgatgtggtgcacgtgtatcggatgcggacgtgtatcagatgctgacgtggttggtatgtagtgggttatggatggaagacatttagattggtcccaagacatgctcctataatttttttgccacgatccaggatgtagcctcggcaacatatctcttgattccggccctattagaccgtctgcagcagtgtgtgatagtttaa

SEQ ID NO: 74451 - DNA, 818 bp, Zea Mays
aacaaggaaaaagtgtcagttatcgcaatattggatcgccttcaaaatactaaaataactaaaaattcagtctccgatagcccatctaatcagtttggccttgggttacaaagtgagaccagacatgccgaatatcaaactcagaagaggctaaaatacattttctggctatttttataacataaaaaggaaggtctattttatagtagttaggtctgaattttaaaaagaaaacatgggtagtggaatatatttaaatcactggagagccgctagctgtaacattccatctgaaatagcacaatggttgaagcatgcactatatgtgagcgagggcatctaaagtgcataggataggaatgatgcaaaatcaacagaaatacctgattgatcttgcttggtttatagagaacgccgtgtcacactgatcgttcgaaggatctagaagagggccagaggctggaccctgggaggagtaatggagaataacaacatacattcctgaagtgactaagattacacgatttcttctatctagtgaagtgactaagattataggatttcttctatctagttagatcacaaggttctgttcttttatgatggtgcataatcaaaacagaagatggaaaatgcacgaaaacaattaaagagttccactcaaacctaggtagcagattcaccgtcaacattcaaaacctcttttctatgttatttctgctattcaccaacaacattcagcaaataataggcaacagatttggagaacttctccctggacgagcaagtagaactatatgagtttaattttgtctagt

SEQ ID NO: 74452 - DNA, 475 bp, Zea Mays
ctctaggggggctgttttgaacataatacaacctggcattgcctgcaccaacatggtagttcctagtttgagatggccaaatactaatgttagtctacaaaacaaaaaaagatctacttacttcattttgcttggcccaccactcatctggcgcactgattgaaccagtatgagggtctcgaccaagacctgtagccctttcatttagagttttccactgggtgaacattctcttcaacgagtcccacctattcttcatttgatcccttgtgtacgtgcgaccagtgcgttccttaaactttcttatcaggttagcatagccttcggcgtttaggaattgttgtggcctgttccgtgcattgacctcttctacacaaatttctgtgtatatttttgttgctctactatcccactttgcaatgactttgccagacttgtccatctagtgcaaaacaagtgtacacgatatgaaaat

SEQ ID NO: 74453 - DNA, 843 bp, Zea Mays
gctaagagcccagtcgccgttctgcatacgcaagggagagccaccatggtcggagtagggcagcgacctcggggactaccttggcaaggattggggtaagacacccatgcgacctcgccattttcccacttcatattttgacaattagcgctgggttgtgggcataggggctcttgctgccctcaccggccgtgcgccaccgtaacgggatagcgccaccacgggcttatttcacgtcgtagttggtactcccccctacagcgacccactggatcgctctctcccatgttagttgtttcctcgactccggatgtattgggtcgactcaacggtggggattctggggcgtcggtcgccgttgcaacgacgatctcaccatagggtagggcagagctctggcacctgggcgcttcggttaggaagaaacatcgtgggacatcgattcgtgagtgggtggtcgagattggtctaggaataacccttcgcagggttgatctggtctgtaggaactagatcggacgactacgatctgttggctgcgtaccgcttcgatgtgatcgaccctagcccttggatcaagatcaagtggagccggcgagatctctgttaattaaaagccgcaccatcgatttcggatccaagagtcacgatagtgtaccggttcagtgtggtgaacatctaatcggcaccatagaattctgatccaacgtcctgagttcctggatacctcttcaccggttacactttataaaagagaccctagaaaacagacaaatcgacccgccgacctagcacagtgatagaacatttaaatacggtcctgtttttagtagttgagtccct

SEQ ID NO: 74454 - DNA, 413 bp, Zea Mays
taggattcctccaaggaaagctatgcggctagggcaattgcggtacacctcccaataaaaagctgctgcacctcccatcacaaatgaagcccgacaggagacaccaaccacaacggcacaccctgcagcagccagagcacacacagctgaagtgcaatgcaatgggccaatggcgggccgccgagatcgttttgattcccccttcaccaaaagcggtgaataatgcaagtatgcaccgcaatcacggttttcccatgccatttttcactttctttctcctcctcctatctccacctccaccaccgtccaccgcctcccagtaattccgtttccaccgaccggcttctccgcttctcccatttcattccgggagatactttacttcacgcacctgtaacgccgcaccattgcac

SEQ ID NO: 74455 - DNA, 940 bp, Zea Mays
cacaacaaaatcaatctcctctctctattgttacgtgcgcttctcgggtatttatactggcatccatgcgtttcccctcggccatatacgcagggcaccgaagctgtcctgatgaacaaagtgccatcaatgtggttagagggtggagcgactaggggaacgccgttgtgcagtgcgccgccatggctgggcctcacgctatgaattttggtatggcgctgcgtccttgttcgcctgggtcccagcatcgtatagtgtttgtcggttgtggatttagggcagggtatcggtcgtgggctgttggccgacgggatatgagcggggaactccttcttgtcgtcgactggcagggatatcatcccaatccccgatgcgacggctcgaagtgactcactagggtatccgttaggggtagaacgtttttccttgaagtttagtaggccggatcaatgggaaggtttacacctgcaatggcgcgccgtcgtgtactccctgtgcgacgccgctcggcctggcttagggaaggaggaaaggcggggaccgtcgagctgggatgcggatgagatgaagcaccacataacgattcagccgggtatatcagaaccgtagatcgtagatcgtggggttgtgagagagtcgcttttcattaaatctggtccatcggatctaatccaacggttaagaattagggataccccttcggccgggtctttttgctaaagagtcctcggaaaatcttgaaactaacccgccatccccagcctgtgctaaataatttaatctgtgccctcgtcatttatggaatagcccctacgctctgtagaatttgtaccagcagtccttagcccttgttttcagtaaatagaattttagaaagtgatttttaatatagaataatcatagaaaattcataactttctcattttaattccaaattgat

SEQ ID NO: 74456 - DNA, 958 bp, Zea Mays
ttaccagatcaatccgaacggaaataacattctctttagcatcatcgtagatttttttaagtttcatcccagccttgcactgtgttcgtttcgaacatgtgttacgtatccttggatttccagctactctttcagcattttttccttccattgaacaattcaaccatttacaattcttccgctccctatatttgttcaacggaaatccaacctcgtatgcatattgactataaaaattatacgcctcgtccacgttactaaatgtcataccgactttaggtatcaatcttatatcaatattgtccggttgcgcacggaaatttaacatttactattcaatagcgtctaaattttacatggtatatgtacaacattacaaagaagtatgtaagaaaatcagagtatcatatttgggagaacttacatggctctgaagaatatgaggtgtgtcctgttcatgcgggccaatatgtctcatggggatgtgcttatctgcaccgactacatctgccctttttgtgtgctcatcgatatgtccaggtgccctcaatgctgccgggggagtaacggagacaccctctgtgtatggggcgatcgcagacgctacaggattcatgtccattgaaatagacgtacctgctggcgtatgcacagatgatacaggtggcatgtcatcgccagctccagtgctggacattttctcgccgtcggccgtatctctcacttccgccgccgctaaccgccgcaaatacctcagataaagatgtggacgagcgaacgtggacaggcggctgtaaccttgtattcgtttcctctcgtaactgcgcctatatttatgcgcacaaagagcacgtctttccttacctcaaaccggttggagattttaaatgttgcatggtttacgctatcatgtctcacagcgttatgcaatcgtaaaccggcatgcacatgcaaatat

SEQ ID NO: 74457 - DNA, 477 bp, Zea Mays
ccgaggtagcagctttcctcttctttccttgctttcgtgaaggataacagtagtctggatatacaaatccgatgacatcgaataccctgttcatcctctttttgccatgagccccgaaggcagttgtcatggcgtcatcttcagccttcgaatatgctccaagcatttcatcactagtcgcttctatggcatctagccaatcatcattcggctcatcaaactggctcctgtacctgaaggaatacttcaggtagaataaaccaccttggctagagccagcagcagcctccttcggcatttcccacccatttgcaagtggccacactctgtaagcaatgtgttcttgaaccaggtctgttgagccaatgtaggtgcacactgtgttgaaagctgcctggcatgcttgaacttcattcccaagtgcagtggctggcctcctaatcccgaagcgagaccatacagggtgttgaataatcc

SEQ ID NO: 74458 - DNA, 1092 bp, Zea Mays
gcagaatatgaagccgtcatcctgggcctttgcaaattgcgagcactcggtgtcaccacatgcatagtcaagacagattccaaattagttgtcggctaggtcgaaaaagaatattcagcaaaagaccccgcgctcatgcagtatctcccggctgttcgcagtctcgagaagcagttcaacggcttcacactacaacatgtggaccacgccaggaacgaagaggccgccgcgttggctaaggcagcggccaaaggcgagaccttgccctccgacgtgttctaccacgtcatcggcacactagttgtccgcaatccagagggcttacaagtaactaacgaagccgaaggccatcgcatggtcaacctcatcatgactgaagattggcggggcccaataactttgcatctacaaggaaattaccacccaagcgacgtcaatgaggccaaacgcctcaagcaccgaagtcgggacttcgcactagtcgggggccagctatacaaaaaggggatcagtcaacccatgctaaagtgcgtgaccgaaaccgaaggcattcaaatccttcgcgaagtccacagcagaacttgcgggtcccactcagggcccagggccctcgctgccaaggtgatccgtcaaggattttactggcccatgataatctataccgcgaatcgagtcacgaggtcttgcgaagcatgccagaagttttctccccgctcgagcaacccttcgcagttcaccaagctgattgcccacacatggccacttcaacgctgggggttggatattgtaggaccactgcctatggctcaagggaacctcaaattcaccttcgtcgtcgtcgagtacttcaccaagtggatcgaggccagagcagtatccacaataacgtcgaagactgcccaaaagttcttctggcaaaacattgtctgccgattcggagtgccgtccgagctcacagtcgacaatggcaaacagtttgacaaccaggacttcagggatttctatttctccatcgtcaccaagcctgtcttcgcctcggtataccacccgcaatccaacggcgtcgtcgagcgcgccaacgacaagattttc

SEQ ID NO: 74459 - DNA, 1411 bp, Zea Mays
cttggttccgtgtaaggtatgcggggttaatcctagatccatgacttcgtgtttgtgcatggtcgttgtcgtggactgtggtgactcggtcgtggtgtggtcactcttctctagagagactcgcgattgtgttgattctcagttggggatttgtcgtttggtatgcttgagccctctggaacctgatcatccatgttttaggttcatgacttcgtgtttgtgcgtggtcgtggtcgtggtgtggtaactcttatctagagagatttaccattgtgttggttctcagttgcggatttgtggtttagtgtgtttgagccctcttgaacctgatcatccatgtttcaggtccatgacttcgtgtttgtgcgtggtcgtggtgcgggtgcggtaactcttatctagagaggttcgcgattgtgttggttctcagttggggatttgtggtttagtatgcttgagccctctggaacctgatcatccatgttttaggcccatgacttcgtgtttgtgcgtggttgtggtcgtggtgtggtaactcttatctagagagatttgccattgtgttggttctcagttgcggatttgtggtttagtgtgtttcagccctcttgaacctgatcatccatgttttaggtccatgactgtttgtgcgtggtcgtggtgcggtaactcttatctagagagatttgcgattgtgttggttctcagttggggatttgtggtttggtgtgtttgagccctcttgaacctgatcatccatgttttagatccatgacttcgtgtttgtgacttgtgagtggtcgtggtgtgataactcttatctagagagatttgtgattgtcttggttctcagttgaggatgtgtggtttggtgtgtctgagccctcttgaacctgatcatccatgtttaggtccatgacttcgtgtttgtgcgtagtcgtggtcgtggtgtggtaactattatctagagacatttggattgtgttggttctcagttggagatttgtggtttggtgtgcttgagccctcctggacctgatcatccatgttttaggtacctgagccatccaatttatagctactgttctaattctagaatttggagaactccttgtcgaatttattgtgttaacgaaaatgacatcatgttgattattctacgccttttgcttaataccctgtgtgaagtttaattgtttggtggtggacttgactttggaagtcccaaaagcatgatgtagcctgtagtctctatgtatctacattgttgtaactaaaccgtggaaatttccacacctctgatggctcagatgttgtaattcctttctgaaccaagcctgcttgatttttgcgaaaatattccagatacgagaccgaaatcttgaggacgaaattgacatggatggctata

SEQ ID NO: 74460 - DNA, 455 bp, Zea Mays
tcactagcaggattaccaaaggaagaaggtttgctcacgccagcagatgcagtgagaacgtcagcaacaatgtccccaggcaccacaacaccaggtcttctcatcaagattcgcgcgatgcggacaaccttttccatggctttgtcgtacattgctttcataacaacacgatcatcctctaaggccttgatgttgtgatgagcggcttctagctcttgcgtgacaagtttcttcgaagtgcgcaactccttgatgacataatccttcgaagatagcagcttaccaagtcgtgacacttcagtctgggaagccctcaactcatccctatgatggtccagttccgacatagtaaagtgatggatcctctccaggatagtgagggaattgctagcatcacgatataatctatccagattgtcacgagaatcaagaagcgttcgcctcttacagccaag

SEQ ID NO: 74461 - DNA, 574 bp, Zea Mays
tagtttcaggttattattacttacttacttctaattgtcggtgtataaattatgtgtacttgtgtagcatcttttggcctgatctagctaggtgtagtcagtattccttccttccagacctcgctcgtgtgttgtcctataaggtgtgatgttctcaaataattcttatatatgagagtcatgctaattgatgctgttttgaatttaaacaatagacataaaatgctctcaagaaccatcgttaagttcctgtatgtcacagtagcagcatcagctgtaacacatgttaatcaagagcttagtgttaccagaaaattggagatcaataaataaagggtgcatgtgtttcactggagcttatgcaccgccgcctgtttgttgattggtaaatgtatctttgcatcgattacaagcaattaaatctacccttcgatattcatgtcgttatatatagcatgcatgtgtgtgcttactatggtcattaatccaagcattgttcctggtgacagttgttaagcacaatttctgaaggaatcatggtaggggattaaattttctgataataatgtcatct

SEQ ID NO: 74462 - DNA, 305 bp, Zea Mays
ttatgcaaagtgttgggggccttattattccgatggtcctcaaaacactaactcaacacctatttttagcttgtttcatatgctgcaggagcaatgccgaaggtcaactgaagctactaatagacgcagacacgaggacaatagtttcggacaaacaatgtgtgtgtataagtgacaaagacgagcaagattgggtatgttaggacctttttagcatgtttatcttgtttgctaggcttacgcatgtttaagacacatgtgataatagaatcacttgggggagttaagaggggaaacacttgctc

SEQ ID NO: 74463 - DNA, 568 bp, Zea Mays
gggatgtcagtcagcccaggatcggaaatccttctgatagtggcttagggtgaactttgggggctcttttgaagataatccaataagtgtttgagtatgaccactatagcaagattgtagctggattatagggctacaactttgttaaagatggattaataagtgctcacatgaaaatgggagatctaggctctacaaagtggtctgtcaggatgactaaatgagaaagtgatggtacagtatcaaaaatatctcaggtttagttcatctcgccgatggtgatctcgcgccgtgatcggcgatgtcgctgcgattcatgctcagtgaagtacagatagttgctggggatgagaaatatcgcattaaggatgaacttaggccactgtacaaccctaggcaccgtgtccgcctgattcacgggcgattcagataagatcgtcgaagttggtcgtcgatcgaccgcgtgccatgtgcctaggtgtcttaccacgttgctgcaactcgtattacgcatgtccgttgatcgtcggtgagctcgccacggtgaaagccaccaattccttgcaac

SEQ ID NO: 74464 - DNA, 874 bp, Zea Mays
ggggtacggcttagggttcggttcctagccttcaaaacccgaaatatttaaatgctcttagtatgtgacgatcttattgtgtgattcacgatcttattagtcacttgttgtagtaatagtactcttatttaattattcactgtatatatttttaacaaaagacactagtctctctattgtttggtctattcggtggaccgaatagaccaaaccgaaattgtgggtctattcgcgttcggttcctaaaattattttgaaaattttggttctcatttttcagaacccaaaatttcaaaaaaaaacgaatagaccgaactgaattacactaatagaccgaatgcccagccctaattgtttgatatgccactgttgatattacagacttggagcaacattcatcattagctaacacactaattcaatttagcatatatagagaaaacataactccaaataagctaaacacaactttgagaataatccaatcagaacaaacaagagatgagtttccagtgggtgcttttcagcattgataccctcacttcagagtgctacaggctcattagctcctgcaagcaattaggctaactatagatttcagtgactccgactaaagttaactcctaagaccatctccaaccatttcccccatattttttcctcatatctgtattttctattatattttactacatcatcctaaaagatacttccccccatagtacacagtaggtcggtagcaatagcaagggtgaggggaggtttggggggtgcggttggagaaggtctaacacagaactgttcaccaagacatggatagtggacacaaaaatcacgtggaagatgttcgtggaataccagtttgacagccacc

SEQ ID NO: 74465 - DNA, 1001 bp, Zea Mays
atgggaccttcccgatcaattcccccaacttaattttatggttggtaatctatcaagctctgtccatgcggaccacggacgatgaggacaattgcacgcgttcccggtgaccagtggtttcctagtgcaattgggtgggttggcgagtatcacagacgtatgagaatgcttaaacaagggagcagaggggaggagttgacctgaattgggttgaccacgacggggtgtgttttacggtggcggaaaccgaattgggggaaatccaaaattgaggctcactagcgatcgactgaggatgattcttggcggctgggttcgtgatgatccaacagagctcacggcggggtcaatttgtaccaagtgaaagcggtggccggggatttgagcgacgacccgcggcggtcggagaagtaagagttcactggcgcgcgattagtgtcctattaccgtggcagtcattccgacgagccatggagagtcacaagggttcacggcgatgtggtggacaggtagagacacgccgcggacggcggtgatggcttaacagcggtgagaaccttatccaagggatcagtgagcaaggggagaggcacggcggctagccggagtggcgtccagctcatcgacggctatgctttttcaccccgcgatgttatctacttgccacgagcacgaatccagacaccggcgacacgaatcacggcagaggtatcatcggtggtgagatcactgaagcttatcttcttcagttactgtaccatggcattcctcttcagtccatctgacagagctacttcagggcaattcctctccagatttcgcatgacaacttcatcacccctctgcaccaaagttgtagggctacaaaccagctataactttgctacattgtgttcccacaaaaaatcactggatcttgcttaaaattaatccctaagttcatgtaatcctactgtcagtctgaaattcagactttaacagcctgacagcctttaacagcc

SEQ ID NO: 74466 - DNA, 487 bp, Zea Mays
atttgtgacaatggaactaacatgttcaagattccgtagcaaagcacggggcactatttattattgggcagctgaactggaatgctgaacgaaccattttttccttgttatggtaactgttaaccttccatctctgtccgaatttcctctctattgctaccagtcctttctacatgactacatgtactactaattaatatgaccctcttctgtattaggagcttcagactattggagaaagtagacaagtggtttaaagtaaaattggatctcaaatatgaagtgatttaatttgctattgttgaaaatagttgtctgccccccatcccgatctgcgattgtcgccccttcttcccccatagcacgtctttggatctgcgatttctgcacctggatcatgttccatatgttgtccctctccagccggtcatcgtcaccacggcggtacatctcccacgcccgtgcggtttgacggcgcctacttcgc

SEQ ID NO: 74467 - DNA, 882 bp, Zea Mays
gtcactgataggtgagtcttcatccaatgttggaggtgcattggatcttcctctttccatccaatctctaatggcttcattatgcctatgtaatgatagatccatgaaggccaaggcaggatcaaactcactaggctttggtgtaccagttgctcgttggatgcgaagacgaaggttgtagttaacaaacacaagctcatgcaatttcaagtagccaagtttgttgcggagctttgtgtggatgaatgtgaaagtactctagttgccctcacacccactcgatgagacacactgtgatagcagccgcttagcaacacgttgaagcgttggtgtatctgatccaaacatggaccaccaacttgaaggagaagtcccgcggtcaacgaccattctccttgcaagctcactcaagaagtctccaatcttcctcttgaagaagtcatacccttggagtgccattgcagtagtatttgaatcaaacatcctttcaacacccttatgaagatctgtcatgagattgttcgtcgtccccatgacatagttcacatatggatgcaaggcacacactgtgggggacagatatcccctaggtccactagaaggttaagaagacctcgcgaaaggctctgggcccgatgtttcgcaaggccatcccttcgtgggcctgaggacaagcgcttggcgaagtggatcaacacaagatcggatcaactcgagcccagacggcccaacagatttgagcaacatccacagcagtaacctgactttcccgcgctgcgtcctcaagcgtcggaactgaatggcaataagtcggcagcgttataggaagataggctcagtcggttcactattatttaggcatacattgttatcatatccgca

SEQ ID NO: 74468 - DNA, 466 bp, Zea Mays
gaagcctgtttgagagccatctcaaactaggcccgtaggtcacaaagaataatcgctacatgttattacatcatttcatcggcacgtggaactaaacacaccaaattttaaaaagttattcctgtgttccaaattactaggcattttagtatttttagacaaatttgaatttacaagtgcataacaaaatttatgtacctacaaaatcaaatatctgtacgtacatgatgttccacttaggatgcatttgggagatggcgtccacgaacaaatagtatttggttcacgagtgagttggatatgaatatcttgacataacgcctagatgttagatgtcctttctaccaaacaaattgcctaacaagtaattttatctcatctactcttatttaacaaaacagactactaatttattccatccatccaatcaaatagacaacatagctatatgtatctccaaattcat

SEQ ID NO: 74469 - DNA, 615 bp, Zea Mays
aagattcttcttttttgctcagatttttctgattttatgagtaattcgctgtttaatttgtcaatttcggcttgagcttcagccagtgaaccttccatagagtgaatgacgaagtccttcttctccagggaagcttcgtgatctttaactttattttcaaggtcttgaatgacaaagtcctttttcttcaaagcagcttcgtaactttcgactttattttctagatctttgatggtagcttcatttttcttgtcttcaagatcttgttgcatcctcagcactttacttagtaatatactctggcaaaacaaccttcgtcagaaaacatcttaattcaaaaaacaataataagttgagagtttttaccttgaaattagcgtagaacaagctaccggcgatatggtatcgctggtacctgcagaggtccgcttcaatcttcggcaggccaacattctttgagaaagtcctaacaaccttggcctcggttcgattccaaaggcatcttagcttcccttcattgactccgccaaacagcagagcccctggtttgtacccacaggatacaacatatttctttagctcttctttttcagtttctgataactcttgtcccag

SEQ ID NO: 74470 - DNA, 698 bp, Zea Mays
gaggagaaaggcgccagcgcgcgcgcgtgctgacgacttcgcagaaaggtcctcggctttaccggctaaacaaaaataggtccaattactattgcactaagtcactgacatattgcagataagtccccgggattctaattcttcacatcccgaggtccacgacgttggtgaacgcagccgcgctccggtgagccactgtaccggccgattgaggcgatgaccgacgctcccgagcgactgacaccaaatcgaatctatcctaagcttttcccccaactcaattgcatgtaagatcaactgaggagctctggccacggtgaccgagagcatggcggctaaagcgttgtgttcccggcgatcccaggcggttcggttcgattaaagggtcggggagcatcaccaacatgtaagggtgctagaacaagaacgagaagggaatgagaagacctggggaaggctggccgcggtgatgggtagtttacggtggcggagagtcgatttgcggcgaattcaaaattcgcgagctttggcgaaggactgctagcgattagcggtggctgggtgcgcgatgatgttgtgaagctcactacggggtcaatttatagatcctcggggcggtggcgcttaatttgagcggacagtgggggcggccggagatgaggaagaaccctggcgcggtgaatacgtgtccagtggca

SEQ ID NO: 74471 - DNA, 954 bp, Zea Mays
gatacatattacaatatcgctttaaaagtatcttttaggttttaacatatttacatataattgggttgtggacacgtcgtagccgtcaactctttagtactttgctcctagactattctatcatatactgaatttatacctaagatcgggaaccacggtgggcccctctgccccaccctgcctgcataccaacgagcaagtagatccattggcttgtaaaaacgcccactcgcatgtccctacacagatcgattcaagcacggtggctgcggttgtacctgattccactttttgtttgttggggtcactcacagtacatggtacccttcatgcacaccgcattgtgcattggattcacgtggttaagactcaacagtgaagacacgggattcaggatgttcttgttctcaagtttcaacacagaggttcgtccttgttaacagctggctgctgcagctagcatagtatcaaatgctaaactatagtgacattgttcctctgtgacctactgcatgatatcttttactatttgcgaaaagatgtagctgtaaactctctcgtcaacgagctttcccttccctctcctcttcgtggtccacatgatcaagcacatagctgttggattaatctcaagatagacttagatcataggccccaacctgactctattcccacctaatcgaaagcgcaacaacttattgatcgtggcccattcacaccatgtatataaaaagagtacgtcactggcacacgaaccaacgctcgctcatatctccttgtcacccttaaacctaaacaagacccgctaatctaatacatttagtgaagataaggttgcaccctcagcaccgtcgtcatcgcacactggctccaacatcgatcgtcgaagtctccccttcctatgacgagcacctccaattccaaagatgattctctctaaactctctcgtttct

SEQ ID NO: 74472 - DNA, 485 bp, Zea Mays
gctaccatcactaacaggagggttagacgcaaattcagaaattgatctatgaggtggcagattacaggcagaataggcaacaggagcaccaacatttgacactctacccctcagaaccatatccagtcgactcactagatcttcagtggagattctcttgtttgtgactcaggtagagtcattgatgccactgtacagataagctggatacaccctatccttcaaaggctgaatattcttgaagacgaaatcagcaaccatagcttcagtagtcaaacctctgtctttcaacaagaagacctcagcaagaagcacttttgcctctgttatctccgaaggggtcgaagattcgacccagcttggagtacggacatctggctgcctccccgatcgagggggaagggacttgtagtggttctccacaatgaacaactcgaggcgccaccccttgatgctatccttgagggggatgtcgaggtactctg

SEQ ID NO: 74473 - DNA, 731 bp, Zea Mays
gccttgtctcgtgaaggctatcgacacttcgaaagctttgtgcagagtaatcaggactttgatcgaggagtttttcaagtcgatgacttatctttgaagcagcttgttggtgtgctatttgactggatgtggggttctcatggccgctttatggtcagggagagggttggacaggccatggagcatgtagcattgtttcctacttgattgggattgtatttcgtgtgtctatactctaatgtgctgaatttttgtgaaaggcacggagggatgaggagatcgaggacttggaaggctcgttcgttactctgcaaattgctggagttggggtgggtgcgaaggaggagtcctcgctggctagggctgatgatgtcgtgtatagtgctgcagagacttcacatcgagcggttgacgatgaacaacgcgatgcacatgtataaaaggggtgataatacttttctgaggggcttgatttgtggtacgcattaacacatggtttggtacctgcacaggttctgttgactgagcctatgcagggggattttgattcctcaggcaatggaagggatattcttgatgttgtcgcatgtgttacgtcactatcttatcagattatgtcgttttccaatgatggtgatgattttttatttttaatcgtcgagtggcgaagggggttcgaagttctttgagggtatggccgatgagtcctctgaggaggacttagaatcttt

SEQ ID NO: 74474 - DNA, 948 bp, Zea Mays
gaaacctggcgcttgtaaccacctgtgcctagtggtggtggtacttgttcttcttagagagttctgaatttgcctcacttagagatatgtaataagggttgctcctgtgtctagaaatattgcccactaacctactgagattttatatttttttgtcgagtctaggcctttctttgcaaactttgtattcatctcagacctccagttttggaaattgactgcaagttgcttcatcgtgtattccttcacgagttcttctgaaccccaaggtagaacaaacctcattaatagcttattccatatttgattcttgacatgaactgacacatctctccaatgtcggattgtgatgtcaagattatccctaactaagaacccaagtgtattccggaacttagggagtgcctattctagagctaggggataacctttcgggctcacatatgagattttatatgttttgtcaggaaaattgttcagtcccctgccaccgcttttctgatcgctctgcttccttttccttgacctctaggtggttgtatcgatcagtactggtgcgtcttcgtcttggttcagttccggtgtgtcttggtatcgtgccacagtttcatcaagtatcgcacgatattgagacaagacctcctattcatgtaataaaatgcaaaacatgcatgtgtaatagacattgtgaaatcaactaattaggtacacacacaaaactaaagatgtgtactttacctcacactcttgtggatcataattagggtcacattacaactcatgccgagcggccctatctattctaggacaagggtcgctaggcgtttcatatccttcatcattggaatgttcttgagaaacacccttgttcatgtggtcgggcattaacccttgctccttgattagagaactcattgatctatatatacacaggattgcaacaaagat

SEQ ID NO: 74475 - DNA, 572 bp, Zea Mays
ctggatctgaagtgaacggttcaaattagactcactattgtcgaatcggtacgtgctcacgggggtcggattaaaggccaacggcccagatttaatgaatccgagactactcacacccctccgatacagatcctacagtcgcgttttactaccttgaatcgttatcccgcttctaatgtaggccatcgatacaggatccgccgacccacgcggattctaaccaaatcgatacaacaaatccaatcatggccacacgatcccagatcgagggcccctagctcatcctctccaacacgccgagcgcacggcggcgaacattcccacggcggcgaggcattccggcgctatagtcccggtacaccggctactatccaacctatggatcccctaaatagcagtggaacgatacgagaatcaaaaagcagggcatggttctcaccagagacctatgcagcaacgatagcatggcggagagcgaaaccgaaggtgatcgcgtcgcgcggaagaggaattcgtcgcaaccagtgcacaatctctcccaccccagctgtgagcaccccacaacaatcccg

SEQ ID NO: 74476 - DNA, 499 bp, Zea Mays
cctactcccacgactttcccgcgctgcgtggccgtgagtctgcaggtgggcccccatcaacaacctgcggctcgtcgctacttcaaatcgccgtgctcgaccgtgatcgccgccgcagattccggtagccattggaacaaccccctctcctctcggccggaccctgggggggataaatatgggcttacctctccgctctcctctcatctcttttgcgccacacataaacattagagcgccgccgcagggaaaacatcgccgtcgcacctctgtaccggtgccactgccgttcgggcctcgatttggcaggggaaagtactaacgacacgcgtgtgatctagccatagcttcgcgtagtgtgtggtcggccgaacaccgccgcaatttctcgccagtggtgaagttgcaccaccgtccgcctggtgtcgtggataggaggaaccactccaaggattccggtgaggaccatctgcactgctaatccatatcctcaattctg

SEQ ID NO: 74477 - DNA, 402 bp, Zea Mays
aggagcagcagcggtttaaagatcttatgaagcagtgaaggagaaattcttgtcacactttatggtggagcgacactagaagattatcaagcaagtagaaatcaagcttgacccccgcgtacctttgctccatgaaagcaatgtaagtaactccaatgttgattagcatattaagcattttgtgaaattgcaacggggtcagttatgacaacacatgggaggaatataagaaacactaaaaaaactcgcacgtacattcgaaaaatctactatttcgagttttgcatcccatgatctcactatagaggagaaatcgttagatgcatcgacaacaaataggcctacacagtccgagtcattatatggtatgccagtgaactcatatccagggtagacactgcc

SEQ ID NO: 74478 - DNA, 498 bp, Zea Mays
gacgagttgaagggtgcattgctgatgaattcaaatacaaagagatagcatcgttcacgggcctgtactatgtagagaaacacaatgccaatgcctctgcgttgcggtatcatgttgacgagccccctatcagtgatcttgaagtttttcaatggaggggcaaaattgtaggacccagcagagcatactgtttcaccaatgacgaatggaagactgctttactctacatgtataacaacatggaagagatgagtcagtttctcctgtaagtgcaaacttaatttgtagtcattgtcgctatccttgtttttcttatcctaaaaggtttgtttccttgtactaacagtgaatttgattctcaaaattggatgtctggccatgaacgtgatcagattcgtcaagagggaaaagatggggggcctaatttcttttgttggtttcgagattatgtatacacccgaaccttcgacaattgtccctaggagcaataactgccag

SEQ ID NO: 74479 - DNA, 426 bp, Zea Mays
caaaaggtgaatccattaattatctcatttatcaaaactaagaatagagatttcactatctcgttagaggcttatagtagtagtgaagttggtccatgtagcccatgtgtggttctagttggtgggtttagtatcacctttgaagtttaggatgatgaattctagcttatgatccttgtagtaccaaatgtagaacctatgtgttaaaccttttacataaagcagggatgagactgtaagatgagtgttacatgtatgtaagcccattccatgtatagagctaggttgtaggcatattttggatgtggggtgttgcatgcacttaaattcaacaaaatgaataatgcaaactttaaaatcttagaaaattccatagcattgtcgtatatcgatgtacgagatgccataactttagaagtgttcgtg

SEQ ID NO: 74480 - DNA, 739 bp, Zea Mays
ctcgaagttgcggttgcagtagctgatagctttggcaacgatgtcactaacacctttggctgctctgctgcgttctctgattctgactctttggtcgggtctgcaatagcttcaatccgcatcgcaggagccatctctgtagctaggggcagtatctgtcctttcaattaacttcggtacatcggccgtcttgatgggcttcggtctacgtgtcaagaccttgactttctttgccttcggcgcaccagaagatgtcgaagcaacgattttcctttttctcccttgtgtttggacgagaaagcagtaatctgggtaaacaaacccaataacatcgaacaccctattcaacctctttttccggcaagtgccgaaggcggctatcatagatttgtcttctgccctcgagtacgctccaagtagttcatcgctcattgcctctatagcgtctagccaatcatcatttggctcatcaatatggcttctgtaccgaatggtatacttgagataaaccaagccactctggctagaaccagcggtggcttccttcggcatttcccatttgtttgcaagaggccatactttataagcaatgtgctcttgaactaaatctcttgtgccaatgtaggtgcatatggtgttgaaagcaatttggcacgcctgcacttcattcccaagtgcgatggatggccttctaatgctgaagcgtgaccatataggacgttggataatgcctctcaca

SEQ ID NO: 74481 - DNA, 596 bp, Zea Mays
tcgattcggagtcccgtccaagctcacagttgacaacgacaaacaatttgacagccaggacttcaaagacttctgcttctcaattggcaccaagcttgccttcgccttagtatatcacccacaatccaacggcgtcgtggagcgcgccaacggtaaaattttcacgactatcaagaaaatgctcctcgacaacaagggcaaatgggccgacctgctacctgaagcagtctaggcgctgaacacgaccgagtgccgggcgactgggttcactcctttctgcctgctatatggatcggaggccatgaccccgcaagaaataaaacatgggtcaccacgtacaagcacttcagccgtccccgacgtagacgaaccaactttgaaggacctcatcgacggagaccatgtcttcgccctacaggccctcaacaaataccaagctcaaacaaaagcatggcgcgaccacacagtcgtcccgagagaattcaacgaaggagacctcgtactcgtccggacaactcggacagagtcacggggcaagctggagccgaagtgggagggtcccttcatcgtcaagacgaaggcgtcccccagcgcgt

SEQ ID NO: 74482 - DNA, 546 bp, Zea Mays
tggttatggagaaggtggatcccttgctggtggtcacgaagaggacaagctggtggagccctgaatggcaatgcttgtggcggagatgatgggtcagaaagaggatgaggagcaacaggtgaagtttgaggaggtgatgatggttgtacaataagaactatgggttatgactcttgcgttatgggttgggcatgcgatgatgatggtggtggtggatcaaccaattggacatcctgtcgaggacatagaatgaaattcttgatagcttgtccaagtgtcttaatacctttgggcccatggatgtctagcatgtcatcctctaatccttggacaaccattgtcacttctaccctgcaataatcttctagaatgtcgttttcatggaacttgcgtcctgggatggtaaggcatgtggttaatttcttcattcgaatattgttaataccatatcttataactagggtgcacgccacatgccttgtgatgtcatcaacttgatagcggaccttatttcccgttgacatgacagagcttgggacggttgta

SEQ ID NO: 74483 - DNA, 379 bp, Zea Mays
cagaacccgaaatttcacaaacccgaatagaccgaaccgaattaccctaatagaccgaatgtccagtcctatatatagctcatattaacgtaacgatcgtggagagaagttgatagcggcgacgggaggcgagggatttcatggtgagtaagggagaggggacggcaaggacacgagggaggtgggagggatgatctaaacaacatttttcattagatttgagtgagtaatgaaaataggacgatgatccaaactgcttgatagtgtgttaagtatgaatgcaacttatttggtggatttagtggagattatgagtgtgggataatttagttgagtcgtttttgcaaagtttaaacaagtgaattatacagtggtatag

SEQ ID NO: 74484 - DNA, 454 bp, Zea Mays
ccctagtattgcggctcgaactccaggctataaagggcagagccccgcgaccccatcctcctcattctatcccagtcggtagaactgttgtcgtgcgcgcaagatgagagaaaccatgggagggagagacagcatggccgatccggatgtgcgcgttgatggagctggtgctcgggccatggggcttcgttaggtcgccagggtgctgttcatggccaccctagatgggattgttccccatggctccaccaatttctcgtcggaatgatgtaggctcgtagttgcgcccctcgccggagcacaactcagccacatgcatgagagctaacccaaccaatagagtcatgatggattgcataatctgtctatccccacctaacatcaaacaaactttgacctacatcatgtagtctatctcatccatatctatcttaaccatattcctcaaccccga

SEQ ID NO: 74485 - DNA, 503 bp, Zea Mays
gtcagacttcatggcattccgcgaagaatagtgttagacaggggaacacaattcacctcaaaattttggttgagccttcagcaagctatgggcaccaagctagacttcagcaccgcctaccaccctcagtcagatggatagacagaaagagtcaacaaagtcctcgaagatttgttgagagcccgtgtgctgaccctcaacagcaactgggagtccagtttgtcgtatgcagaattctcgtacaacaacagttaccaggccagcatcaagatgtcaccttttgaagccttgtatgcaaggaggtgtcaaacccctctgttgtggtcaaacgtaggggaaaagactctagaaggacctgccttcatcaaggaggcagaagagaaagttgcccttatccgcaagagactactcgaagctcagagtcggcaaaagagttacgcggacaacagaaggagagaactcagtttcgaggaaggagattttgtctacctcaaggtttcccc

SEQ ID NO: 74486 - DNA, 677 bp, Zea Mays
caccggcgcaacaggagcctgaagcggaggagggggagcagactgaaccggaggaactgagacaccagaatgttgtagcataagagccatgaatgccctactctcagctcgatcctggagtagctgctgctgaagcgaatcctgtctgtcctgtatagtctgaaacatcgagagcatcctctcggataaccgggtctgctcggctgccaggtgagcctgctgctgagtgagagactggagaatcgaagcaatagcaggatcaatagccggaggagcaacaggggtagcactagaactcccagcctcatgatcatgtgagcgtggggggcataggaggcgggggcggaggaggaaccccaaaatcatcatcatcatcatcatcaactgctgcatcctgagcctcgaactgacgaagagcagcatcctcggcctgagagtcaaaaactggagcagaagctggcacaggagcctcaggcgcaggacggtaggacccaaagacaaggcgtgaggcctcaagtgtgccctgaaactggggaggctgaatcaactgcgcaaaaatgtggcacaagtagtgagcatacggcagctggcgtcgagcacgcagaccatccaagacagtgtcctcgatctcacaaataaggaaatccacgacgtcaaactcagagtgagagaccagg

SEQ ID NO: 74487 - DNA, 368 bp, Zea Mays
gcgggagtcactagattttcctggccttgtataaagagaggagagaagaacgtccacagggagccgcctagtcatcaccggcctgcaccatcgcccgagcgctgcaaggaacttggttgcgcaggaactcgcgttgtggtcttgctacaccagagaggcaccctgatggccggaaaatcattcacggcaaggagtgcatagtcggattgttgtgccgtggccgagttcctctacgtattggcgccggtaaattttctatccatagattcgtcgttcctatttcctgtatactccctagacatgccagtaggaaccaccaggatgatagatcacctaccacggcaatagcgcaaccatcatggttttcc

SEQ ID NO: 74488 - DNA, 342 bp, Zea Mays
ctatagaagcatattgacgaagcatcagaacaattgcgtcacataatgcaacaaaatgaacaacccaaagagccacatcaccagggaaacctccgccatgaagaacacaattatgatgattacctatacgatgatacttctcccttggcactagagttgcaagccatgccatggcctccactatacatgcctcctcagctgccaacatatgatggtttatcagacccgaagcagattatgatgatctacgaagctacaatatcattgtatggcgacaattcagcggtgatggcaaagtcttttgccatggaaatcagaaatataactcaaacttggtattct

SEQ ID NO: 74489 - DNA, 905 bp, Zea Mays
tctggaccttcctaaaacgatctttgcatagatagggatggcaggtttatttgacaaaagccaaggagtctcttatgcaaagtgtcggccgaaggggtatgggtcactatgatccgtctgatccttcacctacgaccttgattagattaccacttaaaacaaaactgtaagcaataacaatcataggatgacagattagtggtccaaaatttgtccacgacacacgctggtcccagccctcggatcttggatcaatggcgtggatcaagatccaaccggtattcacctgatctaatctcgtccgctcttttgcaatccaacggcctcagaccaccctccaccccatgacacgggggcgtggtggcgcctagagtcagcggcgacgctcgtggctggagaagatgatgttgtgccaagagcctcaaatcccaatctgaatggtgctatgcgtagaagagaccaaaacggactagttaggagtgttcttagcaaggtgggcgacacagggatgtgtggctttgtccatgcgtggcagcatggcggacaccgacgtcggtgagaaattcacacctcccagaccaccaatggtgcccagagaagcgacaagcacccccgtggaaactctgcgaaactcccggacccgattccattgcttttatgacgatggtgtagagctctatttatgtgcgaccgcggcctaaccctccctctgctcgacgacatctctccctcacacattggcattcacgcccggcactgctggttgctatggatgggtggccaggggaggtgaccttatagcgcagagacgcggggagagcccgcgcggttggtcaatcggcgagatctccgcacgcggccacgacgaggttgttacgaatggctcagaggggagctatcccggg

SEQ ID NO: 74490 - DNA, 765 bp, Zea Mays
aggttaatggtcacttacactaatcattctctagcacacttcgtgggattgtacagaatgatatactacatacagagggtatgtggtggtcatgatttttatatcactgaccttattatctataaagataatattactttgtgttgtttagatgaaaaacaagttacaaactaagtctctaccttactccacattttaaatgtgtttgagagtatgtatgggatgacttagtgttttgtaaagatcagggggagtttcccttttgatcggaagaacttgtttctacatcatgttgtactcttttctttgcatgagttttctccctgtttgggtttctcattcaaagtttttaacgaggcaacatcaacacaaggcctatgtcgtatcatctattttcccatagtggttttcgaggatgatacattatgacatagttattgttgtatttgaactaggtgatgagtttatctccctagagttcaaatggatcaacaatagagtgtgactactctccttatttttcccactgggtttttaaggatactcagctgatatgttttctcagattttctggctagattatcttggagaaatattagcctgagttatatgtctcatcatttattttccccacagggtttttgagatgatggctatagacatattattgttctttgggctagaggtccattggagaacaatgtcgtaccatggttcaattgaaccaccgacaattatctataaagataattaagcttgtgttgt

SEQ ID NO: 74491 - DNA, 912 bp, Zea Mays
cagaaatgcttcagtccgcattatccagcgtagcaaaagtgctttctcatcatcagttattcttgttaagaagaaggacaatacctatcgattttgtgtcgattaccagcatcttaatgcactcactgtgaagaccaagttccctgtaccaattatcgatgaattcctggatgagcttcacggagcagcatggttttcctcattggaccttcgcgctggatttcatcagatccgcatggcaccggaagatcgccacaaaacagcctttcaaacccaccacggccatttcgagttcaatgttatggcttttgggttgtttggagccctagccaccttccagggagcgatgaatcgcacgcttgctcctctccttcgccgatgtgccctggtgttttttgatgacatattggtttacagttcatcatgggaggaacatatccaccatctgacattggttttcgatctcctccgcgcagataagtggcaaattaagctgagcaaatgttcttttgcacaacagcagatcgcctacctagggcatgtcatttcagcacaaggagttgcaaccgatcccaacaaggttacaccagtgtcttcctggccgacaccaactaattgcaaagagctcaggggatttctagggctggcaggttattaccgtaagttcgtgaaacattttgcagtgatagccaaaccactcactaatcttttaaagaaacacacactgtttgtttggacagcagaccatgagaattcctttcagaccctgaagaaggcattggcctcatcgcccgtcttgcaactacctaacttttcattgccctttgccatcgagacggatgcatccagctcaggaatcggtgcggtactcagtcaacaaggtcacccactcgccttaatcattaaagcatt

SEQ ID NO: 74492 - DNA, 477 bp, Zea Mays
aagctatcaatctgctaaccgatgttcgaagcttttagatcatctatttgcttctgaagcaagagaggattccactgcagcaaggacaaaacctaatcaggaaaaggggcaccgcaagacctcaactaagccgacacagagctcagaacattctgcaactacaagaattagcaaaggaatctatttgtgaacacaagtaaagtagggaaaaagtcagctcacatgaaggttagaaaggaacaaaggaaatcccaaagctagaggcatcgacgtgctgtcgaacggcggggtactagcaaaagcaatattgagagcagactcgagccccaaaagaggatcagagctcgcacccaaggcagcactcagtgaaacctcagctccaacagcgtgcagcgaattcctagtgcccaggtcactgacctctaaagtgatcggaccaacaagagcagtaggaagactcgttaccaccggctcctc

SEQ ID NO: 74493 - DNA, 356 bp, Zea Mays
gtcctttctgcaaactacgcacaccaaaggggtatgaagcgttgacgaccgtccgatcaagtgcggatggcccggattagattcgtcccaccgcgaaccggtacacaaccacagccctcagatttggatctggcgacatagattttaaatactaagatctaactacaaccactggatatgagatctatggtcaggattgattgcgcgaaggggtaagcagtgatctaatcttaaccgctaatcctgagatcgacagcttctaacgcgtcgttccccaacacctgctcttcccagcgaacagacacggtggcgttctcgcatgcggtggcgcaatggccggacacagcgaatcaacg

SEQ ID NO: 74494 - DNA, 284 bp, Zea Mays
gcggtccctagtgcataccacttagatgaggatacaatttaatctgcgccgtgcgaagacaatccaatggctctcattcatcgataccccttcagcctcacacatttgctaaagaaacctcgagtaatacgcaaatacacccgtcgtccctccatcataggaatacgtcacatttaagtccctagaattagcaaatgaacccctggaagttatatttaggtataaatttaataataaaatacctagaaacttgtttaattcatatccaatccgttttaactccg

SEQ ID NO: 74495 - DNA, 603 bp, Zea Mays
cttggagaaggtgttcaacctcatcagttcttggacccctcaagtattcttcaccaaaaacatgtataactcctttagcgaaattacccaaacattccaaaactgtgcttgctgcaattttcaaattatcatcaagttggtcagctggagtaccgtaagctaacattttaatggcagccgtgcatttttgaataggtgagagtccttcccttcccacgcaatccaatctatcagtaaaatatggtgaccactcactaagtgcagcaacaattttcaaaaacaatggtcgcctcattctaaatctccgacgaaacatctcatcggtataaattggattaggagaaaaatagcaagcaataagatctgtgtttgcttcctcacgaggccttggaacaaaccttctacgatagcatctccgtcgtgtcgactgttcttgcaaattggagatgatatcctgaccaatttcatcaagaaagccatctagaaattcttcttcggcaagaagatcttccattgtgtaaacatcatcagcatcagtgaactccaattcttcatcgttgccctgtgtagaattggcactttcttgtggtgtatttgctcgag

SEQ ID NO: 74496 - DNA, 1643 bp, Zea Mays
tgttgaatcacaccactgtctagcatctctttgacttgtttctctatctcatccttctgctgaggggtgtaccgataaggtcgaagcctaaatggttgtgctccaggtaacaattcaatggcgtggtcaacctgtattttcggtggtaggctgtctggccggagaaacaagtgctgatattgttcaagtaattgctgcacagcttctggggtatttttaacagtcaattcagttacagtctacaattccaaccaatgctgcactgcttcttgctttatcatgaaacccaactgttccccgttcaggccgtaacaggtctgaacctttggtaacacaccctgcaggtgaactctcttcttatcataatcaaactccatccattttgcagcccagtgaactgacataggacagtggcgttctagctagtccatgccaagaatcatgtcgtaaccccctagagcaatgaatttgaaatctgttgtaaaagtggtgcctccacacaaccatttgcagtttggcaaccagtgttggctccaaagaattcccccatctgctactttaacttgcattggcttggtcaacagttcaatccctggtaagacattcatcaagtgactttccagaaaactagcagagctgcctgaatctactagcaccagcaattgttgacaataaactgaagcccaaagtcggatagtcctgctgccctcaccaccctcagtagcagcagcagacaatgctagcacactgtcttcattagtttccttactgtccccgatacagtcctccagcttctcctcttcattgacagccaattcccacatttcttccaccaagtacagaggaacattagttgagcagcggtgttcatagccccatttgttcccacacttgaaacacagtcctttagcctttctgtacgccttcagagctaatagcttgccctcatctcttctgccttgttgtggtccatggcctcgacgttcttcagtgttgctcaccgccctgttgccccccaatggtggtaagggtagtggcataggcgttggcttaactgaatgtcggctggaataagcaccaaatttagttcttcgaccatctcttcgccccgagtgcagcagcacatcctcctgcaataaagccaaggatccagcagtatcccaatcggatggacgctgaataattacagcacttttaatctcgtctttcaacccatctacaaaccgaccagtgatcatagtcgaagtgaggtggttctcatgggctaataattgatgcataagctggtcaaattgttctacatattcagctactgagttggtttggtggatgtgatagaagtgtctaataagcaggttatgctgatctctaccaaacctagtgttcagcgtagcacagagcgcttcccaactcagttccctgattctgtgctccatagactgaacccaatacatggcaggaccctcaaaatgcatagtagcaattctaacccatttctcaaaaggcgcagcatagaaatcaaaataggtctcgcatctgtgtttccagagctttgggttggatccatcaaaaacagggaacaccatattgggcatagttgggccactcatctgtgaccaatttgctactgagttccggtctaa

SEQ ID NO: 74497 - DNA, 529 bp, Zea Mays
gttaaaactcagagttgaatttgtttgaagattaaaattgaaaattagaactgaaagtaggaagcaggaaatataaagaaaaaaaacaaaaccatcccatgggccgaaatcgttcattaggcccattgcccaaccgttctcctagccgaagcaccatataaccagctccacaatgacagcagggcccacccgtcagtcgtggttcttcctctgtaatgtggacccggcgtgtcatcttcttcttctctccagcgaaacaaacgaaattccgtggcaattccaaacagaaatcacgacccccttggccgattcgcggaactcctccttggatttgggtcgatccgatcccgtgtccgcgctggctccctaaccgattctcaacaaccaaaatccccagttgacagagtccctcgcgaaaccttgatctgggccgctataaatggtgaccgcgacctcccctgctacttcatcacgcaaggcacccagccaaatccaccgcaagggagcaaagagatcgagctgagtgctg

SEQ ID NO: 74498 - DNA, 324 bp, Zea Mays
tgaagattggggcattgtgcttgttcaacctttgccggagcatgaggtcaatttccacatttttgatgatatcatccgtgagtatcttgtggaggtccggcgtgttcaagtcaggagcattcaacgctcccatttgggacaggctctggttcgattcagattcgcgtttgacagagacaacttagtggcattaggtcctcagcaagccctgggattctcttttactgtcattcgacacaatgagggctggaatcagcgtgccctaacctttaaccatgaatgttggcttctgcttcttggttttcctctggacttctggactca

SEQ ID NO: 74499 - DNA, 482 bp, Zea Mays
gttcgagtttgagcagtcatgtgtgggggagggaggtccggccaaggagcgccgtcgccggccactgctccctcgtccatggctaccgggaggtaggagaagcctttggaccgttgatcgaccaaggtgtggctatgattagatcgtgacaaattttgatccagaccatcgatgccgcggcggacggataggattaggtatgagagtaccccttcgctcattaaatccgggccgtggatcgacggttgtgtggcctggatttaatcaaatcatgctcgtcgatcacaaatccggcgatctctggtgcataccgcttggatatggatgtgatctaatctgcgccgtccgcgcgagatccaacgacccaaatagcccaataccccttcggccagccttatttcaaaagagaccctaagaaattaaataattaacccgcagccttctctaggtgttcactgagtctaggaaaacttgcgagatag

SEQ ID NO: 74500 - DNA, 375 bp, Zea Mays
atattagtagcgctagtcctggcagctatgaatgatcagagtggctagggctgccagtacgtcttccatgcagtaccagtactgtacgttgcatggggaggccctcaatcctcatccttgtatagaagagaaggcgagcgaggagggggaaagggtgcagagagtggtcagagcctgcactgttttgtttacggcgggccaacgctgaggtgacccatcgtcctcgcctcgctttccctctcttgattctctcacgtcgtcgtctccggcctgttggtgctgtctactgcagtggtcgtctgcagtcagtaatctctctgctccttccccatgcaatgcagagcttcttcatccgcatcccttgccctcgtctcc

SEQ ID NO: 74501 - DNA, 977 bp, Zea Mays
gtcataactcttcatccctaagacacgcataatagataagttcacccgctactaggttagctgcatactcatcagggaacattaacatcttgatccactctagtacttccctcctctaggccttgctcaggacaaaattggccatagaccttctccatgtctttccactactaggcgacttcatctcttggtttgatctatcacataataatgccagatccactcttgcctttacattatcctttgacttagcgtgaatgtctatgattgttgcccaaagtgcatcagcgacatttttttcagtgtgcatcacatcaatattgtgtggaaggagaaggtcgtcataataggggagccaagtcgagcccaacttatgggtccacatatgttgctcaccatattccacaaaaccacattctggcttgaccacaagaccatctatttattgacgaactttagcaccagtcatcattggaggtgggcgatctgccactacgacacatttcgtaaagttcttggtgtctagtttgaatgcatggtcaggagggagaaatgtcgatttttattgaacgacgaatatttgtcatcctttttcaaccaaatgaatctaagagcttcctttacaaactgggcatggcaacttaccgtgaacacaccagacggagaatagcccatataccggaaagtcatgcatggaatactagtaccaaacatgcattttgaagtttttctttgtagctcagtcgtatgtccatatcccttcctctcaagcatggatcaattcataaatcataagctccatatacacacccaatttattccccaggcatccaagaattatcaacaacaagaacatgttctgccgttgaaagcatacaccggaggggagattgagagggataacgaacatgggccaacatgtatatggggcagtcgtcagtacataagtattgaacccatcactaccggaatccgag

SEQ ID NO: 74502 - DNA, 450 bp, Zea Mays
tagtggtattgttgtgcccttaggcttcttttgcattcataagtgagtttgcttttgagttttattttcgattaagttgctcccttaggcgtcttcgcaccattaggtgtctttgctcaattcttattttgatttggtcatgctcttaggcgtctaggcactcttaggtgtctttgctcgaatcttttttgattcggttgcgcccttaggcatcttcgcacccttaggtgtcctcactcgaatctttattttgattctactgcacccttaggcatcttcgcatccttaggtgtcttcactcgaatcttattttgattcggctgcgcccttaggcatcttcacaccctataatgtacagttatatggcaagaaaacattaatctttagatctactaaccaatcgcttagaggtcgcctgaccgcatagctcttcgaggttttcactgcttc

SEQ ID NO: 74503 - DNA, 521 bp, Zea Mays
cctatgggaacgggaagtggttggagcaaccctggcaacttagcacgatcagccttagcttgccggcaaataacacagttgaccacaaagtcatggacaaattgcttcatacccttccatggaaataggtgcttgagccaagcaaaggttacagggaaccctgaatagcccactactgtcgagcaatgaaatgttgagaccaagcgttgctgcaactgcacattatcttcgagccaaatacgattcatgtatctcagaagaccatattgccaagctttatgaggtatagcttgaggatcgagtgccaatttggctaccatcgtcgaagcctcattgtccccatcatatgatgaaaccacctctgtcagccactatggggtacacgaagacataacctagcaagcaggagtcacaatgggatgtcgagacaaagcattcactgctccgttatccacccctttcttgaaaatgatacgatattgaagacccaacagacgtgtgaacatctttttctaccaaac

SEQ ID NO: 74504 - DNA, 428 bp, Zea Mays
atgctgagcagtctgttgtgtctgatcatcctagagacttaccttgcaatttgctattccgacgtcagctattagaaacagctcaccacctgtactcgtacgcacgccatcgccatgcatatcatcttcgtcatgcattgttagaagcaacggtggaatagtggtagaagaagtctcaaggaagaagaagaagggaggacgacataatctgtaggatttttgtgttcgtattgttcaagtttgcatccatacaatggcagccgccatttaactctctctcacagctctcctctaggctacacaaaaccctgtagacgagaactgggcctgtggacacggcttccccttcttgggcctgcttctgcgacttgggcttcattctcggaagagcggcacgccggctcaggagtagtgggcgtaacactcca

SEQ ID NO: 74505 - DNA, 1212 bp, Zea Mays
aagtgatcctggaacacaaacatatcaaccgagaaacactttgagaagggctgtccacgaggagatgaagagccggccggcgtgatcaccagaatggtggacaacgaagacgacgacgtggggcgagttcaggtaggatgagcggcacaacaaagttcactacgagcacggggacatggatggataaatcactctctggttaaggatacgagtcatgagaaggcggggagaacactactacaccggcggccacggtaacggaaagggcacggtgaacatgcagtgtttgcccatctcactatgcacacacagagaggctaaaggtttcatgaaactggacacgcgacctcataaccgtagcacacgcaggaccaaaatcacagcagggcagtaactgattgacagagaagcaggcagacagcttagtcaccactaggagataagctgcagacttctctagcctcagatatttgagtgctcaaaacttatccttacccacaaatgccaatgcctgtttcacttacccaaactgaccagaacagcaagggaacacagtggttgagatccttccatttctccacaacctgaactctcattagttacctacaccgagcctttcatttgcccacattggcttactgtcaaacaccacccaaccacagttacaaagtcccagctgaatccagggagtgagaagctttaaaacaccccgaactccagatctccaaactgaattcgagcagactgaaccaaagtttcagccacctgaactaacttgacgcccaactgaacccccatcttttccccacttttatcacacgattccaaatggtaacagggaacctaccttaacataaattgctctccaaactaccttctatatcttttatacagagtccttcgtccaaaacctcatgaattggtcacaaaagagctccaaaccgagcacccttcactacaattcagttttcagtaactgaacaaaaaaattcagtcacaaccaacctgacagctgatcttggaaccaacttttctccaaattttgtataagatcaagcccttcacccttaaagacatttgtccaccaacttatggtatttaactcttatatataaaccacatcccataagtttatggattatccacaaagacgctccaaaactgcactaataacactaaaactcagattcagtttactgtatcaagtctgaa

SEQ ID NO: 74506 - DNA, 523 bp, Zea Mays
ggctacatctattcgtggaatggcggtccaccaaacggatttgggaggagattgctgcttgggtggccattgaggacctaaagtcgtccaattgggagcaattcccctcgttcttagttgtcgtggtttgtttttcttctctactgtggggagggtttttatccttgagcccggtgcttttgcctctgtattaaacctatttggtttcttctccttatcaatacaataggcagacctcctgcctgtatgtttcaaaaggataaatgaagacaaatccatgcctgaaagatttgtaccatattgcagttgtaggctggattatcaaatattttacaacaagtagcaatagaagtaaatgaacatgtattgcataatttatggtagagtaaattgtcgtcttataaagggcaactaaagattcaagaaaaaaaatgacaattacatgccctctaaaagccaaatagatacacaaaatggcatatcgtgcacttcatttccactggggaaaacaacaaatagatca

SEQ ID NO: 74507 - DNA, 290 bp, Zea Mays
aagtcctacgaaactcatctccaaaatccttcttatacctaaggtatgagggagatttggaaaaacaaaacttctcttgaatatattatgtagtgttgtcatcaattaccaaaagggggagattgtgaatcatctaggccccttagtgatgttttggtaattaataacaactgtttgtggactaacggttcttggagaaataagaatgcagggttggaccacatagaataggaaatcttggagattcataagcattggttgtggatcaagtgaaggcaaaggtataacat

SEQ ID NO: 74508 - DNA, 458 bp, Zea Mays
tttttcgcaggtatggatatgggtagtgctgaaattgtcatttgatgctactggaatgataattatttcaaaatgtgataaaattgttgtttggtgttgaatgctaaaattgtagtgggcgggcgggtaacaggtatccactggatagcggatacccacgaacgtttatgggtacatgtatggattaagttttgtctcgcgggtatggattaatgaactatatatctgtgtactactcgaccgattgccatccctacgtgccaccagtcgcaggaggttcaaccacttctactggatgttggcccgatggtgaggcgatacccaatgtcgagtttagcggcgtcacgtcctcacggcgccgagctagcgacaaagtgatctccgtttttattttcctactgtcccttcgtgcgtctagaaagatccagagtagcgtcgacgacgaaacgatctccatt

SEQ ID NO: 74509 - DNA, 711 bp, Zea Mays
cggaggacgatgatgaagctgaagtaggatgcggaggacgatgatgaagctgaagtaggggcgcccctaggaggcaggtagcgagatccttcacggacaagaaaaaagatcaaactcaatagaacgataattatcggtggtgaattgacgaacaaaaagaagattttgagatatgtggggcggcaagaacattgcaaagatgaaagggcccggagaaggttcctgttgccacaatgatagatggaggtggaaataagagagtatactagcatctagagtggtgtggtaggaggcactagaatcagcaacccagtcggtgacagcaggagcagtgagggtcatcgtgaggtagctagcaagggactgttgatcccaccccttgggccacggggtccaggacggagtggagtggtttggcagtggacaaagtgatggttgaggagctagcggtgcaggggtagggtggacgaagggataccttgaactagttatcgccaagtgagctggctagggcggaggaagtcacggaggagggacacccggggactggctaggccacatggtgatgcagccggtccacgagttgtagatggaggaccaaggagagtctctaggccaccaccaccacagacgataacacggtcaggcactggccggtggcggccaggtcgaagccagggagagcaagagtcaactgtaggaaggtgggcg

SEQ ID NO: 74510 - DNA, 798 bp, Zea Mays
gaaaggcgctcgcgcgcgcgcccgcgctggcagacttgcacagaggcccttggggttttaactaactgcgaacgagcctttttactatttaacacagtcactgacgtttgcataaaagtccttcctcttctatttattctgagtttaaagtccccgacgccgttcacgcgcggccgtgctccggcgagcacctgtaccggccgaatggggcaacggctgggttctccaagcggcagacatgaaatcggggctagcctgaccatttcccctaacttaattgcgctattgatcaactatggagctctggccacggtggccgtgaatatggcgactatacggtcgtgttcccgacgaccagagagctcttagttcaattcgatgggttggcgagtatcaccgacgtatgtgaatgcttaaacaagggagcagaggacgggaactgaccggagtatggctggcgacggtgaagcttgttttacggtggcgaaaagagatttgggggaaaacgcgaattcgagctcacgagtggatgattgtggccgattagcagtggttagttagctgacgaccttacggaaccggtggggggctcaatttatagggaggacaggcagtggtggtcaattcggccgagccgtgttggcggccggagctgaggaagaaagcgacgcggtgaattcgtggctatcgccgtggcaagctccccgtcgacgatgggacgggtgtagggagtcatggcgacgcggtggaaagttaaagccacgcggcgcaaggctaggaggcggcggtcaccggcga

SEQ ID NO: 74511 - DNA, 560 bp, Zea Mays
gtttccgaagctcgaagttggcctctcgctatgttgaaggatgaccttgcagacagcctcgcttacaacagtctgaaggtacagatgtgttgacttatgagcagattatttttgtatcttttaccattgtgctgatcctgctcccccttttttgtagggcttaatcttgagcaatgctttaagggcacaaaagaatgttgaggacaaaagctgccaaatagcccttgggaaccttcgatcagaggttatcaaaccaaggaataaagccgcagagaaggataaattctgctctccttggtagatagaataaaggctagcgaagccaatcttgctgcatagtctgaagctcatagagccgaaattgaaaacttaaagaaaaagcttgctgagaagaatgaggattttgaagtggctaaagcaaaacaagaaataagtgtatggacaagcgcaagattgcaaaagaatgaagatgagcttcgggaatcgaaggagaggtattacgagaagcccttggattgtgctaagaagttgaaagatagttttgcaaaggtgggtgcata

SEQ ID NO: 74512 - DNA, 446 bp, Zea Mays
gagggagggagtataatttaaatagtggtactaacttttcatattgctagactaggtagctgtggttcaagtattacaaagttgagacaaactatggatcaaacattgtgatgtttattagttatggttagtatattaactcggactaaagaaccttgtgactaaagaaaacccggctgatcagcaggcctatacgtgtggttgacgaatcggcccacggccacgagatggatccgtcggcgtctcgcgacagcatgtgaagggtcgcttggccgtcacatgcatcatcatcatcatcatctgccccgctgccatgtcaaaacaccgctttcgcggatgaactggactcatcgtcccggcggtgccccggtgcgtatctctcccatatcatccatgcccatgtgcccttccgccttttctcactctctcctttctcttctctctac

SEQ ID NO: 74513 - DNA, 503 bp, Zea Mays
gtcggctcttcaatgggtctctatcctcgacaaaagaaacattatcacattattttatatgacattaacggacacactacatccaataacaatacatcacaaataaatctaagaaaaaacattataatcattcaaaacaataaaaaaagtaacacgtggactggtgggcaggacagctggtggctgatcgtttaggttgtgtggatgggtgcttaaaagagttgtgagatgtaggattagttgttgggcatatggtatattgggctgcacagtgattttactgcgtaaattttacccatacgtatctggtttggattatgcttttccatactcatacccaccatatccaatatgtgaataatttctcctaaatttatatccatggggattaaaatcttcacatactctaagcttaatagaggaattatacatggattaacgggtatcgggtctgcattggcacctctaagtatacctaactctctagtgatacacaccatcgg

SEQ ID NO: 74514 - DNA, 462 bp, Zea Mays
gtggactccaccgctgggtgttctgtgctgtctttcctggattgctattccggataccatcagattagtttggcaaaggaagacgaggaaaaaacagcgttcatcactccgtttggtgctttctgttatacctccatgccgtttggcctcaaaaacgctggagcgacttatcagagagccattcaaacatgcttagccgatcactggggcaagcgtgtggaagcgtatgtagatgatgtggtaatcaaaacggagaactcgaaaaacttcattaaggacttgcagctggttttcaacagtctacggcggtaccgatggaagcttaatcccgaaaaatgtgttttcggggtaccagcaggaaagttactcgaatttattgtcagccaccggggaattgaggctaatcctgataagatcgaagctatcatgaaaatggaagcaccacgatcacaaaagaaggtt

SEQ ID NO: 74515 - DNA, 1173 bp, Zea Mays
caatcaaacccgactcatcgaggtcctcactcgaaatctggaaaatcaacggccgaatggtggaagaccacaagacagaatgggggatttcctgagactcaaacctcccacattcgccggatcaagcaaccccctcgatgcagacgattggatgcgcacgatcaaaagaaagcttgaagccattggttgcccagaaatcaacgtgttcagatggctgcccaccaactttccgagatggccttagcctggtgggacaccttcaacaacaccatcagagatgctactaaggcggaatttgaggcggctttccaggagcatcatgtgccccaaggacttgtacagcttaaggaggatgagttccgagaattgactcaagacggaagatctgtcagcgaatatgtgcacaagttcacagagttagcccgctacgcgccagatgatgtcagtaccgagggcaagaagatggcccgtttcctgaagggactcagaccagaactcaagacaattctggctagccaagacttcctcaatttctctcacctttccaacaaggccatgcaagttgaaagggcaaaggaggaagaaaaagggcatctcaaaaaaaagttccaggttctccgggcacaacagcaggaccggcaccagaagactcgatcatttgggtttccacccaaggggccaaacttcagtagaccatctggacccgccccatcacggttcagccaacagagtcagagctctttccattccccctcagtggcaagcaaccaacccccggcgaatgcatgttggcactgtggtgatcccagtcacttcaagaacaactgtccgcagctgaagccaccaggacccgcctactccaactcggtgaatggccccaagaatacctcggcatccgcccccaaggcgccctcctccgtcagccagcagaacaaggccccgtaccaagggagggcacgagtgaatcacgtcgatgcccaggagcctcggcaagctccgggagtagtgctcggtgagttccttgttgaatttactcccgctaccgtacttttcgattctggagcatcccactctttcatagccactagttttgtggaaaagtatggcattccctctactcctcaagagattcccttggtcacccgaaccccagggtctgaccttctatgccag

SEQ ID NO: 74516 - DNA, 1085 bp, Zea Mays
caggctcctgatctgaccatgtcgggccctattctagactcaccaaccactgcggtggtcgtgttagcctcgatgccaccagcgcccctacttctgtcacttctagccttggtgccaccagcctaggccctggcttcatgcatggcatcgcacaccactcctctaaaatcacggtggctcactccaccttggttgttggactcagcactaccaaggtgacagtcattgcattcaggaccacgaacgtgatgttgccctcacctaggagcacaagcgcaacacgataaatgcccttgccatgcagttggttgatgttgagtgtcacctgcttggcttctccatcgttgagtattctctgatgcccccaatggtccttcctcctcagagtatgacgtggtggttatcgctagcctcaatgctcaagtagaatgtgtccagaacatttggttgctcatatctatcatcctcaaccttgtgtctactcactacgaccactggcgtgatcatgtgatcctcatcctacgaccacgtccttgctgatgttgttccccaactactatcgtcctaacactggatcgacattgtggttctctcatggatccttggcatcctcaccattgagctctagggcgtcgtccactaatgaggggggcatcgctcactaggcctgggttgcactcaaggcccagttccttggcaaccaggaggtttgtgccctacaccttgactcctccttttggcccttctcctagggcgacctctttgtcaccgagtactgtcatcggatgaagggcatgacagactctcttcaagatcttggtgagcccatctccgattgcacacttgtcctcaaccttttgtgtggtctcaattggcacaatgaccacatgaaggccttcaacaagcgctctatgcccttcccgtccttccatgacattcgcaaagtggtacttctcgaggtcctcacctcatacgctaagtccactgtgtctgccatggccctctatggtgcgtcctccagtagccagccaccttgccatccatcaccggagagcctcctctatgccctcctacctcttctccta

SEQ ID NO: 74517 - DNA, 352 bp, Zea Mays
gctgaatcccgacaggggcgggggaaccaccatctagatagtggcgtgcggcgcactcagcacgcaattcctcaacatctgcccgaaccttgcccaactcgtcaagggtgtggtccagctcggtgttgagcatgacggccaggttgaccaagcttttcagcctgggattaccctcaccaactggtgcgacaatcacacctccagcactgccgatcgaacagggagggaagtacttcaggtcaaggccatcagctaccccgctgaacaacactgagaaagtgcacatcatgctgcatcttgcatggctgcctcggaagtatccctctcagtaatagagtagagctctaagaag

SEQ ID NO: 74518 - DNA, 390 bp, Zea Mays
cgaaggtgcttacagtcaagccatccaaagccaaggcagatacggccagagagccagaattgaaagaaacattgatgatgccaaaaattttgagcccaccggcagaggcagaattgctgaagatgacaaaggctcctgccacaactcccaagaggaggaggatggccagcgtgctagacgctgtcatggagacaacaaaaaccttgaaccctactcctattaagaaagttgccaaagttgccaaggtacaggccgaagccgaaactgagcctacagtgcccatcaaaacgaaggttgtcgcgcctgaagataaatctgagcaacaaacttcagatactggcatggcaacgggcaagaaatgatggaaaaagcaaaatctcctgcccccga

SEQ ID NO: 74519 - DNA, 597 bp, Zea Mays
ggagaattcaacttcttccttgggctacaaatcaagcagaccaaaatggaacatttgtgcatcaaggaaaatatacaaaggatgtcctgaagaagtttggcaagggcgaggccaagcctctttcgaaacccatgtccaccatgatggcgctggatgtcgatgaggacggtgagtttgtgcactagaaggagtacaggagcatgatcagctccctcttgtgcctgactgcgacgaggtcggatatacactttgttgtgtgtctgtgagctcgcttctaggcttccccacgcacttctcgcgaacatgctatcaaatagatcatgagtgaaagggaaattgggttaaccatttcatataattaattttggtggttgatgatcaacgcaaacacatggactaactagtttgttctagaaattcttgtattacaggtgcataaggttcaacacaaaccaataaaataatcaagttagggacacaatcgaaaaggagcaaaaggacttgagtgtgctgaaaaatggtgcacctgactgtccggtgcactaggccgtacaacttcgaaccagccactctcaagaattccagggcgcactccgc

SEQ ID NO: 74520 - DNA, 540 bp, Zea Mays
ggggagggttctaaaatctcaacaccactggagtcagtctcattgtcttctgtacttttatttgtcttatttttatataacggacatccctttctcttgttcaaatctgaagacaataaaatagcggccaattttggcctaaagtgttttatatcggcctgcaaagtaagaaaatatatggtgttatttatcatatcattgtagatatgtatatgatagctttttgatatacctgtgtaaaattgtctgatagttcgactcctgtccagtactccatataattaagtaggaaaagtccacatgaagaactacattaaaaaatcaaatcaaatatgtttccaatttaaatgaaaaggttttagaaagatcaattatatacctatctgtctgcttggcatctttaaactctataagtttccaaggccaataggcaacttgaaggtctggccaattatggtctttaagtttcatgtaatgcgacacaccatctatttgcttttgcaaaccctttagctacaaacaaaattagtaaatcacatc

SEQ ID NO: 74521 - DNA, 389 bp, Zea Mays
cccgttcaacttgttatcgagggcagcattcgcctgtcatctctacaagacttcgggtttgactcaacaagttgaaccaacccctcggagggctcatgttggaacaaagacagaacacccccctcgatcacaagtccacatggtcaaagttgcagaagaaaggcgaaggctgagaaataatatcgaaggcactagaacgtgacctctctttggtggaaaagtcaaccagatagactaacttacaaaggtcgctggccactatcgaaagctcgaagactcgacaaggccgaaaggcgacccgtgatgtgaatggcaagtagatttggcattaagcgacctccatgtaaacagcgcccaccctctgtgggcccacttgtaagtgactcagg

SEQ ID NO: 74522 - DNA, 599 bp, Zea Mays
gtacacatcgaacgacggtttagtttggcttttgtgcgtttaatagaatattgaggcattacattgtataggcattcctccccctaatgttgagatgttctaaaagcatacagataaaatcccgaaccacaatcatccagttgtgcgcaatgtatgctattgtggtgatttatttgggaaatcttacgcacattacagataggggttttatgcagtgagctttggactttagattaatgtagtggcatgaatactacatatttgtccttcaacatgaagggttagtctcaacatccagcgagacacacaacaacaagttgcttcgtggttacaattctaccaacttattgttagtattaccaaatacacagtcaatcattaagttttagactaatatgcacaacactattttatccataagggtccttcaggggatcatgcataccattcgtcatttggagcaagtacgtagttgacttcagatcaacaagtaaaatgaccatcagagtctagcgctcacaaggacattcactggttgcattgtgcttttaagcacataggaaaatgtgtgcgtagataatggtagtaaagtgcacggc

SEQ ID NO: 74523 - DNA, 577 bp, Zea Mays
catgaattctcctttcaacttagtgcacatcaagagagatatcgattaaattgaaaatagtatatacgacactaagaagcatgagtgttaattgaagtcattcaatgatcaaacaaataacagatgtgatcaaaagaataacatacggattagattatcaattaagcttagagtaggagaatccagcaaatatgctactttagagtgaaagataagaattgaaaaatagtagcatacttcatgagaaactcattctcatgcaagagactatatgaaatgactaagataaagggatagtctcatcgtaatcaagatatagacagaggctccccctaaagatatgcatcaagtatttgaatgaattgaatggatgcatttactttaaagacaaatagggagaagcattatacatcttgatcaaggctcataaaatttgcaataaacaacttaagcctagtattctcattatgaaaggatttagaatactcacaaccacaccattgattgttttgtagatcttattatccaagttgttgttcttgatgtcctcccctttcatttgagagtcctccctttg

SEQ ID NO: 74524 - DNA, 811 bp, Zea Mays
cacaatcttttttttcttcatctgggtggcgtatgactcactcctctataaccatcttatcgttgattagcattagaggcaataatctgattattgattagcaatggatactcgaactaacacggatagggaaatatatcttgtaatcagtctgtcttaataaatgcttacattgcagttggggtttgctgtcttcatgtttcccgaaagcagagtgttgtgtccgcatctttggttgattagtctagaaaaggtgggggggaggggggaagctttgttaagctggcttttattcgcacattagtcgattatggtaaaaattatattctatctttactttatgcgttttctcaggattagctcctcctttagcttactgaatttgtggacactttgtttggagaccatcttttcctgtattaagtttgttaggcgcagacactttttttttaacgcaatgcacatacacttttcgtgtatggtctggtggcaatgatttaaatggagcgggatagacattaggtttgttaatcagtggacagtctgttgctgttcatgacaggtgggaaagttgagcgaagctgaaaccgtgtcccttattttgcaagggtggtgctcataaggaaccacccccctcttctttgctggtgggagaacaccaaatggcccagctgttgcaccatcaggattctgcattctacagcaaggaattgcacgggtgccggtggggtattcttcaattctttgggtttcgccgtcgcctacggtccacaaagatgctctctgacaagagacatggtcaggagaaaaa

SEQ ID NO: 74525 - DNA, 391 bp, Zea Mays
aaatgtgtcattttgctaaattgataaaccacaacaaaaattgaatcccttccatgcttggttcgtggtaaaccaagaacaaaatccatggatatgacttcccaaggcccattaggaataggtagtggagtgtataagccatgagggtttaaacgagacttagctttatgacatgattcgcatcgaaggacatgtcgcttcacttcccttctcattttaggccaaaagaaatgattgacaagcagttgttatgtcttcttggcgccaaaatgacccataagtcctcctgcatgagcttcctgcaaacgtaaaatttgaacagaacattttggaatgcaaactttgttagctcgaaacataaaaccattattaacatgaaattttaccgaac

SEQ ID NO: 74526 - DNA, 567 bp, Zea Mays
gaaaattagagttcaatacaaaaaaatatcttccaggaaaatgtaataattgatcattagaaatataaaattttaaaccaattactgcatatatacaaaatatcatattggactaaaaatggtatgggccaccaaatcaaccatgtataaatgaaaaataagtcgaaaccatgtaagtgtaaaaggggagatgggacctatgtgacaaaaatcattaggtaaccgcttataaaaagacatgttgctgcgtgggcaacttttcagcagctgagaaaggatcagataccaaaaattagaacttctatcactggtacaaaccaatcagcataaaagaagaagataaggcctaccttttatgtaattggaatgaaatttgaagtaacaactatgctgaaggctgcacaagccacatttgaggtagagaaataacgtcaacaaaaatcgttatgattgtttcaaatgaaattttaatagttaataacaaacttcatttagtatttcaggtctgcagatcacatgttaattggttgtaacttcacaaatcaagaaaaaatggcagacctaatg

SEQ ID NO: 74527 - DNA, 738 bp, Zea Mays
gctggagcgggatggattgataaaaaggaaaagtggcccacaagctatgcatcggcagccgcaagttgggtgggcctcgaaagctcccggtcccgggccgggggaagggacccagcccagccctgcacggctgcacttgccatgtaggcgtagcagtggaacgtgtcgaaagtctggccgtcgcagtagctaggttggaccccacctttcccttttttgttgttttgttttgctgctggttgcaggctgagggatgtcgccatcattggctggctcgttcattggatactgggaatgggcttctgttaaactggatcatcgaccaatgagagagagcgagaccgtcgtcagctggatggagaacagaacacagcctgtcctgtcgtgtgtcgtctcattcagctccgatgttctttctgatctggacccttctagttcacactttctgctcttttgaagaaattattagtctcgggttcctgccgacttgagcaggggggcggcggtggtttgatcaattttttgatacgtaccaagatgtgatgtgaaatgaatcccctttcggatttattattagtgggtgcttcaggtgtttagtttcttgaggcggtaggtagttccggtactctgaatccgtgtcattattagcagcagaaatacctgtcctgaacccctatgagcatgcatgaactatcatcgtccttgtttgtattcatgagaaaagcggggctgtatatt

SEQ ID NO: 74528 - DNA, 637 bp, Zea Mays
caaagtgttgtgaaactggcaatggcacgcacacacaaggcgatcagctgcagatctttgggtgtcgagctagctagctagcgcgccagcgggcagggcatcattttgataaaaaggcgctcgatgtagatctggtggggagagatacatatgtcgggttggaagaccccactgagatggcaacaacgtaacgtgtgggtgcaaaggatcattgtgtgtatgtaataaagcctgctgcagcctcgtagtagctagctaggcaaggcaaggcaaggcaaggcgcgatgtggtgaaaaagaagggccggtgaaataatatttgcccctttccggtgaagatcgaaaattttctcctttccggtgaaggttcatgcaccgtgcttaattgaatgtgtactagccgcagtacaaaagatctgctgtgttcagatgctgattgcccactgctagctattctctaatatatatatcgtcatccatatgcttcaactatagtaagctaccttgcaataaattaaagctagctccctctatatattggccaccaaaaggatatttttaaacattcctaagaaaagaagaagacgtttttcaaacatcactagctagtacgtgcaaagcctgccaagctagctacc

SEQ ID NO: 74529 - DNA, 683 bp, Zea Mays
ttttacggggactctttagcaaagtacacaagcgaaagggtattctctattatcagccgcaggatcttgatcttgcggttaggattagatttcccccctcagcgaaccggtacatgatctgtaccgcacgatctaacaccgacgcctacgatttaatgagacctaagttgaatcagagccgtaggatcaccgatctacggccgcaaaggatttgacgaaggggtactccaatccctaaccccggccgtccgatcagaactctacggctcggattaccctaaccctggatctaatcgtaaccgttaattcagagatcaatggttcctacgcgtcgctccctatcgcctgctccgtcggcgaacagacacggcggcgccctggactacggtggcgccatggccggatctactaatccccccatccccgcacctaaactccgatctaaaggtagaaattggcagcggtgctgacagggaattccaatggaaggtgctcaccgccgatcgacgtcgtggaagccctgtccacggagtgttgcgggcttgcagcgacggtgacgatttggggccctccccggtcgcccactccgcagacgcacccgaagcggcgaagaggctcgatcgaagtccctgaccgcgcaccaaccccgaaggagatcaccagtggcgtttccacacggcgcc

SEQ ID NO: 74530 - DNA, 1324 bp, Zea Mays
gactaattcgggccataaccacggtgaccgcggatactgaactcatatcgaggtgttccggttgattaggtgaagtcaagctccaagggctgggcaggtgacgatcacaagcacatgtgggtgctaaaacacgaacaacaagggcaaggacggacctggaatcagctagccgcgagtaggcgattcacggcggcgcagtcgaccgaattggggggaagaagggaattctccggctacggtggttaattgagggtgagaacgggtgcttcggcttcgcgataacatagcgcagctgacccggccttcaatttatagagggcttaagcggtggtgctcaatttggccgagcagtgttggcggccggaggggaggaagagtactggcgcaacgaattcgtgtcccacgccgtggcagttactccggtgataaacggagagcgagagcaggtcacggcgatgcggtggaaaggtatagacatgcggcacaaggccgagaggcggcggtcactggcatgcttatcagaatccaccgcggcgagctctgtacggtggccggaatattttactggccgtagcttatccacgacgacgtactccgagcgttatccacttacccagagcacgaatcgagacggcgatggcacgaatcgcggcgaagggatcttcggcggcgagatctctcacctggcagctctatccagttactgtaccatcggcgcgcctattcagtgggtctgacagagcaacttgaagctcggtttcttccagatttcatacatcaaccggttcaactctctgtatcaaaattatagtcccatgttccagctacaattttgttatggggatcatgcccaaacttgcataggatcatgtttaaatctgggttcaaggattgcctcattacactgtcagactaagttcagtcttcagacagcctgacagcccgactttgggtttaattatctccaatttctttatgtaaccatggcttagtacctataacaaagttgttcccttattatagctttacaaaattgatgtggtgacctagggcaaaatcctttttatttggaagttacatggccccaaagatgagttcattacactgaaattcagatttaatcaaaagagtttaagtgtggctcttttgcaattaagtccaaatctcaagttttggattgcaaaccctcatgattgggaaccatatgacttaagatactttaacatcatggtttttgcactttagtccaaaagtgcactaattttgcacttagccccctagggtttaggtttagggttttccagggttccaattaggatttttg

SEQ ID NO: 74531 - DNA, 570 bp, Zea Mays
caactatcccagagcctgaaaaaaccttgaatgctcaaaaatctgatggtgctcgcccaaagcgccttcgcccggccagtcatccaactgctcctgccatggggaagaagaaaaagaggaggcttcggcgagtgtcgtgtttgaatcaggatgctagcccttctgttcctactgctgaagaagtaccagtggaacttttcactagggatgaccccaatgggtgtgaccttgatgatgctgatcccaatgggtgtgaccctgctgatgctgaccccaatgggtgtgaccttgatggtgccgatcccaatgggtgtgatccagccagggctgaccccattgggtgtgttgtttgtattgttgacgagggtgaggaagaagaggaggaaatccccttaattcgaaagaacagtcggcgctacctagtcagtggggtgagtagtgatattccttctccagctttgtctactctcgttggtctgcaagagttgtccatagcaaattttgatcaggctctcgaggatatggttcctgaagatctgctgtctgagccaacagatggtggtatgatgg

SEQ ID NO: 74532 - DNA, 598 bp, Zea Mays
atcttttccaccatcagaacgaaggaagaggcgagaggaagacgaaatgctctttgggcagaaggtgaaaacggcgtacaaaggcagagggctgaaacagcaatggtaatggtcctaagcctccctctcggtcagctttatatagggacagatggagccaccaaggtgcgagtcacaaacggccagacggtggtcgtttcgaatcctgcacgcacacgtgccatgaacggccggctgaccggtaggacgtctcgtcgcattaaatgatcgtgtctcctccgaggaaaaatgtgtcgagcatcgttctgcattctgcctcaaaaggtatgctctccacctcagcttctccaccctttatcctctcagaaattaaccagaaggaagcgtattctgccttgggtaacccacctcggaaagggagcaacgaaccggaagaagacgtcttctgcctcggcatgtcattttggaaggaaaaaaggcaaggaagaatattgtttagaggttcgaaggttcggccctcagtagggttcagacgaaccgcctcaggacttcagggctccgagcccaatactgatcaggggttcgaaggttggcccct

SEQ ID NO: 74533 - DNA, 512 bp, Zea Mays
cgcattcatagtttggaacaagggggaccagatgagaataaacacaaacacacgaacggaactaaactatcagatgtttactaactaatggaaaaaaaatagaatgatgcccgatcactctaagttatagccaagagactagtgaaacacacagagacacaaataagagttagttgtgaagtccctatgtggggaggcaaagatcagaatcaatgatatgaagcaccaaactatctcctcattttgaaattataatggcgaagaactcttccccacgatctcgccgacttcttcacgaccatcccattctttattccccaaccccaaccacagtcctaccatccaagtctcttaatctttgcctgacttcatcttcaagtgcaaaccgctcttttaagtctaccactgtacattactctagcaatcacctaatcatgtttgcctactgcaaccaattattattattcatgcaatcatctggattctcaggattgcgcccatttcgttaattg

SEQ ID NO: 74534 - DNA, 709 bp, Zea Mays
gacacccgaccatgggatggagtttggcaaaaggaaaaatagattcatcgaagataaagtctcatgagatatagacatgtccagaactgggatcaatgcacttgaagcctttgtgaaaaatgcttaatcccaagacagcgtgtggaccaaaactagagtttgtgagtgtagtatcgacaagcatttcaacgatgtttcataattgatgactttgattggtgtaagattgatcaagtaaatggcagcaagaaaagcatcatccgaaaactttagaaggtatagaggctagagaagggcaaaaccaacctcaactatatggcaatgctttcttttaggtggcgtgttttgttggtgcatgtatagatgggattcatgatgggtgatgccaattttttgaaaaaaaaactgaagcctttgatattcacatccctagcaataatgaactatgatgctttttctataaaaaagacgctcaacaaagtttggaattcaacaaattcatgaaagacgtcagacttgaactttagaggataaatccatgagaatttgcagtaatcatcaataaatctcacatagtattgtttacctccaaatttgagaacattgcccagtcaagtgttgttatgtaattcacattgatcaatctttttaaaaatttggttagatttaattcagaatatattagcaataattatatcctcaataagtt

SEQ ID NO: 74535 - DNA, 546 bp, Zea Mays
gggaaacaaaagatgatcctagagttaactatcctagtcactgccaccaaagccttcctttcaattaagcgactctagggtataaattcaaaccttgtacaacttcctactcacatttcatcgaacgctaagccagtagaggccctagtcatctgcaaccagtgttgctgcagccattgcctaagctactaagagtgttccactctcaccaatgcattctcacctttgtctccggcacaattagcttcatctacacctggtacccccgcaatgagcatcaacgtgaaatataccgcctcccacccatcaaaccatgtggagcgagccccaccacgactatcgcaccattgccagttgcttctaatctaggcccacctctctatttgccaccaacatcgttgcctgtaggtaacaagtttgttgtgcctttcctcgcattttattaatcccatcaaacccttcaattgctcaacatagtagtttcgagccgcggtgaacaccctcacccaatcagacactcccaattgatctgccataataattttg

SEQ ID NO: 74536 - DNA, 452 bp, Zea Mays
aaccgcggagaggaaaaagggtggcgcggcttaccagcggcgagggaggtccggtgaagggctgggtgaggtccatgaggtcctggcggtcacgtcgaggtgcagatcatcgatggtgatggccggaataggtctgaccgcgtgcacaggcggttgggctcgtcggtggcgtgtgctccgtccttctcacgatggtagggctcaatcaaatggcacaggaagcttcacgggatgctaaggatgctataggtacaaggaatcaacgaatggcttaccgtggagctcggtctacgtgcgacggcggccggttgaagtacggcgacattgatctgtcgtctccggtaaggtggtgttcaatcctcggctcggggagcttcactgaggtccggagaagctaacccaagggtcggacggggcggagaatggctggcttggccggtctacggtggtcg

SEQ ID NO: 74537 - DNA, 353 bp, Zea Mays
catttttagacttgtctggtaactattgttgtacgagaattttgcataaggcaaacttttatcctagcttctaccatgttttagagcacaagctcttagcatatcctcaaacacttggtttgttctttcagtttacccatctgtttgtggatgataagtggaactaaagtttagcttggtatacatggactcatgtagtcttttccaaaagcgtgaggtaaattgggttcctcgatctgatacgatcttctttggtactccatgcagacaaacaatccttgacatgtataactctgctaactgggctcctgagtaggttgtcttcacaggtataaagtgtgccactttagtca

SEQ ID NO: 74538 - DNA, 597 bp, Zea Mays
accaccttaggggatgtccttagccccgaaggtccggtcataggccgccaccgcgtcaggagagcgtttgggatgtctcgatagaggtatggatgtctcactcaaactttgaaatcaaccaagaaaaatgctaaggcacaaccgaagttgtacaggcaagcaaaacatgggtaaacaataaatacctcccacctaggtcttccagtgctgggcctcggtctgttgagcctcgagttccttagcaagggacctagcttgggaagaggcttctgcggcctgacgctgaaactcctcccattcgctggataccctcttaaggtcctcttccagctcgcgggccctctcggctagaggtgccgcctctcaccaggtcgctatagcctcatccctcagcaccgagcagagtgcctaaagatccatcgcttcagcactcttctgggcaagctactaattggactgagcaagcaggcccttctgacgtcgcagcaaataccagacgacgcgtttgcggtggaggaacatagacttggtcacgtatttcgccataagctcctgaaaggaaaatcgacgtcatcaaggcatgccttaggcaaagga

SEQ ID NO: 74539 - DNA, 628 bp, Zea Mays
ggaggatacaggagatttaagctaaacaaagatcgagagataagaatattaagaatgctgacagtaatactgcctattttccagaccgttgctaatcaaatggataggaaaaggagaataacaagtttagaaggacctgatatataaggttggttagaggacgataaattcatgcttgagcatgccgtatatttttataagaacttgtttggacaagaaccggatattgagcttaggttgagggtagatttttttggggggttatagtgagaaggttacctccgtgaagaatgagttcttacagtagcttttgcaaaggaggtgaaagggaaatgacctttaccattttctctaatttgattttggtgctcgatgaccatcataactttatgaactaactagtttatctagttggttgtttcacatgtgcataaatctatccatatcatttctaagtcgactatctagaatgacgtagattattcatctaggcgtgaattgtccaagctcttccggcggaccgtccacgatacattgatgcacctcaaacagaaactatgttgaaatccagtcttctactatggagtgtccgaaggggagaagagcaccatccgggaccaagcgcgga

SEQ ID NO: 74540 - DNA, 370 bp, Zea Mays
gggatagatgtcaggagccaacacaaccactaagaggagatacacgtctagaagatgtagcgttgctagcccttacccgatgcctcatgcttcgggtagaagcaactccgtgggcccacctgttggggtccagctcccttataacgtgcccccattgaactataaaagggacgacactagcgatacagaaggaaggttgagtgtaaccgacgacttacaggctttcagccaatacaactcatagtgaatgtagggtattatgttctggtggtctgaaccactctaaatccttatgtttttgtgttcttgtgttcatccgttaagccaggcaaatcccaaaccacccccgtcagaccttattcggttattc

SEQ ID NO: 74541 - DNA, 584 bp, Zea Mays
ctgaatcgatgcgactgtctatctcctttaaaagatgcatgctttttcttgaataatatatcttcagaagcacctttagagttctcattctcatgttcagaattgtattcactttcatgttcataatcagactcactttcattacaataattctcactgtcattatcagaatcaaacatattgttacccgtcccagtcccattaacctttgctgccatttttttaaatacttcatcgaaatgctcatcttctaagtcatctacaatacctagattgttagtaaattgaaattggcatgcaaaaaattattgtaaaggaatacatgaatgcaatatcaattaccatttgctgcagtattcggatttctataaggcctcttcttatgttgattcatggttgcctttataatagagctatcattgttgattgttgtggtagtattgggttgtgaatagtaccttctcgctggttttttagcaatactctcattgttgattagtatgtcggtaattgggtttggataggacctcctcgcatgttgctgacgaagcaatcctaggctgatgaagcttgactgggcagag

SEQ ID NO: 74542 - DNA, 656 bp, Zea Mays
ttgtcaacagtttcctcgtgcagccgcttgggggcaagcggcatcccaaggagaggggaatgttagcttgtccaatgctacatatgctcatgggccggagcaagtacgcaggggcgcggaaccgaagacaagccgtagagttcggaggcccaactccttatacacaggctcagagtgggttgtgtgacggcagtgggccggtgtaagctgtgtcgttgtgtcgccatatggttggtcgatgtatatgagacagggggaaaacattgcagcaactaagaacacgcaggtttcctccgtatctcctccgcatctcccttcttctctaccaactcttccaatcagcatagctgtggtgctgacaattggtatcagactaccgatcttgggtctggcggagtccgggtacttcacacggcgggcaaaaatggcggacgcagcagatccgggcatcgcaacggctttggcggcgcaatccaaacaaatcgactcccaatcgaagaatatcgctgcacaatccaagatcctgcaacaactctgcgagcgattggaagctcaggaccatcgctggcattcgctcgagaaatcggtggccgctcactccgacgacatcgcggttcttcacgcgaagttggatgacgccgccatcgattccttcc

SEQ ID NO: 74543 - DNA, 778 bp, Zea Mays
caacaacagcatagccttttgtccaaaacaattttgggtaggtttggaatttctaaacattagatcctttttggattttttatgcaccatgtaaattaagttgtcctttgacccttgaggcaaagtcacttcggtttgcagcttatgttcacttatccgaggaccatgttgactttaaaaacctacatctgagcttatttcttctatttactattttaattccctttgttctgtttggtgtcttgatttgcgccacacattactgatttagttatcatggaatttattgtcattctattgttttctttcgtttgtccatgggatggttcacagttttttttataagttttccgcatcttttacacaagggaatgtatcaggtgcaaaccaaccacttggtgtaaaccgtgcaaattaacacgttggtggagttgggagggtgtatttgaaaatatcattgttttcaggtagggcgaacagctggtcgttccagaggaccgaccaggcgcctaatcgtgattagggcgacaattaggacgcctaatcggttctggtcgacctctggtcatcccctaactgtcctatatatttctggacatatgtatatacaagaaatattgcgatatgcgttatataagtctgaaagtctgaaattgaaactgagtaacagactgaaaggcaatataggcatatagcactacatcagaactgaaattgaaatattgaatacaaggctacaagcagtaatgcagtacctactacctagagcagatcatca

SEQ ID NO: 74544 - DNA, 1215 bp, Zea Mays
tgagcttgccatgtagtagtggcatatatgtcccatcacaatgccagttattaaagcccatgtcgtttggcatggcatagttggtaagtggtacaactacttatactatagaatacttgctgatacgctagcttgtttagatgtggcaacaaggatgatggcacacactgcacagtggccacatgcacacatgttgtctctagcttggtcattgtacacttacttgatcataatgtcgtccatcacatttaatgtgatggatgtcctaaatgaccgatatcaggtggtcgtctagtgtaggggcccatatatggcactagggtcataccgccccaattgtcctgcctcgtggctcgcttaggtaggcatctctgctcaatgtcatcctacctagggagcttctcatttcattgtttcttttctctagggactctatcttatagggccactttgccctgacgcaccttggagaatgttcgagaggtctagacaggccctctagggggccccaaccttgggcaagtaggtaggttagctcgtagcctatataggccctaggaaactgggagggtctcatacatcaagagggcattgagttctagtcccctgatgtagagggcactaaagccagaagagcactagaggctaagggcctcgggccctcttcccaaagcatgggggaattgagttggatcttagcattgcccctaggacttgggtccctaaggacatgtattatcattattgaatggtatggccttccccgggcactgtcagagaccctaagctaatcacaggtcttgaggcctatatgtgggtccaatctttttgcaagacacttacaaagtaaatccattattcttagggctcattgcatgcttgggcgtcgacaggcattgggaggtgacttgccaaccagattccctagggtgagtaggtatggcaatgggtcgggtttaggtcaggtgcaaaaacccacccacgatcgcatctatgaagtttacctaaactcaccagtgatcgcacgcacgggtgtaattcgaaactcgcatttgaatcatcgggtttcgggtgggtttcaagtcccccatggggttttactcattgtacacttttaaacaataattcatctataagcaattaagtaccagcaataatcaatttatatctatgtattataagtcctcatgttgagcagcaataaaacatttcttg

SEQ ID NO: 74545 - DNA, 404 bp, Zea Mays
gcctcccagaaattaaacaacataagtctaagctcttcgccgttgaaaagcgccctaaggttttgttctttgaaaccccgttcagaaaaagcgccctaaggtattgttctttgaaaccccatttagttgttggtgcaagaacaatccggtgaggcccatcttccgactgcgccctctcccgttcttgaggacgcagaggtgacatgcgaagcacctcgcaaagcgagacccgtgggcgaggccccccagtcccatacggtgatgccttcgggagccttcgcctcctcgtggcggcacgccaacatttcccactttccgtttcggtactccaactcttctcttactttttgccacaatcgacggggctctagacgaagactctcccatgctagattccaccgtgg

SEQ ID NO: 74546 - DNA, 387 bp, Zea Mays
tgcggaccaaatccggctgcccagtcagtccgggactgatttgcatttggggtggtgccgtcggccatgtaaccggtgtcgggaccgctgactggcagagttttgggagtggggattctagagatggggcagcgatggttgatctctatttcaggatcgagggcgatgggtggaccgatgggttgggtgcatggacctggaccgatcggtgctcagccgcacggtgttagggtttagttataggactgcgggtttgattctaaagagcaaggatttttttttgtaaaatataagatgaatgcgggcgtgcgagcatcctcagcggaaggggtggatagggcggttggatgggtgaggggcacgtgcgcgggggtggaggcctgggag

SEQ ID NO: 74547 - DNA, 712 bp, Zea Mays
cgattttttaacgaaaggattgataaaaaaacccagcagagcagtacagaaacgttctttagctgatgggctgtttcgaagcaccctaaccgcagtcaagcattatatgttattcagtgtcacctgttcgactgaatgctagactgccatgtctggtcatattgtatgaaatgaaactcatccgttccgacacgattagattggaaatccgagcttcacgcacacaaccacatgccggctctagattctctgatcatgcccggtagcggtggtgctaggataaaagtgttagggtcacgtgtaataacagcgccattttccttctaaatcagtgctcgaaatctgatggcgacggtttctagacaaagggggtgtgtgtggggtgggggcgccgggcgcggcctggatgcctgtctgagagcgatgctttcatctccatctgaggaaggcatttgctttctgctctcgtcgcaagagtagcagtagcagcacgcgacaactacaaagtcagtgaccaagctttgctatcgtcatagttgcaagcggagcacagtgagtcgtcacctgtcgtccagagcagagagaaaccaggcacacatcagtcagtctcccacttgaacggagaaacaagcaagcaaaggtgctgctgtctgtaactgttaacagatgttaggatgtcacagacagaaggtggttccgtggccaaattgat

SEQ ID NO: 74548 - DNA, 482 bp, Zea Mays
ggtgggtcttgttactaagcgtgaggttgagaagggtatcgagctgcgcgagggagaagtccagtcaaatctcgtgtttagtcagatggggcttgtgtatgaagcacacaaggctcgactgaagaggaaaaagagaatgccaatgggggtccctactcaatcttagacatcgtcgtagactccgttagcctgctcgggggaagtgaacgctagggcctccttcgaggccttcgctcttgagctggtggagacatgtgagccaactgactcggcgcatgacacataggctagactcgctgaggacttcaccgagcgaattaccgggggtaagttggggaaagacttgattctgatcagggttggctcagggagtgcaaagcgatgggttgtgagggatatacctgtgttgtgcagctgcgaagatgtcgtattagcctgagtggcgatggagctgcttatattcccttactcgcataacatcc

SEQ ID NO: 74549 - DNA, 552 bp, Zea Mays
gagggaagtggtaacgaagatgaagaggattacaccatcctgagcctagaaaaacctagtcaccttgactttggtagatccactgtggcgacaaatgatatggttataatgaagaaattgggttactttagtgaatccgaaagtaagcttgtccgttttgctggcgaggaagtggttccagagccgaaggatgatgaagttgttgtgtttaaaagcttcttcaaggcggggcttcggttccctctttatgatataataggagaggtcttgaagaattttgaaatataccttcatcaattgacacccaatgcaattgttagacttagtgtctacatctgggccctccgaagccaggggatgagtcctaatgccaaagctttctcccaggtgcacgagctgcattaccagacgaaggccagggcagatggccttcatgaaaattttggttgctacaattttgcgtatcaaaaggatacgaaggcatcgattcttagctaccgtaccaagtggccaactggttggaagaatgaatggttttatatcaaagcagac

SEQ ID NO: 74550 - DNA, 747 bp, Zea Mays
gaggtcatgagtaggataattcccctcatgcttcttcaactgcctcgagccataagcaatcactctgccttcctgcatcaacacacagccaaggccaatacgagaagcatctgtataaactgtgaaacgcttaccactctcaggcaaggctaagataggagcattcaccaacttgttcttcaatgcctgataactgacctcgcaatcgttggtccagacgaaaagaacacccttctccaagagtctagtcaatggcttagtaatgctggaaaaaattggcatgaaacaccgataatatccggcaagccccaagaaacttcggatttctgagacactagagggtctcttccactccaccacagcagcgacattcttggggtcaactgcaatgcatgctgattaatcacatgacccaggaaagaaacttcagacagccaaaaggcacacttcaatttgccatagaattgattcttcctaagagcacccagaatgagatggagatgccgctcatgctcttctccgttttcgagtaaatcagaatatcatccagaaacacaaccacaaagtcatccaagaactcatgcaacatcctattcattgcttccataaaagcagcaagggcattagttaagccaaaagacatgacgataaactcgaaatgcccatacctagtgctaaaacctgtcttctcaatatcctcctcgcgaatcctcaactaatgatacccagagttcaaatcaattttag

SEQ ID NO: 74551 - DNA, 379 bp, Zea Mays
ataaaagtcaaataggggggagtgcagaggggagctgaatagagggaataattggagaggagaaggaatagaaggaggaatgaaagataaagatgtatttaaaaacaattagagagtataaatacggggaggaaaaaagggaatggttggaatcaccataaggctccctagtccctcccgccatagtgccatagagaccgatagagcgagaactataaatctttaggtcattttttataaaagtttcatgtttattaaatgaggtgatgcatcattatctttgattacatatcattgcaattaagagaagaaacgtcgaaagagttttataggagatgatagagtttcacactatttcctagtttaaatttgatgtgac

SEQ ID NO: 74552 - DNA, 554 bp, Zea Mays
tcaagatgcagaatatataacctgttcttccctctatgtaccttagcgagcagacgacggttcttgtcccaaatgcgaagcacgccatggtcaatcacaaccttggaccctccttcatcaagctgtcccagacttaggatagagttcttcagcgccggaatgtagtagacgccatgaagaaccctctgctcaccggtcttggcttggaagatgatagacccaacgcccttgatctctaccttcgacgcgtccccgaaccggaccgttcctcgaacgctagtgttcagatcagcaaagaactcttggcgcccggtcatatgatgcgtcgctccggaatccaggtaccaaccgctgtccacttcttcgtccacgccaagataggcacaagcacgtggcttggagaactcgacgtgctgtgccgtgtagctgtgcgccggcgtgctctgttccaggctgataaagccatgtgccaggaacaaagcgccatcttcatcacactcggcgtactggacgcgtgcctcatgccttccttggttcccgccacgctgtccagc

SEQ ID NO: 74553 - DNA, 647 bp, Zea Mays
cttgaggattgattagtccaaaccaccatgtctttgcttagacttggaatgaaagcgacgtcatcaggagacaactgcaaaaaattatattagcggttgtcatgttctatcagggaaaaccacaaatacacaaacccaagttactggtacacaatacactatctatctgatctgtctctcttgcgttgccatccggtagatcttaagccgctaaaccatctcgttttccagaatcaagcatcgtcatttatcccttgataacaattttgcccatgcggcagtgaaggacgacgggggaggtggtaacacggcacctggtccaagtggaccaagtcgtgcttccaacatttttctacgtcaaaaccgagtatgagccagacaaaatcacccaatgccgacgttaacctcgtaaagatctccaaattcaagcttggtccctgctactctgctgtatcgtgcaaaaaaaaaaggtatagcaatgttttacgcgtctataaatgaaaacgatgacctttttctgaaaaaataaaataacacctacccctaacgcaaacgcgagagcgaaacggaacaccattgttggaaataaaataaaagaacaccacatcgacatcctctcacctccctcgcactccattggatttggg

SEQ ID NO: 74554 - DNA, 308 bp, Zea Mays
ggcggttcccaatctccgcttcaatactccaactcttctcttgcttctcgccacaatcggcgagaccctagatgaaggatcccccgtcctagactctgtcgcagacacatctaacggtacaacaaaatctaagtcctctttcgaggactcatcgtccatccttgcgaacgggcttagtaatccttcgctacccgatgaccatgaatcaaaatcagatcccctcgttgctaaaccctgttggactccgacaaagcaatgacgtaacactttccacaacactaaatatttttgtccccttgcccaacagg

SEQ ID NO: 74555 - DNA, 515 bp, Zea Mays
gaacaatacaagtgtacgaatacggccaacaggccacatcaccattacaattacatacacacggcgagggcatcgcctattacacacacacggcgagggcatcgcctatcacatcggctcaaccttcggaatgatactcatctccttgtaattaaacaccattatcctcaattcctcaccctcaaaaagctcccgaagatccccttcgcttatgctcgccccattcggcgaagacaacaattctcgcctaccaaccacgtctactcgaagtcggccacgctccatccccatgcgacagcgcctgccactacgtgaaaattcaccctcacactattttcccaccacccttcaccgcctacacccagtactcgtaccaggaagatcctcggcaccctccacatgtggcaaagcctccgccgcagccacatccaacgcaacaaaataatctaagccttcatccaagtactcctccatccaaggaaatgaactcccggactcaccgttagactcaaaac

SEQ ID NO: 74556 - DNA, 1039 bp, Zea Mays
ccgaagcacaggtctccaacagctctgcggcgaatagcacctgcacatcaatattgtcttcactctcacttgggacgtcgacgtgcatgtgggattgtacttgagcccatttggcctttggcatactcttcgacgttttcccctcttcgggcgaaccttgtgcacgtcataactcagcccaagtatgctgaaaacccgattgaccccaactttattctttcggatctccaaactcctctctagctcctgctccgtcacaggcccaaccaattttcagcctcctcgatctccttcataataaccccacctgaccggccacacaaatcaaccgcgaagggtggactaagtagctgccttgcaaacccaggaaaactgttgtgctccaccaggccaactgaccagatgtgccccaacggccacactctacatgccatgtactcttcgacaaggtcttgatcactactagcgataggtgtgaccaaaaatcttgtcatcttggcccccctctgcaacatcaaagcgaggaaaggcttcatagtcgaagggagacatcgagttaggacacggctagccctcgacatccaagcaccagacatagaaccaattgtctgtctacccgccccatcgattttttgtgcaagggtccaattcagtcaccttgcccttcgtcttcctagtcttaggcatgaacgtgcaactcccaaactgactaacacgatcgtccacgaccttttctgccaatgcaagcaataatgctttgcgaaaacctccacggacggagtccctccataggtggtaactgcccacacaaacttgctaatcgccacaatcgcattcggagtcaattgatgcaactgcatcttgaacttatccaacatgtcaatcaaaagttgatgacacgagaacagaagtctagcattaaaaagtcttcgaagattactatctcccctctaactgtggcacggtcttagacctcgcagccctgcaagctcctgcggggaagcagcccagctcctccaactccttcacccttgacaac

SEQ ID NO: 74557 - DNA, 1552 bp, Zea Mays
cctaaacttaaaccctagggggtaaagtgcaaaattagtccactcttggactaaagtgcaaaaaccatgataataaggtatcttaagtcctttggttcacaaatatgtgaatttgcaagctaaaccctgagttttggacttacttgcaaaagagccacatttgaactcttttgactaagtctgaatttcagtgtaatgtgctcatctttgtgaccttgtaacttctaaacaaaagggattctgccctaggtaaccacatcaatattgtagatctatggaaggagaataactttgctatagaactcatgccttggtaccatgaagaattctgagataaatgagcctaaagttggactgtcagactgcttgaaatctgaaattcagattaacagtgggatggcatggagttagggctcgaatttaagcatgatccagtaagaatttggctaggggtgctataacaaagatgaatatggtttaatggtttacaactttgatgcagacagtcactctagttgttatacaaaaatcaaagaaattgttgcccaaagttgctctgccagacttgtatcaagtaactaaaactgaacctgaagacagaaatggtcacagtgatatgggaccaatttgagcacgccataactttaaattcgttcggttttgacccaagaatcctatagtaagtttgtagactgatgtttagtgaacaaattttaagggaagttgctatgttcttaacaaaaatccaaagataaagagggtagaaggtgatcggttcagaagaacgctgaagatcgaaccctgacaaatatctgaagaacaccaaaagatccacggcactgttgatttggaggaacttggatgaatcggtgaggatttgatcgcctgggagtagctcgatacgtggcatcgttccgcgggccgagccacgtgtggccggagttggtcaccggcgaccgccgtgactcgattaacttttgtcgtggtgtcacccgtgcctcgatctacctcactgtacttcacctctacgtggtatacatgcgctagcaaggttatccgcggccgctgatcgcttgtcggtccgctgtggctttaaatagcgtcatgaaccacggcgaggcactcaccgcctcaaccgcaagcttgagaagaacccaaaattcgcactgccttctccacctcctcccaaattgattgtgcacggtgaaactacagtctcttacggtcgtatagccccaatcccatcccccaatttcacccagagccggcgcgacgtcattttccccttttctctgtcaccggtgagcacaagactccgtgctccttggccggaccactctggtaaggctctgcctctctcgagtgttgttctagcagctctgtaggcacgtaaagctcactgtagcatctatttgaccaattcgggcataagtgattgggaacacgggatcaacatcacagtttccgtcgtgcacgtgggcagaccattctcaaagtgttcaagccaaagtgaagctcgttcctaggtcgccttgggtaggttatgctcccc

SEQ ID NO: 74558 - DNA, 549 bp, Zea Mays
ctatgcgagggagagggcatggacccattgaggggttgccaaggaagttgtctaggcaatgtaggggtggatcagctagatctggtcccacatgaggtagtgaagggctagactgagcaagaccgctgcatcgctcatgacacgacatatggttagtattactagatatggtgttacaggccaccgctccatctagtgggtgtgttggtgaagccatattgatgtagcacaacaagatgtcaggtagcccctaactgggacaccaaatatcatcatgttgtgacaccacaataccaatgcaagagtagttgagaaaattagaggggagagagagagaggatgtaagcctagggccgttggaccagagagtcaatatacttgtatgcaatcataggatttataggggtctataccgcttgagcataatatcctacatcctttatatggtaaatgcttagatgcaagtatggatagagagtttacgtacacataataactttggactaggtcgtgcccgtgccgtacccaaataccaaaagctaggtctaa

SEQ ID NO: 74559 - DNA, 349 bp, Zea Mays
ataagactttggaacctagatgcaagttttgtctgtcttgcacttaggccccaaatttctagcaactactttatcatttttgcacataagaacaaatgaagcatcataagtttgataaagcatggttcgtccatttgatgcattcctaggcacatgagaagcaacatgatgaacatggcatctaggtctattcctaccatgagcatgcgaggagttggatgatgcaaacatggcatgtgagaaagcaccatcatgatgggtacaaaaacataatgattatgacacctatcacgatgagcatcactggaaacattcttagcatgagcataaaggcatgcatggttatttt

SEQ ID NO: 74560 - DNA, 481 bp, Zea Mays
attcatgcaccacctcatctaaaataaattgattctttaaaccaaataccttttaatgcgtgataggggaaaatttgaatatccaaggcgaattaatcaatttccttttgtgtgtgtgtggtgggggggggggggtcatcatcactcctcattcttcctctatctgttcctctcctcggagcaagtataacaaaatgttgtagacgggttgtaagatataccacatcagatgattcagattcatggtaacgtggaagaaaaagatatgaagaaaaaattgaagtatcaacatgtgggctgcaaagatgttatgtcagatttatggtaagagaaggaaagggaaaaaacatactccttaatcgttactagtagccagctgagagtaggctgcacacggactctaaaagtgtctgtgagatagaaagtacatcaaatattaaatgtacggcttgaatcatgtggtagttaaacttgctctcgc

SEQ ID NO: 74561 - DNA, 909 bp, Zea Mays
ggagttctgggtaggctgcactcaaagcaaggattagcacaatcaaacaataatgcaaggttgaattatagtaccaaacacataataaaagctgctagaaacaaagtacaaaggtggagcaagggtaggggggcaaaggaaaacagaaagaggagaacaagtagcagcgggtgcgcacccctgggcgtcctgcgtgacgcgcccacacaaggtaacctccggtttgtgtcccccttttttcccttttttctttttttttgtttttcatttttttctttacggagaaactcacaaactgattatatgggcaaaggaatacaaaagaaagttaccacacacactctctctctctctagagccggtcgatcaggattaggaaatcaggaggcgagatcttttcctttcttttttgctttcgatcaggtgtaggaaaataggaaatcaggatacactctttttttttgctttccttcctttttttgactttccaaaggacacacaaggcagggaaaaacaggaggcgcaatctagggggaggtgatcggcacgcgatccaggggggtcggcgcgtgtgatgcagaagggaaagagatgtggcggcacactagggttctaagaaaaaaatggcaaaagaacacaaagtaaccagcaacatttgaacgcgtaagcacacaaattcaacaatgcgaattattgaaagacagtgcaaggctaaaaagggtgctgggacaaggaatatatatttgtgttttggttttgtggactgcaggaatttgaaaacactcgataaactcaccgatcaacctagaaacctgataccacttgatagagccagagtgctcgatctttcagtgagtggggaaatttcgacttggtggaagatgaccctcacgatctgactacgacgag

SEQ ID NO: 74562 - DNA, 652 bp, Zea Mays
ggaattgaatgcggcggggtcgggggaatcagtgcgcggtgggcgaggtggagggcgctgatggcggcagaccgggggcgcagaggcagaacatggaccgggaccggtgggcgtcggagattgcggctgcaggcggttgcctgcggggcggctgcgggtggcagaacacggtagtgtggacgcctacactgctaacatatagagtagtagagattacatgtatattgctacctctacttaagtaaaacaaacagaaaaataaaacgaacaaccatgagttaaagtgatagaagtcaaacgatatatacaagtatacaagtgatagaaatcaaacgatatatacaattgagtagagtttaaatcctcattttttagatactctacacggctggaaaaatttattcgctcggtgcgttggagaagagagaagacgacataggaaagtgtttttcataaccgataggcgatagcaggtaggtaaaatatttgaagcaaagagagagatatactttctgtactagagaaaaacagctactactctgccgttgcatccgcctttccctcggagaagccagcgatgccgctgcgctcgaaccactcctcccagttcctcccgtcggccttctggtactcgacgtggcccagcgtaccc

SEQ ID NO: 74563 - DNA, 499 bp, Zea Mays
gagagaactggccgagcacaaactgaaggtctacccctaggcgaggccgatccgacaaaaattacgtcgtttcacgcccaacaagagagaagccatccgtgcagagctggctcgcttggtcacggccagattcattagagaagtgttacatcccgagtggttggcaaatcatgttcttgtactcaaaaagaataaagtggattgacgcatgtgtgtcgactatacggatctcaacaaacattgtccgaaggatcccttcggacttcctagaatagaccaggtggtagactcaactgctgggtgttctatgttgtctttcttagattgctattctggatatcatcagatcagcttagcgaaagaagacgaggaaaaaacagcattcatcaccctgttcggagccttctgctatacctccatgccgtttggcctcaaaaacgctggagcgacttaccagagggctattcagacatgcttagccgaccactggggcaagcgt

SEQ ID NO: 74564 - DNA, 850 bp, Zea Mays
tgggggggtaccttcttctcccttgcgcccgcgctaatcggatggtgggaaccgtccacgacatgcggggaccagctgaccgcctgggctctgagttcataaatggggaggtggatttacagaccacgatttcgtccgctccgagcctcaaccacaatcgctgtagcaccaggaaaagcaagagaagtggagacgatctcgccgccgccctgctcttcgccacaacctccgccgcacacttcaattggggtgcgtgagggttcaccggtggtcggggatcgtgcgggtgtgggtagccactcgcactgctgatcagcgtttgcctaatttcacatcgggggtgcggcgggttcacaaatctgcgccccaccgtgccagcgtcctcctcgtcattgtcctcggtgtgacctcctctctacctcgccttattccttccattgaatagtaccatggcggcaccaaatcgttgtgctcaccgactgcggaattggcgccgggcttgggtccttgtttcagcatcgcccgtgtgcggggggcattggtgtgggggcacacggaagtcgatgtattgatcccccatcagtttgcctaaatctcctctaggttttgtaccgaccaattttgggtttggagcgtccgggcgttggattgcgcatccgccgacgatgctccgtcgtgggcggacagtgcgccgccgtcgcgtggatttgggggaaggaagaagaaccgtgggccgtaggatctcaggctgacggctcagattagaacttggcgtaccttttcgccacgattcgatctggtccgtcgatcctgcatcgtatgcatctgattagatctaggttctttaaat

SEQ ID NO: 74565 - DNA, 278 bp, Zea Mays
atttcattgctcacaaaagtcttccctgggttacaacattttagggggattcacccgtaagcctagtccaaaatctgataccaaaactaagctcgcatgggttccagtcctcctaatacgtcaaaataacccgtcaaccctgagttgtagaggcaacgctggatgcaggtgaagggggcactctggagggagtcgcattcggaccgggagctggctctaattcttcgggatcctcctctccctcgctgcaagcctcgtttgcctccatgtattggtgg

SEQ ID NO: 74566 - DNA, 977 bp, Zea Mays
atttcgacgataggtccaatcggccattaacaaggatcgattaaaatttcaagaaatgcaggtggacacagaatgcttttcaatgaacatgatcagttttgacgataaaaaagtcatcgttcggcctaatacgactgataagggccaaggcaaagagaacatcatggtgactcgcgagaggccaatgaaatcaccaaaatttcatgtaggaaagtggttgtagagaagaccctcgatggagggagacattgaagatcaccatcttagcctccaacactaagggggtaggcgcaggcggatgaccaagtgtagcgccctgttctacgcaccgcatatggtccatcatgtaggcacggatagtccatctcgtagacatggattgtctaagacaccgctagacagtccgaacgggtctagcggacaatccggtggtacctaggagcagcaatgaccacgtaccttcaagccatgtcaactagagataggtacgtggaagacaaacacatcaaagctagcccagccattgatgaatcattatccgaatatgtcaaaaagaatcccagtccctgcaatcgatcaacaaaacgaccccattcaccttcccataagagacatgtaggatctattgagtcaccttaaaacaatgtccaattgatacccaatataaccacgtggacacctccacccccatatccatctatgtcgtatcagtatgcatacctgctaccaccatatgtcccaaatcaaatgttgggcctaccaccatatccatatgggatgccacaataccatgcttggggggcaccctaattggttgggaccacgagtacaagaatgattgagttcgcctcaatttggtcaccaggcacaggtccaacaaggatgccggactacttggccacaaaggccaaccaatctcatgtagagaaaatattcatgagtgcacctaccaatgccaaaagaacgacaaacgaaga

SEQ ID NO: 74567 - DNA, 657 bp, Zea Mays
gacgtgcaatcgatgcattggtcaccccaaacttgaatccaaacagagctaaacgttgcgcaggcagaggcgaaagtccgaggagtcttcttaccggtggttgtgtcgtgcagtccccaggccgcgacgaagtgcggttccatggcaattgttggcgtcggtgagaaattggggcagcaccaaaggcttcttccacccgcgagtgcctcaatgatcgctgtcgtgccccgaggaagcccactgacccgagcttgcgcctcaaacgatgacggaacacaatttccacggcggcggtgtctcttcctcacaattcgcgacggggaaggatgatggctcgactagggaatcagagaggcgaggcaagaggtcgcggcgggttttatgcctcccaaggcagagtccacctcccccaagcacacggcagaaaggatgaggatccgggtgaggtttcgccatttctgttgaaaccaacgccgaggagacgatgcggatgtcgcaacagaccgggtcgaagaccaccctgatcgtgggctccacacggcagagattcccccgggataatcgactttgggtgcgtgggactagagctcagccacagactcaatctacccgcacgatcccaagtggcccgcatggagtgaagaagaccgatctgat

SEQ ID NO: 74568 - DNA, 376 bp, Zea Mays
ctcgactgatttgtagaagtgggggcagtggtagggcgaatgaaaacaggctttttaaatggataagagggtggacgaggcaaagaacaattctgattgaaaggtcggattaccaaacttgttcgcttctcaggtccctgattggacctgtcacctccaaatcccttggattttccttggcctatattcttggcttctactgccaacgccgtgctgacagccctgctgtatgtaagatctaggtaggtggccattttcctttggagccggtcgttgagtcctctcttgaagcaattcttcttttttaggtcagtgtttacttgatcaatcgcatattgggataaatgattaaacttgttgagatactgtatcacag

SEQ ID NO: 74569 - DNA, 440 bp, Zea Mays
caccatttatagataagaatagataaaacaacgtcatgattcttggaggaagagcatgagattgactagaaataagatattaggctgatccacatctgatacatgagaacggcttataccagacaacaagatgatgtggtagatttcgatgaatgatctagatatttgatggataaggtcaccacatgtttcaccaggaaaatgattaccagattcggacgaaggagaggtaggaaaacaagatctgctaggatgagcagtagaaatgctatgaagattcgggacaggatctgtggaaagaaacatggcttggacatggtttgcgcaactagacaccaacaattgttttaacataaacacgtgcacaaggaagcttgggttggtctggcggtcaagctatagagatctacaagatgtgtggtgtaattttgagggtaaac

SEQ ID NO: 74570 - DNA, 610 bp, Zea Mays
gtcatagtagtcactggatttccaataggggatattctccacaacaaagaatccatcggaagaatagccaagtgggcctgcgagctaggagctcacgacattgagtttcgacctcgtacgacaatcaagactcaagcactagttgacttcatatcagagtggaccaagcaataggtgccaaataacctagtgactgcagaagtatggcagatgtattttgatggctcgttgaagctgcaggaagcaggcgtaggaatcctcttcattgcacctggaggtgaacaactcaaatatgctctttagttgctattctcagcgtccaataatgcagcagaatatgaagctttgattcatggactgaacattgccatatcactgggcatcaagagactgatggtatatggagattcactggtggtcataagtcagataaacaaaaagtgggattgctttaatgattccatggacaagtactgcatagccgtccgaaagctagaggacaaatttgaagggctgggattccatcatgtggagagagatcgcaacgcggcaatagacgcgttgtcaaaactaggatccagtcggactcaggtcccacctggagttttca

SEQ ID NO: 74571 - DNA, 407 bp, Zea Mays
tccttaagtcttgttcgctttcgatgtccgcctcgtgccccacctcggcacagatggcgaggatggcttgtaccttgtggcatgttgacaaaaaaaaccctagccggttgagttaaacacagccatcgcctcccctctcgtcaacctccctacctttggcaaccaccacaagccatcgtcttgcccccaccggagtccacaccgcctgaaccattgtttccctacgaggctatgccttctcgccatcgccgcacccacggtgctgggagttcaccacaatgtcgcatcaaggtgtcgactgcacgctcgtctaagcgcaacctgttttgccccatctttgtcccccaatgcaccacctccccaactccagcgccgccgccgatctgcctcatctgcaccagacctgc

SEQ ID NO: 74572 - DNA, 572 bp, Zea Mays
gttgatataaaccacgctcctacaaaaccctacttttgctaggagaatttgaaatacttatctgcttcaatgttgcctccttacatgtgcttagagaaaagcaatgtgtgattatagtagtgcactagaaaagcagacgctaggttttgccacgccctaataggtccagaagtaggtataccactatttgcacatttgtgcagttggcatgcagtctacacaaatgaaaatccatgttcacaatctagatttacttcccctagcattggcgtggatagaatacacttccatattcgtatatgaaaactatctcatagaaagctgagaaagccctggatctctaaggcatgaatatgaagatgcttgtacagtgcagcattgtttgagggttcagagatgagcatacagcatgttaaaaaaaaattcgaagctcactggtttaaaattttgaaggacctcaaatatgttaaatacaatctcttttcagtggaaatgacttcagtaccatgttatcgatcaccatggtttggaagttcgataatctattttcgtgctagcaagtagcaatatct

SEQ ID NO: 74573 - DNA, 534 bp, Zea Mays
aataactttgagactgccttaaaaaaaattcctaaccatgttccaggggactctgccaaaggagacacttgcagccctaatgttcgccttcaacctcgaagggttgaaagggaagagcttcgaggatgctatgattgcgatgatggggaaaggagttgcagacccgcaagatggcattgagagtctgcgcgttgaagagctacagtcagcagcatgagccagtgatccatgcctaagggtcttttgcttctatcatgttaaccttaggccttgaattcctgcctcacttttgtgctgaggcttcggaccactgcatgtgtttgatgtatggtgtgaacaccttttgtgtggtccttttgctttctccgcatcatcaatgtcttgacgcaccttgttcaccagctatgtgatttccatgctcactgtcctgtcactgtgctaagagagcaggaaactatgaatcaaggggtacctcctttttttccaatgtaaggcttagaccttaaggttttttgctggaatgtgaggggtctc

SEQ ID NO: 74574 - DNA, 621 bp, Zea Mays
gcactgtccaggtcggtgttaagacctgccaccacaccaactagggtgttaaggcgatcttctctagctccacctggaacaatactggtctggctttctccacgaagatggagaggaagatgcatgtacttcgtgttgtgcagttgctacaggtaagtgtggctgagggaccatagagttcgcctagcagcatcgctgaccaaagcagcgtaggtggatagcggcgttagagactcatgagctgacagagtcctgaaccctctatcacctgcatcaatcaccctaacatgaatgcgagtgatgtagtagcaagcccgatggggctcgcacactcgcctagtctcttacaagggtcgaacgtaggttcccaacgcatgcagaacatcctgcagcaggttaggttagtgccccgtctcgaacattgatgtataatgttcggtgacaggccatatccccacgaagtggtcgtactgttcaccattgacttcctcgttgatgttctcctcctcctcctcttcttcttctttgtcttcatcgtcgtcactagagtcgtctgggttgtcgcctccgggagcaggggcttggactgctagtgctggcggtgctgaagatgacgatcca

SEQ ID NO: 74575 - DNA, 583 bp, Zea Mays
agataatttcattacctaactaacgacgtcagtttgaggtaaaaatttcattgtagtcagcaggaattaacgaaacaagtcagtgtccagaatatgtcagtacatgacaccatcatattttgtgttgtttggaccttgtaacatattgggaatcttatggacacgaatatggggggtccttacaaagttacacgccccttgagctatatattcagacattgttgcgagtgttggaatttaggttttagtttaaattcaattttgtaaggaaaatggacccgacacatttgactaagtgattcggtgtttgatgaacaacataaccagtgacctaatgttttccaaatgtttgtgttttgaagttcatatgatgcaaagtggatttgacttggctctgagagtacaacacctcaaaaaaagacctgaaagactccttgaagacttacaaatattcaacactaatctaagacagaagaccaaaagagcccaagaaaagaagatataatattcaagaaatagactgccagctgaaagactccttgaagaccatgtttgctaagagctcagcaatcggctctcgggc

SEQ ID NO: 74576 - DNA, 917 bp, Zea Mays
cttaaatcgctctaaatatttatattatgttgagtttttgactcacatcgagcggttaaatattataggggtactcggacacactgatcaggctatattgagttatggcattagctgaatattgactgcgccctggcaacacgatgcagtatttgtgccgttcgaacttggctgcgtcatgtgattgctatgtcgcactctcacttaatcggaccactcccgttgagtcgaaccgccatcactgagtcgcgtatttttcgcatgccctgtaggcactgtctgtcgtgatcattgagccacaattgcgcctgttgcgcacgttgtgtggatttatcgtgtaccccgattaccgagccataattgtgtatgttgcgcttattacgaaggcttgttgtgttgtcgtatctctgatggtcgcacacgcgttgacgccagatacactagagcttgtactcgcgtggattgtggtgggttgttcaagcccctgaagtcacatcataacgcaaccttcgtaaataattttgtttagctctatttttttatttgattgtgttgtgtggcatcatatatttatttatattgccaagtggctataacaactatatcaagctctatagtgcttgaataatctgggaaagtaaatgaaataatatagaacatagataagttaattgcgtgctctcttttctcatgcttaaagttttacctgaagtaacctgaagatatataatgcatgaaagcctttttggcatataagacatcacaaattgggattctattagtaagcaaaaagaccttaccaaataatttaagaccagaaatctcagtcatacattgctcaaccagatgttagcacattgctctctttgtcgctgaatggcatgaagcaaactatgagataaaaggacatgtaatcg

SEQ ID NO: 74577 - DNA, 685 bp, Zea Mays
gtccctgggcccttctgaccactcgcacaactgtgaacgggcccaccgtttctgtaagttgtccactacttgtctgggtcgtctctcgtgtccaattttgcgtcctggaggaacctagccagctggaaactacttcagactgaatgccactatatgcagccgccggttacggtattttcttgtgtttataatgctaagcaaatgcatgaagtgagctagtactttcatgctgccatctccaactaaagatgtaggccagcactgcataagttgatagctaccattgtagaggaaatggctaattacgcgtttccataacttgcaaagatgtgctatcaagagttgtagatcccaatcgtatcatgcaaggcaagctaactacacggtacaccttaggcttagagcaccgccccagcttttgatgcaccaacgatagaaaccaaagagaaggcgtaagagccggtgatccgccgttcggatctgggcaaaccggtctgttctactgccctggatccaagcagtgtgcgttgtggagacaggagctattggaggtacaggcctaatcatgcaaagcgctcaggaatcatttaaacaccctggggggaccccttctcgtccctgacgagatgatatacatctgtactgcattacggctggcagaatctgtttctgcccagaaataatt

SEQ ID NO: 74578 - DNA, 466 bp, Zea Mays
cgagagcagccttctctggtcaggactgtggacggtccagccccaaggcccggacggtccgcagtacaaatgaacatgaccagtccgaagtaaacatacttcggaccgcactggaggatcgtggacggtccgcccacatggtctggacggtccgccctatcccaagacttagcaattttcaaacacgcttttgaaaagatttttaactcttgatatttgaagcgttgtcagtcctcatgcaaatgcaaccactagatgctctttgaggcactaagttttacacagatcaaagtcattgacccctcttaatagtacggctatcaagcctactaatccggtcaaatatcttctctaaactcctggagatcggcaaaaacaaaacctatgttatacctttgccttcacttgatccacaaccaatgcttataaatctccaagattttctgttctatgtggtccaaccctg

SEQ ID NO: 74579 - DNA, 492 bp, Zea Mays
taaaaatattgcaaatattaatatttatattcacattaggattatgttggatattggaaatctgaaattcaaaacatttgaatttagcttgaacatttgaatttggaaaagaaaggaaatagaaaataaaatggaaaagagaaaaaaaagaaaagtgcagcaaccagctcttgggccacatctgtcctctgctcaacccaactcccacatagccccttgctccctcacgcgctaacaaaagggccccaaccgtcagtccccagccgtcctgcctgtcatgcgcctcgtactcactactaggcagggcccgcgctgtcaaccattgtaccgcgtgtatctgacgctgccaggtggggtccccagttcagtctcctcatcatgacacagactcacctctggtcaatgaaccatgggaaccaactatcagattctccttcctcaagagtttgttaggatcggcacaaccaccatagccgatcgatctgctacgag

SEQ ID NO: 74580 - DNA, 498 bp, Zea Mays
tagacaacttggaggaaaagcggcttcatgcattgcaaaacttggaggcataccaagctaggatgtctcgagctttcgataagcgattaaaaagaagatcgtttaaacatgggacctggtgctagcagttatccgccccatgaatattactcatcgaataaaagaaaaaattgagcctaaatgggaaggcttatatgtagtaaaagatgtttattcaagtggtgcatatcgaattatttcttctgacggcgaatattgccctccaccaataaatgaaaaattcttaaaacactactatgcttaaaaatatataatcgttgtatgctccatcgctctcgagcttaaactgctaaaaaaatcaccatacgttccaacgcttcatgagcctaaaccgtaaggaacaaaaaaattatgctccaatgctcaagagcttgaactattagcaaaaaaaatcaccatatgctccaacgcttaaactattagcgatagaaaaaggtt

SEQ ID NO: 74581 - DNA, 303 bp, Zea Mays
aaagataacagaattttggatctcgaggcagaaaatctttggcactcaaaacgtgtcaagaacttaagtctaaaatgaaaagatttgccaaagcacataaggccaaagtggctaagctgaaggaagagctagagaatatacatgtgaattttgaagtggaaaagtcaaaaaaataattatttagtgatgataaagattgttttcaaaacattcttgacaaattacgaagctccaaagaggagtgcttctctatcgccacccaatgctgtcattgactgagggatacctttgtttcaattggcc

SEQ ID NO: 74582 - DNA, 277 bp, Zea Mays
ctggctctatgtatgcttatacgaaagaatgttgtctcttccctttcctataggatggtgaaataagttttaccagcagcgtcgtaccggaggtgccactagccttagtgtaccagtcgctcctcaaaatggactcactggcagcaaaatgttctctaacgagttgactcgcgtgctcgactgggattgtactttgtctcttctgtcaactgagctatggtgaactctatcgacatcaacgttagcacaatggttcacccaactgagcatgtccccg

SEQ ID NO: 74583 - DNA, 822 bp, Zea Mays
cttcgctcatcaaaagaaatatgttttgaaaaatctatagaatgcgtcaacaagataaaaactagcttcgccaacgtgggcccgtactcgagtgaagacaacttcataagaggcgatcctgagggcccaattgagtagatcagcagcgaagctgaagcttttgaggaaatcttgagtgaccgtggagacgtatatgccttctcttgtgcgaggggaattgcagctattttggagaagtcaggttgtgagcatgttaaaaccatggctcaggccaaagctgtcctctgcattgatgatacgaaggacccctcagccgaagcaagcttaataggtggaaaatttttcactgacatatgggaaaatgacggccgaggaatggcccatgaaataataaagaaaaacaaaaaagatattcatgacactcgagagtcaataaaagcagctgaaaaggctgcagagcttgagaaacgaataggtattacttaatggtttttaactttgttgcttatttttgtgacttcgaactgatttacgttttctaccgcagctaaactatctcctccccctgagccctttgagtcactggccgacccagaggcgaaggaatcaacagaaattattagcatggccgaaactattatggacgaagttgtcaccaaattattaaccgaagctgcagagaaagtcctgagagaagaagactagctatttataaaaacattgctagaatattaatgtaacatttgctggactatgcttgtaatattcagtgcttataggttttgaatgtaatatatgaatggttttgtaattcatttcttt

SEQ ID NO: 74584 - DNA, 279 bp, Zea Mays
ggacacataacacacgaaagacaaccacactcgctcgacgagactagaagatccagaggccggagcaagacccaagccactacgacgtccaaggcttagcttagaatctagttccatagtatttaggtccactcacgcataagagacttgggagctcttcttcccactctcgcccgcttgtaacccctaatatgagcattgagcaacaaaggtgatggtagcatgagctagcatagactgaatgtagggacgttctacccgaatcagtataaatcttgc

SEQ ID NO: 74585 - DNA, 465 bp, Zea Mays
acgtgcttcgtgcgttgttgctggacatggttgacgaagaggtagacaacgttgttctcgcagtagaccaaggtgctccgggagagagctatggagcttatgaagaagctgacgcaaccaactcgcctcagccaccccattagtgacaacccgatgctcagctttagcaatggagcaggagaccataggctgacgcttggagcaccaaggatcaagttggccccaagaaacactgcattgccggaggtcgaccggcgggtgttcgagcaccaggcccgatcaacatcggtgtagacgagcaactcattggtggtgtgccaaagaagaaggccatagtcgatagtgccccgaagataacgaaggatccgcttgaccgcaccaaagtgcggctcgtggggtcatgcatataaacgtagacatgctgaatgatgtagccgatgtcgggcctgattaaggtgagatact

SEQ ID NO: 74586 - DNA, 800 bp, Zea Mays
ccaccagtctgctgctgttgattgggtgaagggggcaccgctgggacgactgggatacactggagctgtcgatgttggacagggcagcatgggcagcggccggagcagcctttgccatcatgagttcctcaagagccaggacatcgcggacctgcagaaaactgggaagagggttggtgcggcgcagatggagaccaagagcctggaagcgctcgttaaggcctctgacaatgttaaggactaaagtccggtcagagacaggttcgccgagatcacgcagatcttcggcgagtttcttgtagcggcgacagtattcggcgaccgggagatcgccttgggagaaggaccgaaattcttggtcggcataaagagcacgtgtggtaagatttccaaggaactgggactctatagagagccagagggtgcgggcagaggcgccgcgctgagagatgatgtcagcgagggcatcggaaagagtgccaagaagccaagtgcagatgacggcattcatgcgaatccaatcaggtgactcgagaaaacggaatcggagaggacgtggcactccagggaaaatttggtgagggtgagaaggaaagattcacaccagcgggcgtagaaggtggagttggtgtcaaggagaagtggaacaagagtccggatgttggttactgcaacagcctgggcgtgaaggtttagcagcggctgcctcgtggtggagaagagcagcatgaagagttgcaggtgggatgtcggactgtcggcgacggcgccagcgccagacgaatgagtatcctcctccg

SEQ ID NO: 74587 - DNA, 377 bp, Zea Mays
cttaaactttgtgacaaacatttcgtgatccaaacttaaaacaatataatgtgtatgagcattcaaacaaaatgaatttgatgtgagatctatgtatccataaaatcccatcattgatctaaggatcaatcaaaatacccaagtttggcctctgttagtatgtcatgtcaatcatagaaaagttgtttaatgcttataaagatcatagttatcccttatgtatccatgagtgttacaactaatcttctaaataattgctaaataaactctttatgagacggagagagagtacaaaatataacaacaatttccatgcaaacatggtatcaccatttatctttggagtttaatttgttcataccttatttcacttgcca

SEQ ID NO: 74588 - DNA, 815 bp, Zea Mays
agtatcctaagtcatttggttcacaaacatgtggatttgtaagccaaatcttggattttggacttaattgcaaaatggacctcatttgagttctttactaagtctgaaaatcagagaattggctcaactttggggctttgtaacttttaaattctaaggtttttgccctaggtcaccacatcaaacttgtagacctatcaaaggagaacaattttgcttaagagtgtaagcatagttgttgagaagaaattggaaataattaagcccaaagttggactgttagactacttaaagtctgaaatcagactaacagtgggatggcatgaacttcaagctcaattccaagcaagatccagtgactttttgtgggagcacaatatagcaaagttgtagctggtttgtagctctacaactttggtgcagagagatgatgcagttgttgtgcgaaatctggaaaggaagtgccctgaagttgctgtgtcaggttcatctgaatggaactcaccattgtacagtagcctgctatggatcaggacgccagcgcaggatgctcaccgccgacgaccgatctccaccgcgattcgcgccaccgccgttgcgatttacgtcaccggtgactcgataagcctgccagctaatagctcttcgcctgaggatgactccggtgactcatcgctgtacccccgtgctttgcggcttgggctgataagctcaccggcgacagccgccttccggtcttgtgccacgtaattgaacacctctattgcatcgccgtgactctctatagccatctaatcatcgccggtgaggtcgcc

SEQ ID NO: 74589 - DNA, 492 bp, Zea Mays
aaagaattgagtattggcatctctttttaggaattgaattcgggaccgtaaatgtgcgatagttctttgcaaagacgcaagcaccagacaatgctgtttcagctgcccccataaccaaagctcctccctggacaaggatctgatatcttgcgccatctccagcctatgcaacacctcacgagcaagacccaactgggcattgacattccccacctctttatgaccccaggactgcaaacacttagctaatcttttaaacttcagtgatatcttctccaagggggaaaaatcctgcaaaggtagattccacgaggcagccaccacctccaaaaacctagggaatttaggcaaaaaactctcaaagtgaaatcttctcctccccacgccccctctctaactctaagatttaggggacagtgatccgagacatcagtagcattactgtgaagagaacaatctagaaaaaatcctcccagccagcagtgcagaaaa

SEQ ID NO: 74590 - DNA, 875 bp, Zea Mays
atgacattgttgcggatgttaaggttgcgcctgatgccttgagtcgcccttcctcctcgtttgctcctgcgaaagacattgccaaatagagatgtattgccgtagcgatgtgtttagaagatactgaatgcatttgtgaactatatgtgtgtgtgatcagtgcgctcggatacttggtggatagggtattagaatgtgttcttggcgctaaaaactataacattttgtttctgttgttagaatttaacagtcgtcatgaacgattgcagaagtaagtgcggcgtgctggttttggagtcttttcctaatttatgccaattgatcagttggtaaggcatagaggtcgccctatgacgagtagttgtgagcatgttgcaccgtcttaagtcattgtcgacttaggccgattgctctattagtagggtatagtggtcaccctaagtcgagtatgcgtgagcatgttgcaccgtcttatgtcattgccgacttaagccgattgctccgttagtagggtatagtggtcaccataagtcgagtaagcgcgagcatgttgcaccgtcttaagtcattgccgacttaagccgattgctttgttagtagggtatagtggtcaccctaagtcgagtaagcacgagcatgttgcatcgtcttaagtcattgccgacttaaagccgattgctccgttagtagggtatagttgtcaccctaagtcgagtaagcgcgagcatgttgcaccgtcttaagtcattgccgacttaagccgattgctccgttagtagggtatagtggtcaccctaagtcgagtaagcgcgagcatgttgcaccgtcttaagtcattgccgacttaaggcgattgctccgttagtagggtatag

SEQ ID NO: 74591 - DNA, 412 bp, Zea Mays
cgttggctcggtatatacgataaacatctagattcgcgcaagtctattacggtagggtgtcgtacgtgtcatcatcgtgctgacaattgtaacaacaattacgttatatctgacactatttacgctcaaacttgaagagtttacgatcatgaataccacgtcccagagatatctacatctctaatgttggctcggtatttacgataaccacctaaatttgcgcacgtctgttgagcggggaccggggtcctacgtgacatcgtgctgctgactattgtaacaacatttacgctatatttgacactatttatactcaaacttgagagttttacaattaaggataacacatgtaagagatatcaagtctcccatgttaagtctcccacgttggctcattatttatggtaaccat

SEQ ID NO: 74592 - DNA, 1701 bp, Zea Mays
gttgagaaagtcccattcctatgagctctccacacaaaagtgtccctcaccggagtcagattaaccgtatccagtaagtgtatcatggtctgccattctacaagcttaattccaacaatggatctccggaaagaaagatttagattttcatgtgacaacacttctgcaaccagcgaggtcttattgcgtactatattaaaaaggtttgggaattgctcactaagaggagaattattaagccatttatctttccagaatcttgttgcttgtccgttccccaccttaaaatatccccacttgaggaatttgtccttgacgttcattagaccggcccagaaatgagaatcacccggttttctgacagcttgtgttagggatttgtctctcaagtatttgtttcttaatagccgttgccacacaccatctccattgagtaatttaaaaagccatttgctgagtaaacaaatgttctttatgtcaagattgacgactcccagcccacctagctctttaggttgacaaatgatttcccatttggctagtctatatttctttttatgatgtcctccttgccaaaagaatctagaccgaatagcatctagcttctgtagcacaccagtcgggatttcaaagaaagacatcatgaaaatgggtaggctacttaagacagaattaatcaaaacaaaccgcccccctgaagacaggaatttggctttccaattactaagtctcgactcaaaccggtcaacgacacaatgccactcactatttctcaatcttcggtgggtcataggaatcccaaggtactttaaaggcattgtgcctacgccgcaaccaaagagttgtgagtactggggctcacaatccttagccgtcccataacagaaaagttcacttttgtgaaagtttatcttaaggccagacatttgttcaaacgcaattagaagcagttttacattcttggcctgttcgatgttatgatccagaaacaccaccgtatcatctgcatattgaaggatagataaacctccgtcaatcaagtgcggtacaattccattgaattgatgttcctcattcgctctagcgaaaagcactgccaacatatcggctacaatgttaaatagaattggtgataaaggatccccttgacgtagtcccttgtgtgttgagaaaaaggggcctatgttgtcattaactctaacccccacatgccctttggagatgatactttggatccatgtacaccatttcggcgagaaacccttcatgcacatagcttgctgaaggaacttccacttcaccttatcatatgctttctcgaagtctaacttgagaataattccatctagatttttcctgtgtagctcatgtatagactcatgcaaaacaatcaccccttcaagaatgttacggccagacataaacgtagtctgagagggtttaataattcgatctgccaccatacctattctgtttgtgagtactttagtgataattttaaaactcacatttagcaaacagataggtctatattcctggattttcaaagcaatctctttcttaggaattaacgtaataactccaaagtttagtctatataccggcaaagaattattatagaagtcctcaaacagagtcattaaatcacttttaataacttcccagaaaacttgaaagaattctactgggaaaccatccggt

SEQ ID NO: 74593 - DNA, 797 bp, Zea Mays
gctcgacgccgtgggggacgttggagcaggcggtgccgggaaggttggtgcaggcactccgattgaaatgttgacgccggccaaatcccttgagagagactcaatgttgtcatcattctcagctgcatcttttgcacacaaagtgccccatggggcacgattgcagttgctctgtctttgcctcttgcgacgagaagggcgacgacgggagccttgatcctcgggaggggcaggcaggaggagtgccatgtcgtactcgattccgagagacatgaactcaagactcccaaacctggtcgtcgtcccaggcctgggtgggtggtgagaacctaccatctagagtgctgacgagaactagggatgttgcacgtgactagcccctacctggcgcgccaactgtcggtgtttggaccgtgggtccttaaccaacgagtaatgggccgcgtggccagctctagatggtgtgcaagatgacacaagcgattatcctggtttgggcttctcgaggccctacttcaaacagaggggatgaggcttatattactcgcactgtggtgcctgtagtagggttttacaagcacaacgggagaggggacgttcccaagtcctaagatatgattgagacaagtaccaatatctaatacaaagtgagagagcaagaactcgtctacgtgtgtctcccccgtcaatggagggaccactgccctatttatacaccaaggggagcgtccgtggcgaagctgagtcttgtatttgaaggagagatgccctagcatctgatgtgacggcgaaccgtg

SEQ ID NO: 74594 - DNA, 471 bp, Zea Mays
aggtgtggagttgcagccggatgtggaggataaccattttttagattagatagcaatggaaaatattcagccaaaatagcgtatgagtgcttgtttttttggctcaacacagtttggaccttttgaacgtatttggaaatcttgggcgccttcgaagtgcagatttttcatgtggctagcagcaaccaatgctggactgtggatcggttgtctagacgaggactgtctcacaatgagaaatgtattctatgtggtcaagaggaagaaacagtgaaccatcttcttttgtcttgtgttttctctaaggaattctggtttagattgttcaatcaagttggtctccaagggttggcgctgcaagctgacaactacaattttttcttatgatggaaacgggtctccgagaatgttgaaggatttgcctgaatgggtgtcaatacccttaccattctgggagcttggacgctttgg

SEQ ID NO: 74595 - DNA, 655 bp, Zea Mays
agtgctcaagtgagtgcatgattccaacgggcagacaaaggcaggggagataggcagttccctaggttcatcgtcggtgtgttcatctaggtcgttgtcgccatacaaccaagtgaatccaccctttacatctctatttagtacaagcacatgcatcatgttcgagcgtctaatgatcagcacaagttctggatgcccaaaatggattccccttgttttgacggcagtgatgctcgcatttgggtggataagtgtgatgcatatttcaccgtgtttcaaattccacctatctttcgtgtctctatcctttcgattcacatgactaatgtcgctagggacggagccaaaaaattaggaggaactgaactaaactgctgcggtatagaagactcttctgcattatattatgtacattttagattaagggaggctctagtgggtctccatgtgatccgaagcgataggtgggtctcgagccccaccctccccaccgctggatctgtccctggatgtcaagatgcattggtaccagtcttacaagcacacatatgggtttcagtagtgggatcgatttgttatggctattgtcgtggtttcaaaaaactgggggacaatgagatttgtgtttggcgggggatgctaacacggactcact

SEQ ID NO: 74596 - DNA, 622 bp, Zea Mays
ggccgacatagtgcgacctcgcgtggaagccaactatgggatctgctgtgacaggatgccaccaacataaaccccagcctaacgtcgtggatccaagcgctcctcccacagttgtcaccacgacggtgtagggtgggggagctcgggtgcagccatctccacgacggcctatggagggggtaagcgtggcctagcttgcaacagagcccgagattcgactgacgatgacgcacggagcagctggtggttccgatctgttgtgcttgacaacgcgacgacgatgacaagcacgacggattagatgaacctgcgacgcatcctacgatggtgctgcgcccgacggagatcgatctccccaggggcggcacgacggtgacagcggaagacgacttttggatctaaaacctaaactcgctataccatatagaaatgagagattgtgtataatagaagggatgagttgtattgagcttttagagtaaatatataggagtacatgacttgaagggtaagtagtctatcctagagatgaggaaggttatcctgggattataatcaatcctagattatccatatccggagttgcctaatatactctaacactaaatcaatgaatatggac

SEQ ID NO: 74597 - DNA, 351 bp, Zea Mays
gttactatcaggataaccaacaaagaacacgagagagaagatgtagatggtagtggtactatcatctgggctgcgcggccgtagcaccggattcgccgagaaggagaaaatagagcagagatcttgaaagattgaggattatggtttccaaacagagaaggtaggaggtaatggagggcaggaggggtagctagaaggtagtagaaggcaagaacggagaggagatcacatcactggaatccgatacccagagcagatctaaaacctggaaatggagcaagcgagaagcgatgcaggctagacctgaaaccagagcaccagattctcgtcgaggaggcaacagccaacggg

SEQ ID NO: 74598 - DNA, 426 bp, Zea Mays
cctaccacttcacgaaaattcacccacactatgttttccgaccacccttcaccgcctacacccggtactcgcacgaggaacatccccagcaccctctgccgcagctacatccaacgcaacaaaataatccaagccttcatccgaggactcctccgtccatggaaatgagctctcagattcaccatcagactcaaaacattcagacacagaaccaaacaaactatcatcggtaggcgctacggtcgaagtctccaccgcaaaatcagtattgccagtagcggttgcttgcgcgggcccaaacgtcggaacctgcgcagcaccgagattcagtatcacacagacaaaagtttacacttacaatccctaacccctattccgccacctacgaaggcccggccaccgccgcagggtcttcggcagctggtt

SEQ ID NO: 74599 - DNA, 1975 bp, Zea Mays
tgtcacttacacagttacacgtacgatggcttcgatccatttacagacgaaacccatcgtcaacatcaaaatgttcctcatttgagtcaaattgaagtagatgtcgacccctattggcgctctacgacgccactccccaagccatcgatcttccctcctctagtctcgtttcgtctatgtcactccaacgctgctctcaaagatcagtcgtggcctcgctctacatcatcgacttccacgctatctgcaatggccatccccaccctgtatcagaggtagaagctttggatctagtcacgacagtcgaccacgactccaaacttcatttatgtcatccctgctccccgtgatgacctttaccacggctacatcccctccacacacgttcccgcactagcgctcgtcgctttggagttcctagcgatggttacagtggttctactaccctcgttggctttccctctccccacggctgatgtctcctccccacgatggtgatactcactttggaactggtcgagatgacaggctacaactccggtcatcatggtttcccgctttggcatttcgcacaactaacatcccctccatgctcctccctccactagcactccttcttcgtgatcaggtcacgtgtgagcagctctttcaacggtggcattggatggcctaggtacgtgtcaatgccactcacccgctatcataagtgtccatgttggagtcattagtgaggcttagatgtaaaaggtcaaagcataacaagtatagccaggagtttgtgaagtgtgagagcaagccacaactaggaaaggtccatcctctttgtggtgatgttcccttgcccatttgattgtggtaatgactacattagttcggttgatgccatgcgtaggttctaattgagtttaatttgttggtttaggttcttaaacaatgcaaatttgtcatgtgaatggatgcctacaccgtgaagtttaagttagatagcatgatgaaaggggcatgattgattgtgctaaagatgagcgagtacaagtagtcatatgtgactaaaaattaggacattattgtttctttgaacaagatgaatggtaacatgagcaaggtaattgagctagaaaagcaaggaaactatatagtgggaacttttttgctttaataatgtttatcggcttcatgttcttgtttaagtaatcatattgttgtatggatggtcttgatgtactcaactttatgtgaatgtaaccttgttattctagcttcttatgaaattaagaaactaatccactatgataaatgacatgatagtaaacttccatgaaaaataaaggagtgaagatatagatgttctaggtacttaaataggtacacaactttaaccacatgcatgcatttacataggactaactaacacacttggtctagtcgatcacatgccatgatcaaggaggtaaactatgtcaatgtcattgtccccacaccattcgggcatggatggactgggaggctcatcctcattagcttctagagtccaaatttcttcccacatttttcaatcttcttcctcattgcgccgaggagccataaggttgtattggcacttgaatgcagtgtattccataatctcaatgagagatttcatggtgcatgctatctatgtcatttggcacccttccacttactcctcatccttgtttagtcaccagtgtagccacacaactctaaaagttggctataacgggtgaataggaagcacctaaaatttctttctcaaatacaagatataaaccgaaagttcataatttggtgggtaataatagagtaatatagcagcgtatgtattcaaggattatcatttgctataagctagcaacacttggagcggaatagaagctagcaacaagattgaatgggagataaagctcaaatcaataagtatagcaagtatgaaccaaacaagcaaagataaatgtgg

SEQ ID NO: 74600 - DNA, 456 bp, Zea Mays
cgctggaatcggttgcaattgaaatagtgcagacatctctgtagcactggcgcgtgcgcgacgtgcagtgcaggatgcgtttgcttgtaacctaagaactgccacatgctgctgcggttgcgtccaactgaaagggtggaaagcgacggcggccggcatgggaatgagcaagcagagcatactagctactgaagagaccaaaacgcttgtcctgaagctgattcaggctcacgatccactgcaggattgtctcttgccttgcttggggtgggtgcctataacacgctcttgtgtcgtaggctcgacgattttgtttgtttgtcagtggatttggctatgtagaggggtgtttgtttcagcttaaattctggccatcggaatccgattctatcagtcaaacgtttttgtttttcaattcgcttgtgtaagaattacttccgtaaaaatagtcaaaat

SEQ ID NO: 74601 - DNA, 585 bp, Zea Mays
aatgcaacaacaaactcaacatagatcactccacaaggcactaacacttcactagctcaaatcacttgaattggcacctgggaggctttgaatggattggagttgttgcattgaatttacagccccaaccatcccatatagccattgacattgattatgaaattctgcacacttttcgggtgcaccggacctcctacaatgtaagtctggtgcaccaccagaccttgtcagactgttgttgtaggtagccattatgacgggtcagatgaacaataaatcagtctagtggcacattggaccttgccatgttggatccgatcgttgaaatctaaagtcaacagttgcatcctgacaagtcatgctcgccgaaccgagggtccagtgcgccagctcaaagaagtctattttctgccctctctgcataaccagtctggtgcgcgagccgcccaaaaccaagtttttgccttctgtacacacaagatccagtgcacccccagaccggtccgatgcgtcactgttctactgatttttggcaaacttcagcaaatattcttcaagttatttggctggtcttgagggtgttcc

SEQ ID NO: 74602 - DNA, 499 bp, Zea Mays
catatgttttgatgcttgtcgtgatgaactcatgatgaagttggatctttataatgattgtcaccaaggtgtgggcatcccctgcaacttggtgtagttattaataaagttagtcatttagttgggcaatcttttagttccactttcctatttatctaagacgttgtgtttggttgtgttgagagtcagtgaagatgctcatttgctcagtattgtgaagacttatttatatcttttcttatgatgaaagactgcaaggtcagatctaatgtgtgtgtgctttctacagatgtctgataacaggcgtagaggtggaaggtgtgctcagcaggagcagcaggcaccctaagaggaggcacctcacagcagttgccaccaccaccccaatgactattgaatagatgtttctgatgtagacccaggcaatataagtgattggccagactctagcagctatgcaacaggtgcagcagcggcaacccccacctcaacctcaaat

SEQ ID NO: 74603 - DNA, 460 bp, Zea Mays
cagagatctcgacaaattaggataggggtttacatcggtcgatcctttggaggagatcgatatcggagatggtaaaactccaaggccaacttttgtgaacaagaccctggagaccaatcctagagatgaaatgatcggtctattgaaagaatattctaattgctttgcttggaactacactgagatgcaaggattaagtcgagagatagtagagcatcgactgcccattaagtccggtttcagacctttcaagcagaaagctagaacattttgtccagacctactcccatgaataaaggacaaaattcaccggctgctagaaactaattttattagaccttgtagatacgaagagtgggtctccaatattgtgccggtagagaagaaagaatcgggtaagcttagagtatgcattgattttcgcaatttgaatagagcaactcctaaagatgaatatccc

SEQ ID NO: 74604 - DNA, 552 bp, Zea Mays
gtgttcgtcgttgtcacgactccagtgtcgtgccgtgaagctccacctgtgcgtgtcctcgccgcgtggaaccggcgcccggggctcgggatttccttcaccgtcgtccgcttcctgtcccggccgtgaccgactgtgttccgccgtttcttccagaaaggtaccctcctcaggtgttcgcattgtcctcctctgcgtgtatcagtgatcgtgtcggtagttggggccttggcgagctggtttgccgttcaccggcgggagcgccgccacgggatggccagctccaccatctggagtctcgggtagggaagatggtgctgccaccgtcgatttggtaatgggtgggtgagattagaggagcgtaccgcttcggcaggactcattctgggccgtccatagcgtgatatgtggtcgcagattggatcatggcgccgggcgctactgaccgttgatattggatctgtcggccatgattaggtaccggtttgattaaaaatgcgatctaatctgaaccgtccggatcagatcatgcggttgtgtgatgtccatacc

SEQ ID NO: 74605 - DNA, 401 bp, Zea Mays
gggctcactgatgaaggctagaccaagtgatagagagctcaacttgggctgaggttggccgccaagccattatgggctacgacgaacacagtgagaatggttggggtgcgaaagccattgggagagctcagacggcagcgagggagattgcggcgatctagagcaactatggtgagcaatctaacatgatataagggtgactgaggatagggaggggagcaggagtttcgttaccctcaggcagtactcctggtggcgcaaagagggacgatgcaggactagaggcacttggtgatagcgaggcgacgctcaagtcactatggtctaggcggtagaggacggtagagttgatgtagaggctcgtcgcgaacatttcgaatgccggtgaatctaatgacatt

SEQ ID NO: 74606 - DNA, 626 bp, Zea Mays
tattcttgagttaaaaatcaatttctataatcgatttcctaaattctcaattccctggaccgagtgcataaaagcagataaatacagggggttcatatgccagaaacggaggggctctttagaaaaatagacaccgcgaaggggtatcctccatccagggccgcccgatctgatctagatggcccagattgaacctaacttaaagtgaaccaatctgcacttgtggccctcggatcacatatcagcggacaagggatggccatggacgaaactaacctgaaccctaggattaacaactagcggtcccgattcaaagcatccaaaggggtatggatgttttaatcttagccgcccccaacactggccaaacgcggtggtggcagacactggctggcgcgcggcggaatgtagtttagtgccccaaattcgattataaccagtgctacacgttgagaaggaaaaggcaaactacatggatgtgctttcacctcagtggatgacgcagacgcacatgagcacgacgaggagcggatcaatggcggcggcgaccgacgtcgagaaattctcggtctcccgggtgccctccactgccagcgatagcccgccccgcacggtgctgacacaag

SEQ ID NO: 74607 - DNA, 396 bp, Zea Mays
gtgttgagagcttgtgccctttagcatggttgtagttgggacaagagtctaccctatgctgagttctcatataataatagttaccaggccagtctaaagatgtcaccgttcgagactatgtatggcaggaaatgcaggactcctctatattgggaccaaactggaggaagacagttctttggacctgaactgattcaagaggcagacgaacaagtacgtataattcgagagaatttgagggtagctcaaaccaggtaaaagagctatgctgataatagaagaagaccactggaatttgaagaaagagattatgtgtacctcaaggtgtcaccacttcgtggaatgaggagatttaaagttaagggcaaattgttccctcgctttattggaccattc

SEQ ID NO: 74608 - DNA, 900 bp, Zea Mays
ctgttcagcttgtcctcgactcgcctgtcagtctccatgatgctagaggaagacattgcatcatcggtgtcttggttgaggtcgctgaggaaggtgaggaaggtatgctccttgatcttggccttttggaagtacttgttcttgagcgcctccttatcgaatcctcccttaaacttgtacttattggaggagttctcccgcttgcccttgcaatgaccagagtggtggtcgcgcaggccatcctcctgcctgcccttcttgggacaactagcgatgtagtggtcaggattgctgtagttgaagcatccatcttttgacccaccatgtcgtcgtttctggtggttgttgtggaaccgtgtgaactgactggccacaagcgccatctccttatccacaaggctctccacctgctcctctatgatggtcaacaaaaaagacaaagtaaagataccaggtgaggggttagaggaagcaccacctccagaaaaccagggccatggtgggtgcacaagggttctcaatcttggcctgagtttggtggtcaatctctgtggacttgagcttattgaaaagctcatccatagtgagagtctcgtagttgggtgactcgatgatcgtcgagaccttcacctcctaaaccattcgatctagagcatataacaaatttagcgctctctcatgatcatcatagggaagttgtgccttgttgacatgcatcttgttgacaatcgtctggaactgagaaacatagtgtctatggtctctctagccaactgcacaaaattccatcatattctctgtccttcatagcacattcttaaaggttccatcctctatatctttaacatccccaacaacatcccctaaattccatcatctatatctgatcctccacacttt

SEQ ID NO: 74609 - DNA, 417 bp, Zea Mays
gcgggagctaatcctgcgcatcacaaacggtcctacacatagacacgaacagtctaggacatcgctggacagtccggatcattgcagcggacggtacgacagcgcccaggagccaagacgaccacgtaccttcaaaccacgacgaccagaaataggtacgtggaaaattaacacattcagggcagctggtcgactggtcaaatctgacccgacctttgattaattattgtctaaatatgtgaaaaagaaggtcagcccaagtaaccggccaccaaagctacctcggtcacctactcaagagcgacagcaggtaagaccaattggatcacctcaccaatcggaaaggacgataggtcataatgtccaattaagacataacgtgcctgcatggacactgcccccatatccacatgtgcc

SEQ ID NO: 74610 - DNA, 812 bp, Zea Mays
ctaaatgggtggatgtatccaacaaactctccaaatataaatgttggcctgtaaaatctcaactactcatcgtttaaaatttcatccacagtatccaatggaatggcgcattgtagttctttgatctgacaccatcacgcgcaacaccctcttcacgcccgagccaagtcagcaacttctcaccttctgttttccacaacacttggccacccagacttcgtcgttggcgcatcaccgaggtgatgccaattgtgtacctagaagctactgccaccgagagttggacaccttggacggtgtcgtcgcgccatcatgacatcgactacagaatatgcgagaacgatgatggggaagactgtggcggcgtgggaaactcgcagtagtgagggcacaggatcagtcggccgcgagcaaatcgacggtggtgactggagagcgggaggaaatgcaggaacgacaattgtccactgcggcgagtgggcaggaggttgcgagggagggagatggcgagtcgtacgcctcaacaaagatgcctagcgaaaaggaggagatacctagacagattgcgagaagaggaagatgcacagtctcttggatgagttttcaacatggttttttatttgtttaccgagcccaataaatttacataggctgttggaggtgcccttatgcatgttagcaaatagattttcctatgtaacacggtttttgttttatttttattatcttttttgtaggtttactacctcgacaatcttcaaagtggcgtcgcgcttcctggggtgacacctcgatgggtgtctttacccgaa

SEQ ID NO: 74611 - DNA, 533 bp, Zea Mays
atacttctaattcacttacgcctaaattggtgacttagatcaactcagacatacccaacaacttgacctacatgataggttacataacctatcccacccgtctagaagcaaacgaccaaaccagattctgactaacctcattaaactcatagccatctactaaaccagctgctctacatacgtgttacatacagatctatcttaaccaagacaccaatacgaagaagatcaacctcatcaaggaaggataagagtcaccgtcaaggaaggtaatcgtcaaggataaaagtcaaaccagatctctagatgcatcaagatccaccatccgggatagaagtttttcttgcctaaccttctcttatcctaagcttttctaaattttacttattagctaaaacataatatgtgcatgttttctagccacacttgctaataaagagaaacttttgggagcgttaaaactaattgaaaacaaaaagttaaaaaaaactttctatatccctttcttgcaaatctcgaggacgagattattt

SEQ ID NO: 74612 - DNA, 358 bp, Zea Mays
gtcgatggcaaagtgcaaacagataaaatatgctcaaatataagggtggaaataagggggatagggttccccagcgacctaatagcaatagacacccctggggtagatgtcatcctagggatgaattggttaatgaaatatgaagcgaatgttagctgtgacaagaggatcgtaacattgaagtccccgtccggagaagaggtagtggctgagctaagaatgcctaaaacagcgaaaggtgattgtcaccagatttcggttggtagcaaggaggccaacccgctcgaggctatcaaggttgtgtcggactttccggatgtgtttcccgagcagctaacgggcatgccacccgagagaa

SEQ ID NO: 74613 - DNA, 321 bp, Zea Mays
taaggtctggtatctccacggtgaagatgttgaacgagcaacagaagtagaagttgatgacggtgaagatgttgataggatggaccatatgcttgaggatttgcagactgaactggccccagatcatcatgattcacctacaccggaggttcagaagttcttcgacctcctcaaagcgtcagaagagcctcttcacgggcacactgacatgaccatcctcgaattcgtgacccggctgatgtcaattaagtccaagtttgcattctcaattaattgttacaaggagcttgtggatttgattagcgaggttcttcctacggg

SEQ ID NO: 74614 - DNA, 557 bp, Zea Mays
gcctattgagcgagacttatgcgagggcatctgtctcgggtctataaacttgaaagtttagaaggaatttgtcgcggagtgttttccatgaatcaattgataatggcggcagtcttgagtaccatgtgagagttgggccctcgaggaatatgatgaatggcttggccatgatggtgtcgtccccccggatgatgcgattgcaacctgataactcatgatgtacagagttgggtctgcactgccattatacttttggtaagtgcctgctctaaaattttgcggccaggggaggcctgaagctgtggtgcaagagggctccgttcatcaaggtaatttaacccttggaaagcagctagtgcgaaggctggcatgtgggggagacgagggtttatgttgaatgcgggggcgtgctgctggtggtaggggtccttgccttggatttctgcgatttgttgctctagttctctggatttttgctcttcttctaggatcatctgtctgactttggcttgcatgttgatgcgctggcgcttggccgcgagtatctccttttgttt

SEQ ID NO: 74615 - DNA, 355 bp, Zea Mays
cttcttcagaggtaactccgtcatagaaaaagcacatgactgagtagaaccttgactaggcagaattaaggtgaagttcccacagaacggagaattaatttccacggtacggctggctacatcaagcccaacttggtgcaaggtcatccaattggctcccagaataatgtccacattttccaaacccaacacaagaagagtggttttgacaatgtggctccctagttgaataggcacactttggtttaattgattagttcaaattttacccccaggtgtgactatcaagaatgacccctttgagtgagagaatggcagttcacatttagcactgaacttctggctaatgaaacta

SEQ ID NO: 74616 - DNA, 568 bp, Zea Mays
tggggcagcgatcgtgctgaattccttcacgaatcgacgataaaatcctgcaagtccaagaaaactccgcacttgtgtcaccgtcgatggcgttggccaactctgaatagcatgcaccttggcctcatcaacctcaataccctgtggagtgacaacatagacaagaaacgatacgcgttcggtgcaaaaggtgcatttgtcaaggttagcaaataagcacgcggcgcgcaaagcatcaaaaacaacacgtagatggtcaagatgttcagataaacaagtgctgtagatcaagatatcatcaaaataaaccaccacaaattttccaataaatgggcgcaaaaccttgttcatcaaacacataaaagtactaggggcattagttaatccaaaaggcatcactaaccactcatacaagtcaaacttggttttaaaagcagttttccattcatcgcctaatttcattctaatttggtggtacccactacgcaaatcaatcttagaaaatattttagaaccacttaactcatcaagcatatcatctaatcgaggaataggatgacggtaccgg

SEQ ID NO: 74617 - DNA, 735 bp, Zea Mays
cagacttaacctattcggaatatcccatccgagttttggatcaaaaagaccgagttacacggaaaaggactctcaagttctataaggtatagtggaaccaacacgctgaagaagaagcaccatgggagtctgatgatttcttagaaaaacattttcccaagttcttagcctcttgtaacctttaaagtttatgtactttattgtaaagttagaacaaacccccacactcacccctgctctataacagaaaataggaaataaagttgtgacatgtttccttttacattacttaccctggagccttaaatcttggacgatattcttttatggggggaaggatgtaacacccctggtgtgggggacagatatcccctgggtccacttgaaggcaaaaaccctgcttggggccacaagccagtctccccacaaggtcgtcgtgtcgtgggtcgggcaaagacaacgatggagatgggccgacctaggaaggcgatgggctcacgtccggattattcgtggcttgggcgtgatcctgttgaagctgctcgcttttcgtgcgcctgatgtccttaaacatcgaggatagctcagaacggaggtgccgggttttcctcaagataagcaatgtctgttcgctattagctaggagataagctggaagagtgtgatcagcatgtgtgcagggagtgccctatagttgtgcgtataaggcctagggggatccccatcattttcatc

SEQ ID NO: 74618 - DNA, 347 bp, Zea Mays
ttggaaatctaaatggttttatgttaaaattgatgaagaaaaggagaagctagttcagagcccgatgaagctaatcttcggactgactaggcctcaatgcaacatgacaccgggggatccatgccaagatgttgtatatgagtttagaattgtgtctgaacacattgggactagggatctagtccaggaatacttggccaatagagtattcccaatgctgaggaagtggggtatgccgaagcttggagaagagaagaaagagggtgaactcgttcggctgccttatcactttaaattcaaaaaacacttcaaggaaccctgccaagaatggttagacacgattgaag

SEQ ID NO: 74619 - DNA, 538 bp, Zea Mays
ttttgagtaaaatttaggtagactgctgcaaacggccttagcggacaggagagtacgttcgttcgttctgtcgtgcaatgatgcaaagggaaaatagagagactcgttagtatcattagcaagaagaaaaattagagactcgctagtatcattagcaagaagaaaaatagagagactcgttagtaccgtctgatccggaccattctgtagtttgtccccatcaatctgtgacgaaggaacaccaacatactgttcgcacgtccccttcagtacgtgctacggtcatcgtcattatttggatgcacaatcctctgccatcgacacctagcagatggcaatagtaacttgccatttgcccatttggtaggccgtacagccatacgtttggcaaatagccagctaaatctatctcatatttcaaatttcactatataattagggcaatctatagcatgaaactgtgtttgacacggccatatacacaatcagctgtccatagcctaaattcagttttctgacacacatagcctaaattcag

SEQ ID NO: 74620 - DNA, 335 bp, Zea Mays
gggagctagcctagcgtggagagaacgaagtgagccacgcacgaagaaattgtccgagatatgggccgccccagtactttgctcgctctgctctatttggaccgcaataagacatccagcccacgacgtatgtgacttcgtttttatgggtgttgcaactttaaattagtaccatatgaactactaaatggtgcagaaactggcttataaactcaggtgcggaggatgtagtaccgtttctcagttcatcgtgtaggcgccccgaggaggcaccaagacagtctgcaacgccgcactcctaatctgtgtttgtttttggttaaatgggctgttgg

SEQ ID NO: 74621 - DNA, 342 bp, Zea Mays
cagcgcactcggccgttggattagaagtttacggctcacatcatacccacctgagatcgaatcggtatgctacgacatccgttggatcggacaacaacgctctagatttaaatacctacatgtcaattatcgtccgctcgatttgaatcggatggcacacgcctcatctggccgaagcggtattcctagtctaatctaggccatagatcacacgatcgacggtcagggcatgctccaccgaagaggtatgcctggtctaatctgagccgccgctcgtgagatcgacgccccacgctctttccctcaacccgacaacgctcaggcggcagagctcagctcccc

SEQ ID NO: 74622 - DNA, 414 bp, Zea Mays
cgtggtcaacttggctgtcgtgctcaacacagagttggaccacgcccttgatgagttgggcaaggttcgggcggaggttgcggaattgcgtgctgagtgcacagcacgccactatttggatggtggttctcccgcccctgtcgggattcagcacccttaccattcaccgccccgtggtcgcttcgactatggtaccccagactgcaggacccagatagatttggatccctagatcgacagagacagagtctgtaataattcttagttaagtgtctcagtctagtcagtatagttagagttagtttgcttaatttatgttggatgcttgttatgatggacatgtactgaagttggatctttgtaatgattgtcaccaaggtgtgggtatcccctgcaacttggtgtaattattaa

SEQ ID NO: 74623 - DNA, 391 bp, Zea Mays
caaaaacctcaaaacaaatcaccaagtgggggagcacattagagccattcaaaattctctaagtccccaaaaccacccctagcccaaagatcaaaggtgttcacctttgtgctggcgccaaaaccacttggaccaaatagcaaaagtggccaaattacccaaggcacatccctgaaaaatttgaattcaaatcgaggtcatttgacatcggttttgtcactggtgaatagtgcagacagacaagacttggcgcccacatatcttgtgatctagggcagatcttccattggaacttacacaaactagctagccctaggtgccaggaagatatcttacacacgacatttggtaagattcacacgttttggagctctgctggcgcaagaactcg

SEQ ID NO: 74624 - DNA, 655 bp, Zea Mays
ttgggcttgattgcacgtatagttttccctcacctggagtgcgttgttgatgacgtggaggtcatctaacttgtcggtcaccaagatgatcgaccaaaggtgaagatcctcacagtgagagattgaaggtgttagcgaaaatcgccatagcaacatgttttcccttgcgagggcccctatttggaacactaactgtccttatttagtactgcatggtccatcatgggatgatccacaaggtgggtatattcgtaagggacttggaggatgaaatgtgatggtgtattgtcaaaggatctaagatttggatagattcaagcaaccaaatcattgtaccctatgtctgtatggagtggttgatgcttgtattgcgtataggtgagtcgatgttgtgagccggtgtcacgagttgtctctagatgtggctgttttatagagccctttaagggttcctagctcccttttatatatgcaagggctagagttgcaggtcggttatgtgctatagatctaacttaagttataacccgagtataaatcacaacagagatcatagccaagtagaacttcatattgtgtttgcaagggatatgtcatcttgtattgtatatccttgatgacgtgggttgatccaccaataagatgtttagtctcc

SEQ ID NO: 74625 - DNA, 608 bp, Zea Mays
ttagccttctccaagggtgaaatggcagcagctccaagcattggagaatcttccccatcaccaaaaccccctgccatagaaccagcaccacccccctttccatctaatttatgttttttgaaagcatgttctagacttttatcctcttgatcagaaaccttgtccataccacccccaccatcattacgagactcctccctaaaaatcaccggagatgcaggaatgaagttcttatcctctatagaataggtgatctcgtatcccttcttgtcaaaaacaatatcggtggtcaggggtagtggatctctcctcatcacaccaacaagcagtctgatgacgcccatctttctataggtgtacatgtctacatcaagagtggcgccgattactgatcctagggcccaaaaacccaaataatgcctccaagcgtgaggtactcccctcacatgaacccaaacctcgtccaattgataactgggttcaacatcactagcatccttccattcagagatggtgagagtaactccatgatttttgagagtgaactccacatcagccatcctaatcagttcatcaactgagggaaataccaccaataaggaatcatc

SEQ ID NO: 74626 - DNA, 532 bp, Zea Mays
ggagattggaaggacttctcgtttagaccaaattgacgcattaaggcctcagtttcttcgtcttccagcgacttagctcgaaatttggtatcaatgggttggcttccattctgaagctcgagctcaacctcatgtatcattgcagagagattaaaatcctccacaacattatcacaaataggtccttcaattccatcgtcaaagcccaagccaagaatagcattgccagatgctagggcttccttttcaaactgcttccaaagtcgttctcttggcgactcggaatcactatctgagggttgcccaactgggctatgctctattccaagcatatccaggaactcattagcaacagaatctgttgaagcatccatgctgcgtgatctgcccttcctactggcagacttgtaactatcagtcacccctgtgcagctcaatcggcgagaatgcttatcttctacaactggtgattcaaattcctctggctcagcaactgagagctccttcaaaatacatttgtcctccagttccg

SEQ ID NO: 74627 - DNA, 811 bp, Zea Mays
cgccttcggcaggtacccagtttgggtcgggacgttggtacctcggttcctgatgctgaagaagtgcctgcgactgaatttactgacgctgatcccaatgggtgtacccagtttgttgctgatcctgatgggtgtaccgaatcagttgctgatcccaatgggtgtaccgaatcagttgctgatcccaatgggggtgctgcctgtgttgctaatgtggatgatgaggagggagaagatgaagttcctttgactcggaaaaacagtcggcaattcattgctagcggtgaaagtagtggagttccctctcctgctttgtctgctctcattggtctgcaagaactgtcactggccaattttgatcagactctcgaagatatggttccggaggatttgttatcggagccagcagatgatggtgtgatggaggtttgcgctgatgtgcttgatgctgggttgaggtcatcccgtgcctcgtcgaccttagagcgcgatcttgaggatcgggagactgacttgggtcgtcctggtctcatggaagtaattgagggcccatcagccttagaggtggctaccacggagagcttggaccccaaggatggtgttgacacatgcccagcccccgagaatgttgtcggggatgacttgatccgggtgggaagtgcaagccactgcccagcccccgagggtgctgccgggagtgatccggctcaagtgggcagtgcaaactatgacccagcccccgaggatgtccgagcggggtctttctctggtacttccatggacgttcatgcggggtcgtctccacactccg

SEQ ID NO: 74628 - DNA, 557 bp, Zea Mays
tttgcaattaactaccagatcaccggtgagcagcagtgctgtctatggcaccccacattacgggcagcatcctaacatcacattgcctctctttgaatcgcaggtatgtaaaccatcatatataagagtgaggtagagttgaatgagtgatctagtcactatatgttcacctagatgtatgatcttaattaccggtagtatttatatcgagagataactgaacatgcatgtttggttgcaaaatttcggtatataggtatcttcccggttgaagggacgacatcatgatcgaagtcagtcagcggactcaacaagcttgaactccgacgatccacaagacgtggaccttgagctcaagctatgattctaaaatgtccctagctccctttctcccctctcctcccttcgttgtgacgcgatagatttgttagtctgcttcatgggcattttcacttgtggtgcaataagtttctgaattggtgccactagcgctagtcgtcagaaccagtgcaatgcaagaggattatatttgccgccttttctgtaacgatatcgat

SEQ ID NO: 74629 - DNA, 760 bp, Zea Mays
cttgtgtcacatacaacttggctccccgtgccagctggccaaagttgaatttagagtggtagctgccgagattagcactagagacctagtgcaggaatatttggcaaatagaacatttccaacctctagcggctgggagatgccaaagaaaaaggaagggagaaaagtatgagcttgttcggctcccctatcgcttcaaatttgagaaacagttcaagaaaccatgcaatgaatggctagaaatgatcgagaccatgtgcaatgagattcttggaaattatacaaagaaggaggaccagctaatgccttcaatactcagccgaaacaaaggctgaaccgggtaatggatgcattgaacttcaaatacccagattatgagaggcttgacgaaggggccgggggtgtgaaaagaaaaaggtttgtcatcatcctaagcaggcaagctgcccggtccgtaaaataagatgaaaaggccttgaagaaagcaaaaatagtgctagagccgaaggcaacaatttctaagaagagaaagcttgaccaaataccctctacagaaccgaaggtacacgaagcagcagagaaaatccctctgtcgctgtctgctgccgaagtgctcgaaattttgaaggtaatgactgaatctctgccattcaagctgctaagtcctctgggattggaactgacaaaagttttacagaggaaggaaacgtcttcggctacagaagagaagattgaagagcaaagaaacaacgaattgtga

SEQ ID NO: 74630 - DNA, 364 bp, Zea Mays
ggagcgttgaataatcccttttatatcttccctctcaactaagttattcttcacataaaaccattcttccatccaggctcctggccaccttttccgaaatgttggaactagataacttacatcagagcgaggcacgaagccataacaaccaaagttgttgtgatactgctccttgctagtagccttcgtctcatacagtagctcgtgcatgttgcagaagcattttgcgcttggctctagcccttggcttctcatggcccaaacgaaaacccccatcttgataatggattcaggggtaacctgatgaaggaaaatttcgaaggtcttcagcacttcaaccaggaatttgcttagcggaaactga

SEQ ID NO: 74631 - DNA, 526 bp, Zea Mays
gcttcttgcggccttcctgctgctccaaatacatggtctttcccttgacctgcctgaaggggcgaggaggatcctcgtcatctcctctccctggcgccgacacattcttcgtgcacggcatcctgacttgacgactgcaaatgagagagagaagctaagcacaagtcgataatagccgatagaatatcaaaagagtggatgtctacctggaaagctcacaggagaggtgaaaatctaggcaagacaggagacggctcacgggcaggcaaggtcactgaaatgatagaagaggtgagcacatattagtcacatagtcataagtatatgaaatgtgaataaatacatacacagagaattatggcacagaaaacgagagatatggcgatcgagaggtcaaacgacgcgaaaatggcgtttgaacgagaaatattgccataggaggtttgaaattgaaaatgaggcatgaaatgatttggaattgagccgatacttcacgaataggtttatatgggtaaatatgagtgaa

SEQ ID NO: 74632 - DNA, 387 bp, Zea Mays
aaatggttaaaggtccaatttcatggaggaaaccctgcatatgcgatttgatcagagtcacaatacttgaacaacggttacaatccccaactacacagtgctaataaacagaggtgcctttcccctctcgaaagccaactcaccgagagaggttagccacagaaaaccctaaacatcagatctaaccgagcgctggagtaaatggaaagccatcgccattccttagcccttcctcatcatcattgagaatgtggattagagtaacagaacagaagtctggatgataaaggcgacaaacacaactacagaatcgactccaacataattacattaatgtctgcatgccgcaggatcgagtcttcacattcaatggcttcatcatcgtcg

SEQ ID NO: 74633 - DNA, 302 bp, Zea Mays
ctctgctcctggaggaagagcaggttgttgtcgcagccctagacgccaaggttgtggctgcggcacagcagatcccctcgtcgtccgcggctgcgcctcctcccccacccgtcggagatgagtttgtcgtcatcgccaacctgcatgcccaagcatgcggcgttcagaacatccgcaacatgatcggcattgttctggacccctcttcaatgaactacgcccgctggcgcgatcaggtgatgctcaccctcgagcgctacgaactcgctgcccatgtcctcctcggcactcctgccaacgat

SEQ ID NO: 74634 - DNA, 463 bp, Zea Mays
gcggcctggaggaggctgcacggggaggagcggcggcctggagcggcctgggggcagagagcggtggacttgagcgcggtctgggggcagagaacggtggacttgagcgcggtctggtgccctaaacgtgagcgcgaccaggtttggtgaattgggctgggccgccgtagaacgcccgaaacgtggcgtttcacgctatacaacgtttaaacgccaaaacgtggcgtttaaacgtagttaaatgacgttttacgaagaaaactaaaacgttttatagtttcagttttctccagcgttttatagtttaaacgtcgtttaaacgacgtttaaacgtcgttttaataagcatggataagatagctattggagacagctaaggctaggtcaggcaaaaataccccttttaacttttaagcggtaaagcgtaaggcgaggcaatgcgttaaatatatttaaaaataga

SEQ ID NO: 74635 - DNA, 796 bp, Zea Mays
gccgaacacaccctcaaccaaccggaccaagaccctgattctatcctaacggttttcgcagattcgtgagcgaaggggcaatcagcgaaggcatccttcgctctaacagaatgtcgcggagggattacatcatgcggagacctcaagatggccgagcaaccgaagaccaaacacggcctcgatcatagagcgaagaccatatttcttgtcttgtactgaccatacacaggatcacaagcggaggggtcttcgatccggcgggcaaccacaacaagtcatcgatagccgaggccttcatctcacatcactaaaagactcacccagccagtcgcaaccaaggggaacattgacgcgaaggctctcggagcagaggctacaggtcgaccctgtactcccccgttgcacctgaagacatcgccaagggcccacccgtaagcgtagtgtgtgggtgtgatgtctagtgtgtgcgaattattttacatgcagcattgtaattactccattacacgagatatccatcaaatatagttggtagccggaggtagagacatactttggatcacctacccccagatagtcctataaataccatcgtcctgtagcaggatgagacatacataacaagaagctatagtttcccgcagtttgtttcattgtgcacttgagctctcactttctacttgagtgtttgggtccacctgacagcgcagccgcgtgttagtgccaatagttttgatggtgtgttatgtctgggtgtaatttgtttggtggatttagtggaggttataggtgtgca

SEQ ID NO: 74636 - DNA, 718 bp, Zea Mays
gcggagaatcgagctccgacgaactcataccggccacgatacttaaggactggtgctctaatttggctaagacgtaattcaacacctatcaagaatttcccctcaatcaatttcactagtggagctttaaatcgtcctgtccacgaagacagcgtagacaatagatgaacaaacgtgttcccggtgatctagggcagtctagttcaattaaatgggtcgagtagcattaggagaacctaaggacactagaacggaagagcagagagtataaacaggcctgtatcaagctagccacggcgaggtttctttcacggtggcggaaatcggtttgggggaaaagagcaattcgtgggctctggtgagtaattgagggcacaagcggttggattggatgctggattacctaacggagccgagggagtgctcaatttatagcgtgtttgagcggtggctagtaaatttgatggagatgcgcggcggccagagaagaggaagggcactggcgcaaacgattagtggctttcaccgtggcggactccccggcgacgagctagtgatatagagcggttgacggcgacgtggtgaagcttcagggcacgtggcatccgatcgacgggcggccaactccggtgaacttatctttgccggccgcaaagcaacaggggtacgacggccagcctccggtgttatcctgtggcgaagatcttttacccagaag

SEQ ID NO: 74637 - DNA, 299 bp, Zea Mays
tgttgatattaggataaaggattggcgaaaagtgcctaaagtggtaaaatcaaacctatgggaggatgtgtcaaagaaatttttcatgccaagggatgaaacccataccctcaatgtgaagaaggtcgctttgaaatctatgagtaaggattgacttctcgagattgtttggttcctgtttgcatcattttttgggatttatggtttattttccttttattcgtacaggccatgcatggaaggatttcaagtggaaactaaatataaattacgtcaagaagaacaaaactccatttgag

SEQ ID NO: 74638 - DNA, 513 bp, Zea Mays
tcaaacttatgatattaatattgtaacatgcagaatgttggtctactaataatatgacacatgcttaacatttaagtgtcacatgtgaatgcagatgttgcattatatttgaaataatacaaaagcacatcgagtcctaaatgatgatataagggataggagaagggtagcacattaaagaaaaacttgtcaaacattgattgagatggtttggatatgttcagtggagaccactagagccacgagagaacaataagatacaacaacaatttaaagatggccaaggtcgatcaaacttgacatggatggtcgcaataaaaagggacttgagagtatgaaatatacctataaaaattgtccttggatgggagtgtatagaaagtagatggtttgaaccataaacgggctttaaaaacctccatcatagggcgccctataggcattgcagtaaaaggttgtacaaggatttgaatgtggaccgacaaggggagacctctcatcgtactgctctaa

SEQ ID NO: 74639 - DNA, 291 bp, Zea Mays
cccggcctccgaagacagaggacatatcttcgtgctctctggtaaggtgatttccacatatctcattgcacttttcctctatcagtctaagccatccaggtgagggagctttgtgtgaagattgttccttgaaatcaaaagccagcgtaacaagttcttcatcctttgacttcacctccttcgttagtttccacccagtctaagttggataaatgttataggtaagtgcatcttgaatcaaatcttgagactcaatcttcttaacaactgtatcaaaggctttgtaacact

SEQ ID NO: 74640 - DNA, 649 bp, Zea Mays
cccgccacgggggcagaaaagaaagggtgcgacttctggaaaggttgctgcttcgactgctccaagcgagcctacgccgaagagtaaaaaattaaaggtccttacccaccgaccacgctatattgaaccggtcgcagtgcctaagtttggctgggagacttcttcggctgctgaaccaatgaagctcattccttctacacagaaggctaaagagccagctataatgccgaaggtaacttcggctaaattaattgaaagaaaggttaacgaaggtaaagctgaagagtcgaaagctgaagaagtaacgaagatgtcagggatttaagttattcgacagaagcaacagtgccgtcggcagaaaaaggttctgccataacacccaaaagaagaaggatggtaaatgtattagatattttagaaacatcgggttccataagccctgcctccataaagaaggttgtcgaaactgtcaaagcgcagactgaagctgatactaagcagataaaaagtaaagctgcaacaattgaggctggaaccgaggccaagcccacagtgcctgttgagacgaagcttgccacaagcgagcaaggggccaaaggagtacctccaaatactaatatagcttttgagagaagtgtggccaaagaag

SEQ ID NO: 74641 - DNA, 551 bp, Zea Mays
cacaagcctagcattgtatttatcgacagtaccatatgtttcagttttttcttaaatatccatttacatcccacaggtttacacccaactggcaggtcacatatttcctaagtccatttgttagaatggactccatttcattgtgaactgcctccttccagcgctctgcatctggcgatgcatatgcctctgcaagggtttttggtgtatcatccacaatataaacaataaagtcatcactaaaggatttttcagtactttatcttttgctcctacgtggagctaccatattgttatcctcaatgtgttgttcagaataagcaggaggtaaagaaactggattaggttcaagagtataactagtagatgcctcactacgtgctgcaactctatccttcataaggaatatatcttcgaaaaaggaggcatcacgagattcagtcacggtgttaacatgcacatctggaaaatcagatttaatcaccagaaatctataggctgcactattatgcgcatatcctagaaagacacaatcaacggttttttgtccc

SEQ ID NO: 74642 - DNA, 1074 bp, Zea Mays
acgtggctacgacgggatgcgatgtccttaggccacactcgggtaaacgtgcggcaccgaaggaatgtcgagtggtcaccattagagcacaaaccttacgcccacgtgtacaaacctaggcacaccaccactgtgttgtggggccagtctgtgggggatggatatcccccgggccaacacccgcatggaaacgcgcctggcttccccctatgatgtcctatggtgggccagccgaaagtaactaggcaaagcaagtccattctgaaccagcaaaggccaacgcccgagttaggtgccacaagagcacgagtatatcgtgcggtaactcgggcggatgagtgaagaggattccgagatgtaggaagacagttcactacaaactgggagataggcgaatggattatgtttatcacctgtgcgggatagctatccttggtcgtgtatataaggctaagaggcaccactaccattttcatctcaccttagcccaacctactcataattcacggtttgtaatctcataccagtaccaagatcatcacatgacgtagggtgttacgcctttcgcgcggtctgaacctgtataagcttctgtgttcctcctgtcgtgccaccgcacgaaccatcgagtcgcgatcaacgacgtcgtcctgcccaaaagcaccacgtgggtaaccccgtggtgtgcggtcgggtaataaacatcgatacagtcaagcccggctgttggatgattttagtaccaaaatcccaatagtgacccgaataattggaaggactggacagtacactataccgggtgtatgtctacaacacactaaaggatgatgtagggctcatgacgacgagaggagtcgtgttttgtacgaccgcaccgtgagactgatctgtgggacttgtaaggtttcggggactttgttggtttcctggtcttcgtgcaagcagtctagcgtagctcgatctagcatagaggctaagtatgtcactatcgctagatgttgcttgcaattgttatgatgatggctactttacaaggttttggcttggattttcatcatgtgcctctgctttgcg

SEQ ID NO: 74643 - DNA, 609 bp, Zea Mays
catgcgaagctaaggtcaacgctaatgctcaaaggcgagattcttaccagagggtgcgacgcgaagggccctcccacgacacccagcgacgaaacgacggaggagctcactgtgaagcaattaacaagctctggagattccaccgatgccacaaacagatgccacagggatcgaagatcatcccgggttgcgccccgaaggctatggggcagcagggccctggttccgcgtcggtgatcccctcctttctctctctctctacgggacaaaacttcttctctctcgatgaaccgatccctctctctctcttgctccatggcgatggtggctcggttgatgggagggcctgggttctatggtgcgagtgcaatccggatttgacttgatcactagaatcacgcgcgcagagatcagttgatttggttggagtctgcctcgatcggaagctaggaggagactctgtccgcggggcccacgtgccagggaaatcagggtacggctggttaggctgacgacctggccctagtcgtcagcgcgtgtctgcggtagaatgggctaagtgagtggagaggcagaaggatgggccggggcgtgggtgtttcggcccac

SEQ ID NO: 74644 - DNA, 1464 bp, Zea Mays
cctcgtacggtgtcatctcgttgagtgccttggtggacgagcggttgaggatgtagaccgatttggactcctgcgtaccttggcaagaaggcgacgagagggatcccagatcctcatgactctgtgctcaacctccacgcgcgaaccgttctcatccaactgtcccaagctgatgatagagttcctcaacgcggggatgtagtagactccggtgagcagcctgtgctcaccagacgcggcggtgaagatgactaagtcggcgcccttgatctctacgccggaggcgtccccaaacttgacggagcctcggacgctagagtcaagctcggtgaagaacttccgtcggccggtcatgtgatgagtggcgtcggtgtcgaggcaccatccttcgatcatgtctttgctggagccatcgccgaggaaagcgtgtgctttcgactcatcaaggtggaggagtgccgctgcggccggtgtcgctggagatagctcgatgcttgcatgtgctaggtgcagagcctcctccgcctgtgcgacgttggcctggccacgtcgtggttgtcgacagtccctggcccagtggccaagcttgccgcagttgtgacagtcgtcgtctcgtgccggcttgttgccgacgacgccgccttgggcacctccacggtcaccaccctcagcatgtcctcgcaccccggcctaggcgtctccacgcgccttgcgcggcttgccgcgtttgcggcctcgtgtcgaggactcccccttcttgtcaccctagcaggcctcccactgctcccgagtgagatgtagcttcccgccgatagtgataggcccagagggagcctgtggttcgtcgctgtcgaccaccttgagacgacctatcgcctcttcgattgtcatcgtggagaggtctagaagagactcgatcgagcgagcaatctgtttgtacatctcggggatgcaacggaagagcttctcaacaactctctcctcatcgtaggtgtcgtcgccgaactgcaccatcttctgcaacagtgttgaggcggagagcaaagtcatcaacatcctcacctggcttgaaggccatgttctcccactccttgcgaagtgcctgcagtgtggtcttgcgggcacggtcactgccgatgcgggtcgcagcgatggcgtctcaggcctccttggcagtccgattctaggaaagccaaaactgcatatcgggcgggactgcagcaatgagggtatctagcgcccgtcggtcctcgtggtagtcgacgtcgtcgtaccgaactgcttcccacatgtggcgaaccaggagttcatcaccacggaccactcgacgtagttggtcttggtgagggtaggccacccatcgctgggaccgatgtccctgacaatggcctgggtcatgcggcgactatggtaccgatccggggagggagagtcgcgccacctatagaggccgcgatctccgtc

SEQ ID NO: 74645 - DNA, 293 bp, Zea Mays
gaatttaccatggttagaaagaggcggggaaaggtctcgcgagagttaaagcttatgcccgagacgcactacgggtaggcgaataactagacgttacgtgctctaattccaattggttctaacaaaaggattagctacatgcactaatgtaaacatgaccacttttagtagattaacattgaatgagatagacggttagctatacaaattaactaacgtaaccaatttccaaattgagactcctatcttattaataaaaacacgtgattagcgagcataggacacgggggggg

SEQ ID NO: 74646 - DNA, 305 bp, Zea Mays
aaattatagagctgcatgaatttattaatcggtgcaggagtatcttggtagcggattcggatgtgaccgagcggagcagcatttatatagaagctgaagcgggccggccagttcggtacctgttgctttgctaggtactgttactgtatctttccatcacgtacacattcaaagagaagattgacgaagctctgaagaaagtttttagcttgccatggccgtgtttccgcgttgacctggaccgggaatataatgagagaatggcatcaggacaagctaggacaagacgttccataatgtccggc

SEQ ID NO: 74647 - DNA, 471 bp, Zea Mays
aaggaacggtggaaccaaggattacctcaaatcgctgaagaagggacagactgcacgatttcgggacttgtgcgtgttcgccaggtctccaacgtggcagatctacatgagcaacatgaacgatgagccaatgcacatgaatccaatgcagagacggaaaggaatggaaacaaaagaaatagggatccgaagaaaaggaacggacgacggcgatggagtcgacgagaagaaaggagcgcctgccagtcagaggggaaaggaagacaacaacagaggtacttcatataatgggattgggagaaagcagcggcatgggcgctgcggtggaaggacaggaacacagtgggctgacgctgttcaggaagctcgacgaaggacgactaaatagtgcaacgccgctgttgagaaagcacgcgacggacacggagcacggtcagaggcacgacaaggcgtggatttattggattttgg

SEQ ID NO: 74648 - DNA, 771 bp, Zea Mays
gcctttcagagggcaacggttcatcgggggcgtggccagtcaggcgagggccttgccggtccatgccatctgattccattttcactgtaacttcctgatattttttgttttccccctaatggctcccctcagtctgttgccttcatgttgtgcgtgaggaaagtggtttccaagaggaggagaatgatgcttatcatcagcgaggaaagtggggcggttgcgctgtcgagttcctccttgccaatactcccgtagggtgccaccgcggtcgatgtctcaggttcgtctctcttgacgcctccaaactgctcttgcgtgagtccgatgggggcggctaaagttcacccctttttcttttatagtgggctcagaagttgttttgtcgatactatggaggttgccctagactgcgctgctgggccttggtggccagccaggtgtctagctcgctccagattgctctactaaaggcgatgacccctggccctgtgtcgggagctaaacaaggaaagcgatgcgatcgagaaggcattgtggcacaagcttgattggctttcaacgatgcgccaatagcttgcggtaagccgcacgtgggtggcttggtgagggaaacattcctcttgctaatcaacttgttgtccgatttttgtgtgttcattcactcatagggatgctggtgggcaggtcccatcttcttcttgaccaaagggaggcatgggcgttccaccagtgatcttcaggtagcgaaaagcgaggccgtcgaagcccgca

SEQ ID NO: 74649 - DNA, 353 bp, Zea Mays
gccccaattgccagaggattttccctaacacgttcactaactgatgagcaccagggaccgtgatcttatccccgacattagcccccctcctctcgggggcttttcttaggtcagggcgttgccttgccccttatcctagcgcacactttcatagtttcgtgcatttggtgtttcgtctcgttccatacatggcgcttggaatccatctcgttccgctacgcctcacacctttctataaatgattctttcctcgagcgactttgacatactttgccttgttcccttcgctaaaggatggtttcttcgtgatcccctatggacccaaaaaaagtgtcgtgcggaggagcagcccc

SEQ ID NO: 74650 - DNA, 973 bp, Zea Mays
tcccgaccagcttgtattctctactgcaagcacttaggtgcaagtaatataagtcgcatcccccctgctgaaagtagggtcttcttttgctcgaaccaggatagagacttgtgtctccttgcatcacccatcggggctagggcacgcaacactaattcacttgtcggtaggatccttaggtcaaaacaccgacatttggcgcaccaggtaggggctcgctgcgtgcagacaccacgttcccatcaaggctccaaatggccaaccccagcaccctttgcgactcggtgcggtgatctggttcgggagtcttgagttcatgtcacttcacatcgactacgacatggtgctcctcccacctagacactcggctgatgttgactaccacttctcctagtcagggggcgcaaggccactcctgctcccctggtccgtgaaggaacggccagacttcctcccccgtccttctcgccgcaggagacggagacgaaacaactgcaaccgtgccacgaataccgcagaaggccgctccttcaactgttccctgtgtgactgcaagccccagagtaggctcgaacatggcctcgggaagacttccgcctcgcccaagcgtggcttcggccttgatagtatagacaaaaggatacccaacgtcaccaaaaaactatagagctgacgccagatgccctacgtattgccaggagctttttgccatacttaccactgctccaaccactacgactcggacagctcctccatcggacaggttcaggtacgtgttcgagccccggaccttggcctcggctctctgctcggtgaaagatgtaaatacaggaaccatattaactgttgtagctgcaatgacattaactgttgtagctgcaatgacattaactctggatgggtatcgatccatatattgtatgtattgaagtgatatcctcatcaatgagtcatcagaggctgagtgccttag

SEQ ID NO: 74651 - DNA, 630 bp, Zea Mays
cctccagagggacgaaggtgcccttgacatcgtggtggttggtggcgatgcatccctaaaccctatttatgcacatatgagagcatcagtagaactgaagcagagagaagttactaaagatgtagtggaaaatgcttttggtgctgaggaagaggaatatgaaggctagcccacgaagctaagctatatcgacatcgatcgacctattatgaagaccaatgacgtgaagattatcaaaaagcttggtatgttggggatgacaacaagatccattttctcagtgaggagacaactcccaagccgaaggacagtgaaattgtcgtcttcaagagcttcttccgagctgggcttcaactaccgatgtacaggacgatcgccaaagttttaaagaaatatgaagtttatatgcatcagctgacactgaatgccatagtttggcttagtttttcatatgggccgtgcggagttaggatgttcacatagatgccgaagtttttttgtagagtacatgaatttcattattagatgaaggtcaggctttcagacaaactgcataccaactttggttgttataacttcacctatcacaaggattcaaaattccctatgatggcttaccagacgaagtag

SEQ ID NO: 74652 - DNA, 433 bp, Zea Mays
caaataatcaattaattaaccgaaacatgtgaattgacgctaatcaccttaactgtattcataacgtgcaaattcacactacaaattagttttaactaaattggtattttctaataaccgaggaacaaattaacaattaattaaacaaatattacatgtgttatggcaaaataatatttttatagtgtgcgcgacattgttacgaagctagcgcgattgacacggaatcagtcgaacttctagcgcaaaagttgtcgcgtatttaataaatcgtgggttgaatagtgacgtggcgtgattctatcggtcagaaccgagcctcatagaggaccacacgaggctcagccacaacaaatcacgaaggggtgggatcaattgtgaccacagccattctcttcctcctctatcgctacgcacgcagggaccggatgcc

SEQ ID NO: 74653 - DNA, 1083 bp, Zea Mays
tgcaaatcagaaatagcaaagcatgcttgtcgttcatttcagtttctatttatccttagcacacctaaggtgcagatcccacttgacattaacatgttagtgtttcccttggttatttcgtttgatagaactatagcccaacttgtcgcgaagtcgcttcactcaaactggtggaagaatacttgttgtgagagaagggattgttttttgtcacaaagttaatgcatccttttattcaattatttgttctttttacaatcctttgcaaaattcctaaatccctagctgaacatatcattacactattagatagtacatgactaacattagaactataaggtttcatatcttagtgcacatatcttagctagaaccaacatcatgtcatttaggtagactcttacatatgtttacatacaactcactctttctaatttaacagttgcaggaaactcccactgataaaggtaaaaagtttgagcttcatcttcagtctcctccaaggaggtgagcctcatttaatgttcacctggaaactgggttaagatggtggtcaatcactttagtttttttgcaaaacaataaaatcttgtactgtcatcaatcgccaatccctatcatactattatgtacaatcttttattgagcgcgaaagagtagaaagagctaacatagtaagccaatgcacaagaaagtctcactaggaattcataataaaaaatacccaaaactaaaagaaaccaatactatgtagcgtatatgaattcattataaaaaaatataaatgaatccatcttagaaaataccaaataacaatgattcctctgacctttcaataatagcatagaaactacacctttcagaccattgccttgattgtttcatatgttttgcctaaaaatgatacaacttacatctagaatttttgtgtggattttatttgtcatatctatggtctgcaggcttccagctattccagatcagaatcttgtgtgttcaaattggtgccttcctattctgtgtacaaaaataattgctaaatactgattacatgacaaaaccactttgtcaagactctacata

SEQ ID NO: 74654 - DNA, 657 bp, Zea Mays
gccaggctcaagtatagccaggtaaccaaacagaccttatacatactagatgaggctagttccaacctagaatgataacgttcggtgatgtggcaacatatgatcggtactgaccacgtcggcttcaacgtcggcccgtttagccagtcagttggtggacctatggataggtcggattagtattgactatgttagatcgtatgtcagttggtttgaccatcaaaaccgatcgtttcgttgaatggtcgggtcagtatcgattgaccggttcgacgtggccgatcctgctgattcgttattcagtatcgatctaaaccagtctatacatatcaatattttttgaggtggcacacattcttgttgatccacatttgtgccatgtcaggtagtcattacatgtatctgttttaatccgtttgtactctaaaaaaatccaatttcaaaccctaaaatctgacctataaatagaagggtgttattgagttcattcatagctctcgctctctatagaagggtgtgattgggttcattcatagctctcactctctattccactcatcttgtttcatattttagtttctcactttattttaaatggatcgtagatagagtccaaacatttaaaccttcaccgaattaatcatcgatcggtctcca

SEQ ID NO: 74655 - DNA, 536 bp, Zea Mays
taggactgtgtcttcgtggtgattggcggtcctgcagatttcgctcggtcgctaggagcagcagctctgagaagaaataattcacagcttgggtagatttgttccccccacgcagcggttgggcctcattattgatttgttcattcaatgtgcacgtatacgatgatgtctcagggccggctgagggaccgcaggagggagggaggcagagctcgatcgggcggaactacaacctgggtaattaaaaaaacgaagtgcaacattgcatggtacacaacacagaactagctacaagtagatagcgtatgcatgcagtggagttgaactcgctcgctcagtggcggggctgggcttgttggttgtactagctagctaggctgctgaactgatgatcaggcagaggcaggcattcatcgtcgtaggacgtactactccgcatcgtagtaacacgtccctgcatgctcccgggccccggccgactatggactgcactgcactgaccccgtgggcacagtataccctatatactctcgtac

SEQ ID NO: 74656 - DNA, 1946 bp, Zea Mays
ccacatcgttcaagaatagggaacgggccaatgtatcggggtgctaactttcctttaaccccgaatcgactaataccctttatcggtgatactttcaagtacacatgaggttggacggacggtctcttatgcattgactgtaaagtatgcctacgcgaaggccgctgattgtatagtggatggcaattttgtcatcaatcagggcagttgcgacttcaggaggaggaactttttataatagtcatgaaggctttccttttcttgttgtatgcagagggacaattctgccaatgtggttgtttcaggtctatagccttggaagttgagtaggaacttatgtaaagggtcttccaagaatccattgatagaggggataatcttgaataccatgtgagggtggtgccttcaagggcaatgatgaatgacttgtccatagtggtgtcgtctcccctatggatgaaacggtgacttggtagctcataatgtactgtgttgggtttgtgcagtctttgtattttggataagtgctcgctctataattttgtggccacagagaggcctacaactatggtgacaggggcttcgtttgtcaggatagttcaatccttggaaggcaacttatgcgatggctggcctatggaaatgataaatgttttgattggcggctccagcaggctgttggtgggggaggtcttcgcgttgcatctcagcaatttcttgctccagtgctctggctttttcttcctcatccatgatctgttgcctcactctgacctgcatgttggtactcttccttttgccatgagtacctcactttgcttctgaaggtgattattttttatgcgaagggcacatagtttgagttgatctttagctgagatgcccaagtcttcaccttcttgtatgatgtatgcggccctgcgggacaaagcccgatgggtcgtcgtcgcgagggtggtcttctaaactgcatgtatgaatgttgtcttcgggagtaggtgggtctttggtttgagtatgcttgttgttgatggtcgccgcttcgttgttcttggctacggcaggaagggtgtcgttagcgagggtagctttgcctttctttttgacgagggctacctttgtagtgtagtccagggaggtgttggctctggtggttacttttttcggtgccattgtgagttaacgatgggcaccaaatgttgggaccgactgacatgtggacaggtgggcgcgaacactcgacgaatgaaagagcttaggtgcacaacaagatagtaggtagggaactgcaatgtctagttatgtgtgtcctatctatgtatagagcgtgggtatttataggtaactaggcagacaggtgggtcctaagtacctttatacaccgattacctgctacattcctagaatattcccctcaacgggtcattacagtgtactaaagtacagtaacccaaacatactctagaatctgccccacgaaggggcttacaagtgggcccggacgatggtgggactaggcctgtgtcccacgatagtttggcgtggcctttgcttgcgagtcgcacccttgactttgttgtggcttggacttcactgtcgagggaggggttgagatttcggaacgcatgggggagctgcagcaagcccccctcttctagtgtggcccttcgctttttcgtctccaaaggccctagtcgaggaccttgacactggtacgggttgaagtaccccttcgctatgtaacctgcgctaaaacatgttcaattggagccagattagtctaattgaggtcgtgttcgtccttcgctccaaaagtattatttttattaaatctgtaaggatttgtgattttattattaaaaaccccataaaacttctgaaaatatgctggtgatcttttggttcgtttttaactctttctggatttttaaaagctaactcacaag

SEQ ID NO: 74657 - DNA, 557 bp, Zea Mays
taaagtaacatatgtggtaaaattttagatggatttaccttgtctaatgaatcggacatgaatggatcaaacaaagacatagaaccattggacatgaaagcgaaacataaacctccgtgtttggagactcacgcaaaacatcagcgatgctaattatggattcctcctgtgactccaatcagacacaaacacaagtagccacgttcctaccctaaacacccaatttcatgcctttagccgctagctcgaaggatgaatagaaaggccacgtcgctgcatccaaagggggatgaaaatggatctgcgatggctcttgcgcgtcctggcactgatgggcggagaggtccttgcaaggcgcctccactgtcacagtctatttctccatatccgatcgtctgcatatgagaaactctgcatccgatggattcatggatttcactggcgctttcggagcagcgtcgcgaccaggcttcatctccctccgtcgacgccgcctccgcctcctccaccgccattgtaccctctcccatctcctctaccgctgccgctgaaacctc

SEQ ID NO: 74658 - DNA, 433 bp, Zea Mays
aaagccttcacttgctccaatgcacgactggcccttcccctaacaacaacgtgatcatgcgaccccacatccgatcatacaacgctctagcagacctcttcggtacaacttcttcgacctagaacaccgcccaattgaggtcctcgttgccttagtcaaaagcttcgaattgtcgacaacctttgcgggacaaggcatttacaacgccttcgcaagtattgaggaaggcgtaggacatcggacccgtcatgatgggcgggagagactctagctcctcttgcagccaactaaggaagcaagtccccacctcccctagatccatcgaagggggctgtctcagcacctaaatcacgataggtgtaaaaaagcgtatgcgcctgatccacaccggcccgcatggtagcttcctccttatcaagataagtccttgcgt

SEQ ID NO: 74659 - DNA, 312 bp, Zea Mays
ccggacttagcacaacaagtgcgcaaaaaacgaagtctatcgcgaagactatccgcgcagaagtcgcctaaaaggtgcagccggacttagcacaacaagtgcgcaaaaaacgaagtctatcgcgaagactatccgcgcagaagtcgcctaaaaggtgcagccggaccaagcacaaacgcgcaaaaatccgaagtctatcgcaggaactgcctaagggcgcagccagcacagtataacaaaaagcagaaacaacagcaagaccaatcaatcaaccacacgaggcacaggcacgcgagggcacacaactccatt

SEQ ID NO: 74660 - DNA, 613 bp, Zea Mays
cctgcgctgcccactcgacaagcctcgcttcttcgctccggcgcgcggtgaggtcgcgctccggctctacttggcgccgtacgggccgccggccactctcgccgccgctgggaatgcctactctagcacgtatgccacaaccttcaacgacaccgcctccatggccggcggcccagagacagtcgtgggaggcgcggacacgcaatcgtcccctgcaccggtgaccaagaagaaagaaccggtgcaggagccggcggtgcatgtcttcaactccatcccaacacagtccagcaccgggtcactgatattcccgccaccgccgccgccgtccatgccaccgcccaccggagccgcaaaggccaccaagaaggcggcgcctggcaccgccggcgacgccaaggcggcggagtatctcatggttgataagctggagttcctgtacgtcaacgtagtgcgcgccaggggcctctccggcactgacctcacgctcggaactgatccgtacgtggaggtccgagtgggcaactactctgcggtgacacgtcatctcgtcaggaatcatgaaccagagtggaaccaggtgttcgccttctccaaggatcagctgcaggcg

SEQ ID NO: 74661 - DNA, 471 bp, Zea Mays
ctcggatataggaaaaatgccttcatgcacctgatctgcttatgcattaaattccagtattatttgtctgctttatttctcgtaatagataattagcataaattattaaaatgtgtgaaggatatagtgcgcatactcaaatcgctctgaatatttgtgttgttttgagtttttggactcatgtcgagcgattaaattatatagtgggtactcagacacgtcgatcagactacgttattaatcgaccgagttatggcattagctgagcgctggctgcgccctggcaacatgacgcagtatttgtgtcgtacgaacttggctgcgtcatgtgattgctatgtaacactctcgtttattcggacagctcccgttgagtcgaaccgccatcactgagtcatgtatttttcgcatgctccgtaggcactgtctgtctgtcgtgatcattgagccacaattgcgcctgttgcgcac

SEQ ID NO: 74662 - DNA, 569 bp, Zea Mays
caacggtgtccgcctcgcccgagccgcgtcgggcaagaaggacaagctcagggcaagatcatctgaagtccgccgggggacagccgcattcaatgtgcatacctaccccactcaggcttgtgggtgtatagggacaataaaatcgcattaatgtcaaagattcaccaactgtgattatgtgtgtgggcactgtacatgcacgtcgtctgccaactcctgacgggacgtgtaatacgacatgggcgcaagccagcccttgggcgcaaacttcgtctctcccgaagcagaactcgccctcaggacaacactctaccttgcccgaacctagtctcggctgcctactcccccgcaaatctcgcaggaggccactacttcaactatagcgcacgtcttcaaatctcagaacgagttcggtcgcgacctcaggcggacttccgcctcgctcgagcccggctctaacctcgatatctggaaaggggaacgccccaacatcattagatactgcagagctgacgcaccgcttaagaagatttttcccatacataacactgtgtcaaccactacggtat

SEQ ID NO: 74663 - DNA, 444 bp, Zea Mays
caaacagacccttagagcatctccagtagttatgtaaacaagtccctaaatatgaatttaacaagttttcgataaaaactattctccaacagttatgtaaatcagttccctaaatgtacaaactccctacaaaacacaatttcatccctacatttaccaaccttgttgggactcactaaatcaacgttggtactaaatccatcatgaaaataatacttttgccactgttttgcgctgtcccactgtcctgttgaccacaaatccatctctaacgcctagatgtcttgtgccgtcactgttagacaacctcttatgcggaggcgtcgttagagcacatcctgtgatgtcttcgcgtcatcgccacgtccgtatggtcttccatcgataacttcgacatcagggaaggttgttgatattgatttctaccgccgactcaattaaaat

SEQ ID NO: 74664 - DNA, 426 bp, Zea Mays
gcagaattggctcgagtccaagcagagctagcatagctcaccttagagaaggatgaggaaatttaggccagggatgtggctatacttgacaatgtgttgtggattggtgaatgccaggactaccgggcaatggtagtagagatcatcaaggaaaggaatgcagcctggtccgagataactcatcttagagcgattgaggttaacctgatgtagcggctgaacaatgcagaggcatggaattctaacctgcattaagaggttcattagttgcatgcctaaacccagttaacttgccagaacttgaggaagtagatgtagctgtagcagacgacagtggggcagtctctgaggtcggtaatgcgcagaattagtcagttagcccatcgttaggtgctagactaatttcttttggttagcgttcctagg

SEQ ID NO: 74665 - DNA, 388 bp, Zea Mays
tgatgcacgttatataaacttgattctacatttcgtggattagtcaagtttgaggatggatccatggagaaaattgaagggcatggaaccattgtcttccttagcaaccctggtgaacatcgatgactcactggggtgtactacatccccaagcttagggaaaacatcataagtcctaagcaagttgatgaagaaggatgcaacatcaacattaaggtaggtgtgctatgcattcgtgatgagcatgtccatctacttactaaggttcgatgcaccccaaggtggttatatacttaagaactcaggaatgagcagctaatttatctcatgtgcagaacagaaaacacatcctagaagtggcatgcaaggtatggccatctaaattttc

SEQ ID NO: 74666 - DNA, 859 bp, Zea Mays
gtgagttacttaatgctgatacaaaggataaggccatactcctaattcactcaagcctaaattggtgacttcgatcaattcagccaactcagccatataccaatgacctacacattcttgataaattgcctaatctgtctaaaaaaattaacctaccagtttgacctacatattttcaatgatatacatcattgtttttccaagccctgcctaatacaaagtcacccaactgaaaattgacataacacactcaacctgtactaatctagagcttattcaatctaatgtgggtcacttaacaagctaacactagtgaaataaactagatcctactcctataaactttgttctcccctcacacacttaaacctaaaaaaaattagtgcattagaccaactcgaccaatggcaaaagagttaacccaaccttagagtcatgatgaattgattaattatctgtccccaaacatcaaacaaacttttaacctacatcatgtagtctatctcatccatatctatcttaaccataattctcaactccgatgatatacactaacctcgaatcaataagaccaatatcagagaagaaaaggtcaacatcgacaaggaaggatataacagtcaaagcaaatctcgagatgaatcaagacttaaacatttcggatgaagacttttccttgccataatctttcttacctcaacatgtccagcttatatcgtacaaaataaatggctggatacctatgatctcctaatcacccactaatgattatatatatatatatatagactctggatttttgaaccaattatagattaaaagccgaattacaaaccaatccttctgtattccttttctt

SEQ ID NO: 74667 - DNA, 836 bp, Zea Mays
ataatttgactgagtcgatcaaattccttgctggtaaccatcagagagactcacgcagtaagtattcagatattttagcagatacacgtcgccttttctcggcccctcagttagatgttacagaacataaggttaaggccttgaatgtgtccatacttcaaatcggcaataaactcatccagcggcaaacggatgactggctgtcatattcaggatcaaaacaagcgtacttattatcggaggagtctccagcatgaaaagcttcgctgtctagtggagtctctaggatgatgtgaccacacgtccacattcaatgaaccggtaaagaagaaagaaaaaaatgggaaatgacactccactatacgaagtgcaggtggttgtgctgtgcgtattaatttgtaacacttttgtcactcatccagttaacatgtcgagtaccgaggaacaccaacgtatcaacaagttgtttttttttttggtggggtggggggtcaacttgtgaaatcagtcccaaaactatgtgctagccatggaaactaactgcagaacatttgacaggacacccaaacttacggtttagcaaatgctactctgactgaatcgagaaatgcacagagctaaagtacaatggagacggcagaattgaaggcatgcagtgctgaactgatgatgaagcaaagatcatacttacagacccaaaaaaaaaggcggcagcgtcccaagcgtccggccaatctgagttgatcagggacacaggccaagaacagagaaatgttagtgcgctacttgccttggtccaggctgctggctctggctggtctctggtcgctaacctc

SEQ ID NO: 74668 - DNA, 684 bp, Zea Mays
gaaaagtacaggggtcttggagaaaaattcgtaagacatagggtgcgccacaaatggacggcgagttctatttcaaaaagcccggggtctcttatgctaaagtgccagagcggaagggtatcagatagctctggccgtccgatcagaattggacgcgcaagattagatctgggcctgttatgaatccgcacccgtttcaggtcgccggatccgaaatccaacgaccatgttcgagtctaccaattcggtgcgcgaaatctaatctgaggtgctgattaacggaccaacggttcgatttcccccaccgtcacacccaagcagaggcacggcggcgcccagctcctacgacgacgcgacctaccggagtaccgcgccagaccctgagactcatccaaccctatcctgctagggcataattgcgacggggagtgtgacgaagcactggaataagttcatgccggtgattgggagggcaggaaggcagagccacgacgttggcggcttcacacactccgacgagaaattctcgagtcccccgaggttcttcgctcgaattaagggttcctaaagcttcactggttcccagcgaacaccctctaccactcgcacagacccgagctcagccacggacgacaaacaccggcggcgggccgtaccttgctctcactcatggaactatgggtg

SEQ ID NO: 74669 - DNA, 344 bp, Zea Mays
aaacagtgaacacaacatattttaagcactaggaatcactacaagtcatcaccattcactaaatcagtgaacacaacaagacttaagggaaactaaattttattcctcgatctgcctcgtcaaaaaccttacaccccagtgaggggctccctctataaggaaaatagtatagatcggcataagtattaatgttcacatctcacaagtcttaatgtccagtccatattacaataacagctaaccatgaactagataaaagagaaggtaacactaatgactaatcattgctaaaatcagcaaaagcttgttcaatctcaggatcttccagttgatgttgctttcga

SEQ ID NO: 74670 - DNA, 710 bp, Zea Mays
cttcggggatcaatttgagaattccaggggcctatacccaattacttaacacggcaaaggatggcgagttgttttgtgtaaagtacatgggttcttttagaaaaagaccatgactgttataatgcgcgggcaacccagagccgtccagatcgaatccaatggtcacaatacaacgcgcgaaggggtatgtgcataatctatcctcgccctccaacgacgatccaatggtcagcgtatatcttcaacctcacgtgctcctgcctctctttctctctccgctatggtggcacgccttccgtgaccccatgcctcatgatcccgtagcgacgagcgagaagacacgctaagcaaacggaacagcatcgcactgccccaacgttagtgaagttctgtgtggccttcctagtagcatcgttacctagtaggttaggcagccggaccaacaatggagctttacgggttatccataaaaccacgcccccggcccagtaccccagacccgataaacgctaggcacagttgagcactggaaaaacattctaggggttgcgtaccggcggttaagatgacgaagacgcctgtctgctctcggtgactccgtggtgtccctacaaccctggtgagcagtatcgcctccaccagtagttcctcgagcttggcagcctatgagatgcgtacaacgcgctggcgaatctgcacggccatacgac

SEQ ID NO: 74671 - DNA, 667 bp, Zea Mays
ttattatcacgaataacacgacgcactgtaacggatgacggatgaccaagacgactatgccaccgatctgtggatgttttgacaacactggaaacatgcttgctactgttgtgctccaaggatgggatgggatatagtccgttcctacacatgccgtgtagaagagtttgcctcgtgtgacgatccttgacaagaaagaaatcagggtgaagttcaagaaaaacatcattatcagacgtgagacgatgaactgaagctaagtttcgagtagcttgaggaacatgcaagacattatttagagaaatgttatgataaggggtaataaccgtagattggcctatatgctttatcgtcatacctgctccattggccgcatgtacttgatcattaccattgtagtcttgccgcatggtcagtttgtcaagatcgccagtaatatgatctgtggctgcactgtcggcataccacgtcgtgtcaacattataggaggtgacagcagcagaagctgttttctcagggccattgaaattcttgtcaaaccgcttccagcaccgaagagcagtatgaccagttttaccacagacttgacattcatgatctctgtaaggattattgggattacctcctcgaccaagattgccacgtccagaaccattgcggcctccag

SEQ ID NO: 74672 - DNA, 871 bp, Zea Mays
acatcaagtttgtagagctatcataggagaacaagtttacttaagcaactaaccactggtgctgaatgaaaactgaagataaatgagtttgaagttggactgtcagattgcttggagtctgaaattcagactgacagtggaactgcatgaacttagggctcgatttcaaccatgatccagggggaatttggctatggtttctataacaaaaatgtagctggatcatagggctgtaactttgatacagagtgatgatcgcgttactacacgaaattgggagcaaaaccccctgcaaatcgctttgttaggtgttctaaaccacatgctgatggtacaataactggattaggccgccagctcagtccctcgccgccgacgaccattgcatccggatttgcaccgtcgccacgattcgtgctcacctgtaccggataatgctcctgggtgaaagattctggcgatgaataagtttggattggatcaacggggagttcaccgcacccgctcggattgcagctggccgaattggtcctcgccggcgttagccgtttaccaaccatgctccacgtgcccgagcatctacccacgtcgtagttagtcatgttaagcgtatctggtgatcgccggagggcttgccactgtaataggacaccaatcgcgcgcgccagtaattcctgttttctctggccgccgcgcgtcttcgcccaaatccccagccaccgcttagcgatcctataaattgatggccaggtctgttgcgccatattatcacgaagccaacgcacccacgcttgcctcgaatcgtcccctagaactctccaatttctcactctccccaattcggtttccgccgccgtgaaagcatcctcac

SEQ ID NO: 74673 - DNA, 455 bp, Zea Mays
accgtccgagtatgtcaccagactatccacaatggggcatgcagaataaaacgcagattgttagcaacaaccctcctaccaacctcaaactagtttctctctagcacccaccacacctcaaggtcgtggactgatcccacccacacatgggtacgagcccttttctgccccaagaaggcccgaaagatctaacatgcaatgtggggcacctaaagccatcattaatgccccacagaaccctaactcatgggcaagggagcgacataatgataccctaacacccacacctatagaccaaagtgtcggtggattacccttgaccgccattgatatagtgagagaggagatatctagggcattctgagacaaacttggagtaaacatgacccatgggggcagtcatatcagaaaccatatgataaccgatttgactatgacccatacccacagcggac

SEQ ID NO: 74674 - DNA, 953 bp, Zea Mays
agacaatcttcaggaggaaaaaggtttactactgtcaaagcaaatccatcactcagcatcaaggagtctggtgaatctcagggagagttatggaaggcaagacagttgaaggaatacagaaggagtaatgggttgtgttttaagtgtagggagaagtatattcctggacacaaatgcaagactgcaggtataccacagctaaactgtatttcggtagacgagggaggagatggagggcccttgttgtctgatgaagttctggatttccttgaatctagctgtggaaatattgatgatgagatggtggtgtctttgaatgccttaagtggaactgagcattccaggtgtatcagaattaaggcattgattcagaaccagacgattttgcaattattggattctggcagctcgaatactttcattagtgaattggcttctatgagaatccagtgtgaaacacaagagatcagtcctgtcaatattaaggtggcaaatggacagactatagtttgcaacaagaaggttgtgcagttggaatggtggtgctctggcaagacctttgttgcagatgcgattgtgttaccccaagcagcctatgacatggtgattggtatggattggttggaaaagtttagcccaatgctttgtgattgggataagaagtgggtcgaattcagatatcatggagaaatggtgaagttacaggggttgattcctggaaaggtgaatgaattacaggaaacctcttgtgaacaagtcatcaagtggcacaaaggtaatgaagtgtgggttgttgctatgttgcaaagggtttctaaccaagagaaagaggaaaccgatctgattcctccatgtatccagaaaattttggatcaatttaaaggtgtgttcaagactccagactccctacctcctgcaagggaatatgatcacactatcactttattgtctgg

SEQ ID NO: 74675 - DNA, 665 bp, Zea Mays
cagaaatctcgtccccgagatttgtaagaaaaggatataggaagagtggtttgcaatttagctttcagtttctaattatttcaaaaatcaagagcctctattttttttattagtgagtgattaggaaagcatgggtatccatatgtatagtcattttattatgtaggacgaaagatgggttggttagggcaagaatatcctggtgtaagaaagtttagggtgagaaagaactccttgttgggtggtaatgcatctgaagatcgagtttgacttctctccttccttgacggggttgatcttgtccttttccagtcttgctctttggtgtctccatccgggtttgggacaagaagctaagatagatctgttatgtaggtcaagttgttgggtatggccaagttgatttaggtcaccagtttaagcttaagtggatttggagtatggctttatcctttgtaccagcattaagtaacttactctagattagatcataatagattagatagaatcttgattaggttggtacgactagattaaactagttaagatctcattattttggattaggtctcggttgttttgttaggatgagttaagtaaagtgattagggtaagacaaatctttcaagataagatgcatctattaagataagagagaatctttt

SEQ ID NO: 74676 - DNA, 350 bp, Zea Mays
cggagtttggtttccaaatgaaacctacgtctctgttggggagtccagtaaggaccgagactctctcaaccctttcctcactcaagtgatcactaagatcgaactcgagttccctttatcttttctcaagtaagatcgagtctctgcaagactctccacaactaggagtctcttgcctactttacaatttctcaaagggagcttagctccaaggctcaaagatcacaacacaactccacaactttagctcacataagtgctatattagttttctcacaagggatggctatctctaagctcactacacaatttgtggcacttgaaacactttaatcacttagatgtgttgc

SEQ ID NO: 74677 - DNA, 468 bp, Zea Mays
gcacactattctgaataaaactttcctccaattctctttctctttctaaaactgtcgctgagcaactttgtcaatagtttgatctttttgcaatctattacgcaactcataccaagaggtcatattcataacatgatatgcacttttttcatgctctctaagtctttccccaagatgtgaccaattattaaatccatcatttgccagcataccttttctatccccatttgtgaatactttacagctgaagcaaaatactttgtcgagttctttggaatacacaagccaatctctatcacactcctctccattggatataattctagtataaaaaagtgtagaaaaccttctagaaaatttatccttaggacctttctgaattgacaagtctcttttaggaccctttagtgctaagatatcaacctgcttaggatttaaggaatcccaataccttggatcaaatatatc

SEQ ID NO: 74678 - DNA, 931 bp, Zea Mays
ccggattggccaccgtgacagtcctgtcacttgcatctgatatggtcttgggtggacagatctcgacgccagtcaagatgtcatcaagctgggcggcgcggatggccgacacgacctgcgccttccagagaagatagttgccctttgtgagcttttcattaacaggtatggcaaaggaggtggggatggcagaggtagacggcgatgactccatcgccatgagagactcggtggagacctctcactaaaaaacactggctcttataccatgaaggaattaggaagcgttctctactgcccttgggcagccgcggatgtgtatttatattggctgacaaagcagcgaaggttacatcgtaccaaaccctaaccggacgctaacagaggccgccgtatctcatgcgatatcagcgccaacaatcaaggagatcttgtgctatctatgtccggttggttggaaagaaatcaagattacaatctggaatatatctgtctaataccctcttctcctgagcatggctttcgtgttaagtctgtcctgaagaagaagccagaagaacaattttttgcttggtttgacattttgagttctagatattgaaaaaagtttgggcactcgacgagacacatggatgatcttgtacactttctaggaagagtagtgtgaggtcccccaactccacgctactgagcttgatatcgaggagctggagttgcgaaaatgcctccgctgacatagacagatggaagagttcatgggtcaaggcgggtgtctttgcatttgaaatggcagaggagaagagcgcaaggtaagctatgtaatgttttttgtcatcccaaaggtcgtaccatagctgtattaaacatccatccacaataatagccttggagatttttgaacgtctgtagtgtcttcagaatatccctccac

SEQ ID NO: 74679 - DNA, 421 bp, Zea Mays
ggaaattggtaaaaaagaccatgaaaaacttggaatcatggcttaggccaattataaaagttgaaatacactaattaagctacaataactactagaaaagtttggccaaaataattgcttaaaatccccaaaaaggccatgcaagtggaagctctctagggaaatttgaaaattcagatttctgaattttagctctcacctagaactcgagcgcgttcaccttaatccctaattcaaaaccttaagcccccattgactaagttgtgctaaattaacccctctgcaacgtgtgtgaagatgacatcgagatttgtgccctagacacgtcaagtcaagggttttagctcggattcacgtggtgagacaaacccgatttgatcaccccatatctttggctccagtcaacaaaatctataagccg

SEQ ID NO: 74680 - DNA, 278 bp, Zea Mays
cctcaggagtaatgaatggcacaccaaattcatgttggtgccactcattaaggttctcagggtaggtgggagtcggaggcggaggggacctaggaggcaggagatgacccatggcggcggcataacgacgaaagtcctcatgcagtgcctcgttctggagcctgtgcatggactcctcgattgcccggtcgcggcacatggcaaaggcgccaaaaatgcccttggccagacgaataaacagtccccgaccttgaccccgtccctagccctgacctcta

SEQ ID NO: 74681 - DNA, 487 bp, Zea Mays
aattatattagtgacatttccattgtgaggctcagtggggaggcattattctccatctagagaaaggcgaattggtagtgtttcgaagcttcttgaaggctgggcttcaatttcctcttcataaggtattagtggaggtactgtagaaatttgaaatatatcttcatcagttgagcttgtatgccttggtgaggatgcggatcttcatctagcagtaaagagctagggtgtagagctgagcgttgactgagtttcattatcagaccaaggcaactggaaagaagcatcttcatgacaacttaggttgctacaccttcacataacggaacgatgctcgataccctaacatagcataccgaagcaaatcactaaatgtatggacaaaagaatggttcgatataaagaatgacttggagaaaagggaagacatcagagatacaatccaaaggcctataaaatcacattttggcataaagaggtcggcgat

SEQ ID NO: 74682 - DNA, 1252 bp, Zea Mays
gctcgccatagatttgatggcagaagaacaaggtccttctagggcaaggactcgtaagtcacagagaattcttgaaaaacaacaaagacttgaaataattgagcagcgcgttgctgaagcagattctgatgccgatgatttttgaaaagtatatataattaaattcttgtatgtgcattcctatttcaatcttaatatggactcaattatgaaatttgtgcagatgatgagggtcatggacaacctcaaagggaagaagcacgaagaccgtggtgactcctcgaggtcacggtcgactaggggttcaggtggtggggatacatcctctattttgttctaggtatttaatttgttttattttcttttcttctacgtaggtaattgtattatcaccttattttcgtgtacttgatatatctctttgttgattatgtttgtaggactccacagcatcaaggcaacggctaaagcagctccttggttgcatggaggagcacgagcgcgaagtggcaggccatagtgcacttgggcaagagcgcgaggtggcaggccaccttgcacttgagtaggagggtgaggcgataggctcaagtggacctatgctagagcaggaccacaatgcacttgagcaagagcgcgaggcggcagaccacaatgcacctaggcaggaggatgagctcgcatgccaaggttcaccgatgcgtgatgatgttgactatggggaggactacgatggagaggccgatggagaggccaatgacgaggttgttacaacgacataggcaacgaacttcaggtatttttattttgacgatgagttctattttttgttggattgatattattaccagtgcacaatttacaattttgtaggtttcggcggtcccttagagtaccaccgacacaacccttggaccaacgtagggtcataaaccctgcagtggagaggagctgggtggagatggcatggagtggaaaaggtcaccagacaccagttaacacagtgctaggatctatagctcgttttcactatccaggggtggtacaattcaacggggcagagataggggcgtatcactaggttcactggggcatcaaaccatagggacccgaccgtactcaccaagacgtagtgtggtcatcgttttgggtgagtttattatgtcttctaaatttacttaccgtgggcatctataaatgaatctaaatgcttcttcattatgcaggaacaatttagattggacgaaacagc

SEQ ID NO: 74683 - DNA, 573 bp, Zea Mays
gtccggttgggtgtcgcgccagccatggctccgccgtgctggccctgcgccaccgtgttggtgcggccagtggggaagaggttgtgtgcgccgtccgtctcttgatgaacggcgtagattagagaagatcgtaccccttcgcgggatagaatctgggttgtcgatcttactgcggatggttgagattagggattggcgtgggctggcgctgatcgttggatctaggtctgaaggtcgatgttgcgtaccaggttggattgaagaaggatttaatccaagcgctctattttagatccaacggccagtagtattccataccccttcgtccagtcctttttcctaaagagtcctcggactttctggattttgaacccgccgtccgtggtagctgtgcactgagtctgggtgaatttgcgagtgagcccctgatctttttagtaattgacgcgcaaaccaggaaaatagagaaaacagggaaatcaatttagaaaatgaattttaataccaaattaagtgcaaaaacttgtataaatcatagaaaattcatatgagctccaaattagttcatttcag

SEQ ID NO: 74684 - DNA, 299 bp, Zea Mays
atgtctctacataatacgccgtagtcagtacgacagtgaagtatgccaccgtgccacgcctctcggtctctggatctctctccacacggacgaatatataatgtgtgcatgcatgcatcaacatccaagaattgtggctttggtattgcctggtccctctttatgggtgcaggccggacctagcttggacgacattgtttgttggggaccgaccgatcgagacgcacggaaccgcgctcactgttctagatcatagaaagtgccatcagtattgatttggtggcaaaacccgataccat

SEQ ID NO: 74685 - DNA, 506 bp, Zea Mays
ctagactcttcggccagatcggctaaaatgtcttcaatgacttcgtcaaccgcagtagagtcctcaaccacaccaaccaaagcaccgctcgcaacgactgggatttctcatgccctcccaatagcatccgaagatgccacaatggccagctcgatactcgatttatccccttccattgctaatggaatgaacctggcaaagcatgaagattatgagaaagcagaaggctgaaaggagtttcggaggtagagaaagcaggagcagcaggtcagcaacaacagcaaatattgtacctcattgtcaggtcatcatctgacgcgagattcgaggaatcacattcattttttataatatgagctctaggaaggtgtttttcggacctatgtcgtgaggcctacttcgtttattccgtggtttgagctcgttataaaaaataaactaatatcgtgaggggctactgttgggagcctactcttgttgaaggtccccgaaacactaagatattg

SEQ ID NO: 74686 - DNA, 618 bp, Zea Mays
aaaacatcgtcagggatatcttcataaaaaatataaggtacaaacaaattcttagctatgtactgttgctattatcttgcaccatacataatgtatcagatcctacaataccttttccataataacccttacaataggtagtatgattataattaactatgttattctttttcttttttcctctttagtgacgcctctctaaaaatcacgctttgcggggatcaagcatcaggtttctctattgacaatgtctgcaatcaaggcaataataaacctattgtcataatgtttgttggatgcttagctaagcaattcaaaggtatgttttcaaatagttcaaagcaatgtctacattatttacatagacaaacaatctaacaagtgtgttatttgttacataggccaatcatatctaagcggcactgcagcaactacatggtacttcaatccagacattcctgaggcacaggaatactacatcaagtaagacacaataattagaaaattcagaactttaagacactccgtactttcgattttcccctccacacacgcactttaattaagtaatattattcatgtagttaactgtcccaatctaatattttaccaatattg

SEQ ID NO: 74687 - DNA, 892 bp, Zea Mays
ccctagcgtgaggctagagaagtagcatgtgctgaaaaacgatagtcttgtagcacacacaaaagtgtctattgtgaggcttttggggtttcatgctcatcacaaggctcatggggatagcgaggcaacgacaaaaatgctacatggccccataaaggggttgtcaaactagactagccactagagttatctaactaactatagaagaagaaaattgacccggtttggtcctataccacctgaggtggtggcaggctataccgagcatggttgttgcacatttgtgacatagtgcatggtcagagttggtagagctagtgttggatgtcatcgctccatcaacaaggtgtgttggtgaagccataacaatgtagtacaatgaaacatgctctaacccctgcttggcgtgtcaaatgttgtcggttcatgacaccagggtatgtggtgtactagtgaagagtagatagagaactgaagggactagggttttgctagattttacgccaataggatggataacactcatatgatttagaaaggttcaagccgcctgtaacgccccgaatttcgagttgaattttttcttttctctatcgctcgcaaaattcgggcgttacccctctttcccatttcttttcgctaaaacctcacccgtcttcaaaactttaagtcatgtgataatggtaaaccctagagttaatttctttgatttgctgcaccatgctgaaccatgcatttttgattgttgaaaatgtgaaagcattcatatagaaaatagatatcaaaaaaagggaaaatcttttcttttctctcccctccctttcctcccctttttggcccagccgcccccctgggcgcgcggcccagctggccggccggcccaaccggccac

SEQ ID NO: 74688 - DNA, 305 bp, Zea Mays
ccgccaagaatactaccccacttaaaagaattctgacttgggagcacttgaggtggcatagaaggtctaaccctggggtttgggtgaccaaagggatttctaaagatgcagtggggatgccatgcttttccacaaaactagtggcgatgaaagaatgatatgctctagaatcaaaaagcatagtagcgggggtaaattcgactaggaactcactaagtactactccacgggcttgctgagcttcttgggtgtcgacgtggttcactcgagccctgccgtggaactgggtcttgcttaactggctg

SEQ ID NO: 74689 - DNA, 294 bp, Zea Mays
atctggtataaaacatgcaatgtcttctctgtgtaaggccaatctggggcggcatccaacaaccctcatgaacagcccagcccatcgtagcaccagtctaacagcccacctcgatgagagctatgtttttagtgttcagacttcagaacttgtgttgaatacttatgttagagcttgaaaattatgtttttatacttctggacttgtgttgatacttatgtttgtgttgagaacttgtatattaatgtttgtgttagatattttatgtttgtgatgatatctatgatgtatata

SEQ ID NO: 74690 - DNA, 290 bp, Zea Mays
caacctcgaactaggactagatcatgagccatcagcaattctagctttgatggacttgacttattaaaatgggtgttgaattacaatcaagctactcttaacatatttagtgctaggatagtgagatggaactagggttaaataatgatccattaccagaggtacatcacatctaacagatctccttttggttatagtatcagtacacgtctacatttgaattaccgctgtaggaatctttttatgttgtaacacacgtgcacgcatgcacacatacacatatctctact

SEQ ID NO: 74691 - DNA, 492 bp, Zea Mays
agatcatgcaatccatcaagattctatgggttgggtcggatctcatgcatttgactgagttggtctaaggtactgagttaagttaacacctggctagtagggtctaatctatttcacaagtattaactggtccattaagtaactcactttagattagatcatattaggttagatgggatctagattagattggtatgactagcttgactatataagatctaattaatttgcattagatcatgattgttaaactagggtggataagtttgcttattatgataagatggatccataaagataagatggaatcttttgaggttagtgagatctattaggatatgataggatcttttcagaataagatggatctattaaaataagagagaatcttttaagataagagggatctatatgaaatagataatctaagttgtttagttattttatgaattctatttatgtttatatgtatatgcagatgtaattatggac

SEQ ID NO: 74692 - DNA, 695 bp, Zea Mays
agggaaaagaataaaaagggagaaggggccaaccaatggcatttgggccctgttgggctgcttgtccaggctgctatgttggtccatgttgagctagtggtctgggtgacatggatgggggcaggaacaccatgtgtgcggggcccacatagcggagggaggcaactacaacgatgttaaggggaggcagtgagcgcccggttcgatttgaaccgtcccttggtggagcggcttgccgatagttcaccatcgacaacttgattcttgggtgggggagagcacggtgacgaggaggggggtttaggtgaacttaggggaaggggttaatttaggacaaacgctctgggaggttgggttccatggcgaggcaacacttggccagaggtcggctgagagcctcggctctcgtgcattttggctaggaggcggtggtgggcaagtgagagtgtgttcaggcggagttgggtgtggggttgtattggagactagagcttctaggcgagctctcaccggcgagcggcggaggaaggagacggtggtgttggcggcttcgcggtggagaagagagaggaggggaagtactctggagagttggtgcagggcagaaggaggtctgggcaggccttttataggccacggggttgagcagggccgttccggactatttgggggcctgaggcgaaatgcaatatgga

SEQ ID NO: 74693 - DNA, 993 bp, Zea Mays
cagaggctaccgaagtatggagaatgtactttgacggctcgctgaagctacagggagcaggtgcagggatcctcttcattgcccctagaggtgaacaactcaagtacgcactccaattattgtttccagcatcaaataatgcagtagagtatgaagcactgatccacgggttgaacatcgctgtatcactcggtatcaaaaaattgatggtatatggagattctctagtggtcataagccagataaataaagattgggattgctcgactaattctatgggcaagtactgtgcagccgtccgaaaattagaagataggtttgaagggttagagtttcatcacgtggggagagaccgcaacgcggcagcagacgcgttgtcaaaaaagctgagatccagtcgggctcaggtcccacccaggatcttcgtccaagaagtatcatgcccgagtattctcttagaccgggcagaagagtgcaacatcttgagccaacaagagtcaaaccccaacgacttgagagagcctatcatcagatacataaaaaatgaagaagaactagatgacaagtcggccgcagaacgcatcacaagacagtcggcccactacaccctcataggggggacactgtacagaaggggtgcgacaggagtcctcatgaaatgcattcactcggctattgggaaacaactgttagaagaaatccacgctgggcaatgcggggtacatgccgcatccagaaccctggttgggaaagctttcagatctattttctattggccaacaacgaagagtgacgctgccgagttagtccagagatgtgaagcctgccaattcctatcaaagcaacaacatttacccacacagcagctacataccattcctataacctggccttttgcatgctgggggctagacatgattggacctttcaaaaaagctcaaggaggctatactcacatactggttgccattgacaaattcacaaagtggatag

SEQ ID NO: 74694 - DNA, 998 bp, Zea Mays
ccgactgcgacttgaccatagtgtccttcagctcgcccagctgacgactaaggccctcgttctccttttcaaagatgccaaacttgtccaaaatattacgaattttattctcggcggcagacttgtcccagatagctttggtattcttggtccaaagacgctcaaccttatcctccagtcatttcttcttagaacgtagctgtgtgggcccaaggtccacaagtgccccagacaccacctggtcaacaaaagaagaaacctgccacaaacagacttcataaaaaagagtgagggagagagaaccgcttacaatatgtagctacctcacagcaactgccacaacatcaccacatgcagacgcctcggcgacccccacctccatcaacaacaacgcagaaccacacccacgagtcagactatgcttcagtcgtagacctcgccagggtcactaccacctggcaagacctcgaccctgcaacaaaaccctagtacgggacgccttcgcatcgcgttaagggtccactagcctcagtagagcctttcttttcttcctagaagacttggcgtacttgtccatcacggatgttacaacgacataaatattttgcccgtaacgaaaaaaccttaaaataccaagccagaaaagacgtaaaattgtcctcgcatgaagccatgggaatagggtcatctctgcgccactcaccccgagttacttccaacatccgagcagatgcttctcggaggacgagcgaagtaatgacctcccctagctcggcacacgtcttagctagctcagacgccctcgctagacccttcgctgaggcctccgccaccctagacgccctcaccagacccttcgccttagcttcaacctttttatttttcctcattgctagggccacaaccttacccttagaacaccatttgttcacaccgccaagctttgccccaccctttctcttaggatcatcagtatctccagcattagtggagccctc

SEQ ID NO: 74695 - DNA, 664 bp, Zea Mays
caaggggtacttgttcttgattgtgacttcattcagagctcagtaatcaatgcacatcctcctagtgccatccttcttctccatgaacaagacagggcggcccaaggtgaggtacttggtctaatgtaacccttctctgacagctcatctatttgcatcttgagctcaaccaactctgatccagataccctgtaggctcttttaaaaatggggcggttccaggaagaagctctatgacaaactcaacttttagcttaggtggcatacctggtaaatcttttgggaacacatccgaaaattctgacacaaccttgatagtctcgagtggatctgcctccttactatcaatagctatctggtgacaacctccttttcttggctcgggtgagactagcttagtcaccacttcttctcctagtgggaacaccaacttaattgtcctcttatcacagctgataactgcttgatacttatctagccaatttatccctaggataacagctattccctgagtacccattactatgaggttagcgggaaactctatcccccttatttccacacttacatccaagcaaacactatcagctcgaactttaccaccggctgaatcaatttgaatgggtgttgacatggtagttattggaagattatgcgcttctac

SEQ ID NO: 74696 - DNA, 484 bp, Zea Mays
aaagaggctgctcataagtagctccattgcagaaactgatatggaaaatggttgtttctcattcttcgtacgaccatctcgaataaataccagtcggtgacctcctgggaatcgcagcgaggatcggcccaaaaaatctagcgagcgcagtccccgaccatcaccatcaaaatcccaaaatatatgatgtgcctctgttataggcatgggctgttccaacttcgtcaaatctatgacaaaaggaggaaatttaactggacaatgtaaggtcgctgatttccgagcttgcttccaaaaagaggcgaaccagcccatgatgaaatgacccgggagaaaaagggaacactcgctcgcggaccgtgtcccactaattatattatcatgaatattatccaaacaattatatagaaaagccaagcttgcgacaccaattgctctgcgaacgccttctgatatctgaacggccatatgaaatacctcagga

SEQ ID NO: 74697 - DNA, 847 bp, Zea Mays
ctatgttgatgtaaccaattcatagcaaggataacatcaatttcctgattcttaaggacgattaagttagtagggaaaatacatccctccaaatttatgggtattctctccaccatttccttactatagatacgacctccaggggattgtataaaaaagtatcttttccaatttccaatggtagctgatgtttgacaataaaagctctattgatgaaggtatgggatgcgcttgaatcgaatagagtcaccgcaggatgattggcaacaggaaatacactcatcataacaggagcaccctccggaatagcatgggcatgaataagattaacctgtccccacataggtatagctctactcctctttctagtatctagtcagttacaccgaggtaacctgatcagcgactgcggcttagccactaatttagggaaacgacagtcttgagtagagtgtcctgactttccacaattctcgcatgagtcagtgttgtctaagatatctttagaaggaatgtctgggatatctggcttatgtggaatgaaaggaatgacaacctgttttcacatgactgtggtgagctaggcagttggggtggagaaaaacgaggataataaacttgttgataaaaaaccctccgacactgtttgattttaccaaatgattcctctgcaaacttctttcttttagactcctgatgaagccgaatcttgttatcacccaaaacagcctgactgaccacctcattatatctttcagccaaactggttgccatcaagccctgaagtttcttgttgaggccacgtaggaagtagaactttttcttctcattggtatttacaaaatcc

SEQ ID NO: 74698 - DNA, 435 bp, Zea Mays
taccacaaaaatagtttatcataacacaaattgcaaaataacaaatcaaagtatacacaccttcaggctgttgtaggcaaggctatctgcaagctgatccttggtcatcgcagacaagccgagttcaagcttcagataccccatgttatccatcgttttacggcaaacattgatctcatgtcaggtagacagtagaggaaatcattatcgttatctcctccgtataccaaggatcccccgggggtacttcagctccttagcataatgttcgggttcgacaatttgctctgctgatagttgttttcccgaagcatgtcacacaataaaattaaaatcactcttggaaggtgcttcgggagtaggtgccgaggcttcctctacaaggctctcttccacaagatattctagtgcaatttccgaaggtcccacctgggc

SEQ ID NO: 74699 - DNA, 613 bp, Zea Mays
cgcgaggtgttgggcagacccacaatgaaatccatgctgatgtcatcccatttccatgaaggtcttgataggtgttgtggggcaccagctgactttaggtgacttgccgttgtcctctgacatgtatcacattctgccacatacttggctatctctcttttcatccttgtccaccaatacatgggtttcagatcatgttacatcttggtgctccctgggtgcatggagaatttggagaggtgagcctcatccaaaattttcttcttgaggtccccattttttaggaactaccagtcagtcttcgaaccataatatccccttactgtcttggcagaagcacttataattctccactttctggttaagattctccttaatgatttgcactcccttgtcaccgagttgggccataataatttggtctattaaggttggttcgacagagaatttgagatcatgatacatcttggtccaccaatacaggggtttcagatcatggtacatcttggtgcttcctgggtgcatggagaatttggagaggtgagcctcatcgaaaattttcttcttgaggtcctatttttaggaaccaccaatctgtcttcgaaccatagta

SEQ ID NO: 74700 - DNA, 551 bp, Zea Mays
cgctgatttacccgctttaggatttgtggttgtcgttcgtttctcaatgcgcttggttatcgatgcagctatctcatggtctcagttcagctgagttcacttgactaggaccagcatgtgcagtagaaaatccctggttaattatgggtccttctaacctccgttcgttgcttgagtttctcgttatatgtggcatgttccttcaagttgtttacttacaatcacataatgcttgtggtgttacgccggacatgctaatttctttggatgttagcatgtgaacttgtgagtcagttcattgctcatttcattgaacctatgctgccatgctggtgaagagacattgaagcagccagttggtgctataaacacaatacacctctgttttctaatcagtctgcttctcatagttgtagataaccttgtcatttcatcttatattgtgatgcgcgggctagctagtagccgcaaaacagttttatatatttgttacctcgtagcatacaccacatgatcttgggtgcttcagactgatttacctccatgataac

SEQ ID NO: 74701 - DNA, 1044 bp, Zea Mays
tgaaacagagatatcttgctgctcacataaacagaacgaaatatgatatttatgaagcaaggaatcttcattcaaccataagtacctccaaaacaaagtgtttttttaccatttctcaccaaaacttccttaaagatatgttggcttcatttttagcagatctgcccaaactggagtcatcatgcattttagttatcatattcaagttcccaccgccacttgactaagaggctgagactaccttcaacggttcccgccagagaccctcccctctacctgtagcggctacagagtactccttttctctacaacggtgcacgctacgcctccctctatatggtcgctggcttctctctccctctacagctagagagctccctctgcagctagggacgcgccaaacggcccccttctcttgatatgtgtgcacaccggtatttatcagtggtgaaaaaaatattaatagatgatgaatgtgtatggaaattgatattttatgtttgtagttgggtataaaggaatggtatagggggaaccgctgcagagggaggagatatagaggaaaagagtgtgctgatgtggcgctgtagtgggatatagaggtgcaaatttagggggaaccgctgaagatagtctgatatcaggcaggagcttctgcctttcaggagctttcattgaggtctcttgctcctagattgggagtgccccgccccgcccctggtagtgtttggtcgtgtaatgttacctcggtcagagtgatgttggcttttctctctcccaaggggttgctaacctctcatggatttgtattcctttattttcttttcttaataaaattatgcacatctctcctgcgtggttggaggaaaaaaagagaaacttctccacatgcatctgcatgttatatatcaaattatttgtgcctcgtctcttgatttaatcacccccacagccgctatcttcagcagatcccctagctcatcctctatcacatctcttatttcaaatttcactatgtaaacagtgttatctatagttcacgtc

SEQ ID NO: 74702 - DNA, 376 bp, Zea Mays
ccccgtcgtgcgtgcggggcgccgccgccgttggcttgttatgttgggggtgaagggttggtgaccgttggatcttaaccaacgttcacgattagatctcggggaattaatatatgtgtcgttggatggccgcgggtcggccaggatcagtccgtgacataccaattcgctgggggatctagagcgttcgtttaggatcggacacgtacgcttagatccagactcataaaacccgagctattgatcctggatctggcggtcttggttacataccggtttgccgtgagcataatctaatctgcgccctccgcgcgagatccgacgaccagaaaccctggataccccttcggctagcgtattatacaaaagaaacctt

SEQ ID NO: 74703 - DNA, 314 bp, Zea Mays
aaaatttaatcatcaagcgcgaaggtgcattactctgacagctttgaatgccttctgtcaaatggccaagagatgtgcgtatcgttatcattgtattaaagaaaggggtacaaatctctactactctataaggttgtattgtaggcgtccacaactgagtggcgcacggttctgcccccgctctgctccgcgattctcgcagccaatacgcgcagatctcgtctcctccgcggctccgccatcaacggaaggtgtccgaggatctcctcccctctcctccgcgatccccgtcatcggcgccgccatcaacgccc

SEQ ID NO: 74704 - DNA, 690 bp, Zea Mays
ccggaacttagggagtgcctcttctggagctaggggctgacctttcgggctcacatatgagattttatatgttttgtcaggaaacttgtttagtcccctgtcacctcttttccggtcgctctgcgtccttttccttgacctctcggtggttgtatcggtcggtaccggtgcatcttcatcttggttcagccccggtgcgtcttggtatcgtgccacggcttcatcaagtatcgcacgatattgagacaagacctcctattcatgtaatgaaatgcaaaacatgcattgtgaaatcaaataattaggtatacacacacgaaactaaagatgtgtactttacctcacactcttgtggatcataattagggtcacgatgcaattgacaccaagcggccctatctatgataggacaagggtcggtaggcatctcatatccttcatcacttgaatgttcttgagaaacacccttgttcatgtggtcgagaattaacccttggtccttgtttacagaactcattgagctatatatatataagattgcaacaaattaagattaaaaaaattgaacataaagtttggaacagaagattagaacacaatatatatatatataatcacactaggttcttacataatacacagtccgtcatactaagttctaagatttagtacgtcatccatcatactaag

SEQ ID NO: 74705 - DNA, 1106 bp, Zea Mays
agtgacttctgctactatgaatggtccttcccataagggcgacaacttgtgccgtccctcccccgttagaattcggcggaggacgagatctcccactgagaaggatcattgtcgcacggccttgtcgtgatagcgtctcagagtctgcttgtatcgtgctgattgaattactgcattcagccgttcttcttcgagtacatcaatgtgctccagcctagtagcttcggcttctgctatgctttcgaagaccaacctcggtgccccgaacttgagatcggcgggtaatactgcctctgacccatagaccatgaagaaaggagtgtttccatgtagagctcggctaggttgggttcttaggctccaaacgacgtagggcaattcccttatccactttcctgtgaacttttcattctttttgaagacccttttcctgagtgccaccagtatcatcccgttagctcgctcaacctgcccgttggccctcgagtgtgctaccgaagcatacttgatctgaatgctcttttgctcgcagaaatcgaagaattctgaacttgtgaagttggatcctaagtcagttatgatattgtttggtattccgaatctgaatattatgtcttgtatgaattccacggccttagccgaggttaaagaagcaatgggtttgaactctatccatttagtgaatttgtcgattgctaccagtacatgagtgcatcctccttgagctttcttgaaaggtccaatcatatccagtccccagcatgcgaagggccaagttactggtatggtctgcaattactgtgctggtagatgttgttgctttgacaagtactggcaagctttgcacctctaaactaactcggccgcatcgcttttcgctgttggccaacagaatcctgacctgaagaccttcccgactagtgtcttggatgctgcgtgtattccacattgcccagcatggacctcatctagaagtcgcttcctagtagatgagagaatgcacttcatgaggacgcctgatgcaccccttctgtataatgtttccccaatgagtgtgtagtgggctgactgtctggcgatgcgctcggctacatttttgtcatctg

SEQ ID NO: 74706 - DNA, 434 bp, Zea Mays
gttcacatccctcttttggaggaacacccatttgaacctgacttaactctaggggcgtgggggcgataggcccaaatacttgcatttgtgaaagcaaacgcaaatccgtctctattgcttctttccatttgactcaatctaagcacttttggcactctgtcatgtattctggtttaggatccatggtaattgtgatagtgatcatagagacaaaatcattgtcgacatatgtagtctttcggttatgtaactcttctgattccatgtagtttgtgacaatttcttcaattgaatcatatagttcttcatgatttcataagttatttgaaatcggttgttctaaagtccttttgctattgtttgcacgtacatttgcactaggacattcacctttagggtgtgtcacttctagaacatctggaaaaaaagtgtga

SEQ ID NO: 74707 - DNA, 476 bp, Zea Mays
cggcagcggccagtgcgcgcttggccggtcagacaaggcattgagcacgtggcaacatttgttctggtcactttcaagcgtcgattagcctgtgatctcttcgtatctacccaaaatccatgtataagatttcttccttgtagtatgcccgttgtatctcatgcagtgctcaagtggatttgacctcgggttggcaagttacgaggaggtgaagttgtgtctgtccgagctgtccacatcgagacaaaagccatgtcaagtcgggtcaaacgacttagggttgggttcaaacttttccagggtgttctaggggtctttaggcgccattttgtcaattgggccataaggttttgaggttgggaacaaggtgaacatgattgatctttgaaagagggtcggttttgaacttgagaaaaacctgatttttcttttatgtccttctctttggtgacctttttggggtttttatgaattct

SEQ ID NO: 74708 - DNA, 430 bp, Zea Mays
gtttacatcggctgatcctttggaggagattgacataggagatggtaaaattccaaggccgacttttgtaaacaagaccctggagaccgatcctagagatgagatgatcgatctattgaaggaatattcagattgctttgcttgggattacactgagatgcctagattaagccgagagatcgtagagcatcggctgcctattaaatctggtttcagacctttcaagcagagagctagaacatttcgtccagatcttctcccacgcatcaaggacgaaatccaccggctgctagaagctgattttatcagaccttgcagatacgcagagtgggtctccaatattgtgccggtggagaagaatgagtcaggtaagcttagagtatgcattgattttcgcaatttaaatagagtaactcctaaagatgaatat

SEQ ID NO: 74709 - DNA, 646 bp, Zea Mays
gggcaacccttcgcagttcagcaagctgatcgcccacacatgtccacctcaacgctgggggctggatattgtcgggccactacttacggctcaagggaacctcaagttcaccttcatcgccgtcgaatacttcacaaagtggatcgaggccagggcagtatccacgataacatcgaagaccgcccagaagttcttctggcaaaacattgtttgccgattcggagtcccgtccgagctcacagtcaacaatggcaaacagtttgatagccaggacttcagagatttctacttctccattggcaccaagcccgtcttcgcctcggtataccatccgcaatccaacggcgtcgtcgagcgcgccaacggcaaaatcttcaccgccatcaagaaaagacttcttgacgacaagaagggtaaatgggccgaccaactacccgaagtggtctaggcactaaacaagaccgaatgttgggcaactggattcactcctttttgcctactatatggatcggaggccatgaccccgcagaaaataaagcatggatcaccccgaacaagcgcatcagcggtccccgacgtcgacgaacctacgtcaaaagacctcatcgacggagaccgcgtcttcgccctgcaggccctcaacaaa

SEQ ID NO: 74710 - DNA, 616 bp, Zea Mays
tgtttggaccacggtcgcgttgattttgttgatgccagtaacggcaccgccgtgaatcggagcttcgccgtgggcaggggcctgggcgcaccgtttcatggataggggttagccatgagattcatggtggccgagcattcatgaaaacggagtcgggtgtgtgaatcggacgaggttcaccgtagggcgcgttcgccggtttgcttccaccgctctgggtgcgcgctatcgtgtcgtgcgcagggaggtagtagcaggatgccgcgaccattggatcttgatgccgctctgggtgcggtcaccggatcgcctgggtgaagacctaatctgagccacacatcttcaatcctacggtcggaatccgatgccgattcgttattgtggctgatctaatcatagcccttggtgtatgatccagcagcccaaaatgcaccataccctttcggcccgcaccatttgcataagagcccctccgtttctgcggattaaatccgcggtccaacgcagatagatctgagtctagggattttagtagattgccccctgctgttctatggttttgtgcgcgaggtccagggagcagtaaaaataaataaataactatagaaaataattt

SEQ ID NO: 74711 - DNA, 526 bp, Zea Mays
gcactttgcacatttttataaccttatttcttgtaactcgagtcaaagtgtcaagaatcttgataggatattcagtataagtcaaatcaccttgaacactgagctcttccattggtaattgttcctcagggacacagagacacttcttaagttgagacacatggaatacattatgcacatcagataggttatcaggtagcttgagttgataagccatctctccaactcgcctaaagattctgaatggtccaataaagcgaggggacaatttgcctttgactttgaatctcctcattccatgaagtggtgacaccttgaggtacacatgatcaccttcctcaaactctagtggttttcttctattatcagcgtagctcttttgcctggtttgagctaccctcaaattctccctgattacacggacttgttcttctgcctcttgaataagctcaggcccaaagaactatctttctccagtctgatcccagtatagaggagtcctgcacttcctgccatacaatgcctc

SEQ ID NO: 74712 - DNA, 1256 bp, Zea Mays
ctggtatctccacggggagacacgtcttgaatgagagacgcatgtagaagttgatgacggtgaagatggtgataggatggaccagatgcttgaggatctatagcctgaattggccctagatcatcatgattcacctacactagaggtttagaagttcttcgacatcctcaaagtgtcagaagagcctcttcacgagcacactgatatgaccattctcgaattcatgacctggctgatgtcaatcaagtccatgtttgcattctcaatcaattgttacaaggaactcaaggatttgattagcgaggttcttcaaacaggtcacaagatgcccaaagacatgtaccagtcaaaggaattgcttaaagatctcaacatagagtatgagaaggttgatgtttgccaggacaactgcatgctcttttgggaggaacatggcagagaggagaagtgcttaaaatgtggcaagtcgaggtacattgagcttataaattaagatggggacaaggtggtgacaaaggttgcacataaacaacttcggtacatgcctctcacttatagagtgaaacgtatgttcctcttgaggaacaccattatgcacatgaggtggcataaagattgtacggacatacaagatgggttaatggtgcacccgtcagatggtgatgcatggaaggctcttgacaactttgatccagagtacactagcaatggaagaaacattcgtatcggcttggcaaatgatggtttcgtgccttcaatatgaccactgcatcgtatttatgttggcctatcattgccataccgtacaaccttccacctgctctttgcatgaaatatgagtttatgttcttatgtattgttatacctaggcctgagcatccttgttggaactcgctatctcgtggtcagcctagctcaaacagtgggagaacaggaatagtttgatgccatttaacacatagtattagggcaacaatgttttttctgtcccccgcaatggtgttgtacgatggtatttataggtaattgagggacaactctaccctgtcaaagacgattgtgccctcgattacctacgttatccccagaatattcccccttgggggttacggcgggtcattacagtgtgattaattacaagtatagacagacacactaacaactctaccctcatagcagcttacaagtgggaccctgcatcatgggccgtttatgtgtgggccccttattacaataacgagcgggtaacaacacat

SEQ ID NO: 74713 - DNA, 578 bp, Zea Mays
atgagctcgaccaaggaagacaaagaccaggacaaccgagttatgcgtagaaggagcgttgatgtctcgcgcagggaaattgaagagctagatactcaaagataactcagatgaaaggcgaccgaaccccggataagtaggaatgcatgtcggttaaaagatagattcaaatagagttagatagtcatcacgaattgtaaagggatagtcctcaggtcacctatataaggctaagagggtacccctacaaggctacaaacgcatcctatctcgtcaaatcccaccgtcatcacatagctcattagccctctcatagcaactacaccgccactagatcgataggagaattcatccttcaccgcccacagctcatctgtaacccgtgaaaccagtaatacttaatacttagtatcgacgggatgtagggtattacacattctagcgactcgaacctgtataaactcacacataccattgagtcgcgatcaacgacgttgtcctagccaaaagcatcatgtgcgataccccgtggtgcgcagtcgggtcataaacaccaacaaagtgttccacaacatttt

SEQ ID NO: 74714 - DNA, 788 bp, Zea Mays
gctgcgccgttcggggctcggttattgctctacggggatcggcttcgggccacgaagcgctaggtgtcgtcggtgggcggcgaggaacctcgtggccaccggaatttcttgccgtcgccataaacccgcgtcgcgccgtcggcgggcgttctcgtggcccaactgctggtaagaaacttcccttcatgttcagcgtcatctcggctttgcgtagaacgtattggcgcgggcggtggagcacttgtgcgccgattcatcgtgctccggcgagctaaccagtggagctctgggcaccctctccctatcgcggccgggaggagggagacgatcctctggccgtccgatttatgtcgtgcggtggcgattagatgtgcagaagcgttttggctatagcgatcgtggatcgttggatcttcggccaacgtgcgggattacacgagcgcataacgattcgagtgttgatctgggccgagcgtttcggatcctacgactgttatggcgtacaatttcattacagtaaagatctaatcctaaccatcggttggtgatccaacagccctggatgctagataccccttcgccgtgggagttttgcgtaagagccctcgtagcatctgggattcaacccgcggtccacgtagttgggttttgtttcttggtgacacttgcgctgaggcccctggatttccgtttattagtgtgcgtggaccagagacagatgaattcattttagaaatgattttcaatacaaaattaattgcagaaacttatttaattcttagaaaatt

SEQ ID NO: 74715 - DNA, 512 bp, Zea Mays
gtcggaggtgacctcgatcgaataatggcttgagtcatccttgagcaggtcgagaacgaatgttgattggcggccgacgaccgccaccaaggtcgaggatggggcttccaccacctttgtcctagtgtgcctattgaggcaccactttagggcggtgacacacttttttaggtgtcgcttctccgccttgctcctagtggagagtgtcagttgtgtgcccttggtgtcgggcatgccggggacgatgagactgagctcaccggtggcggtggcaaagaagttgagggtgtcaaaggtgatgtggatgcctagagtgaaggcctcaccttcggcgaatgttgatgactgggccatcagattggaaagtgtctcttagtgcactagcactgcccctacgtagcgcgccaactgtcatggtttcaaaaactgggggataataagatttgcgttcggtgggggatgctagcatgaactcactctgaatggtgaatcgctatgattcaacgagagat

SEQ ID NO: 74716 - DNA, 1036 bp, Zea Mays
cggcattctagcaaccattgccgaaatggctgatgagaaatagatcgttgatccagcgctagccgggttttacgaagccatggaaaaaaccaacacagagaagattgcaaatgagatgttggctagaatatctgaaaactccagcgatagtgaaagtttcaatgtagaaagtggaaatgaagatgccgaagatcggccctggagaccaagccatttgtctttggaaaattaaatattaaacaagggcaaatcgatacaatgagggggaggtattttcgtgatatctcaatcgtaagggccgaaggagagaataatgttcctcttctcaaagctgatgaagtggtagtttacggaagcttcatgaaagcaggtctttgtttccctctggataaattgctggtcaaagttctgaaaaccttcaaaatttaccttcatcaacttactcccgaaactatcatcaaagtggggatctttatatgggccatgaggagccaaggactagaaccagatgcaagatgcttttgcaacattcatgagtagtcttatgagacgaaggctaccggaaaggagcaatatcacaacaactttggttgttatggttttgtgcctcggtctgaagtgaactatccagttcccacattttggaagaggtggctgggctcctggttgcaggaatgggtttacatgaaaaatgacctaagtcaaagggaggatgtgagagggattattcaacgccctatatggtctcgcttcggcactaggaggccagccactgcccttgggaatgataaacaagcatgccagacgactttcaatacaatgtgtacttacataggctttcaatatcgatggagtcgtccagtggatcagcggagtcgaagcctttgacgaaattttaagagaccggggagacttctgcgcgttcgctggcgcgcaaggggtcgcggtgatctcagagagagtcggttgtgaacatgttaaggctgcagctcagccgggatttgctttctcagtggatgacaccaaagacccctcg

SEQ ID NO: 74717 - DNA, 481 bp, Zea Mays
atgaccacggaccgttcatctggtacttgatggtggtgccaggatagacatcaatcgacccacgtgcggtcaggatgagtggactgcgtacccccgttcgcatggtatatagggatcgtgtgatgttgatccaatggatctatgagcgtactccccgcgtgggttaatgtcagccttagatcatcgatcagagtgcccttgctggatctgtagcgtggacgatttcgggctatcgatctttgatcctagggcagtgaacgcatatcgattcataataaccttccccgatctaatcatggcccttcatgtaagattcaacggctagaactgatcagtaccccttcgccataaccattttgcgtttgagcccctcggcttttgtaaaaccaacccgccatccaatacaggtgtagtaacattatagtatggccctggaattttgcgtagagcaccccagaagagttcaaaatattgtccgaag

SEQ ID NO: 74718 - DNA, 500 bp, Zea Mays
aaacaatgtggtctacccatgctctgttaggtttgaaatttatttgatcgacgacagattggatgtatggtagatggctcttggctggtcttcatttcgctctgtgcttcaatgcttctgctgattagacttgcagttcagtagctatatttggctttcctttgatctctatcgatatctttgttcttcttgatacatttattgcgtatactatatggatgtgactacttcagaaaatctattgaaaattcctggacgtccaccccccaatgggtgtgcccaagggacgtcttggtacggagagcgtttagcacactgtcctagagtgttaacttgacgtgaccgtggggcgtaatcatatcgcccaagcatttgaccttagtccaaatggtgtcgtgttagagaagcggcgtctgctgcctgacttgccttcaggcgatttgaattgcttattgattacttgcgattgttcggtgagtgtggtaggagatgaacagttg

SEQ ID NO: 74719 - DNA, 619 bp, Zea Mays
cccaatttttttttctaaactaaaaatcacgcacttttcaaaataaacttgatttaatttggcaaagtattttcaaagctaaaaaataatttattaatctagagacaaattataatattttaaaactaatttcaaaactattttacaaagttacgatggaccacaagattatttattttgtctatctatttaatcacttttttccaaccaagttgcctcaaactctatcctaaatctcattagcaggtaaaggagaaggtcaacccaaattaattaagtctagctagcactgacgagtgacgaagcatgttgttccatcttcatgcttgctccggcaaaccagcgataaggagcacgccatagttgctaattgtggaacccttcgtctactcatatttgtttgtttgcccagttaacatctagcgagcatcgcttctttggtcattgccactacacccgagcaagcaaagagcagaacacgcacaaaccccttcgttcttctctttccttggagcaagcaatagagcaccatggctacactacaacgagcttttcccatgccgcacccttgtcgcgtgcgctgtgccgcagtcaactctgacatcctcgccgctactgc

SEQ ID NO: 74720 - DNA, 601 bp, Zea Mays
cgataatctgcgccgcgaatcgagacacgaggtcgtgtgaagcttgccagaagttttctccccgctcaggcaacccttcgcggttcaccaagctgatcgcccacacatggccacttcaacgctgggggctggatattgtcgggccactacctacggctcaagggaacctcaagttcaccttcgtcgccgtcgaatacttcaccaaatggatcgaggccagggcagtatccataataacgtcgaagactgcccagaagttcttctagcaaaacattgtttgccgcttcggagtcccgtccgagctcacagtcgacaacgacaaacagtttgacagccaggacttcagggacttctgcctctccatcgacaccaagcttgccttcgcctcggtataccacccacaatccaacggcgtcgtcgagcgcgccaatgacaagattttcactgccatcaagaaaagacttctcgatgacaagaagggtaaatgggccgaccaactacctgaagtagtttgggccctaaacatgaccgaatgtcgggcaaccggattcacaccttttcgtctattatatggatcagaggccatgacaccgcaggagat

SEQ ID NO: 74721 - DNA, 1018 bp, Zea Mays
gtcaccgggtgcccctcgtccatattgtgccggcatcgaagagcctccattgccaccgcagtggagagacccaccgcaggggaaaccaccatgcatgacgatgggcgatcgaaatcggccaggcgcaatcactagtgcacacggatgctcgtcgcggcttcgcctgggcggaatcgtgctccagaccactggaattcttcaccggagtgggagctcctccatactgccgccgcgtaccatgggtagctccccaggcgtcgtctctgtccctggtaaaccctcccatctcgtatgctttgtcccctatgcgggtaggtcgctcgggtttggagattagggtgtcggcatgccgagatggctgtcaccggtgggagctctgccgtgggggcatgtgcaacgccaccctgtagcggtgaagggcaagaaagcgctctagctgttaattccgtggtgagcggctggatttagatctcgcgtacccccttcgccgcataaaatccgggccgtggatctaagatccaatgaccacagttgagtaccgcttcattcaaagtggtgatctaatccgggccatctaatgtggatcgggcggttcaagtgctctgataccccttcggcttcgtaaagttgcaaaagaaccccttggtttcaaagaaaacaacctgccgtcctatttttgcacccggtcctcaaaattaaattttaaaaatacaaatcagtccttagacttttcaaaaggaaccctggtagctatttttacatcaaaattaataataaaaacacctcaagcttgtttaattcataaagttctcattttaactctgatttagaccgttcaaattgcgttagaatcgtattaatattacctaaaccttagtaacattattttatcatgtaacatgttctcaaaataaataaataaataatttgtttaacctatggttattggattaacttgtataatctgaaccaatataatattttaattggatcaactataattttactggaatatgat

SEQ ID NO: 74722 - DNA, 436 bp, Zea Mays
tgcgtcctcctgaatagagcctgcaaaacatatttgggcttgcacttgtttagcaaaatatcatttctagtgagccataaagcccagtagagagctgccactccaactagaagctttcccactttgttttgaccaccctgctttgaccaactgcgaaacagattcatggtattatgaggaggcattatacccattgtacaacaagaaactcgccataggaaattgtcaaaatgacactaaaaaaacaaatgttggattgattcggactgattgcaaaactcacagtttctcctaccattccaatctcgtttagtcaagttatattttgttaaaagaaatcccctctttaggaaccagaggaaaatcttaatctttgaaggaaccctcaaatgccaaatttcctgtgatactacaatgccattgtcaatgagaaaat

SEQ ID NO: 74723 - DNA, 839 bp, Zea Mays
gaaatacttgtatcactgtcggcctgggatggccgggggatagcactagctcgtggggggtgcgagtttggagatgcgtcgtgggaggaaaaccgagtacctcgacatcccactcaaggacagcagcaaaggatggtgcctggaatagtttatcatggagaatcacgggaactccctccccctcggtcagggagacagccagatgttcgcactccaagttggactgaatccccctcagacctggaggtggctgaggccggggctctgcttgccgaggttggattgttgaaggagaagggtctgactgccgaggctgtgatcgccgattttgtttttaagaacattcagtcactgaaagacagagcgtacctagcttatttatatcgtggcctcactgattcgacccgggttaccaacagaaggattcctgttgtggatctagtaagccggcttgagatgatacttagaggcaaggtgtcgaatatcggtgctcctgttgcatattcagcctggaatctgtctccttccaaggcttccatcagtttcgtgtcaaatcctcctgctggtgacagtggcttgggccttagagtgcgaccttctcccgaagaggttgaggttttggttgcttcacttggtgaagtccccgttgacgagaggcaggttcattttgagatgcctttgaatcctagtgacacagaaataagtgtcatgttggacatgttggctgaggattcctatgattcggtccttgctgaaacactagttgtagcacccatcctagagtctggaaaaactttggacattcagaggtctgatagtatccgcccgaagcatcctcg

SEQ ID NO: 74724 - DNA, 1172 bp, Zea Mays
taactccatacctgcaccagttttatttgattctggagcatctcactccttcataacaaagtcatttgtggaaaaacataatataccaaactatcccttgaagaagaaactattaattcgatcaccaggaggtgaacttagagccactcactcatgccctcagactaagattgaaattagaggcctaagctttctagtagaactgataattttggaatcaagtggaatcgatgtgatacttcgaatagactacttgaccaagtatgatggagtaatatcttgtgccaaaaggatggttacattaaccagtccgcaaggagaaagaattgaagtcaaggtcagtatgccagcaaaagcagaggcaatggtaaattagctggaagaaaaatctttggagcacatcagaatagtgtgtgaatacccagacgtatttctagaagaattaccaggtatgccacctgatcatgatatagagttttctattgaactattacccgaaacacaccaatttcaaaaagagcttaccaaatggatgtcaaagatttaattgaactgaagaaacaaatagaagaattactagaaaaaggttttattcgccccaattcatcaccatggggagccctagctctattcgtgaacaagaaagatggttcaaggagaatgtgtgtggactatagaagcttgaacgaactaacgattaagaacaagtacacgttacctcggattgaagatctgtttgatcagatgagaggagataaagtattctcaaaaatagatctaagatcaggctatcatcagttgaagattcgtattgaagatatacccaaaacggccttcactacaagatatggactatatgagtttttggtcatgtcttttggactgactaatgcaccagcttactttatgaacttgatgaataaagtattcatggaataccttgaccagtttgtggtggtattcattgatgacatacttatatactctaagagtgaagaagcacatgaagatcatcttagattagttcaacagaaacttcgcgacaatcagttgtatgcgaaatttttgaagtgtgatttttggctgaaggaagtcgctttcctaggtcatattatcaccaatggaggaatcaaggtagaatccggtaaaataagtgaaatactatattggaa

SEQ ID NO: 74725 - DNA, 525 bp, Zea Mays
gctggatatgctcaattaaatggtattcttaaacaatgttatagaatctaatgtgatgtgatctaatgtggtctacttaaacaggttagtgatacttggaccctactagcaggtgttaacacaacttagcacattagaccaacacaaccaggagcataaaagctaacccgactcagagtcatgatgaatggtataatcaatctatcctcacctaatatcaaacaaacttttaatctacatcatgtggtttacctcatctatatctatctaaaccatatttcccaaccccgataatatacactaacctcgaatcaatgagaccaagaccagaggagaaaagatcaacatcgacaaggaagggtataacagtcaaagcgaatctcgagatgaatcatgacttaaacattttggataaagtcttttccttgccataatctttcttacctcaacctgtttagtttatatctcacataaatagtagctggatacctatgcttccccaatcttccactacctccaccacca

SEQ ID NO: 74726 - DNA, 384 bp, Zea Mays
gttcaatggctatacagttgtcctgcgcgaagacagtttatcacgtagtggatcacgatctgatcgtcagccgaaggcaactgtgacttgagcgatatgaactttttgtaataatcatgcatgctctctttttctagctccctacagagggagagtttaactaaggcattcgtctcgggtctgtaaccctaaaagttgagcaaaaatttgtcgcgaagggtttttcatgagtcaatatacaagggtggtagccttgagtaccacatgaaggttgagccctcgagagcaatgatgaatgatttggccatcgtgcagctatcacctattgaagatgcgatggctacctgatagctcatgatgtattgattggggtctgaattgaca

SEQ ID NO: 74727 - DNA, 814 bp, Zea Mays
atggtaggttattccctctctttagcatagttttgagaagacatggttgtacctagcaaaaagaaacctgctgttcttaatattttttagagtaaaatgcagggtggtccctaaacttgctacaaggtggtatcaaggtctccaaattctgaaaatgcatttcacgtccttgaacttgtcttgttgtgccattgaagtccaaagctctcaaaatgttactttcacgtccttgaatttttcatatcgtgtcatgcaggtccaaaggggtcttagtcaaccctgtgccttgatgtggtaggctgctgtgcatcctcagtggcttaggtcttgaccagtgagtcatgctccatctccgtgctctgcctttctcatcctctctctctatttgtgttgccaagcagacctagcaactatcgcaatcccttacacaccttcattctccatcccctccttaaagtcaacgatgtccctggtagtgattagtgaaggccataagagcgaagctggtgttccacgaagtgtagtgctagaggttgaaatgcgggccccaccatcacgtggcactcactgatcaagaattgagccaagggtatatactgtgggttgtggcatgcaacgtcaaggcatggagcaggtcaggtcctgtttggaccaggacctatatgacactgaggatggacaagtttggggatcttgagagtttaggacctggatgacatcatatgacaaggtttgggagttgaaaatacattttgagagttcgggacttgagtgtcggccaaggacaagtttgttagattgtgtgtgtgggccg

SEQ ID NO: 74728 - DNA, 672 bp, Zea Mays
caaaaatgtcaaaaaaggccatgacagagagacagtcaccatgacggtaaaaaatcaagttagccatcatgtgcgacaacattcagagcaaaagtcgccaaagagtgcagttggaatagcacaaaaagtgtgtgaagacaccaaagggtgtgaagtcatcctatcaaacacaaacattctgagcaaaagtcgcctaagggtgcagccgaattagcataaaaagtgcacgaggaaactcagcggacacgaaggcaatatagtcgtcacttggcaaagggggcgagggcagcgttccactccaaaattgtcgagcaacgataatacacagatctaaatcctagagtccttgccccttgatctaaaagcgtattatttaggtttacaaaggctccacctttggtacaagacaggcttccctcaaagagtgccctaagctcctactccccaatacaacaagggccaaggaccccttcagtcatctgcgctggtagaatccgacgaggtccctcgtatgaccgcgctatctccccctcttgaaggcgcgaaggcgacatgcccaacaccttgtggagcgaaacctgagagcggggtttgcccatccccatacgtcgccatctacgaccgccttcgcgaccacgtatatacacatcggcacttcctaatcttcgcttc

SEQ ID NO: 74729 - DNA, 336 bp, Zea Mays
gtcgagaagtgcaaggagaaaatgcttcaagtctcttggcttcagaagtagatcgatgaagcatcagaacaattatgtcacatagcacaacaggttgaacaacccatagaaccacatcaccagagaaacctcctccacgaagagcacaactatgatgaccacatgttcgatggtaattctcctttggtgatagagttgcaagccacaccatggccaccattgtacaggccaccacatctactaatgtatgatggtttattagacccgaagaagttcctgatgagctatgaagacttgtcagataatcatataaaagcaggaagagcttgctgctac

SEQ ID NO: 74730 - DNA, 421 bp, Zea Mays
atttttcgcatgccctgtaggcactgtctgtctgtcgtgatcatcgagccacaattgcgcctgttgcgcacgttgcgtggatttatcgtgtaccccaattaccgagccataatcgtgcctgttgcgcttattacgaatgcttgctatactgtcgtagccctgatggccgcacacgcgttgacgccagatacgctagagcttgtactcgcgtggattgtggtgggttgttcaaggtcctgaagtcacattatgtgcaaccttcgtaaacaattttgttttcgctctatattttctttgattgtgttgtgtggcatcgtatatttatatatatcgccaagtggccataacaactatatcaaatctgggaaattaaatcgaaatacaatgaaacacatagataagttaattctttgctctctcc

SEQ ID NO: 74731 - DNA, 2075 bp, Zea Mays
atccataagggtcctttaggggatcatgcataccattcgtttggagccattagttgacttcagatcaacaagtaaaatgaccatcagggtctaatgctcacaaagacattcactggttgcattgtgcttttaagcacataggaaaaatgtgtgtgtttatattggtagtgaagtgcacggcatcaggccaatgctgccaagcaaagatttttatatgcagagatgtatagtctagctcgtttttatcactgcccatggttaacccaattactcatacttctctgaaattgggtatcgatttatgcaacatttttaggtataataattttgagagagaacttataacaatagtcaattatttatggtgttgccggcagggcaaatatttctcctcatattatataccaacttgttctatatagcattattttgatctcttcattgttcagcaaaaaaagagaagcattggaatagaacagacaagaccaagaattccttttatctgggaaaaatcatctgattcctaagctttcgacaaagcaaatggagataactacttggcaagagcgaaagaaataccaatatccacctgggactagtcttcaacaacagataatactgatctcatacgaaggagtcatcaagacaagggagaatatatatggtctccataagatcttcatatttctatcacaaattaccatcaccaatagcttagtggtcaagaattatggatcttccggtgccaaggaccaatgacatattaatgcccaattttgcttcaagctctgtagtgatgtgggattttatggttattttctaactctttttacttctggtggatcagagatagattacggtaagcatgtcaaaagttggaatccaatgtagttctgctacataaactccaagtatgtgtccattcaggactgacctttaccatttggcttaaaagtataccataccagtcaaaggactatctcgagtcaatgcagtgactatgaatatttacaattctgagagatatatgcaacacaagcatagaggtcctagatagaacgagtaaagtggttcgacgggaacacactatggttttcacaccaacatagtgaaaattatcagaataacctctcggtatacttgcaacttcgtgttgctggcaattacatgtccttttatctcatagtttgcttcatgtcattcagcgacaaaaagagcaatgtgctaacatctggttgagcaaagtatgactgagatttctggtcttaaattatttggtaaggtatttttgcttactaattgaatcccaagttgtgaaatcttctatgccaaaaaggctttcatgcattatattatatatcttcgggttacttcgggtaaaaatttatgcatgaggagagagcagagaattaacttatccatgttctgttgtatttcaatttaatttcccagattattcaagcactatagagcttgatatagttgttatggacacttggcaatataaataaatatatgatgccacacaacacaattaaacaaaatataaagtgagaacaaaattgtttacgaaggttgcacataatgtgacttcaggaccttgaacaacccaccacaatccacgcgagtacaagctctagcgtatctggcgtcaacgcgtgtgcggccatcagggctacgacagtatagcaagccttcgtaataagcgcaacaggcacaattatggcttggtaattggggtacacgataaatccacgcaacgtgcgcaacaggcgcaattgtgctcgcgtcagacagacagtgcctacagggcatgcaaaaaatacacgactcagcgatggcggtctgactcaacgggagcgatccaattaatggagagcgcgacatagcaatcacatgacgcagccaagttcgaacggcacaaatattgcgtcatgttgccagggcgcagtcaatattcagctaatgccataactcatccgattatcaacgcagcctcatcggcgtgtctgagtacccattatataatttaatcgctcggcgtgaatcagaaactcaatgcaccacaaatgttt

SEQ ID NO: 74732 - DNA, 521 bp, Zea Mays
cgataaatgtgggacagttaccgctttattctcaacgttacggtttgaggagcattaaaataaggaaggaaatattcttttgatactttggcgtaactttgtagtggtctttcctgtacgatagaaggaccacattcttgtgctcttggcggtggttaatgacggcgggaggacatagatcaaccaggtacgtctactggcatggacatcgtagctctacctgacgatgtgatcggagacgcagacggtgtagctgttactccaccggcgacgttgagggcacctggaaatattgatgacaacacaagatcggcagagatggtaggagcagatcgacacatccccatgagacaatattggggcgcatgatcaggacacacctcacattctgcaaagccatgtaagttccgataagatcataatatcagttaggtacatacttttgtagtgttgtagtagcaccacagtaaatttggggcatcattgattcataaatgttaaatttctgtgcacagccagac

SEQ ID NO: 74733 - DNA, 426 bp, Zea Mays
gtcaacttatctttcagtacgttgaaagagtgctcttgtactttgccccaactaaaatgcactcccttcttcgtaagctcattcaaaggtgcagtaatggtactaaagtccttcacaaaacggcgatagaagccggcaagtcctagaaaactccgcacctgtgtgatagtctttggcataggccatccatgtatcgcttctaccttggcttgatcaacctcaattccctatggagtcacaacataaccaagaaacgacactcgatcggtgcaaaatgtgcacttctcaaggttaccaaataaacgtgcatctcgtaaagcattaaaaatagcacacatgtgatcaacatgttcatccatagatttgttgtagatcaatatgtcatcaaagtatactaccacaaattttccaatgaaggcacgcaaa

SEQ ID NO: 74734 - DNA, 522 bp, Zea Mays
attttaaacaaattatatatacatatatcattagtactattatcattttaatcatggggtaggtttttaaaaaatatatatatcataaacgacccgtctgtgttgtctacttcgcctaggggcccctaaaatcatatagccggccctggagcaatgcgctttgcgagtaagctatcacttcatggatctcgcacttaaatcctcctttaatcaatctctttattctctcctttaggtccatgagataatagctaagacaataattacctttgggcaaggccgcaggagcaagtacgcttcttgttggaacatggctcatggccttgatggggagtagttggtttgtccaaaaaaatgaaagctccagctaaatccgacagacagacatcagtgtaggctctgtccgtaaaagggcctgatcttgctgctccttacagctcacatgagctgaatagaggcaagccaatgaaccatgccaagcgttcggtttctaggaagaaaaaacgagatattctgaaaaga

SEQ ID NO: 74735 - DNA, 333 bp, Zea Mays
aaaactgaccccattcacccttcatttgcctcgccaacaaccctaattaggttgctagtttaggtttttattggtcagtttcatcatcaccatccactatcattttacaaactcaatctcgataaaccaatccaatcacccaaaccgaccatacccacataaccaaccccacccttccagcgtctcaccaaaaaccctgattcggagtccaaacttaaaacgtccataactttcgcctcagaactcgaatcgggcccattttttcaaattgcacagaattaactttcgcatccgattctttcctatttctttggattcgtcgtttttaaaatc

SEQ ID NO: 74736 - DNA, 501 bp, Zea Mays
gagatgtggggcgccatggaaagaggagacatctaaaaaaccaactggatgacaataaatcagtagtgaggggaagaagcctatgtgaggagaaaaacacaaggacatactattctagatccaaccattgcgtctaactattagctaggattcaaacaccactgggaacattattagttatccatgtttaggtagctataatttttagccaattctaatgattagttctagtccatccaaatcggttcttagtccaattaaagtttacatggtcaagtttagacgactaaagtttagtgtcatgttgtttggaaacatggaataataagagcgattaacaactagttaggctagacccaaaattactccacctcttaggtagcagtaggtttaagggaggatggaggacatgttagggcaatcatattttagtggtgcttgattgagtggcaagatggacggagtcatccctaaatggttatatatttcctttagatttgg

SEQ ID NO: 74737 - DNA, 287 bp, Zea Mays
caatagcgcagacatgacagcctcgaatcaagctagtttgataatgcagttcttggttggcttcggttgcaacgtatgagtcggtcacacatgagaatgattctccctgtctgctggttcagctattcactggcatccacctccgtagctatataaacaaggaaaccgaagcccggaagacaccattgcagcagcttgcctttgatctttcttctttcccactcccagaagtttcagaggttcacacctttcaccaattcaaggatggtgtgccacctgagatctgc

SEQ ID NO: 74738 - DNA, 386 bp, Zea Mays
accgagattgaggagttaagagccgaagttgttgaggcaaaagctatttttgagattgaaaaggtcaagaaagaatcatttagataaaattgttggtgatttccgaagcctgaaacacgaatgcttctccatggccgctaaatgtagcgaaaaattggaaatcaccttctcctcagttggagcaagatctcgcgagagaaattttgttgatgctgacatagtcagggctatgaaatggattgatggcgaagtagtggacttccaaggtgtgccttcaactcaagaagactattgcacttggatagaggcccaaagccaggcttcggtgttactaggggttggctatgaccatgtaaaggcctatttggatcccaacttcatggtgc

SEQ ID NO: 74739 - DNA, 420 bp, Zea Mays
aacttggacccgaagtttgaattaaaaaattaaatctggaatttgaaaatgggaaataaaatcagaaaaatagaaaatgggattagaaaagataaaagttttacgtgactacgatatcggccaaattcatgcccacgtagcccaggcgcttgcttcctgccagcccagtggcttcatcattcaagtgaccgccaggtggggccctctccttagcatttctgtcgcacacgcgctcatcgggttaactcgctggaaggtgggccccgtccgtcagacatatctccttcctcccgtctgtttctcaaccgaaggcgtggagctcgccgcgtatgacggatcagccaaacgagttcacctcggactcttcatctgtgcctatatatgtgactcgagcaccgcacccccccccatgaaccaata

SEQ ID NO: 74740 - DNA, 581 bp, Zea Mays
aactcgacgcgatctctctatggattaagccgacgccatttgaaggatctacaacggcgacgaggtaagctcttttggtctttttttctgcagcggtggcgaggtaagctctcgggttggcacagccgtacaagttcatttcttggttggatttccacctcctttctgctaaaccgtgacttaattaggtttaggagattttctcaaattcgacaggctattggtctcggattcatatatatagtctcctaattaagcgaggaggacaagaactttagatacttttcataaaccctcatgctcattcagattgttatgtttgtctgtactgcaccattcttttgtgttgtttgtacaaccctatttgacatttttcttgttgggggtatatgtgaatatggcatctgatctttgttgcttgtgtgagtagtgcgtagggatttgttagagatggccagatgggaaacgagtcagagaacgtgctctcaagaagaacgaggagagttgatcctcttgaaggactgaggaaatataagggagggtacaacatcactgacaagcactactagagtgtaaactcc

SEQ ID NO: 74741 - DNA, 357 bp, Zea Mays
gtgcgggcgtgctctgagcgcgcccccgagtgtcagcccacgtcgaacacgtgggggtttacttctgccagggttcaacggccgatttgatcgccttagcgtgcagatcttggcaaaacccccgtgtacggtctcttccctgcaccaaatcatatctttttgatgtgagttccaaacaaagatacggtcggagtagagagatatgggggtgagaagtctgctctgtccgagctgtccacaccgagacaaaagccatgccaagtcgtgtcaaatggcttagggttgggttcaaacttttccaaggtgttctaggggtctttgggcgccattttgtcaattgggccataaggttttgag

SEQ ID NO: 74742 - DNA, 776 bp, Zea Mays
cgtggtggtcggaccaccaccttctcctaggggaactttctgactaccctggggttgttgtgccgtcctttcagcgaccagcaccatgctcaccgcctttgtagccgctgcaatatataagtacaatggctcccctggctctggagctaccagtattggtagggacacaaggtgctgcttcaactcttgaaaggctcgttctgcctctttagtccaagagaatggctcggacttccgcaatagcttgaagaagggtagcgccctctcagccagtcttgagatgaagcggctaagagcggctagtgaccccgtaagcttttggacgtccttgatgcgggccagaggcctcattgtctcaattgccttgatcttctctgggtttgcttcaatgccccagtgagaaaccaggaatcccagcaacttccctgcagagacaccaaagacgcagttgtccgggttcagcttcgtgcatgttgcccgcagcttgtcaaaaaccagggttaagtcttccactagggtcgatcctctcttagtcttgaccacgatgtcatcgacgtatacctccatcttgtccctaattaggtccccgaaagtcttactcatcgcccgtacaaatgttggcaaggcatttttcataccgtaaggcattacaatataacagtaaagcccatccacagttacaaaagaggtatgcttcctatcttgcctaaacatctggatctgatggaaaccagaataagcatctaggaaggacaggaggtcgcacccggagatag

SEQ ID NO: 74743 - DNA, 349 bp, Zea Mays
gttacatgtttgctagataatgagccctacctagcaaaggtccaactactactatcttgtagtagttgaagagcaatatgtggagtatgccttggtcatgtcatagcgccgagcatgtcttgctccacttaaaagatgtgagtccatgttgttgggtatggcatagatagccatttagaagcttgtaatttgtaatccttgtgggtatgttttcacgctcaggcgggggtatggttatagtgggatgcaccatacaatgtaccatgaccttaatcatggtgatagtgtactttcttgaccataataccatccatcgtgtctaatatggtggatcaaagccctatcgtgt

SEQ ID NO: 74744 - DNA, 306 bp, Zea Mays
tgatttgctgccacgttgacgaggatatttaccgcggacgccagcccatcccgaccgccgtggcgttcttatcgccggcgagggctgacccttatcctcggcgcgatttttctgaagaccgatgaacagtgcgcctgactcagtgaagagcttatctgacagatcaacttggagctccattttctccaatttttatgtggtgactaagtcatctttctgcatcaaagttatatacctataatccatcttcaacttttccacaatgcttaccatcaaatagtcaccgaatcacattcaaaatcgggc

SEQ ID NO: 74745 - DNA, 392 bp, Zea Mays
tcagcctcggggacctgtgccagggtcgggaggtaggaatgtccagggcgctaaagcctcgttgtggattgaatcatccttgtcgcttgaagtcctaggcgtcggctagcgtccttcccttttttcgctgtccaactcagcaccttgcagctggaggtggtgtcgtccttccaactgatttgtggaaggggggataggtccactaggcatgcttttgtcgaggctgacgctactgacacacacccttcctactgagtaatccttctggtcggtgttgagtgggccacattttccggttgatgctgatgccgaccgcaagaaagtttccaatcccttcctcgacagcgcttcgtttgtgttcgcgagaacgtcgcaattgcttgtttctcggg

SEQ ID NO: 74746 - DNA, 716 bp, Zea Mays
cgagggaggggcagaacggggtggcagcctacccccttacgttcttcatagtagtatagatataaaacatatgtaataatcatcatctaacgaaaactttaatatgaagagaacggaagatgaaaacagatggcttaactcgaggcctcgagcgcaattcactccagtgctgatcttgctctattcatatcgatcggtcaaaataaacttcacctagtaaggctattcataagctatgagaccagaggattttctgctgtttttgcctgatgaagatactgcaaccagagtccttaatgggggtaggctgttcagaggccctcgattctctcttctgttcaaaagatggtcgcggtttgtgcatgcttcgtcagcttcgttgtccaagctggtggatattgagattaaaggcattccagaacatggttggtctctctctacagcggagcacatcttacgtggctcttgctggatttccgatatccaccaggattcggcacacaagaaaaacttttcatctttcctggtgagagcatggtgttttgatcctagaattctgcccacagaaatggatcttcatattattgaaccaggccctgccgttcttgagaagagatgtctatcttataaaatctcgatcggagtttgcccggtggatcttcagtctgtgagcctggatacaccgtcttcttctccaccgtcgtctgggaataatc

SEQ ID NO: 74747 - DNA, 1082 bp, Zea Mays
cgagaggccgcgagtggtcgtttctcctcctacgaacaagaagcaacattcagcacccagtcaacaataatcatggcaaaatcagccaatagagtttacctcatgcgccatcctttcagagtcaagctgggcattgagtgaggaattcgaagaacgcgcgccatccaaagaagcagagatttgggccaagtcagcttgactttgagaatacttcttctcaaggtcagagcaccgttgggtcaagttagcttgacttcaagagtacttctcctcaagatcagagcatcgccgggccatatccgacaacgcagctgaaaggggatgtatgactaagaacaatttgatcaataaaaacaactaaggaagctataacgtcactaaccagcgttcgacgccttcatgtcgtcgatctgtttctggagcaataatgggttccaatgcattagagacagagcttgctccggaatagtggcaccgcaagatctcagctgggcagacattccatcaacaaaagcctgcgatcatagacaaatgagcaaaagaaagataattcgctaaaacgaacaacgtagagcaagaggccaactcacctgaagattagagaggaacagtggtagacccaaggcaggaggagccatgtcatggctcgacaagggaagatcagcaggaacgatctgaaggacattatcaggggtgatctcagccccgccagcaggcagcaggctccgtgcatctagctcgccgacctctaaggcgacttgtccacttaaaactatggaaggatgtaccgccgtcgccccattggaccgaggaggggacgacccaacgtggacatccatggaggcgtgggaaagagagctcatctgaacagcctcggggctgggtcatagcttgcactacccaccagagctagatcactaccagcaacaccctcgggggctgggtaactgccggcacctccctcgagggatgggtcttctatagtagccccctttaaatctgagggctgctcagtcacctccatgggagtcgggtgactcagaccagcgtcttggcattaaagacagccctccaaagtcgac

SEQ ID NO: 74748 - DNA, 947 bp, Zea Mays
agtaagcgtgagcatgtcgcaccgccttaagccgttgccgacttaagtcgattgctccgtttgtagggcatagtggtcaccccgagttaagtaagcgtgagcatgtcgcaccgccttaagccgttgccgacttaagtcgattgctccgtttgtagggcatagtggtcaccccgagttaagtaagcgtgagcatgtcgcaccgccttaagctgttgccgacttaagtcgattgctccgtttgtagggcatagtggtcaccccgagttaagtaagaatgcaagtcaatcgtgaacaagccgagtatctttgaaatctttctttattgatgacatatttccactttacagaatacattgtcgccccagcagttttgaaatacagcctagggataaaactttctgaggtgctttatgttccaggagttcccaacttctgtgccatccatctgagtgaggcgatatgatccgggccgagtgacttctgctactatgaagggaccttcccataagggtgataatttgtgccgtccctcccccgttagaattcggcggaggacgaggtctcctattgaaaagaaccgctgccgcacagctttgtcgtgatagcgccttagagtctgctggtaccgtgctgattggattactgcattcagtcgctcttcctcaagtatatcaacgtcctccagcctggtggcctcagcttctgctatgctttcgaagatcaatcttggcgccccaaacttgaggtcagcaggtagtactgcctccgatccgtagaccatgaagaaaggagtgtttccatgcagggctcggctaggttgggttcttaagctccaaacgacataaggcagttctcttatccattttcctgctaatttttcattcttatcgaagactcttttccggagtgcctccaatatcattccgttggctcgctcaacctgcccg

SEQ ID NO: 74749 - DNA, 377 bp, Zea Mays
gcgagtattctatacacaagtggatgtgactccagaaggaaatcatgtgcttataggtacattccttgttgcccatcatcctgccaaagtactttttgatactggtgcatctcatacattcattagtataacttttgttgtgaaccatgatgttccaattcaagaaacaaatatgagagttattgtaaaatctcctgggggaaagttaggcacaaaggaagtagcatttcatgtgccagtagaattggttgggcatacctaccccaccaatatgatagtaatgaagggccaggatatagatgtgatcctatgtatgaattggctagctcaacatgaagccattattgacacgagaaaacagactattcagataaatg

SEQ ID NO: 74750 - DNA, 620 bp, Zea Mays
caagtatccgttggaaggagcatgcatagacctgatatgtgcagacgtaccgaaccaagaacagtagtagcagtcctaggatcatatttggcgcttcccaaatacatgtgacatcggactggtctggtccaccaccgaggcgccacatgccaggtagccgttggagatgtctgttggagccgaggtagtcattacccacgaagtctggtgagccatttttaattttctcgagtgtagcttatttgcaaaaatagaggtctggtgtgtcaggccaccgaggcttcctacatgcgcctctagaaaattggttcgatgcaccctcaatacccatacaactaaacttgtattttctcttgattttctactccaaaatccttttcacttaatccaaaggaattaccataacttagataaacattcttagtgtcaatccaaccatgtataagccatgtacttattttatttgattattcaacttaatttcttgcacacctatcttaattatatgcatatgcatatttaacaaacatgttagtccatatattcttgtgttgagcattaaccaccaaaacattttatagaaatagcacaaaggcacattttcctttctcttacaaaat

SEQ ID NO: 74751 - DNA, 408 bp, Zea Mays
tttgctttgttgactggtgcagaaatgcttcatctaaaattctgaaaggcaagagaaaggggttcaacagtgttgttatccttggagcctctcgaaacatagacataagtgtgttttcgatggagctcggccttgccttgctttcttggaggaggggttcaaagaggaggagctatggtctctgacaggtgccaagaatttgtgaactcttttcaaccatggttgattaggggttagtttattaatgtgttgtgtcagtcgagtgatctaggcgtgttgtgtgtgtgttttgggtgtatttttctttcttgtatgtctaggctttagtttcttttcttctcttattaatataatgatacatagctctcttgtgtattcgagaaaaaagtataacactgaaacacatgt

SEQ ID NO: 74752 - DNA, 302 bp, Zea Mays
atcaatgtgtaacacatttgtagagctaaagcatctctaccttcgtattgttctcattggcagcagttgtataatggacatatagctgtatatgacccacaggttcatgctcaggttctcgaaaaattgaccaccagtgtagcttgttagcctgcacacaaaattttagatataccatgcgttgcagccatgtctctagtagcttcaccccctcctatggtacacgaaggaattggtcagaaaaggaaggaggcagcaatgattgctcgtttctgagtgataagacaagttctcgatcacaa

SEQ ID NO: 74753 - DNA, 928 bp, Zea Mays
gttgtctgacagtcgaacaaaaccacctacggatacaaccaagcacgtgtcttcggcacccacacattgccgcagcaggcgaagtccccatctcatttcacaacaaacaatatcatagtttacatacacacagcaaaaggccaccagccacattgcacaaataaatacctatcttatcttgttaccctccctctttatcgcaagccaggggagggcagcgttttcactcactaccgcaatacaagagcgagggcagcataaacgctatattggctcagccttcgggataaggcctgcctcacgaaaattaaacaacatcaccctcaactcctcaccctaaatagactccgcagatcctcctccccaatacacgtcccggacgacgaagacatcaaatctcgttggccatcctgatctagccgaaggcgggtttgttccatccccatccgacgatgcctattactctgcgacataccaccaacattatgcttcgccaccacccttcgccggtggtactccctagtcctcgcctcagctggggaatcggatgctccacgcgcttccagccgcggcacaaactccgctgcgaccacatcgaacgcagcaaaataatccaaatcctcattcgaagactcctccgtctacaaaaacgggctcccaaactcatccccatcggatgaccaagacccagtttccgtaccagacaaattttcattaatagacattgcactcgcagacgccacaatattactatcatcagtagcggttgcttgcgcgggcccagacgtcggaacctgcgcagcaaccgacattcagtatcacaaaaataaagtcctacatccaacacccctaactcaatcccgccacctgcgaaggggtagccgacgctgcagggtcttcggcagccgacacggccgccaccgaagtg

SEQ ID NO: 74754 - DNA, 330 bp, Zea Mays
ctcaatttgagctttgagctgggcgtggcacgtcctccctagactcgaccctctccatgggtatatatggtgccgcatatgaaaccctcgaccatcaaacctagtgtagcccatagccatgaaccgagccatcgccatagccaccgataaaaggttgtatctgccatagccaaaccaagattttatcatcgtttccaaccttgatgggcatcataggggtttagccatgaagcggggagcttgcaatagttttttccgagcatgaaaatcaaccggagccacgatgaatccctcaccgtagttggaattcgcgaccacgttgcaccacat

SEQ ID NO: 74755 - DNA, 635 bp, Zea Mays
gggagggtagcgttttcacttactagtgagggcatcacacactacatcagctcagccttcgggataatgcccgcctcccgataattaaacaacatcatcctcaattcctcaccatcaaacagattccgcagatccccctcaccaatactcgtcccaaacgacgaggacaacaaatcacgttggccaccccggtctacccgaagacgggttcgcaacagccccatccatcggcgcctaccacttcacgacacttcgccaacgctatgcttcgccaccactttttgtcatcggtgttcggacctcgcgccagccggggatcaaacgcttcgcccacctctggccgcggcgaagactccgccgcggccacatctagcgcggcaaaataatctaaatcttcatccgaagactcttcagtccaggaaaacgagctctcgaactcaccatcagatgaaaaagacccagattcagaaccagacaaactatcattagcaggcactgcattcgcggccgccacaaaattagtaccatcagtaggggttgcttgcgcaggcccagatgtcggaatctgcgcaacaaccgatttttaatatcacaaaaataaaaccctacatccaacgcccctaactctatcctgc

SEQ ID NO: 74756 - DNA, 353 bp, Zea Mays
gccacaggatcctaatcttacggtcatgattttatgagatgagatccaacaggattcgtctgttaacagatcagtggcccagatcgttcacgcgaaagggtacgccaagctctaatccctaccatccatcggtaatcgacggtcacaaggttctctccctccacgacagtcgaccatggcggcgcctccgacccacggcagaggggtagtcggatccacgccaatcgatggtgcaagacactagtccctattctgaaggtggctacatgatttagagaatacgacgaatgcgtggtatgagatcttaccagagattacattggtgggacaactcggcgacgacaacggcggac

SEQ ID NO: 74757 - DNA, 570 bp, Zea Mays
gaaacaccgcgttcagaaactacagctacaaacagcttggtgctgctgatgggtggaagcagaagaggatgagaagcaaccagcttgcactgattccacggtcctcctgggagctctacagctacaaggaaatcggagggcaggggcaacggaaacttcgaactgagtcccagcagttaaaagattgacggggctgcactgaatggaggaacgacacaacaagactaatgagcgcagagattttcagaggtgtagataacgcagattgaattgaaggtgaggcatgtggggtcgttgataatgaacatgaagcgcaagatggacgagggaggactgacgctattgctgttactacaactacaaggccatgcctgacagatggatcgtatgcactactgcttctgatttgcgaggtccatggatgagtctttgctataactacacatatgctctacatgtagatttatttacactgtggaattgaaaaaactcagcaatggtcgtctgccttcaatggaatagatagtagttgcctggccatcagctgcctggagctagcttcgagtacca

SEQ ID NO: 74758 - DNA, 768 bp, Zea Mays
cacaaagtacaattaaatcaatgctactcccttgaaacagtcgtactgcagtaccacaaactcgtaaatgatgtcaaaactgcactaatacttttcaagaaattcatgttagtcagttcaggagaggaattgacagactagggttaggctatgttgctagggatgggatgacgcttattatggtaaggttgatgagtgtagtgacttgacaccttcaaagaaaccttcggccacttctcatcctatcaaattccctccacctaaatctgccatcccagctgtgagagataaagtgtttgagtagcctccaagagccccacctcaaaaacaagtgtggtttcccaaacctaaccatctaaaagaagccacttgataccttgcctgacatatctagtgatcccctttctagagcaccacagccacccaagatgaccctttcccacaaaaagactccacctaagagagaggtgaggtaccactaagagtattcactttgttttgttaggaggaagagagatgagagagcagtagggacatgcaacactcttctcatgatgtgcatgatcctcctattcagagacgtgctactagacctagaggtgttttgccttaggtggttaggcctaaagccgtgagactaaacggcggtcgtgtctgacatggtgttggtcatgtgccacatgaccaaagatctcgtggcagaggctctggttcccacagctctagaagacaacgatttccttctcatggtgattgctaacccctatg

SEQ ID NO: 74759 - DNA, 626 bp, Zea Mays
tttgatccctagcaagaaagcatccgaccaactccaaagagtcccacgaaggctcgagggctgctatcgagtacccatggtgaggcccataaacctctctttagtctcacccgagcaagtctgctaggcggggcaaacgaccaagtcctcgccgagcaagtctgcaaggcgaggccagcaaccaagtccccaccaagcatgcctacgaggcagggcgtacgaccaagatcatgaacggatcgcaaaggaaggaacccagaccgacgttgtaggcccacgacgtcgtgacaagacacatcatcaccaaactatgttcaggccatgtgtacagtgccaagggggaccacgacaacagagtctccataaatgacgacccacgtactagaaaaggataggacaacgtgcctagtgcatactcacccatgttggagggtggcgcaagggcattgacagaagatgaagtcatattgtacatgaacctcaaccttacagtgagcgcattcttcgggacacatcaggtgcgaaagcataggcgtagagcaagctacaatgactcgtacgccggatggataagatagaatgtcataccaagagtacggaagcacacgacccgtcggaaggagcca

SEQ ID NO: 74760 - DNA, 457 bp, Zea Mays
tggtggcgaagattctgaggatcgaccctggagaccaagccataccattttcagaaaatcttccattaagcaaagtcacctcgaaaacatgagggggagatacttttgagatatgtctattgtgagggctagcggagacaacaacgtcccggcccctaaggaaaacgaagttgtgatttttcgaagcttcttcaaagttgagcttcggttttcactgagtaagtttgtagttgaagtattgaagatctatcaagtttttctccaccagctgacccccgaagctatattgaggatggaaatcttcgtctgggcaacaaaaagccaagggatagaaccaagtgcaaagtgcttctgtagcatgcacgaacttttgtatgagacaaaagccacggggaaagaacagtatcataacaacttcggttgttatggatttatcgcccgctccaacgcaagctac

SEQ ID NO: 74761 - DNA, 1576 bp, Zea Mays
ttggaaattctcaaagtccagaagaaaaaaaggaaaacatgctacaggattgggctgaaactggcctgggttggcccatttactggcgaaagcgcgtccgcgcgcgccggcgctgctggttttgcagaaagacccctatcggtttgaataactagaaatgagtcacagcgctatttccatgtctcactgacacgttacaaaaacatcccccgagttctatttcttcaccgcccgaagtccacgacggcgaacagtgtagggtcgagctccggtgagcttgtaccggccggattacttgatgacgggtgctctacttcagttgaaaccaaattcaaggcctaacaatcgtttcccctcaactaatttcacgaacggcgctctaaatcatctaggccacggggacagcgcagaccacaagtgaacaagcgtgttcccgacgatctagggggtcctggtctaattggctgggtcgaggagcatcagggacacacaaggacactaatgagcacggggtatgagcaaacctggaacaagctagccccggcgagggtgtttctacggtggcagaaaccgatttgggggaaatcccaaattggcgagctctgttgatcaattggaggcacggtttagtggcttgggtgcttgactaccttacggacccgacgacacacttaatttataggctccgggggcggtggccagtgaatttggagttgacgcggtggtggtcagagagaagagttgcactagcgcaaagattagtggctttcactgtggcaggctcaccggcgatcaccgggcatgcctaacacgagcgactgcgacgtggtaattgtcgaggcacgtggcgttcggtcagtaggtggccaacttcggtgaattatctgaaccagccgcaaagcagaaagggggtgcgacggccagccggaacagtgcccatactcaacagcggtgaagatctttctactctggggtgttatccgggcctaagcgagcacaaatcacctcgccagcgtgaatccacgcgtggggttcgcctatggtcaagggatctaaatctgctgatattttcgttactgtaccattgcgaacttcttcagtcagcgtggcagagcgaatggcagagaggtttgctccaaattttatgtattgacttgatcatatctccacatcaaagttataacctcatagaccagctttaactttgttacattgttcaccatcaaatagtcacaggatcttactcaaaatcgaacacaaagttcatccaacttcactatttctgaaaatttagacctagggttgcctgacagcccgactttggatctatttatcttcaaatttctcatgacaccaaagcttaattcctatagcaaagttgttctcctataatagctctatcatcttgatgtattgatctaggacaaaatcttcatggattgagaaatataaagccccaaagatggtccaaattactggaattcagacttaatcatgtgagggaaatggagtggctttttgcaaataagtccaattcacatcctttgacctgtaaatcttcaaacatgtgaatcat

SEQ ID NO: 74762 - DNA, 370 bp, Zea Mays
tggccatcctataaatatccttttctccctgctttgtgtccaaccgttgataaaggtcgtcataggtttgaccccgggctctactaaccgctcgctttgcagacttcttcactatcctgtacttctctatgttgtctgcacacttgtcatgatgtaagcgtttgtagcaatctttcttctccttgatagccttttggacatcttcgttccaccaccaagtgtctttaactttccttctgtttccttgactcaacccaaactcttctgaagctatctttcggatgcatgtcaccatcttcctccacatgatgtttgtgtctccctcttctgcccaagggcgctcctcgataactctctccttgaaagttta

SEQ ID NO: 74763 - DNA, 538 bp, Zea Mays
aagagaaagagggttgtgagtattctcaaaaggcagaccattcgatccgtcaaagaagatcagagggctgttaagaagcataaagttctagcagagtcgaaggattcggctcccatagaacgaaagcttgttaggatggctactgcagagatgaaggtacaagatgtaccagaaaagactgcgggtccttctccgtcttcctctatcgatgtttcagaaatactgaaggtaatgactgaacccttcctggttgcaatgctaagtcccctggggtcatatttgactagcctattgcaatcaaaggagaagggatttgaacaaagctcgggaggaaagaagactgcttcggctaccgagggaaatgtcgggggtcagaagaaacgacgaatgatggacgtaatgcaagccatccaaaagaccccgccctcgacttcggcggaaaaaattgttgtgcgtgctaatgccgaatatactaccgaagctaaagctaatgaagccacacgtgaagctcagaacctcgggaccacaatgtcagaga

SEQ ID NO: 74764 - DNA, 1156 bp, Zea Mays
ggggtgctagtgcggactcattctgaatggtgaatcactaggattcaaacgaaaaacttgaaacacgggggttatactggttcggaccggagccctagtccagtgtagtactgatcgtagtattacagtagagcgtgttacaactggtgggcttgtgtgcgtacgaggggagagggaccctcttttatactttaagggacgatccttacaagtgagagagggagaaagacacaaagtgagagagagttctttaactatcgccctcagttgtattgcgtagtgggcccctctggggccaatcttggggtgtgcatgcgcacgttatagctccttctgacaggtcgtgtgccttcatattccttgcatggcgctctatcccatccatctacccttcaggaccctatagtttactctatgcccatgccatcgcaccggatgggtcccacagaacgtactcccggtaaggttgaggttcgtgtccagtacgacttcatctttcgtcaactcccttgcgtcacccttcagcatgttcgagcacacgcagggtttgccgtcatgtccttcctggtacgtgggttgagacttcgatgccatgactccccttgttgtcgtacacatgacgtagacatggtttggtgacgttgttcctcatcgcggccgtcatggggaaacgacgttggccctggctccttcctcgtggatccactcggcggggacttggttgactctcacctagcagacttgctcgataggaacttggtcattcgtcccgtctcgcagacttgctcggcgggggcttggtcgttcgtctcgtctcatagacttgttcagcggggacttggtcggtaaacaagtcgaagagaggtttatgggcctcgctttgggtacccctttcctgggtactcgacaatgatctaagcatacatacaaccgtggtttgttatgatttttttgataaagcgatgagagctggtgggaggtttaaatgttaaatttgatctatgtttgcaccatgatctaaagatctagaagacttacttgcatgtttggacctaatacttgcacatgtgtcgttttcttttaataaagctgcacgagctgtggagagttcaagcgttaaatttgacctatgactagatcgtaatctaaagatttt

SEQ ID NO: 74765 - DNA, 753 bp, Zea Mays
ctaaacattaaaccccaaaccctaaccctcaaatcaaaacccgaaatctcgaatcccaaaagcctaatctctaaaccccgagccccaaaccctaaagcctgaacattgaaccccaaaccctaatttgtgaaccctatacctcgaaccctaaaacaaagacccgaccaccaaaacacaaaactctaaaccccaaactccaaaccctaaaaagtaaagtaaggctgttttggcctcgcgtgagctacaacacatgttttcatggccgaacaaccaatttagtgtccaaaccatagtacactagtgtccgaaccattgtacacgcatttggccccggaggccggtaaggctatttttggcctcccgcgacacatgttttcatcgtcgaacaacaatttcattcctcccgtccaccacccatgttttggccactgaaacaggtaaggatgtttttagcatccagtgagctatagcacactaaacctcgaaccccaaaatcctaaaccccgagacccaaaccctaaaccatgaatccggaaccccgaaccctaaaactaaaacccaacccccaaaacacaaaacctcaaatcctaaactccaaatcctaaactccatatcctaaacaccaaacttcaaatcctaaaactcaaattgaaatcctaaacctcgaaccccaaaagcctaaactctaaacacagagccccaaaccctaaagcccgaaccctgaaccctgaaccctaaattgtgaaccctata

SEQ ID NO: 74766 - DNA, 354 bp, Zea Mays
aagggatcgggattagatcttagatgtcagttcggttggggaaatcagggcggtctgtttaggatcacacggataggatgagatctcccccattttaaaatcgatgccgtagatcttggatctagtggccacaaacgcgtactggtttggtttttaggagatttaatctgagtcgtaagtttgtgattgggttgctccacacataccccttcagccatggttcttttattaaagagtccttagggaagctccaaattaaccctccatccacccttattcaaagaacattgctagcagacccaaaaatttataagagtgaccctacactctctagaaataatagccatcgtccgg

SEQ ID NO: 74767 - DNA, 355 bp, Zea Mays
ctttactatgtgaacattgtaaaactttacagtctaaaactctgttttgggtgagtatatgggtgaactgttgaacatggtctttatctttagcagtttatctatttttatacttatatttaaactttacttttcgaacagtgcagtgtatagtgtaaaacagtgtttttaggtaaactatgagtttagatgggatgatattagagtagagacttgtttgtcagaaagacctggtagccttgaatctgggctttacctccctcctatcccagagctcgtttcgaaacaaggacacaatttttccttgatgtgaagtacctgagattttactgcaactagcaaatgtgcccacgtg

SEQ ID NO: 74768 - DNA, 617 bp, Zea Mays
gtggggcaataacataggagacaaatcaatatactagaccatttgataaaaatagtttcatgataataacatgaagattaagtgataatatgatgagtgttctaaaataacatgaataccgaatctttaatttggccaccctaaaggagagttggagagaacaaaggggtggactggcggggactaggcgttaaggcgaagcgagcgcatcagcatgtcggtgtggagagtcagcgactctaccgcaaaatgacgacggtgaggcgacaataggcgtggaatagcgagggcaggcgacgatgcgacggtagatgacgacgatgaggcgaaaggcagtggtagcaagcgacaaccattgtcgcgttgcgacggcatgacgggacccttgtgagatagcgagggcgggtggtgctgtgatgccaaggtagaatcccactaatagcctacgcatccaccagtgcagattagaaggcagagtagttgtactgcgtgcaggataccgacgtggcgacgagcaccacgactcgagtgggagtgggctgagtagtgaagcatcgagaaaaagttagatgaaagtctagttttcattaaatttattccaacctactatataaaag

SEQ ID NO: 74769 - DNA, 1696 bp, Zea Mays
gtttcatctcccaacaacacaaatccaaacactgtacactgcagatggatgttagctccaataaacatgcccagtggtttatcatatatattggtcttgtgtgttgtatcaaaggtcacagcatcaccataatctgcatattccccctgcatacttgcgtgtgaccaaaaaatactcactattttcccatctttgtctagctgaaaatcacaaaaaattgtggattctgtttcttgcattccgtaaagaaagacagaagtttggctacatcatttgcgcagttttctcgtctcattgctgccctcttacaattgttgtacaaaaaatgaacatgcaaacatttactatagtaatatctatggcactcaatatatacatagtcaacacaaaagattccttacatgtttttcagatcttgagcagttaccggtacgttctctggcccatcatgcatgtctaatataaaatcaactatgcaatgctggggcacccggctatcatgcattgcatcaacaaaatttatgaactcagcatcccgacttttgttgcaacgtagatgttgtttctctgcttcgtcagttatgaactcatggttatgctccaaattcaccagttcaatctttgcagctaccacatttttttgatcatcatatttttttttaatttgattccagccttacattgcgtacgaccagaattcctattcctcatcctaggtgtatcatttggttttggtgcacttttaccttcacgtgaacaatttatccacttactgaatatattctccatgtatttcttcaatggaaatccaacttcatatgcataccttttataaaatttatatgcatcatcaatatccttgaaagtcatccctactgttggcactatattcagatcaatgtttttttgctgcaattcattgacaatgttgtttgtaccacagattatgatcataacaatctaatcaatcaagaatcaaaaacaacaattggacttacatgtgaatgcaatatttgaggcgtatccatctctctagagctaatattagacatcggaggtcgaatccgttgttctccttcctcccctatgcttatctcgtcgattacaggccccagtagagcaggaggtggtgtaaccattaagttaccatcaactactccctcagtgtctggaccaagacgaacgccatctcctaccatcgccggcgattgtccagaaccggccatctccaccgccaactagttctgtagtctggggtatttttttcgaatgaaaggaaatcacggatgctatacttaacaagtaaccgcatccacgtttccagggtatttccataatttctgaaaccgtaccgatattgtagcaatgtacatgtaatacaaatatccctaacaaactacttacgcacaatgactcaatgttttacaccaaacagtatacactatatatgcaacatttatagcgtatctgttttgtgccatatctttcaacatcttattcaatattatctttaactgccaccattataccccatgcaagatccataaattccgcgcccacgtttcagagtaagcacatttgcatgtggaatctaatccctataattccgcccactaccatatgtttaccgccttgccattaaccaaccgcgtcacggagccgtcggtcttgcatgctctctgtctcgtctccatca

SEQ ID NO: 74770 - DNA, 948 bp, Zea Mays
caaatttggagtctcgatcagaaacaatggacttaggtaccccgtgaagcctgactacttccttcatatacaagggaaccaattctgaagctgaatttgtggtcttcatgggaataaaatgcgcagacttagtcaagcgatccactaccacccatatagcatccctgccccgaggagaatgaggtaagcccaccacaaaatccatggtgatatgctcccacttccactccagaatttccaatggcttcagtaaacctgcaggcctcttatgctcagccttcacgcgctgacaaacttcacaggcggccacatacttagaaacgtcaaccttcatccgcttccaccagaagttttgcttcaaatctctgtacattttggttacaccagggtgaacggtgtaaggcgttttatgagcttctctcaagatatccatcttcacctatgatttctgaggcacacaaagatggccccctgaaatgaaccaaatcattctcatcaatggtgaactcccggggtttaccatcgccaaccctctttcgagcttcctgcaataaacgatcctgctgctgagccgcacgcactctctccatgagggaggattgaataagcatccgagtctcctcactagcggtgtcgacatagcacaaagtgatccccaaacggtctagatcagcaatcaaaggcaaggccacttttggaaccccggacctgctaagggcatcagccaccacatttgccttccccgggtgataatgaattgacaaatcataatctttaatcaattcgagccaccgacggtgcctcaaatttagctccttctgagtgaaaatatacttgagacttttatgattggtgtaaatgtcacaagactcgccataaagataattcctccacgattttagagcaaagaccactgcggttaatttaagatcatgagttggataattc

SEQ ID NO: 74771 - DNA, 350 bp, Zea Mays
tgttcctgatattgaaagccttcgtgagactattttaaaggaggcccatgactcggattattctattcatcctaggagtactaagatgtaccaggacttgaagcagaagtattggtggtatgggctaaataaggatgttgcttcacatgttgctctatgtgatgtttgccagagggtgaaagcggaacatcaaaggcctgctggtttactgcacccgcttaagatacctgagtggaaatgggaagagattggcatggacttcattgttggattaccccgcacaactactgggtatgactcgatatgggtgattgtggacaggctaactaaagtagcccattttattccag

SEQ ID NO: 74772 - DNA, 570 bp, Zea Mays
tgttaatgtacaggaccaaacggatcacaggcgtttagtgtctgtcagttctacaaacaagggtggttacatccacaagatcacgatgtaatagcgcgaggttccgttcatcgaatgccatgcaatggaaatcttcttgatttatgctgcgcgggtcatctggctaggaatacgactccacattcgtagactccattcatgctgcttaatttgaagccgacatggcacaacaagcagatttcataacacatcttccctatcgcaatttgacagtcagatctgggagaagttatggttcgcctccacaactaaagaatctcactcgacggagtcacattaatgctctgagaccgaaccctgtctatgatcttctgcctgcctgttaaatcttcttcgtatccaacgacctgcagaaaaaagccagatttaaatgagtcagacaatgttttttttttttgtgattgccgagttattcgatagactacacacctgagattctgtctgcgtctcactgaaagggtagtaagtagtaggagctggggaggggactggtacagagtttaagttttg

SEQ ID NO: 74773 - DNA, 671 bp, Zea Mays
atccgaataattttatgaatcggtaagcaacgcggaccatacgatccagattggacgcgcgagattagatcaagctctccttgaaacggtatgcgaccgggatcgtcgatactaagatcgacgcccaggagacgagcaagccacattctaatccgacccatccaatccaatcccgacggcccagatgttaattagatatgatccaatcccagtcgctagttccggatcccacagttcacaccggtccggttgaatcgttatgtcgcttctaatctcagccgcacacaccagatcgaagggccaggaggccatcgtccaccccatacccatccggcacgatggagctttctccccacgacggcgacaggatcggcatcgggtgccccacgcatcaacgacgcactcctgacccgactacccttcacataacttgaagcataaggcaaacccagtcatgggtgtcttaccggggatggagatgcggtcgacccagtccacggtgtggagaggaactgcatcggtgtgaaaacgacggtgcggaattgccaccgcctctgcccgaggtcaacacccgattccttccgcccaagcgccccaccggtgcagtcatgagaggtaaaatgctgccgagaaagccaatccgcgaagaccagatcccgccctggtgttcg

SEQ ID NO: 74774 - DNA, 845 bp, Zea Mays
aggaataggaacaccagtgtgttgaaggatatgagtcatgaacgcccggtgctctgccctgactgtcaagggctactgctggagggtgtcctagcggttctaaatagtctagaacatagacaacatccgctcggacatctgttgctggatggctgcctgacgagcctgctctactgccagatgagcgtgctgctgagcgagagactgaagtatggcggccaaagtagggtcaatcgctggaggagcagcactggagccaccagcctcatgatcatgggaacgaggtggcacaggaggtggtggcagaatccccagatcctcatcatctgaagaggtgtcagtagtggcaccctgatcctcaaactgacggatggcctcatcgtcatctctgaagtctggtgccaatggatctactaaagccggaactgtgtcctcaggggctgggtggtagaatctgaactgaagtctggaggcatcaagggtgacctagaactaagagggactgatcagctgcgcgaatatgtgacagaggtagtgcgcatagggcagctgacaccgagttcgcagtccatccaacactgtgtcctcaatatcacagatcaagaagtcgacaacatagaacacagagtgggaaaccagtgcatcgaggagccatggctgaatatgagtggtggcctctctgtatcccatcgtcggtagcagggtgcgcctcattagctcataaagaaacttcgcctcttgggtgaagtctgtaggagagcgtcgagagccatatgtgagcagaggccggaagagagcagcaacatgagtgatgccgggagctactccgccgtgaggacgacgac

SEQ ID NO: 74775 - DNA, 633 bp, Zea Mays
gattatatgagtttttggtcatgtcgttcagactaactaatgcaccaacatactttatgaacttgatgaataaagtattcatggaatatctggatcagtttgtggtcgtattcattgacgaaatactgatatattctccgaatgaagaaaaacatgaagatcatctaaggctagtcctacaaaagcttcgtgacaaccaattatatgcaaaattctcgaagtgtgattttggttgaaggaagttgctttcttaggaaatattgttactgatggtggaattaaagtggacccaggaaagataagtgagataataaattggaagcaaccaaaggatgcgtccaagattagaagttttcttggattggcaggatactacagaagatttattgaaggtttttccaagttagtgaaacctcttacctctctactggagaaaggtaaagagttcaagtgggatgaagcatgccagaattgttttgaggaactcaagaaaaggttaaccactgcaccaatattggtaatgtcagacattcacaagggatttgatgtgtattgcgatgcatcacaccttggacttggatgtgtgctaatgcaagaaggaaaagtgatagcttatgcctcaaggcagttgag

SEQ ID NO: 74776 - DNA, 420 bp, Zea Mays
gtgagtcagattaagggaataatagtcaagaaggccatgaaagaagtggaagacgactaaacctaacccctgaataaaaatggagcaaaaacaatagattcgtggctgcaatatttatactggttcggacagaacgttcctgcatccagccatcggtggcttgcgctaccggcaccattgatgattaaactcgtagttgtggttacaagcaagacgggaaagggaggagaggctctcaagtctcttgttcgtggtggaggtggttacaaggtggagtccaaactaagtattggcttggcgacgagctccggcctccaggtcctcctcctgttcgtcggtcttctgggcgtcgtctcgtcaaggtctgtccttgtgttatccgcccgagagaaagaacctctggagtctgggaccaacctc

SEQ ID NO: 74777 - DNA, 412 bp, Zea Mays
agagcatcacattgtttgcatatagcagatgacaccacactttattctttttataaagaggcaaaacacaattggtgcgagagattctccaaatttattcatatatcacgtagcactattacaaatccttaaaggaagcaacaacttgtcattttttcgtgagacatactctttcttctagctaaatgaaatattattcttccttgtcacatgcaccaatcaaagctggaggtcgattgtctacaactactattctttctccagatggggtttccaaacacatggttctctcagtatgttggattactgccttagttctttgtaaccaattctttccaagaatcacatcctttcccattgattctatcactataagatcagctggaaaatctatcccattgattttaacact

SEQ ID NO: 74778 - DNA, 704 bp, Zea Mays
atcaacttcattcgaatatatgtatattatactttccatctcaaactattttggaaataaaaaaagttgaaacttaacaacaagtcttatttagtggattaaatctctccttaatccatctcaatcccgatctagacgtaagcccttctcgcagcgagaaggacgcacgggatcggctacagtgcgtgcgtgacatctcaggtgcgctgacgacgacggtaccttcaggtctggataggatgctggttgacagcgttgcactacagtcaaccttgtgttgtcctgcgcaggtggactggtggttttgtcagcagaaagcgcatgcctctcgcacgcttggtagccttgctaactgcttcatgaactgttagcctgatagcctcacttcccacacaactgaaactcgctgagtaggcgaacaccgaaacttagcctcacttccatagagtgtttcagtaattaataccgagaccaaagctagctaccccgtttctgaatctgcagccatttggaggcaggcagagctggtggatcgtttaccaacctgtctatctgcatctggaatcaagatcggattggattggaggctcaggcaattaggtttaatcaacctgctttctactaccatgcatcggcaaaaaactggctacgtacaggacaaatcatcttttgcctatctgaaacgaccatcgtggaaatgcgat

SEQ ID NO: 74779 - DNA, 758 bp, Zea Mays
cctttccttcttgcatcttcctgctatgaagtagtttccacatttgcttcacaaactcatgaagtggggtgtttgaatcgacatgagcgctcttcacgagtttgttcatgctctcgctacgttgtgtagagaccataagcccacaatagtcatgtttgaaaaaaaacaggaatccattccttacgcatttcatataattttctaagagtgccatcttcatgcaggttaaattcatcaagcaacattgtccatgccgcctcaaactctatttcagtcaatggatgatatactatagactggaattttgtcttaaaatccgcttcagcataacgtgcatacaactcatttagaaatggcatgtacctattttgcacatgccatagacacaacctgtggactgtgtttggaaagacccgacgtaatggcactggcattgcagggtcttgatctgtaaatatacattgtgagacattattagatgattatttatgtaaacaatgtatggtacataccaaaacatgactcacatgcattgtaaatatgcacaagttattgaatttatactccatgtatttcgagttcatatttgttatatatacataaatcatacctgtcaacattactcttggtccttcagtccccatgcatgtcttgaatgcattaaacacccactcgaatgtttcaacagtttcatctcccaacaatgagaacccaaacactgtgcattgtaggtggtggtttgcaccaacaaacatccc

SEQ ID NO: 74780 - DNA, 696 bp, Zea Mays
aggaatgctaccggagaggaagacatatggtgcctgtcatgagctgtgatgccttatcttttgttttgggatggcagcaacgaaccgacgacaaatgattgggggtcctgtcctccatcagtttttggttcgctttgaggctggggatctcgttgtagcatgctggacctgcctgcacgccgacggtccggatacggagaagggcagcacaccacagcaattcaactcatagctgtgctcagccagtggatcttggatctgctgcttctatagggcaggtgctttgcatatggggcctgtgccaacaccaacaccaacaccccacctgatcaaataaccgtcgcccatccaatggtcctatgtgtcttctgaactcgattattgcgatgcaggttcctcgtcgttcctagtattttttcggtgaaatcgttctgcaaatgcaagacaacaaattcaacgtaaattccaccaaatctcgtggatcagcatgcactgatcatactgatcagctcctttgagccgattgtcatcttttccgggttggtaataagcaaacaaatgaatgtaatcgtgcattgcaaaagtaggaacatccacgtctataagctgatgacgatcatcatgcacgcgagcacgaatcacggcctccaaatatgtccatccaggataaataatttgactaaacataaacaattt

SEQ ID NO: 74781 - DNA, 629 bp, Zea Mays
tgcagggcttaattcttagcaacgctttgagggagcagaagaatgctgaagatgaaagctgtacgatagctctcggcaaccttcgatcagaggtcattaagctgagaaatgaacccttggagaaggataaaattctactttcattggtagacaaagtgaaaaaagacgaggcgaactttaacgctcaatccgaagctcataaagccgaagttgaagaccttcggaaaaaacttgccgaagctaatgaaaattttgaacttgcaaaggcgaagcaagaaataagtgaatggtcaaacactaggctggagaaaaatgttgtggagcttcgcgattccaaggagaaatgttttgagaaatccttggaatgtgtgagaaaattgaagaccagctttgccaaggtgggtgcatattcttccgaagagaatttcattcgaggcgatcccgagggagttattgattggataagcgaagaagccgaagcttttgaagagattctcagtgatcgcggggacatttgtgcttttgcaagcactcgaggggttgctgcaattctggagaaggttggttgtgatcatgttaaggctgcaacccataccgaaaccgtcttctccacagacgacacgagagac

SEQ ID NO: 74782 - DNA, 306 bp, Zea Mays
caaggttgtctgcaaggtcatccttcgacattgcagataggccaacctctagcttcgggaatcctatatttttgccatctcccgacaaacagatatctccttattgtctggaaggcagtatagaaagttgtcttcattagtgccattaaacaccaaggatcctgggggatacttcaaatccttggcatattgcatagcttcggcaatctgctcttgtgatagttttttccctaccgcgtgacgcactataaattccaatccctcagtagaagctttagtagcagggaattcagactctttgctagt

SEQ ID NO: 74783 - DNA, 340 bp, Zea Mays
tccccagcatgcgaatggccaagttactggtatggtctgcagttgttgtgctggtagacgttgttgctttgacaagtactggcaagcttcgcacctctgaactaactcggctgcatcactttttgccatcggccaatagaatcccgacctgaagacctttccgactagtgtccgggatgctgtgtgtattccacattgtccagcatggacctcttctagaagtcgcttcccagtagatgagagaatgcatttcatgaggacgcctgatgcaccccttctatatagtgtctccccaatgagtgcgtagtgagctgactatctagtgatgcgctcggctgca

SEQ ID NO: 74784 - DNA, 698 bp, Zea Mays
ctgcgccctagacgaagactacctcttgcaagtcgaaagccgggaattcacttgcccaaagaaccccgttatccacttcaccaacaaaggagtggacatgggttacaagaaagaaggaagcaagcgttcctggaacggagcttggctgagccgtctttccggcaccttcgccctcaaagaaggacggaaaggaattcgccaccgtagaaactcctttctaccctgacgtcctcttcattggggggagattggactcatctcccatctccgacaatgagccaaccatgccaggggaagaacctccccagcgagaagctcgacgacaaaggaacagacgccggaatattcagcgacatcacgaggctagggagcgagacccagcgcagcccgtatctcaggatgaagtctcggaagtgggagaaactcccgatgaacgagtcttcaaagaaaggaggaattctcgccgacgtgactgcctgcaagctcaagactgggaacgagaacaagatgaatagggtgcaaggttacgccgagagaaccctctctttgctcggaacctgaaccctgactttgctcgtgcaatgaacacatcgagcgaagtcggaggagtgttggctcagatagctgatagcctcccacggactccggatgctaaaggttatcggcggctgctcactcgggcagctaatcacctccta

SEQ ID NO: 74785 - DNA, 641 bp, Zea Mays
gccagacgttcgcaccccaagctggaccgagtctcccacagatgaggaggtagctgaggcgggtgtgttgctagctgaagttggactgctgaaagagagaggtctaactgctgaagctgtggtcgctgactttgttttcaagaacattcagccactgaaagatagggtctacccagcttatctgtatcgagggctagccgatccaactcgggttaccaacaggagaatcccttctgcagacttggtgagccggcttgaaatgattctcaggggcaaggtgtccaacgttggtgctccaatggcgtactcggcctggaacttgcctcctcccaaagccttcacccttttcgtgtcaaatccacctgtgactgatggcaatttgggccttagagtgcgaccctctgctgaagaagtcagtgctttggttgcttcgcttggggaaattcctgatgatgaacggcaagtccattttgaagtacccctgaaccctagtgatgcagatataaatgccatgcttgatctgctagctgatgattcttccgatgctgctcctgctgatacattggcagtggtgcccctcccagaggttaatacaactttggatgttcagaaacctgccagtactcgcccgaggcgcccta

SEQ ID NO: 74786 - DNA, 378 bp, Zea Mays
acgggttggaagtctgcggggtcgggacggaaacgggaagtactattttccgttcgaattgtcgggatctcgtattaggtcgggatatttccggatttaacccggatacaacccgaagtggtcatctgtcagccatctctcccgccaggcccaaagcggccaagcccaataggcctccacagaccacggctccactgaattgactcggcagtcggacgccgcacgacacggacacagtggacacacatctccagttttccttctccaacctccagcttgggcctcggacacgtaggagcaggacgccattgaccggtcgtcgtcctcgtccattgccagatttcaggtacaccacacgccagtacgcacatgcttaca

SEQ ID NO: 74787 - DNA, 366 bp, Zea Mays
gaaaatcgcgccgccgtcgggtcaccagaggtgggggatcaggcacgctgccgtggatctggccacggacggccccgatctaaccgcgcataccccttcgctcgatagaatttgggccgtagatatgagatcaagcgaacaggatttgatcatagtcattttttaatctggaccgacgatctttaatccggtggtcctcatggcgtaccggttcatttttaatgaagtctaatcctggccgcggaatttagatctgacggctaatctcgatccataccccttcgtggcgaccattttgctaaagaggcctccgagaattagctaatcaacccgcggtcctctctggtaggaatctgagtctgctaa

SEQ ID NO: 74788 - DNA, 659 bp, Zea Mays
cacaggcgtacgattacggccaacaagccacattaccatacaaattatagttacatacacacggcgagggcatcacatattacatcggctcaaccttcgggatgatacccatctccctgtaattgaacagcattatcctcaattcctcaccctcaaaaagattccaaagatctccctcacctatgctcgccccaatcagcgaggacagcaattctcgtttaccaacccggtctactcggagacggccacgctccatccccatacgacggtgcctaccacttcgcgaaaattcacccacactatgttttcccaccacccttcgccgcctatacccagtactcacactagcaagatccctggcaccctccacacgcggtgaagtctccgctgcagccacatccaacgcaacaaaataatccaaaccttcatccgaggactcctccgtccaaggaaacaaactcccagattcaccatcagactcaaaacactcagacacagagccaaacaaactatcatcggcaggcactatggttgaggccaccacaaaatcagtatagtcagcagcggttgcttgcgcaggcccaaacgtcggaagctgcacagtaaccgaggttcagtatcacagaaacaaaagtttacacttaaatccctaaccccta

SEQ ID NO: 74789 - DNA, 465 bp, Zea Mays
cttcaataaaatccattgaaattgttttccaagcaccatccgggatagggattggttggagaagtcctgggtatttgactctttcaggttttgcttgttggcacacggagcactcactgcaccaagttttgatcatctttttcattcctgtccaaacaaaaagcttcttgattttatgatacgtaactgcaaaccctgagtgaccaccaattggagctgcatgaagactaaggaatactttccatggaaatcctgatgttgctggcaacagaatttggtttttgaagtatatgagaccatctttcaaagagtaagatcctgaataagaatcagtagctagagcttgaaggagttcggtagtttcaggaaactggagataagcatcagatatatcctgcagccatgtgggttgattaaccgaaactgctaagagttgctcctcggttctcctagataaggcatcag

SEQ ID NO: 74790 - DNA, 659 bp, Zea Mays
ctcaccggcgtctgagaagggggaaatttggtgtcgcgacgggctctagtgaaattaggaggtgagattggggctacacggtcgcaaagtgctactgattcactgggtacacttaatttggggagaggaggaggaggcagtgcgaattttggcttcaatcatgctcactgatgaagttgtgagtgcctcgccgtggttcatggtgctatttataggcacggtcatccggctaacgatccacggccgcggattgcattgttcatgcatggttaccacgtaaagaagaggcacagtaagggggaagcgaggcatgagcgacacggcggcggaagtgatcgagccacggcgaccgccagtggaatatctccggccacgcacggctaggtttgtgggatggtgccacgtctgaagttatctccccgcgatcgattcccttcaccagatcactcaaacatatcaagttctacagtgcctcagatctttatcagcgttctttagatatttacattgttttgatcttcagtgttttactgaaccgaccacctttcaccctcccatactcttgattcttgttaagaacagggtaatctccattaataaagtttgttcactaaacaacagtcttcaaacctagtatagggtccttgggtcaaaactga

SEQ ID NO: 74791 - DNA, 400 bp, Zea Mays
ttatgaggcaaacaaagcaaccaagaaatgaaggaactgattgcttacattaaagaagttagacaatggaagagaccaccgagatgcctaaaatgtccatttatcaatatatatgcactatcttgtcccattttattttcaaaaaagttgtgtgtacaaagacgtttttatctatgtatcggcactgtcaaacaaaacatcagaatagctagatgctgttaaatcctgattaatcaaatgcagcattacttattgaaccataggtacatgtgttctgctttgataaatctatgtttatatgttacaaagtatagacactactgaatgtaaacttctacttgccggcatgccttgctagagacgaagaagatgatccctggaccactcaaacacacagaac

SEQ ID NO: 74792 - DNA, 495 bp, Zea Mays
aactcgagaccaagggaatccttgactacaagacattctcttgttttgcagcccgcacggtgaaatgttgttgatctactagggtcaaagatctgacccgccttggtagcttgttcatggcaatgtggctggcatgactggcactgtacccaagaaagtgtcgatcctgtgtcgatcccgacaaggttcataccaagtggcgtgccgatgttgatggacatcaaaaatagaaaactgttaatgcttctatcctctgtcacattgatagatatgcctgctttcatctcgtcattagaagtgcccttagaaccaacacatggatgattcctatagaacaccagaaactttatactaccatcccagcccagcagcagcagacagccaggtgctgctgctgcgtctgcgtgggccatccctctctcgtttgatcggggacgcagagcagagcaacctagcccagcagcagcaaactcatcattatcctaccactaccag

SEQ ID NO: 74793 - DNA, 526 bp, Zea Mays
ggagagtgttcattcgtcaggaatgtattattcggtatgagatttatatgttgcatatttataattcaaagatatgggtcctcctaggatctcatgacggatcttcagaatcctattaactgcataatttaattcatgccatttgccaaatatattacatagcagaacaatgtttattcaacacatatgtgggatgagtctctcacaagaccacttgaaccatcacattcaccacgcattatttcaatagtgcctataaatgttcgaacttcaagctcgtgactttcattttgcgattattggttcagcctcgattgcatttatcaatgacccgataagagagcttaaagcactcatgcctaggactttgttttggatccatttgcaatctagagggcaagataggtgtcgacatatttgtctcccacatttaataatgatctccgtcatttcccaaaacgaaagattcattgtcctatattcccagcacaatgatattgcgcgcattgctaggaatttcatcatc

SEQ ID NO: 74794 - DNA, 506 bp, Zea Mays
gtgaagagaagtcccgagcgatagcggcaagttttttatcattttcttcttcacttgaagaaggtcttcttcgcttgaggactaaatgtcagcgagccagtcaccaacaatgtttgtctttccatttttcttcttattgaaccttttgtgtttcccatcatttctcttcaagaatttcttttcctttttctcgtcatcactgtcatcatctttcttgcccttgaacttgttcttcttgggcttattgcattgatgagcaagatgaccaagctctccacaattgtagcagtctatttcacagatgggatttcttttactggagaagaacttctttcttgggtcaaacttgatgtcttttctattgagctttttcaacattttggtgatctttctcaccattaaagcaatgttggcatcaagatcatcatcactttaggattcctcctcaatttgcactttagtttttcctttcttttcttgattggctttgagagccaagtcttttc

SEQ ID NO: 74795 - DNA, 493 bp, Zea Mays
aggcgcgttaggctttgtcttgatgagcactgaaggcccagttttgacttcagcttgagtttgcgttgcttcggcttctgcttgcccggtttcggcttcggcctgtgatttggcttcagtttgagcaattttctttgcaggagcagggctcaacgcctttatagtctccaacacagcatctagtacgttggccatccttctcctcttgggagttgcggcaaaagccttttgcatcttcggcagatttgccttcgtcggagggctcagaatttttggcatccttattatttcttcaacctttggctcttcggccttatcaaccttatctttgactgccttgactatatgcgtcttcggcattacggtcggctcttcggcgctctatgtaattaaagcagtttgtgttgcttcagctgctgaagtagaccctacgccaaatcaagcaccatggccggttcaatgtaacgcgaccagtgggtcagaaccttttgct

SEQ ID NO: 74796 - DNA, 446 bp, Zea Mays
gttttaaaaaaacgcctccagcccgaagccgagccagaggcgctcagtttcctctctgccctctggcgttcaaatcccctctctggtgatctcctcactggcggcgatcctccggcgtccaagtgctcctctcctgccttgtttcccctctggtgagcacctccctccagtgccttccctctctctcaccatttctgtgctcagtgagcactcctcaaccaccctttgattcaaattccaatttctatcaaatcctgtgaatccaagtgcatgattgagtccttgtattctccttgaagtactcctgcaggtttctagctccttagggagggtttcacagcctaaattgaccaaatctccaaaaccctatctcaccgcataccacgtgttcggtgaaatgtccaaaccagccaaaaatgctccgattgaacccaaacttttcaggc

SEQ ID NO: 74797 - DNA, 470 bp, Zea Mays
ctaggcgggggtccggtgccgacacgtgtccagacctgatctggtgggatacggaccttatcacatacactcctgctccccgcccagacggagacccgatgctgccacgtggcctactgcgagcggcgtaagccaacgggtgaaacctggcatgaagcctctaggctacgcgcgtctttgcattcattacggataagacgtgcgcctgtccattccggtgataggcggcgtgcccaatccacgttgtgtgggccgtgcagttactcacacgttaccatagcaaggacaataactcaccattactcgcgtgtttcctatcaatgctgcatgcactacagtcatcatgactcccgctgattattcatgcgttactaaggcggagggaatctgaacggctccgcctatacgcctctatgcacaacaggcgtaccaggctactccgtattctactgcaacaagccatcacccac

SEQ ID NO: 74798 - DNA, 359 bp, Zea Mays
agaaggccgatcatcagatacataaagaatgaagaagagccggacgataaaagggcagccgagcgcatcgccagacagtcggctcactacacactcattggggagacactatacagaaggggcgcatcaggcatcttcatgaaatgcattctatcgtctactgggaagcaacttctggatgaggttcatgctggacaatgtggaatacacgcagcgtccaagacactagtcaggaaggtcttcaggtcaggattctattggccaacagcgaaaagtgatgccaccgagttagttcagaggtgcgaagcttgccagtacttgtcgaagcaacaacatctaccagcacagcaattgcagac

SEQ ID NO: 74799 - DNA, 472 bp, Zea Mays
ctcatgacagggcgggaacttcccgcggcggggaggaaactccaaacccaccacctgtacctcctacattggctgaggctatcgctgccatagtcaatgctaccactgacaacacacgtttcctacgcgaattggcggggaatcaatttcagcaacatggaggcagaggtccacctcaagggccacgagacaccacttacttggaattttatgaaacccatccaccgctttttgttaaagctaaagaacctctggaagcagatgaatgggtacgggttatggagcaaacatttggactgattcaatgtactaaacacataagcccctattcactgcccaacagttgagaggtcctgccagtacgtggtgggcaaatttttcagctattcagcctgccggacatctagtcacctgggcagaattcaaacaggaatactatattcctgaaggggttttacaaatgaaaatggat

SEQ ID NO: 74800 - DNA, 397 bp, Zea Mays
agcccataggactggccgtaggtcgcagccctgaccctaaaacttactctaaaaagaaaatacctcttacctcaagaaaagttttctcttccccgattttaacaagacccttctttacctattccagatggaagcctctctggccattaagtcatcctactgctcggaagtggaagggttcccacgcctcttgcgaagctgtgcgctccgcatgggaatccgtaagaagccggaatacgtctggacggaacatctcgagggcggaatgataagatgctctatggcagtctacctgggggagagccaaagctatcccaaccaacgttccttccaagtcacttttaccggagcccatttcctagatgcttgccaaaatgtcgcccgaaaagccctccga

SEQ ID NO: 74801 - DNA, 357 bp, Zea Mays
ggccgttgtccgcgttgcccggcgagtgccgcgcgctacggttccgttccaatagtttttctatatcttgtgcacactctagagtcaatatagctctgcatctttgcctagccagaaatctggaatagaggatagcaatatttggacatctagttaaagaagctgttggaggaccaaaatctatattctatcaataaggatatagaaactcttggagttactcttaagctcaatgatttaagtagaatctaaaaggagtaaagtttcctcagtgttattggggcacttacatgcatggtggtggcccttcaccttcgggttcaagttttctccattcatatggcttggccacagtat

SEQ ID NO: 74802 - DNA, 314 bp, Zea Mays
cgttgagatagatcagatctcggatgtgtgtttggtgaaagaggtcacatgtcaaccctttttgttgtttctacacgtggtgtgaaagggggccgcaaaccaacaagttaacccccaatcaaagcacagtgatggcgtccgacttgcccctgaccgagtcagatgggatcaacctaatacctatagccaccaggcaggcttgcccaactcagtcaacacgaccagaaccgaatttgtggcctggatttgacaacgttgcaggccattacccacatcgaaatcaatccacaaatctgtggcaagctcatatcctg

SEQ ID NO: 74803 - DNA, 369 bp, Zea Mays
ggcttgcccttcctgtttctccattcttccgcagtctccttgatttctatgactaaaatcttacacatttaaatcccaactctattcttcaagttgacattttcgtacacatgtgcgagacctttcttggaattctcccccactttggactctggaggtacctttaccactgtcggcccggtatggctggaggacagcatcagcttgtcggcggcgccagtttggagcttcaccgggggaggaaagtggaataccttgatatccccctcaaggatagcatcaagggatggcgcctcgagtggttcaccatggagaatcacaacaagtctctgcccctcgatcagggaggcaacccaacgtcgcacgccc

SEQ ID NO: 74804 - DNA, 561 bp, Zea Mays
tgcatgtattccacactgtctggcatggacctcatctaatagttgtttcctagtggccgaagtaatgcacttcatgaggactcccgatgcacctcttctatacagtgtatccccaatgagggtgtagtgtgttgaccgtcttgcaatgcgttctgctgcagctttatcatccagctcctcttcattctttatatacttaataataggctccctctagtcattagagtctgactgtggctggcttaaaacattgcactcttctgcccgatctgaggaaatactcgggtgtggtacctcttggacgaaaactccgggtggaacctgagtccgactggatcctagctttgacaatgcgtctgtcgtagcattgcgttctctttccatgtgatggaactccatcccttcaaatttgtcttctagttttcggacggctgtgcaatacttacccatggagtcattcgagcaatcccattctttatttatctgacttatgaccaccagtgaatctccatataccatcaatcttttaatgcctagtgatatagcaatgttcaatccgtg

SEQ ID NO: 74805 - DNA, 440 bp, Zea Mays
agaaactcaaaaagctagagagcgacggagagaaaaaacaagaactagggttcatggctcaagaagatgtcagcaaaagtatgggttggcatgctatgtttggcgcaaaagggcaggccgatagctcgggagaaatcttggttgcagcaaagcaagcatcactcgggaattacctctaaaatgttagtgaaccgtcagacacaagagcagagtatgtagcagcagattggcacgaaagcatgttttcattcagaggagggagatcattacaaaattgagaccaactcatcatgtgttggcctcccacctcccgatcagtataatacattacattacattactacttagactacactactaactaaactacattattctactattactactaccactactacgctatactaatatttaagccgagagcattatgccaccgg

SEQ ID NO: 74806 - DNA, 331 bp, Zea Mays
cgtgacgaggatgaacgacgacggttgcacggctttcggcggcgtgaataaacagtggggcatcgaggatcgaattgcgagggcacggtcaatggtcgacgtggatactaagttgaagaacgatgtcgacgacgagctccgacgcagcgaaggggagtcgatggctttggcgacgttgacgaggcactgcctgtacgcaagcggcaagagctgggcttggcacaggtagagaaccgatgatgtcatggctgtgcacgggtgcggctctggtgatgtgggtcggacagctacaatgacgagcggtcgcacactactgagcgagtagcaacgg

SEQ ID NO: 74807 - DNA, 421 bp, Zea Mays
gcttgaagcacaattatgctcattcactaggacggtaacctacaaaacaaaataaagaggtaagtaataccaacttttatgaacacaactatacaattggagaggaacaaaagaaaggttagtaccataacactagaatccggtcttctagaaccattcagtttccaagggcatgtgcatcattccctttgttgtacgcactatacctacttctatccgattttgttatgccaagctcaaactcatcatttatagcatactgcctcacagctagactaaactctttcatcgacggatagagagtacccaacttcagatcagggtgatcaacatcatgtaatatattcaacatttctgcattttcatcatcaactggcatggcagcatctagatcacttggatcaaaactattacttttcga

SEQ ID NO: 74808 - DNA, 634 bp, Zea Mays
ctgagaggcagacccactttgagatgccgatcagtactgacgaggccgagatgaacgctgttctcagcatgctggctggggaatcatccgactctgcccgcactgattcgatggctgttgcaattgggtagaaccttggtgaagacgaagaaattcagaaacctaaaggtgctcgttgcaagcgatcacgctgtgcaaactatccagctgcgcctgacgaggagaaaaagaggaagaaacgactctggcggttatcatgcttggagcaagatgctggcccctcaacattactcctcggtgatggcccggtgagcaccaccctcgagaacgatgtcagaggttgtgacgatgctcgagttggcggttgtgtgcttgatgaggatgaggaggaggaagaagaagaaattcccttgattcacaagaacagccgtcgcagcaagagtagtgacatcccaatgcaggccttatcaggacttgtcagccttcaggggttgtcgatatctgattttgaccatgcattagaagagatcatccctgagaaccttttatcggagccccctgaggttgacaattccatcatctgttcagaggtcccagatgatgttcctctgtcgtgcgatcctgtcgggcaaga

SEQ ID NO: 74809 - DNA, 350 bp, Zea Mays
tttgaaataaaatagaaaataaaagtgaaaggaaaaggaaaaaaagaaaagagaaagaattacattacctcggatgggccatatctcctcgggcggcccaactttctaaccccaacccggcccatctccttaccacgcccacagctgaactccctgcctctgccatcgtcggctgcttcccagaacacgcgtactgtgcttcacagacaaacgggccccactggacagggtcatccctatcccggctctgatgcaccacgcacccaggtattggccgcaatcctcgctaccgaacaccgcggacttctaccatccagggatataaattcggagccgaaatccctgtttct

SEQ ID NO: 74810 - DNA, 387 bp, Zea Mays
gcgatttgacaccttactccaacaagaatctacatatacattatatggagtggccttctgtataaactggggggcatggcaacttcaaaattttcaacatagcctagaattgacactggcaacacatactgttgtggagccattcaaactgccaattcagttcccaccatatccaaaacatcttatgccattttacgtggtcatcgaacaacctcataagaggtttgtaggtaacgccccgtctttctttatggattatacttatactgactaaaccatataaatttttcaaatttatttgatctcatgtgattggatcagatgtaattagaatagttattcatttggcgccattagagcacatcggtggaaggtcgtacagagagg

SEQ ID NO: 74811 - DNA, 368 bp, Zea Mays
cataaatgacaaggatgagtcatcttccaagagaaaagatttggctctcaaagctaatcaagaaaagaaaggaaaagctaaagtgcaaattgaggaggaatcctcaagtgatgatgatcttgatgctaacattgctttgatggtgagaaagaccaccaaaatgttgaagaagctcaatagagaaggcatcaagtttgactcaagaaagaagttcttctccagtaaaagaaagcccatctctgaaatggactgctacaattgtggagagcttagtcatcttgctcatcaatgcaacaagcccaagaagaacaagttaaagggcaataaagatgatgacaatgatgacgagaaaaaggaaaaaattcttc

SEQ ID NO: 74812 - DNA, 375 bp, Zea Mays
ctactggttcatcgtcggtgaggccgccacggttgatgccaccgagctctcgcgacagtgctctcttcactcttcgaccgccaccgcaccaaccccaattcacgagccaccgccccaagtcctataaattgagcacaccgtcaggttcgtagggtagtcacgcatccagccaccaaatcgtgccttcaattgttcaccagagctcaccaattccagatttcccccaaacctgctttccgccaccgtgaaagaggtctcgccgtggccagctcgtctcaggtccgctcataccctctgccctctcgttttagtgttcttgtgtgcccctgatactcctcgaccaactcgattgagctaagctaccttagatcgtcg

SEQ ID NO: 74813 - DNA, 409 bp, Zea Mays
tattaaaatatgaatttttagttttgctaatattaatttaatacctaaaatttagtatttgcgaaaacaacaaaatcttagaaactcgataatatatatatatgttcctctcgccgagcgtgttctagatcttgtgtccttttcgcaggatcattaaaatatctttcctcgcaacgacatgctactcgcgtcggctatccccgtctatccctgcctacccctccgacgtctatctcatcgccttggactcgcgggtcagctctgaccgtcttcctctaattttatccaaccctatctaccacttgtttgactcagtctccatcttacactgtctcgcgcaatttgtcgtgctcgcaaccgcctctctctctcggccgcgacacaattgaggatgaatttggcaacctcc

SEQ ID NO: 74814 - DNA, 851 bp, Zea Mays
attattattgtgtgctaatccttcattttttgtagggcttaatcctgagtaaggctttaagggcacaaaaactcacagaagatgaaagctgccaaatagcccttgggaaccttcggtctgaagtcattacactaaggaacgaagcctttgaaaatgataaaatactgctttccttagtggataggctgaagagcagtgaagcgaaacttaatgcacaatccgaagctcacaaagccgaagtcgaagacttaaagaaaaagcttgccaaaatgaatgaagattttgaagttgcaaaggcaaagcaacaaataagtgaatggagaagttcaagattgcaaaaaatgtggaggagcttcgtgaatccaaagagaaatgttatgaaaaatccttggattgcgcaaagaaactgaaagacagttttgcaaaggtgggtgcatactcatcggagcaaaaatttattcgaggcgatcccgaaggagtcattcaatggatcggcgaagaagttgaagcttttgaagaaatacttcgcgaccgtggggacttttgtgccttcgccagtgcctaaggggttgcagcagttgtggagaaaactggttgtgaacatgttaaagctgcagcataggcagaagttgtcttctccatagacgatacaaaggaaccttcagccgaagctactttgatgggtgggaaattttattccgatgtttggatgaaaggcggccgtgagatagccgacgaagcaataaaggaaaatgaaaaagaatcccatgatgcccgagtagaggcaaaggaagctgaagaagttgctgaacgtgcattgattttaggtacttctaaatgcccttttcctt

SEQ ID NO: 74815 - DNA, 314 bp, Zea Mays
taattattagattatgcatgcatcatgtttaaaactatactaataaatcttcccctcttatggagatatggcgcgcactaagactacccagcgcaaatcgactggacctcatggtgtgccacgacatcagctagcctctaggcacgaagagagtagtagtggcagtaatgacccaattggagacctgaaagccagggtggagcaactccggtcagaactacgccacaggaatagggcacgtgagtgggatagccaccgtattgcggagctgtcagccgaagtgagtcatctgcagtacgaaatttcagaacgcg

SEQ ID NO: 74816 - DNA, 467 bp, Zea Mays
ccggaatgaagctgttttgcgaattacaagggcgagctagccctgaggagtcaaacaaaaaatttgcggagattgtcaatgttccaagaatgctctaagtcctcgccggatggcattgttagcctgtatgcgctgggggacgccttcgtcttgacgatgaaagggccctcccactttggctctagcttgccccgggactctgtccgagctgtccggacgagtacgaggtctccttcgctgaattccctcgggatgactgtgtggtcgcgccatgcttttgtttgagcttggtatttgtttagggcctgtagggcgaagacgcggtctccgtcgatgaggtccttcgaagtaggctcgtctatgtcggggacggctgaagtgactgtccgtggtgacccgtgttttatttcttgcggggtcatggcctccgccctgcactcagtcgtgttgagcgcccagaccgcttc

SEQ ID NO: 74817 - DNA, 440 bp, Zea Mays
caactgccttgcgcgcggctgttaatacttagtaacctcagatcccctttgatttgagatcggagaagattaaggcctgctttgggagacataaaaccagaggagattggagtggctagaatctttatattatttaaaattgaataagaaaaagattttaggctctccatattatttaaaatagaatggagagactctagaaaccaaaaaacaaactaattttccctaaattcactcttattattaaagtgatttgagttttcaaactagccctaaggatctgtatacgcacttgtaaatgaatgaagtgaagttcagtcaaaattcaggctatgtaagcagctcggatataaacctgatatggtaattataacggttacatagaactgtattacgatcttctaatataaaaatacaagtcataacctcctcacgcaaat

SEQ ID NO: 74818 - DNA, 272 bp, Zea Mays
gtgcccgtgcgttgcgacggaacacaaattaacgagcctccaattgctcaaggttctagcgatggacggcgtgaacgcaatagtgacgggagcccttatggggaacagtgcattgttgcagagaagcgcgagcctgagcgcactacgggctccatcgtcgtgttgcggcgctgccattgccacgagctccatatataaaatgggttgttcagatcataataactaaaacaatgacgtgccaagacttttgctactacacttaaagactcata

SEQ ID NO: 74819 - DNA, 560 bp, Zea Mays
cctatagacataaaatttatacatgttcgagccctcctgagcgataatacctcacgtccagtttaccggtggttatgttctgattattttccgtgccccttgggacatctccttcttctttttatagttgaaacaaggagtctggtaggagttttattggaggcggtctaatacccaggctaactattagctttaggacgttctaaacagaatctagcgtggaggtttgagtgcttggaaaggtcttaaatgcaaatttagattgcggtagatgaaacaatttaaatatttcaaggaattaaaacgagtcaaaattttgttcatggatcaacatagaaagagattattcaggtattagaatatagttctttttagataatgatttctttggaacccaaaaaacacatatagggaaaacaaaggattggatctaatgaaaatgggagaacacaattcgtttcaaagtgctccttatttaagaaatcaaaatcttaaggctattttcaacagattccctatcacatctcctatctcatcttctatttcaaactttagtctac

SEQ ID NO: 74820 - DNA, 757 bp, Zea Mays
tttgaattgtttctcaaatttgaagcggtaagcaagtcgaacgagttcatgcttcttccctgcttccttcttttttggcatcccccagccacttaacgtaggatatgttatgttagccaaatattcttgcaccaagtctctggtactgatctgctcagctaccactctaaattccactttggccagctgacagggtgaccctagttgcatgttgcataagggctgggtcattccgaagctcaaactcagtgaactcatgaccatgatcatcagcttctccctatttttctcatcagccttcatataaaaccattcatttttccagccggttggccactttgtgcggtagaggaagactggtgcctttgtatccttttgatacacaaaattataacaaccaaaattttcgtgaagaccatctgccctagccttcgtctgatagtgcagctcatgctctcgacagaatacttcagcatccgggctcatcccttggcttcggagggcccagatatagacgctgagcctaataatagcattagaagtcagctgatgaagatatatttcgaagttctttacaactacccctatcatctcatttagggggaatcgcaaccctgctctgaagaagctcttaaaacaacaacttcatccttctccggctttgggaccatctcttctccagcaaatcgaacaagcttgctctcagcctctccaaaatagcccaatttcatcatcatgggcatgtcatcctctgtca

SEQ ID NO: 74821 - DNA, 844 bp, Zea Mays
aagcaatggaaagttggaatgctcttatgctcggcaacataacgggctagggcaatgatgttgttaagtgtgtcctgtcaaggtacagtgcaggggtatttataggtaaccaggagagtggtcatgcccttataaatatggttttgccccttgttacctgcgttatccctagaatattctcctcttaggggccattacgggtcattacagcgggttaggtacaacctaaacaaacacaccatcaaccgtacccaagaatagggcttacacatgggcccaaataagcgagcagggtgcctcgttagcccacttcgttgacatgtgtgggtattaactgcggtcttcgctctgggcgtcgggtcttcgaatcttgccatggccagcgcgtggagttgcggtaagcgagttctcaaggagcctctgtctggatcgaccggtcccatcgcccccaagcctttgccgatgctccgaccgaggagctgcctcgggtgaggagttgaggtagactccgctctctgtgactgacatgacctgttttgcttatgttttaaatagatcgagcaagggggtcgatggccctcactccaacacttgccccccgaggggccggttcaacttgttgagctggtctcaaagtcttcttcgggagatggccgaaacgcggcccttgctaggttgaagtggtccccctggggttttttaattgtgaccattgatagtgatgttttactgtgggactgttggtttcccgagacactttttgggtctataaaagacggtgcgcctgcggtggtgggatttttacccgtctaactcacagaaaacccaagtttcagcatttcct

SEQ ID NO: 74822 - DNA, 319 bp, Zea Mays
gtccttgtaacgttgtgtgccttcccttttatagtttaagggaggcacatacaaggatgctgagccccgacatgtgggcccaggaacataatggaaagaatacgttttgtgagtaactaatgcttgtaattcctaggcaatcaccgggagtcttgatgtccggaatccatgctgcattgatgggcagttaccgtacgagtaatgcgggagtaatggtgagtaactgcacggcccacgtatcgtggactgagcacgccgcctgtcagcggaatggataggcgcacgtcttatccgtcatgaaggcgcacgtagcctagag

SEQ ID NO: 74823 - DNA, 298 bp, Zea Mays
tacaaaacgtgagacaagcagtgagccttccacgaatcggagaggagaagcgctcccgcctaaaaccagaatattcccccacgtgctccgcgccacaccagccacgttacgtttacgtagaggaggagctcagggcatgccgctgctgccgcgcgagggtccacacggcagtctcaccgctccctcctgtacccccactgcgcatgcttttcacgccacagtcccgcggaggaatcgctacggaaatggaatccgtgtacggacgacggaaggcgcaagcgagagccacaacgacaac

SEQ ID NO: 74824 - DNA, 812 bp, Zea Mays
agtgacagtaacaccaggggtgttacagacagattgaccaaagtggctcacttcattccggtcaatactacttacaaaggttctcagctggcagagttatacatggctcgaattgtgtgtttacacggtgtaccgaagaagattttttctgatcgtggatcccaattcacctcaaggttttggaagagccttcatgagaacatgggtacaaagttgaacttcatttcgtcttgtcatcctcaaactgatggccaaactgagagaactaaccaagtactggaagatatgctaagagcttgtgcccttaagcatggaggcagttgggacaagagtctaccatatgttgagttctcttataataatagttaccaggccagtttgaagatgtcaccatttgaagctttatatggcagaaagtgtagtcctctatattgggatcagactggagaaaggcagttctatgggcctaaaattattcaagaggtagaagaacaagtgtgtatgatccgggagaacttgagggtagcacaaactcggcagaagagctgtgttgataatcgaagaagaccattggaattcgaagagggtgatcacgtgtacctcaaggtgtcaccaattcgtgggatgagacgattcaaagttaaaggcaagttatcccctcgctttattggaccattcagaatttttaggcgagttggggagatggcctaccaacttgagctacctgatcatctgtctgatgtacacgatgtattccacgtatctcaactcaagaagtgtctctgtgtcctcgatgaacagttaccaatgga

SEQ ID NO: 74825 - DNA, 558 bp, Zea Mays
ctccgatctaagatctaatggcccagagtcaatgaacgaagcgatacgtaatcgtaaccgttggatcatagatccacggaccaaaaaccccacacgcccacatctaatcccaaccgcatactagaggatcggcggtctggatccatcctgaacgacccggaattccaatcaatcatgaccacccaatttgagatctacggtgcgggcctatcttcctgccctggccggatcttggtggcggagcaggggcactgtggtggcgccatggctggaaaactggactcgcgacctaggcactgcaccatcctaacttgagctggctacatgacgctacggactccacgaatccaataaaggacttaccagagtgggagatgacccaccgacgagtgcccacggcggacagtgggcccgcagcggaggcgcgatcccagcgacgatttcagcgcaccttagtcgatctcagcccgtggcgtccgaacgacaaccatcccgagactcgtgctgtgcgtatcgggtggttttgggggcgacaccagtgacgacagtcatgttcgt

SEQ ID NO: 74826 - DNA, 510 bp, Zea Mays
tgcaaatctgcaacgcaccctgaatcccaaggttacacttgcgcgtgcatttcttaatttctgtggagtatggacagttcaggccttcaatcaagctggggaatcttgagaacctactctactcattgcctgcacaagcagtccttacctgtcaggtcagccgacaattagcatgagatttcagatctcagatcttctcggtttcatgcttccagcatgcagcatacacgatcgctcgtcggggtaaaatataagaaaacgtggcggctaaataccgatcaggtcacactagactgaaacaatggtgccgtctggtttaggacaattccacctctttcttttgtttggttaaaggtcagacgggaagcattagggggaggggggtgttgggggtctacttgtttgccaaaggacctcagcaagctgatttggctcatttgacaaatgtatagatattagggttacaattgtacttttgcttcggttacgttccatgactataaataaatg

SEQ ID NO: 74827 - DNA, 336 bp, Zea Mays
ctacatcataaaatatgtttgttaattccgaagctaaaaacgaattacagagctaaacctcagtaaatgtacctataagcctcgcacgctcagcagcttcttcagctcgtttggcttcttcttgagcgtcgtgacattctttttcattctttctaatagtttcatcagctatctcatggccacccttcctccataccttggagtaaaatttcccgcctaatgtagaagcttcggctaaacgatttttatgtcatcagctgagaaaacaaattctcgctgagctacaaccttgacatgttcgcaaccagccttttctaagatggatgtggccccccg

SEQ ID NO: 74828 - DNA, 1124 bp, Zea Mays
cgccccaggatgagtgattgtaagcatgtttatactaggtcgagtagacgtgagcatgttgcattgccttaagtcactgccgacttaagtcgattgctccgttagtagggtatagtggtcaccctaagttaagtaagcgtgagcatgttgcaccgccttaagtcactgccgacttaagtcgattgctccgttagtagggtatagtggtcaccctaagttaattaagcgtgagcatgtcgcaccgtcttaagtcactgccgacttaagtcgattgctccgttagtagggtatagtggtcaccctaagttaagtaagcgtgagcatgtcgcaccgtcttaagtcactaccgacttaagctgatttttccattagtagggtatagtggtcaccctaagttaagtaagcatgagcatgtcacactgtcttaagtcattgccgacttaagatgattgctctgttagtagggtatagtggtcaccctaagttaagtaagcatgcagatcgataataaatagttcgagagcttttgagaacgaagtctttttattgatgacgtacttttccaattacagaatgcaatgttgccccgatagcttttgaaatctagctagggataaaacttcttgagatgctctatatcccatgaattccctatttccatgccatccatttgagtaagtcgatatgatcctggccgagtgacttctgctaccatgaatggaccttcccatagtggtgacaatttgtgttgtccttcccccgttagaattcggcggaggactagatctcccactgcgaaggatcgatgtcgtatggccttatcatgatagcgcctcagagtttgctggtacctggctgactgaattactgtattcgatcgttcttcttccagtatatcaatatcctccagtctagtagtttcagcttcagctatattttcgaagatcagccttggtgccccaaacctgagatcagcaggtagtactgtctccgaaccatagaccatgaagaagagagtattaccatgcaaagctcgactaggttgagttcttaagctccagaccacatacgacaactctctgatccacttccctgcgaacttttcattcttgtcgaagactttc

SEQ ID NO: 74829 - DNA, 577 bp, Zea Mays
accttcttctatcttggttcagcgacgagcacgagttcaaagtagcggcgaggaggacatgggcaggagagcgggcaacacgatcggagtcgcgacacaagtagcaccttgaccattagggagcgcaaaaacatgagtacgacgacaagcagcgacggagttccagtcacagcacgtcgacgagctgcagcgtgcgacatagtacgacaatggcgagcagcaagcaggggagggaaggagaggcttaatccgtggcttaaatagcggatgagaggatgagctgagcagatgtcgtgggagatgaaatgcaaagacgacagcatggaggtcaggaggcggcgagcaagcgacgtgagctacagcatgacacgatgtaggcagcgcgatgactagtgacttcaggacagtagaacgacagtaggcgcgcagcgtgtggaggggaaaaggagaagaagagagttgagcttggcgcattttatgccatggacgagagagcaaaagggcaccggggaaagaaatggtcagccgccattgattgcgaagccaacaatgcaatgaatagaaggtgaggcggctg

SEQ ID NO: 74830 - DNA, 871 bp, Zea Mays
aaagcggtatgcttcctatcttgcctagacatctggatctgatggaaaccagagtaagcatctaggaaggacaggaggtcgcacccagaggtagaatccatgattttatctattcgtggaagtggatatgggtccttgggacaggccttattgaggttggtgtaatcaatgcacatctgaagcttcccattagccttgggaatgatgactggattggctagccatactgggtgatggacctctttgatgaagccagcgggcagcagctttcgaacctcctcacggatgaaatcttgccgctcaatggactatctccaaggcttctaactcaccggtttggtgtcagggtggatctttagatggtgctcgatcacctccctggagatcctagacatctgcgacggttcccatgcgaatacgtcggcatttgcctggaggaaggcgacgagcgcgatttcctatttctcctccagattgcccgcgatgcgagtggtctgggaggaatccacgctgacctagatggtcttgatgggaccgtcgtctgctccagatggttgcaccttaggcaccttggtaggcgccttgttacaggaagttgaggggtccctccccctgtcatccgggcgaccagtttctgccgccagggcgtgaaacttctcgacaactgcaagcgcagcggggcggttgccccgcacggtgaggaccccagcaggggacgacatcttgaggaccaagtacccgtaatgggcaatggccatgaaccggtacagggtcggcctgccaatgatggcattgaaagggaggttaacctccgcaacgtggaactggacgttctcagtgcggaagttctcctcagtcctgaatgtaaccg

SEQ ID NO: 74831 - DNA, 861 bp, Zea Mays
atgtgccttgcgatggagagttgttaagtcctaaagcccttgaagcttatggcaacttgttcaaaaactcactctctgaagctcatatcaaagcgctgtcagccctcttcggatggacagtcccagatgtttttgaacctgttaatgtgttgtgtatcgccggacaaggcccagaagaccttgagtaaggttgctgttcaagcagcgcatagttgttttatttggtttttcctgatggatccttcaaaggttttgttttggaatgtaaggggtctgaacaaaaaggcaagaagagactcagtgcgtgttgtgattaataacactaagcctgatattgtatgtttgcaagaaacaaagaaagcatccatttctcggcatatgattctctctctgttaggttctgattttgaagagtatgttgttcttccggcgactggtacgcgggggggaattattttagcttggaggatttcggtctgcaagatgctccaaactagaatagacaatttttcagtctctgctcaaaaccagcagcaggatggtgtggcttggtggtttacgggtgtttacggtccccaactcgatgagcataaaattcaatttcttaatgagctgcgcctgattcgatcacagtgtcttggtccgtggatgattggtggggatttcaaccttatatatagagctgaggacaagagcaatgacaatcttgatagagctatgatgggaaggtttaggcggctgcttaatgacttacttctaaatgaactgcccctttcaggtaggaagttcacctggtccaatgaacgggcctcacctactttggttcgcctggatcggattttctgtacagcagattgggag

SEQ ID NO: 74832 - DNA, 421 bp, Zea Mays
gtcctaagattgtttgcattggttcccatctcctctccccctcccctcagttagcgatgaaaatagacctctaagtactgcaatagttccctctattcatgccactacgctagcaggatcgtctctctcccctttctgaaggcacgatattagctcgtcctcccatgtagtcgtcattgccttccaccgtgttgtgcctcgtgggtcgttcctcctcatcgtcggcttcgccttcgtcctcgggagcgatattatggtactcctccgcgctccagcctgttcctctgcctcgctggaggcccaatgcgttgacgacatgccccattccccactcattttcgccatggtagaggacgagctcttagcgccgcatcccctgtcgtgcacgcagatgaagtccgtcgaggccatgggcgacctc

SEQ ID NO: 74833 - DNA, 932 bp, Zea Mays
ttgtccaaaaataatatcatcctaggtttaaagtaaggcctcctttggcagggctcctaacggcttcggctctggctcctctggcttcttggcttctctagaggagccaaagccgttttgtaattcatttggcaaaacaacttctcacaaagagacagtggcagaaactgtaatttcatgaaacattattgtgtgccggatagaaggagccggtagaagcttgttttctcgtgcttcggctcccaatagcaaaacaactcttgctcttcgatggctttcggtgaggagccgttttttaagaccgtttggtacggcttcacgaagagccagaaaatgagccaccgagagagcccttccaaagggggcaaactcataaattttactgaagttatagaacacagtcttaatatttgtttcttcatttatatttatcttataaaaatatactttattatctatctaataatacctactgtatatcataaatattaaaaaatttgatcaagattaagactaattgacttcttgagaatgattttctttgtagggtaaaagtagaatatgttagtatatttttttcgtgattacaaatgtgtgtcggagttgggactctgggccaagcgacagtaattataatacctctccatctcactgataagaagaccaaaataaaaaaatgactacataattttataaaaaaataccaaaaattatagcagatatatttggtgttataaacgttgaagatcttcttttatatatgaagttcttgaaacataagatattttaaattcgaacaaaacaaaaacgtcactttcagcgacacttatcgtttgaagtcgtcagatttgaactgcgggaatcgaaatcaaaatcaacgcaatgcgctgaatgatcagtccaggacaattaatccggcctgtcccattcct

SEQ ID NO: 74834 - DNA, 376 bp, Zea Mays
ttgcttgtttctttgatttctcgcaggaatagaacttcatgttcaggttgattttgccaccagcaaggtcaataaccatttggagttggttctatgattgctaaggcaccacgacctgttcgttcgtagtcggatcacgagagtcaccttctctaccaaatcgaaattatccacctcaccgaaagatcggcactccagttctatcaagtggtatcagatttttaggttgctcggtgagttttatcgagttttatccctttagtttgagagtgttcattgtcccaacgtccaccagaaaagctacaaaaaatttgtaggctagaaccttgtcccagaaccatttggccttgcattctctttcagtaatcttgtatta

SEQ ID NO: 74835 - DNA, 461 bp, Zea Mays
caggactcctggtaaagaggagtgagctgcctgcacgcctctccaccaaatttgagcctctcccttcagcagctgtgtgccaaagcgaacatgatcaccatacacaatctcaaagacatcaatcttatcctccacataagttagccaatccaccgcctcgaccggagtaccactgccatcaaaggtgtccagcttcatgcccatccactgcatcagagaaagaccactaacggggaggggcgcctcagccccgccactcggagcagcacccctagggtcagcgcccccgggcactccaccaccagcaccctgagcagcacccgcaagggcaacaggaatagcttgcctcagaatggccaactcctgctgcatggcctgcattgtggctaacattgccgccggactcatagaatccccactaggaacctgcgggctgccacgagccctacgaggcaacataa

SEQ ID NO: 74836 - DNA, 355 bp, Zea Mays
agacatgtggcgcagggccgcgaagtggctatctccagcgaacccatccaaatcattcggggtctgctcgggtacgatggccggagtaaaatagtggccggagtgtatccacggcgtgatattttcttaccccgggtgctatccaacggatccgagcgtgaatcaccaacggcgagcacgaatccaagcgcacagcacgtcggcggtgaggggatctgaacctgatcctatatgtttactgtaccatgggattgttcttcagtcagcctgacggaccaagtttggggtggattttctcctgattttacatggcaacaagaccattgttctgtagcaaagttacagcctaataaac

SEQ ID NO: 74837 - DNA, 763 bp, Zea Mays
aaaattaaaaccgggtcgtgttccggtcaaccatgatactttttacatgagtttgttacctcgatgctctgtatgattttctttgcgtttaatatcaattataactatgataactaatttttagtcgttttgtaccgaaaatatagattggttaagtcgtttagtaaaacaacatatcacacatacttgcaaattgttttcacatcataatgaaatatatatccatatgcaaattagcaagtcaatttttagaatagttcggttcagaactttatgcgaaagaatgttggctctatgtctgcttatatgaaagaatgttttctcttccttttcctataggagggtgaaataagttttactagcagcgtcgtaccggaggtgccagtagcctcaatgtgccagtcgcttctcaagatggcctcactggcaacaaaatattctctgatgagttgactcgcgtgcttgactgggattgtactttatctcttctgtcagctaagctctagtgaattcctccggcatcaacattagcacgatggttcgtccaaccgagcatgtccccgattcacaaaactatatagttgagaacctcataggtagattcatagtagttgacagtttgcttaaacaaactgacgtggttgtttgatctacgcaaaagatgacactggttgttggttttaatagtgaaatgtcatcctaaccatttaactagctatgtccaacatattatgtatttatttctctaaatattgccagttgc

SEQ ID NO: 74838 - DNA, 473 bp, Zea Mays
cggagctcagatctcactagaatcgctagaatgtgttatggttgtgttagaatgatcaagtgctcttggtatgcttgttgttctgacggaggtcacctaggggtccttttatagccaaaatagtccacatagttgttgctccttccatgcaagacttgatgaaactgaaaccatgttgttctcaggggcaccaaaccgatctggtgcgctaccgaactgggaacagtagcatcggactggtccgatgctcctctagcccgggtgccacgacagtagccgttggccagcgcgcacccacggaaattagtcgttatgcagtggaagcgcctctctttgtccaaacctatcattccccttttcaagcaccttgagaatacacatatgatcaactcaaaagtattgttagtcccaataaggtcaaagtgtagtcaatcctccccctaaatgtgtgcatccaaagtgccaccctggcc

SEQ ID NO: 74839 - DNA, 561 bp, Zea Mays
taaaggtttcactctcagcccagtcctggtgaaattggatccatcaatcatgtccatggtcaaggtatgctttctctttttagcccctcttgaggtcctcggcttcgttgttaccatgaaatctgggttatatatctagtattgttgctcggtttatgtccccacttaatactgaacaaaggcacatgttgactgacacctgatcttaaggaagagtccacattctcacgggtggtttggagctaggtagccgcttagcttggtcccataccgtgagcctacaccttacactgccccataatagctgacctagtactttccggaccaggtacctaaaatcctacacctcattcaaaattaagggtcggatctcttaaactctgcctggcaaaaactcggttatataattcaatggaatgagtatagcaaagctaagatctcaagggctcactgctacgcactactcccgagccactctcagaataccttacgctcctaagcaatattcttaaaccatactcaagagttgctccctggactaaaggcaacccccacgtctgg

SEQ ID NO: 74840 - DNA, 1463 bp, Zea Mays
ccggggtagtccggttacaaaatccatgcctatttcttcccacttccattcaggcactgggaggggttgcaataggcctgcaggtttttggtgcttggccttcgttcgttggtaggtggctgagcctgacaagagactgactttccttggtggtctatgagaaggactgtcctgtttgtgcaactgatgatacctttgtgtttggtcaaccaatccatccctaaggtcacatcaatccctttggatggcaagacggttaagtctgccaagaatactaccccacttaaaaggattttgacttgggagcatttgagctgacatagaaggtctgaccctggggttcgggtgaccaagggaatctctagaggggtagagggaatgccatgcttttccacaaaactagtggctataaaagaatgggatgctcctgaatcaaaaagtacggtagcgggagtaaattcaacaaagaactcaccgagcactactcccagagcttgctgagcctcctgagcatcgacgtgattaactcgtgcccttccttgataatgggtcttattctgctagctgatggaggagtgcgccttgggggaggatgctgaggtattcttggggtcattcaccgagttggagtaggcaggtcctgatggcttcagctggggacagttgttcttgaagtgactgggatctccgcagtgccaacatgcattcgccgggggttggttgcttgcaactgaggggcatgaaatgagctctgactctgctgactgaaccgtgatggggtgggtccagctggtctactgaagcttggtcccttgggtggaaatccaaaggatcgagttttctggtgccgatcttgctgctgagcccagaggacttggaattttctcttgagatggcctttttcttcctcctttcccctttccacttgcatggccttgttggagaggtgagagaaactgaggaagtcttggctggctaggatggtcttgagttctggcctgagtcccttcaggaagcgggccatcttcttgacttcagtactgacgtcatctagcgcgtagcgggccaactctgtgaacttgtgcacatattcactgacagatcttccgtcttgagtcagttcctggaattcgtcttcccggaaagctgtttcaaactccgcccaggtagcgtctctgatggtgacactgaaggtatcccaccaggctaaggccatcccagaaagttgatgagcagccaatagaacacgctgattttctgggcatccgatggcttccagctttcttttaatcatgcgcagccaattgtcagcatcgaggggattgctagatccggcaaacgtgggaggcttgagcctcaggaaatcccccatcctgtcttgtcgtcttccaccattcggacgttgattttccagacttcgagtgaggacctcaatgagtcgggtttggttggctagaacttgg

SEQ ID NO: 74841 - DNA, 824 bp, Zea Mays
tcttatgttccttatccaactttaagctcatttgttaagatttggataagcaccataaaaacggtttggtagtgatatcctcgcctacatgtgtgcttggatggtttggtttcaagcttacacacatgcaaagatatgaaaattgaggggacattatcactaccatatgatgctaaagtatacaaaatagaaatttacctttgtagcatgtttactacttttcatttcatccttagcatcatcttgctagaaacaagtgaaactagataccacatgagatcataataaatagggttctagttactcatttcacactaagactaggcttataaatatcactaaatcatcatcatccaagtcttagttctagcaaacacttatacacaagtatgttggaatataagacaaatgtgatgcaagcaagcaatgtagtgcacaaaacaaatgcatcacacatatattcacgagcttgctcccctacttgtgtgcatctcttgttcaataaaatctcataccattatactttgctcttgatccattcgtattaactcaactgatcagtagctccccctgagttcatgtccaattttctcttgtgcatattttcatatctttgttccaacttgcacatttgcatatctttgttccaacttctccccctttgtcattaattaccataaaagggttgttctaaggctatgggaaaatgtacttgtgaatattataccaacttgaaagtactcaataagtttttgatggacaccatatgcacgataaaatccttgacatcacttgcatgaacttattttaggagagttgctctc

SEQ ID NO: 74842 - DNA, 400 bp, Zea Mays
cttttgcaaaagaatcagcggaaggggtacctggcattctggccgtcagatctaaacctacgcaccaaattagatctgaacctcatgaatcagtatggaacagggaccacgcgatctaagatcgacgacccaaatctaatacgatgtcgtacccatcctgaccgctggatcccaaaccgatgccctagattcttcactcgaagcggtactcacaagatctaatctgtgccgttgacggagggatcaacggtcttgaacaatatgccatactacaatgcccacattcgatctccgccttccgatctagatcctcggtccgaggatcctccttcccccaacacagaggaggtgtctcaccgaaaatgatcacgacgaggaagccggttgcagtgcagtctgc

SEQ ID NO: 74843 - DNA, 423 bp, Zea Mays
cttatttcctcgctttcgagtgtttggcttacggatttctatgtcaacaatgatgcttcggttgctactgctccagctttaattggcaatgaggactgtagtgttgtagattggatggctaagcgggctgcttacaatgccttgctgaaatagcacctagtttaagttcaaaagtgatttaaacaccatgcagatcttaagaggagtcctagggacttttaggtgggtgagcgggtgttactgaagctttagccatatgatcaacatttcgcggttaacaggccttttcccaagcttgtctttgaatatttggaccttacaaggtggtcgaaaaatggggtcgtggcttaccgtttggagctttctatagaggcctagcatcattctgttttccacgtgtcccagttgaagtctttcactgct

SEQ ID NO: 74844 - DNA, 531 bp, Zea Mays
acaatacagtcatacaactagattatgtgaatacacaatacagtcataaaaatgtgaagacacgcacatatattcctaatagaccaactactactctcccagtgccaacaatggttatttttcttggactagaatatgtttccacttttgaacaatggacccggactaagcaagatgcccagaatgaccaaaagctctttcttccatcctccactccgcagctgtcatcgccacaactacctgctgttaataaagaaaacaaatcttgctatgaaaaacagtcactcaaaattataagtgctactgtacctatctggattaacacattgtgcaaaacaacctatatttagtttcaaaaactgtcgtagcagcatcttcacttcaccaatctcatgaaagtactcattagttttcacagttagttgagtggaaacacgaagagtgatatcataaaaatggccaagaaattcagccatcttttttgcattttcccaatcatcttcaagtggaattccatgacctttgtctcca

SEQ ID NO: 74845 - DNA, 710 bp, Zea Mays
tatggctccattggtcgtaccacgacttattccgattcggacaccttcctccccccgggctccactcttcggaaatagagcgtgtcgaccaaactaccaaggcaacctggtctccgtgctcggctcgcagggctagaaatagggaacacttccccaagaaaggcacataccatacgacaaaaggcctagagtgacctcaataacgccaggacaaaaaaatcaagatagaagcaatattcacacaacagtttcatatagtcgttcaaaggaattattacaaaacatctagataggcaaccattcaagcattagcgggcggatcaccggaggacaacgcaaggctccaaggatcagtcaaaagagtatttagatcaacccgacccacgagcgatcgagcatgaggcggacctgatcttcaattctatccagctcattgtcactctagcaagtggcgtagccttctgcgatcatggaggcatcaattgcattaaaatgggagaccattttccctagggccatgctgctctcgtgcaaggtgccttcaacgacgacgtgctccacttggccaggtaatgcttacagctggtcaatcaggggcacctacatcgggggcagggccgagagatgggcgcacaccctgccgatgacaacacacaaagtctgaagctaagagctccgttccgagagcgtagccaccgcttgggacatcg

SEQ ID NO: 74846 - DNA, 672 bp, Zea Mays
cttcgactcagctaactcagctgagggtagcttcggcattgtagttggctcttcaatcctttgcgcaggaggagcagtttcccttgattcagcagctgaagaggcctccccgccaaactcaggcaccacggccggttcaatataatgtggccggtgggtaagtaccttcatctttttgcttgcagccttcggcacaggttcagccgagggggccacagcagtagctttcctcttcttcccttgcccccgcagcgggtagcggtagttggggtagacgaagccaatagcgtcaaaaactctgtgcaatctcttctttcctcgacttctgaaggctgtggataatgcattatcttctgccttgggaatatgatccaagtagttcatcacttgtaacttcgatgcattttagccagtcatcgtttggttcatcgaatttatccccatatctgaatgtatacttcagccggaccagttcaccttcgctagagttggtgatggtctccttcggtatttcctagctctctacaagcgaccatactctaaatgctatgtgctcttgaattaaatctctcgtaccaataaagaagcagacagtaccaaatgccttctggcatgcttcggcggcttcatcgatttcaaccttcgactttcgaaggccgaagcgggaccata

SEQ ID NO: 74847 - DNA, 422 bp, Zea Mays
gtcagcgctaacgtcagctgccacgtcactagccacgtcagcgctgacgtcatacgccatcgggacccttccaaacggctgttaatgacaaaaacacggctctatctatgacgatatcgtaccgtcacagaaagcaaacaacgttaacggcgccgtcagtttgcccgggcagacgacagattatgacggaaaagttccttcctccatgaccaaacctgatcgtcatagaatgaaatcacttccatgacaacgcgtatttcgtcacagaatggatacacatcgatgacgaaaatgggtagtccgtcacaacacaacaaatgtgacgcgacccctatgaccaaatcggaatcgtcacaaattcgtcacaaatctttatctgtgacgatacctgcatattccgtgacgcaatacaaacatcatcg

SEQ ID NO: 74848 - DNA, 869 bp, Zea Mays
gtgatcaccctaagtcgtgtaagcatgagcatgtcgcaccgacttaaggcgtttccgacttaagtcgattgctccgttagtagggtatagtgatcaccctaagtcatgtaagcgtgagcatgtcgcacagacttaaggtgtttccgacttaagccgattgctccattagtagggtatagtgatcaccctaagtcgtgtaggtatgctacgccgatttcaagttgtgtccgacctaggtcagttgttgatcaagaacttgtatgccttggaacatggaagctttattgataatgaaaccctttgcttacaaagtacaactcgtccacaagagttttgagtcattgctatggatagaatttcctgaggtgctcaatattccatgaattctctactttggtgccatccatttgagtgagatggtaggatcccggccggataacctctgcaacgatgaatggtccttcccatggtggtgacagtttgtgccatccttcccccgttagtactcggcggaggaccaaatctcccactatgaaggatcgatgccgcactgctttgtcgtggtagcgcctcaaggtctgctggtatctggccgactgaatgaccacattcagtcgttcttcctctaatatgtcaatgtcctccagcctagttgcttcttcttcagctatgcttttgaatgttaatctgggtgctccaaaaattagatccgatggtaacactgcctccgacccatataccatgaagaatggggtgttttcatgtaaagcctgactcggctgagttcgcaggctccagaccacatacagtaattccctgatccattttcttgcgagcttttcgctcttgtcaaacacctttttcctgag

SEQ ID NO: 74849 - DNA, 405 bp, Zea Mays
gaagcttccaagcgtgttgcatatataaaaaagatacatgagaagaccaaggaagtaattgagctcaaagatgtgcgcagggctgcaagtatgaacaagcataggaagaaagtgttatttgagccgggggacttggtttggattcacttgcgcgaggagcgttttcctgatcagcgcaaatccaaattgatgccacgaggggatggtccatttcgtgttctttccaagatcaatgataatgcatacaagatagatcttccaccaagctatggcgtgagcaacacgttcaatgttgctaacctcttaccatatacaagcgaagacacttcagagtcgaggacgactccttttcaaggggaggaggatgatatgaccacgccattaagcaacatgttacaaccccca

SEQ ID NO: 74850 - DNA, 642 bp, Zea Mays
gttcgactaggaacaaatggtatagacatgtacttgcttaggcaccacatccacctcgacatgaagatagagtaacaaaaggtgaaagaacctctagtactatggacaaaattatgtgagcgcttcgatatgtagaggcatgtgatgcttctacgggcacaaaaatgggtcactcttcgcttcctctgcttaaagacagtggaggcttacaacatcatcatccaccgtattatcactcaacaacgcttttatagctagatagtcatagacttagagatgattgagataactcttataccttctacccctcaagcatgatgctccagcaacactactgaaagcaccttcgaggtacttaaggatcttggatgtcgtctagaggaggtgaataagcaattaatacttttcaaactttattggttgcagtggaacaatgtcttagtccgatgattacatgtagttcacaaacattaatactgaatgcaagtattttttgaccgaaatctactgtaggtggtctacaatatttttataccagagaagataattttacaaagagaggttggggagggttgaatttacattgtttgtaacaaaattctaatgtctttagctatctgatctctcattctataggtgaca

SEQ ID NO: 74851 - DNA, 293 bp, Zea Mays
ctttggtgttcgtctttaactcgttgacacacatcacatagtgcaacatgagtagccacatctcttttcaaaccgtaccaccaatacttttcttttaggtcctggtacatcttagtacttccagggtgaataaaataagtcgaatcatgagcttctcttaaaataagttggcgtaggtgctcgatttctagtacacatattctctttttaaaccatattgtcccttgttcatcttctgtgaaatcggaggactttcccaaattaatatgtgccttaatctccttgattttctc

SEQ ID NO: 74852 - DNA, 478 bp, Zea Mays
aaacaaaccagaacgatgttaagaacggtattttagactgtttgatttgattcaaaatcaaataatttcatccgcagtctcaacacctgattccatggccacagataatttacgtggagaatcgaatctcaattataattccttggacgctacttctcagttgatgagtggagactgaattatattgcaccgaaaactttagtcgtcgagttctatttaattagtttgggatgaactcagagggctgaactaaatttttgaattcgtctttgcgcatcgatgaattttaaataattaccagactcgccaaatttcggaacaattttgttccgaacatcacaaaaatttaggaaaaccccagatagataaagataaaaatgaggtcgaactcacgacagacgaaacagattaagacagatactgttattatctcatgcttaaatctatactcgctgttaaatgtatagtaacacctggg

SEQ ID NO: 74853 - DNA, 452 bp, Zea Mays
gccagacctagtcttcgatgacgtccagctcctcatcaccccgactggtggcagagccttcaacaacgatggcgacatcgatctcattgaaatgtgagaccatatgccccaaagccatgctactaccatgaaaggcggcctcggcgaccacacgctcgacatgaccgagaagtgcccaaagctgatcgactagtggtgtttccatcaaaggcgagagcgagaggtgggagcataccccatcgatggccgaccgaagctcctcaagctcattgtagtttgcaagcatggtcgccgcctgagccatcgaagcctcggtgctctcatggacacgggagagctctcccctcttggcctccgccaccgttgttgccttctgcgccgacctcttggcctcctcggttcgggaagacaacttctagctctgaggagaagaaagggataaaaacacaaag

SEQ ID NO: 74854 - DNA, 471 bp, Zea Mays
ttcacgctgaattaaacacggataacgatcacggggtgaaagatcttgccgcggataggctggaatgtactatgtgcttgatggttcatcagtacacacaggcgacgtggtcgtgcggcaatcaccggcgtgttcgccgttcaccgtgaggacgccacaccttaggaagtttatcgcatcggtatgagccatagtgaccacccaatgaccgccgtagttcagtcgctctgcgattgccacggtagatcgccgccgtgactcattcccctctcgcccgctagtgcaattcgtccaaattaagcaccaccgctcaagcaaactataaattgagcacacagacgggttcgtagggtagtcaagcaccaagccaccaagtcgtgcctccaattgttcaccagagctcaccaattccatatttcccccaaatctgctttccgccatcgtgaaagaggtctcgccgtggctagctca

SEQ ID NO: 74855 - DNA, 1156 bp, Zea Mays
ttcagttcttttttgcttcttctgaagcatcatgagattccttctcatttcttttgatagcttcatcaaagatttctcgtccacccttcagccatacttcggaataaaatttcccacctttggaataatagaagcagtatctgtgactagggggtagtttctgccttttcaattagtttcgacacatcgaccgtctcgatgcgccgaggtctacgtgtcaagaccttgattttctttgttttcggcgcactagcagatgccgaagcagcaactttcatttctctcccttatttctggacgggatagcaatagtctgggtgaacgaacccaataacctcaaacactctattcaacctcttcttgccgcgagcgccgaaggcaaccgtcatgacttcatcttctgccttcgagtacgctccaagtattttattacttgttgcctctataacatccaaccaatcatcatttgactcatcaaattggtttctgaaccaaaaagtatactttagataaaccaggccaccttgactggaaccagcggcgacttccttcggcatttcccattcgctcacaagaggccatactttgtaagcaatatggtcttgaactaagtctcttgtgccaatacaggtgcatactatgttaaaaacagcttggcatgcttgcacgtcatttccaagtgcgttggacgaccttctaatgccgaagcgtgacgatataggacgctgaataatgcccttaacatcttccctctggctcaactcattcttcatgtaaaaccattccttcatccaagaaccttgccacttcttccaaaatgtgggcatagggaaattcgcctcagaccgaggcacgaagctgtagcaaccaaaattgttaatatactgctcctttctgattgccttcgtctgataggatagctcatgaatattgcagaagcatctcacttatggctccagttcttggctcctcataacccatataaaaactcccactctaataagagcctcgaggtaacctgatgaaggtatatttcaaacgtcttcaagacttcgaccagcatcttgtggagcggaaagcgaagcccagctttcatgaagctcctgaagactaccacttcatctcctgctggtagaggaacgatgtcttctcctct

SEQ ID NO: 74856 - DNA, 948 bp, Zea Mays
gcatgccttcgcgccccatcttttgtagagcttggaagtcgaggtggccaaaacgcgcgtgcaacgccactcatcgtcattgtagcttgccgcgaggcacaccggtttcgacggcctgagtggaagtatgtataagcgattcggttaacgttgtaccttggcgaggagttcgtggctgcggtgatcccacaaacgaagaacaccatcatcgatgtcgatcctgctgtcattctcgtcgagttgctcgacactgaggatgctgctccaaagacgagggatgtggtagacatcatgaacggccctgtggcctccatcctttgactcaaataggatcgatccgcgcttggcgatctccaccagagatccatcgctgaaacgcgtggagtcgacgacgtcgtcggtgtagttagagaagatctctgcgttgccggtcatgtggttcgacacaccagtgtcaaggtaccacttcatctcctgcagttcgccgtcaccgttgaggtctggctgcaccttatgctagttgaggtagacatgctcaacgcggtgtgcgtcgtgaacagtcttcacgaacggctgcacaaccgccatgaacagcgagggcgtctcctcctccaactgagcgagatttgcctggggctggctcacctgggctagtgcctcatcacgctttttcttacggcactcccgagcctaatgcctggacttgccacagtagcagcaagcgtcgtcgtcgacctcaccgcctcccttagctgaacgcgtatccttgtcgtgccccctgccgcggcctctcccgccacgacatccgcacaggaccggcttgcgctctgtcgcgcatccccaacccatcagtgttgcagttgagacggcacgcaagatgagcgatcagctgctcctccgtgaagtacagcttgtcgttgatctctttgccaccagcgctcagtccga

SEQ ID NO: 74857 - DNA, 488 bp, Zea Mays
cataattccacatcatttaacatgcttcaaatagatacttcaacttcatcaagttaggaatcaaccacctataacattctcgaatcaatatcctcaacatatttaaaatagtagaacatgaataatttcaaacaacaatccttataatggaattcaaggatcaatacattcgatacttatatcaattcaaagacagggcacaagatacaaccaaacggtataaactaacactgcatttacttgccttcactgggaatttaaaatggtactaagtatgatccagagatccacaatctgtttcagcataaaacatagtacacacattcacataacattcgctaataacaaacaccgctcctacgcagaaccccaacccgttgcgaacaacacctctctgagctcccggccccaacgaatgtatgtcaaaatgctagggttagacggtgagggggcgtccaatgcccttgatgtggaatcaacgcctaaca

SEQ ID NO: 74858 - DNA, 468 bp, Zea Mays
gtggcagatgcactaagtcgcaaggcttcctgccattgtcttacagtaaagacttctgacatcacattatgccaagaaatggagaaattaaacctgggaatgattcaacatggaaccttgaaccaattgatgcttgagtcgattcttctgcaaaagattattgatgcacaaagaaatgataagggtatgaaacatattcatgagaaaataaaagtcggcaaagcaaattattttagaaaggatgatcaaggcatagtatggtttaataaccgcatagttgtgcccaagaatgatgaggtctgccagcaaattttggacgaagctcatcttagtcgatattccattcatcccggaagtactaagatgtatcaagatttgaagcaacattattggtggacaaaaatgaaaattgaaattacacgctatgtggcgaaatgtgatacctgtagacgtgtcaaagccatacat

SEQ ID NO: 74859 - DNA, 745 bp, Zea Mays
tcgccggggacttttaccgtggccgccgatgacctatccgagccacggcggcatccttatcgccggtgagactgatccttatccacggcgtgatttttctaaaaacctgtgaacagtgcgcctgaattagtgaagagcttatctaacagatcaaattggagctctattttctccaatttttatgtggtacctaagccaactttctgcatcaaagttatacatctataatccatcttcaactttgccacaacgcttaccatcaaatagtcactgaatcccattcaaaatcgagctcaaagttcaccccatcacactgctactgaaaattcagtccagggattgactgacagcccgactttgagcttaattatctctaaattcttcttaacaactaggcttacactcttaagcaaagttgttctcctttgtttgttctacaagtttgatgtggtgacctagggcaaaaaccctataatttgaaagttacaaggctccaaagttgagccaaccacactgaagttcagacttagaatgaaatagaggtcaagtggtactttttgcaaattagtccaaaacttgggtttggcttgtaaatcttcccaaatgtgaaccatgtgactttatatgatttaacatagtagtttttacactttagtccaaatgtgcacaatttttgcacataggcccctagggtttggacttagggttttccagggctcaaatggggatttttagtacctcaggg

SEQ ID NO: 74860 - DNA, 749 bp, Zea Mays
ctctcttaggttcggtttacttccctcctgagctccaccccgtgctccacctctcgagctccgtttccgttggtttcgcgtgggggaaagcgcgggtctacggttctagatagagtaaactttcattcttggcatgtcgcgttgcttttggcgattctggcggcggtgaaaaaagctttcttttttctggggactcgtgaatgaaggtgaaaaaacgctaatctattgtccgtcccaccaaggcccgagctcaattcgaaaatccgtacttggcggacttgtccttcctcctttgcaggattggaattggattccactgtgctggcggctggcctcgtccgccatttctggaatcgtggacgcgtgactggaattggatccagctagcctctcgtggatttggtgggtgtgctgcgtgtgcgagagtgggatgcttggtgatgcgatagtactagctcgttgcgtgatccatggccaggatgccaaattcgaaactctgtttttttggcctttccggaaaatttttagatttcagtggcacggccggagaatccgggcgtgattcttgccttgctctgctccgtttgtgtaatctgttatttgcttctcctcgccccaattcttcccgtccctctacggtggatgtttcgaccagaatagaagtcgcttctgtcgggaggcttacaaaaagagcgtcttgacttcagtcagcctcttgcaaattgcaatcgcagctactctgcgaggtt

SEQ ID NO: 74861 - DNA, 525 bp, Zea Mays
agaagaagtggtgaccgagttaatctcacctgagccaaggaaagaaagttgtcatcagatggctattgatagcaaggagccagattcactcgagattatcaaagtggtgtccgaattcctagatgttttcccggaagacttaccaggcatgccacctgagcgaaaagttgagtttgccatagagcttcttcctggcactgcccccatttctaaaagagcctacagagtttctgaaccagagttagttgaacttaagaagcagatcgatgagctgtcagagaaaggttacattcggccaagcacctcgccttgggtcgcccttgtcctattcgtggagaagaaatatggcaccagaaggatgtgtatcgattatcgagctctgaatgaagtcacaatcaagaacaagtaccccttgcccagaatagaagatttgttcgaccagttgagaggagccagcgtgttctcaaagatagatctgaggtcaggttatcatcagctcaggattcgaccttcagacattctgaa

SEQ ID NO: 74862 - DNA, 318 bp, Zea Mays
cctcgaacaagaactggctaccacatgctaccagtgatgcagcagccacaacccctattgtgtcatctgctactcccaaaatagctgctggaactgctgtcatgcaatgcgctagtgtcggtaattcctcaatgtctgatgccatggctccccgtcatccaccacaaccacgtgtgaaaaagaccatcgccaagaaaagaagtcgccttgctaccgaaggatcaccttctgctccgactactcaagaacaagacgcgtcaaccgtggctggtacacagctattaaaatcattggggttcgatttcaagcacgctaacc

SEQ ID NO: 74863 - DNA, 463 bp, Zea Mays
atcgagtatgtcttgctgcagtgatagatgttgtcctgccatagcgataggcagaggagttcgtggagtataacactattgataatagtgtatatgcctatactttataatacctacaagtatgcttacacacaataatacaatggccacagatacacttgcacccttaggcgtgaaaacaatagactttcttgaccaacatattgttcatcacttttaatacaatggatgtaaaccttagttaccatgtctatgtggcaccatgccaccatccaaaaaatgttcggatgtgcacataccatcggagctataccgcctaggatcgttgtgccccaagattgctgctcacggacgtctcaccttgagaacttattgaggaatatcctatggtctttggttttgggtcctagcctataggagccccaaacttaactaagctgaggacttggtccctggtctaaag

SEQ ID NO: 74864 - DNA, 336 bp, Zea Mays
tggtaaacaatagatgggtaaatgacatatctggcagcctgtcagctcagattatcatcgatttctttgtgatttgggacctagtacaaagttttcagttacatccggggactcctgatgtgcatcgatggtcaccatctgcatctggagattattccactaaatcggcatatgatcgttttatggctggttcagtcacttttgagcctgctacacgaatttggaaaagttgggcccccacggtgtaaattcttcatttggcttgcttctctaaatcgttgttggacagcggacagattaagcagacgaggtcttgagcatcctgtaaggtgcccc

SEQ ID NO: 74865 - DNA, 459 bp, Zea Mays
ccgagctgcatcttacacaatggccttgtcatgccaatgcttaatttcaaaggactcattaccatgctcataagtttttcccttttcttctcatcggcttttacataaaaccattcatttgtccaaccggtaggccacttggtgcgatagccgatcactagagccattttgtctttccgatatgcaaaattgtagcatccgaagtttttatgcaatccatctgcccttgttgtagtttgatagtgaagctcgtggactctgcagaacccttcaacgttagcactttttccttgactttgtaaagcccatatctacacgctaagtctgactatagcgtttggagttagttgatgaagatagatttcaaacctctttaaaactttattgattatttcgtacataggaaaccgaagtcccgctctgaagaagctcttaaacacaaggactccatcatttctt

SEQ ID NO: 74866 - DNA, 770 bp, Zea Mays
gatgaagcagctttcaatcaatttccaaaactggaggtctgagatgaataaaaattttgcaaagaaaggcctagacccgatacaaaatataaaatctcaacaggtcagtgggcagtatttctagagcagaggagcagccctgatttcatatctctaagcgaggcaaattcagaactctctaagaagaacaagtaccaccaccacttaggcacaggtggttacaagcatcaggtttctaaatggagacaataagacgccaagaagaaggttgcagggttgccgacgctatccaagcaacttggtgaaaggacggctaattaggtccttgctagaaaaccaaggaaaactaaggctggtatatcttttgatgatccaaatatcgaagaaacggcaaaaacatatatgcaattgtagctaagcagagccaagaaacatttaagccacaaagggagagagacatcccaacggctggtctcggtaaccctaagcattctggtcgtgtacgaggaatctcgtctaaggaaggatggaaggaaggattcagaccatagtgggaaggtttgtacaagaaacgtgattgatacaaagaagagttgtcggattatttaagtaggaggccaagaaatagttcaaaggcctgatgtctcaaatgctatcaaatcctcctctagaattgatgcagcaattggtgagtgcgatgtctgttcaacagatgaccactccacagatgcaaataattccagcagctcaaccctcggcttccaccgatt

SEQ ID NO: 74867 - DNA, 380 bp, Zea Mays
acgagatctggtccaccctcgagagattccatgagggcaatgatcatgtaaagaccagacactttgagacgtaccggcgagagtacgagaacttcacacagttggctggagagaccatcgacactatgttctctaggttccagtcaattgtgaacaagatgcgtgccaacaaggcacagcttccctatgacgatcatgagagagcgctgaaattactacatgctctagatcggagggtttgggaggtgaaggtctcggcgatcattgagtcgcccaactatgagactctcattgtggacgagcttttcaacaagcttaaatccactgagattgaccaccaaactcgggccaagattgagaaccctggtgcacccaccatg

SEQ ID NO: 74868 - DNA, 658 bp, Zea Mays
cagaaaccgaccaggtgtgcggaccgccccgcaccgaccaggtgcgcagaccttttggctcactgtactacctgcttacgacaattataactacgtgttatgctcatttcgtgttatgatttacacacttttgggtatgcacatgtttcgggcatccgggcccacgaaaagattgtgttcccgcaatctaggcagtcgtactagtccccacataaatattgataacacgatgtcttatgtgtccgtttacgatacagtaatccaggtgtcggtccatgggctttcgtgttgatttcgccagcattttatgtgtatcgggcccacgaatccagcaaccgaggacgcattttttttcagctcaactcacccgtcacgctcgcggcggccgaaccctagctcaatcgccgccgtcttcttcttctccaccgtggctgtcgaaccccagattaatcgccgtcgtgagcttcttctccaccgcggctgccgaacccatagagattctccccccccccgtcgttccaccaccgtcgcattcaccttctccaccgcagagacccggaattgccttctccctcgcagagacgcagtcactttgtttttcttcaccgcggaaggggcccggaatcgcggaggcggtgccgccgccccctctttcttc

SEQ ID NO: 74869 - DNA, 456 bp, Zea Mays
ctcaaaactgtgaagatcaaatacggggtgcacttgtatgatattacgacttctggattggatgaagcttgtgatcccaatatagtttcaaggatacagaaaattcgaaatggacacatcatgctctacagtacgaaacatgaggttgcttggggacaagcaacgtttcatcggggcggtaatgtaacatccggctgtcaggtctgaagattggagtggagagctggaggtagtctgaaactctaaagaagaaaggtgacgactgaatgagggagagtgggccgttttgggctattttgtgttggcgtatttgttgggccaagttcagctatatagagatgactccgaaaggatgtaaaggaacagaatagaaaatactagaaggattacctctctcgcgtgcgtgcgtcttcttcgttggaggcggcgtctatcgagctcacgtcctggcgatca

SEQ ID NO: 74870 - DNA, 545 bp, Zea Mays
gtctgttcccgtcgtccccgggcccgtttgtgtaccgacgccgtccagatcgatggcaccagctgaggtggtaccaaggaggaggcaccgggcatcgtctgccttattctatgcttcaagccgccgctcctcgaccacggcatcgagactgagctcatcgtctgccgagtccatggacatggccaccgcctcggtaggcttctctccggctcctcacggcgcgcgacgcacacacacacgacgcacacctcaacaaatcgaggtttagggttagggttacagtgaccaagcagagcgagaaaggaagaggagaggactgagagaccgagatttagggttacctgcaacaccggagcaccggatccaccaaccagagggcagacgacagaggcataggagcgagcttggcgcagatcgaggtttagggatagggttacagtgactaggcgaagcgagaaaggaagatgagaggacagagcgagagaggaagatgaagattagcgccggccgaagttcttctccaccggcgccgcccacgggcatgg

SEQ ID NO: 74871 - DNA, 487 bp, Zea Mays
gactattcgaccatgcgtaggggcatgggttattcccaaataggtggcggaggatgtggctggccgttataggtgttcatcagcatcccataaagtggctgggattgggcatgtccatttgcagtcgatgggtcttgtgggtcttctttagtttgggcatcatgtgatggaaaactagtaatagaaggtttatcaaatgcacgtgctagcctccaataatcctcttgtacaccccctaagatttgttgcataaattccccatcgtttctctacgtaagatcgaagagcttggatgtcgtcgtgtactcgtgtttacttatagggggtccgattgtagcaggacgaagactcgttaggttctattccctctatcggacaagctccttgttccgatcaaccttgaaatcagctaagaacaactcatcgagttcaacctacatccttttcctggcgtcttccagccttcgatattcttcaaccgatacac

SEQ ID NO: 74872 - DNA, 668 bp, Zea Mays
actttaaaataatatcttcttgagatccggaacaaaatacttctaagggtgtggactgtgatgtaggtacgcctagagactgatgaaaactataccaatggtttatacaaggcttcctagaaatttgaaattgttgttgggagggaagttggtactatgacactttgggtcactatgagagaaatttgaggcaacttcgttactttgggatgaatctagaacaactttgtgtcaaggtttgatgccacacaacaactattatagcagtactagctattgacaactgttggggtacaccttcgtagcgtatagtccgacacttgtggatcaatgtaacatcctttttccttgtctgaaacctctttatctatcgtcaacattatgtctgatagttcgacactcctgactcgtctcagtccgacactcctcagagcatgaacaatgttgttgtttggtatgacaccctgttctcctttctgcctagcaccctcatataggaattgatccttgattgtattttcactgctatgttccttgattgtttcttctcatcatatgtcaggttaacgacaccatgaccacttgtcttggacctccttgttccttaatcgtcagttctccaaccctagctagaggcttcctcccacctagggattggtggatgttga

SEQ ID NO: 74873 - DNA, 340 bp, Zea Mays
gggagaagagttatgtagacaataggcggagggaactcagatttgaggaaggagacttcgtctacctcaaggtttctccaatgtgtggtgtcaggaggttccaagtaaaacgaaagctagccccgcgattcataggtccctatcccatcattggcagggtaggacccacaacataccgtctggaattaccggaatccatgtccaacatccacaatgtgtttcacgtatcccagctccgcaaatgcctgctagcaccagaaagtcacatcgaagaagagacagtacaggttcagaaagaccttcagtaccgtgaaaaaccagtgaagattcttgattcagc

SEQ ID NO: 74874 - DNA, 421 bp, Zea Mays
cttgatttgctggctgaggactcttctgatgctgctcctgctgggacattggtggtggcgcctctcccagaggctggtatgaccttggatattcagaagcctgccagtactcgcccgaggcctccttgccgagccaatcaacctgatccttctgctgatgagcagaaaaagaaaaagagacgcctccggcgagtatccagtttggatcgagacgttggtactttggttcctgctgctgaagaaacgcctgtgactgaatttattgacgctgaccccaatgggtgtacccaatctgctgctgatcccaatgtgggtgctccatctgttgctgatcccaatgggtgtgccacctgtgttgctaatgaagacgacgaggaggaagaggatgaagttcctttgactcggaaaaacagtcggcagt

SEQ ID NO: 74875 - DNA, 315 bp, Zea Mays
gaccacctctaacaccgacccgcacactgtcgtgaccgccgtgacctccccgacgtcactgaccaccccgccagggctatactgccgctggtaagcctcgtcgccatgatctttgccatggttactgtttcagccagccagggatcgtgggttaggtttaggttaagtccagggggttttgtgcaaggtcagtgactcatgcaaatagtagaccgagggctgttttgtgagagaaaagggggagaaaacccaggggcttcaacgcaaatatgtatttcttttccatttcgaatttacttttcttttaaatattgc

SEQ ID NO: 74876 - DNA, 390 bp, Zea Mays
ccaattccagcaacatggcggaagggctcctccgtagggaacacgtgagacttcatacctggacttctctgaaaatcgtcccccgctcttcgttaaagccgaagaccctctggaagccgatgaatgggtacgggttatggagcaaaaatttggactaatccgctacaccaaaacccagaagccgttgttcgctgctcaacaattaagaggtcctaccagtacttggtggggaaattttgtagcaattcaacaggtcgtacatcaggtcacgtgggatgaatttaatttgcgtttcgtgagcactatattccagaaggagtgctacacatgaaacaggaggaatttatgcgactcaagcaaggaggagatattgtcatgcagtatctcaac

SEQ ID NO: 74877 - DNA, 391 bp, Zea Mays
gttcgatatcggccgccagatctaagttttgcggaagggattagatctgacagcgagtaagtcgataggtatccaggatcgctagatcggaatccaacggcagagaagcgctttgccccaaatccgatcctatccgcctgatgcagaccaacggcgcagattgcatgccgtgaaaggggtgagtcatgccctaatcctagctgaccgtggttagatcaatggccaggagcacccacaatcacatcttctagtcctaacagcacataggaagatcgatggcccaggcgagaccacttatacccgacccaagcagcagcggcgcgccaactccggcacagcgggaccatttctgcccatccgagaccctcggttctagcgccccaaacacaac

SEQ ID NO: 74878 - DNA, 602 bp, Zea Mays
aatgttgttagtgttatatacatcactcgaggaaagctgccactacagtactacgaatttaaatatattatcttcggagaaatatcgaacaacttaactgcttaagttttgtagttcacatcgaacttgtgtctatgattttcccctgtcagtcctttttgtaagaagtcaaggtggctaaaattatgtctgagaaacgagaacttcattaaacttgtaatctccatgtttccaaatagatgtttttttcctgttttcaaatggatggtaacatagagtgcctgtaatcaaacattttaaaccggttgtcatatgcacaatgcactaaagtatttagatcatgtcaatttagccgacatactactaaggaagatattggtccaggctgcatattggaatccatgctaataatataattaccttgccatttttggaaatttgaaattaagtaggagtctggttaatataattaccaaaatgtttgattactcattactcatgctcttaaatttcaatatggtgatggtcgagatacaatttttctaccccaagcactccagatttataagttcaaatgcatcagacttagacattcatgttgg

SEQ ID NO: 74879 - DNA, 439 bp, Zea Mays
aaaatatagagccaaacaaaattatttacaaaggttgcgttatgatgtgactttaggggcttgaacaacccaccataatccacacgagtacaagctctagtgtctggtgtcaacacgtgtgcgaccatcagggctacgacaacacaacaagccttcgtaataagcgcaacaggcacaattatggctcggtaatcggggtacacgataagtccacgcaacgtgcgcaacaggagcaattgtggctcaatgatcacggcagacagacagtgcctacagggcatacgaaaaatacgcgactcagcgatggcggttcgactcaaggggagctgtccgattaaacgagagtgctacatagcaatcacatgacacagccaagttcgtacgacgcaaatattgcgtcgtgttgccagggcgcatccaatgccataactcagtcgat

SEQ ID NO: 74880 - DNA, 489 bp, Zea Mays
ttaattacaaattagttttaatcagactaacaaataattaattaattagttaaaacatgtttacgacaaaacaatgctactgactcgtacacgacgaggttacaaagttaacgcgactgaaactagttaaatcatgtttgcgacgtaaaatatattgaaaaaattaatattttgcgcatttaatgtgatgctgcgtattttcattggttaaaacttaccacacggatggccacgggtttgaagacacagaaaaaccgaccggatctagtgtggccatacacggaacggcattgcacatggccaaccaggcattaatacgtggctgtcagttttctttcccacacacattacgtgcaatgaggatatcgtataggaaggaacatgcaggggcctacgactgttctcctttccatgctgcgatcgtgtgtgcagtgagaagatcgcgccgcggcgctaggcaacgaatgagcatgcaggtggggccacacg

SEQ ID NO: 74881 - DNA, 498 bp, Zea Mays
gacaagttgtggagatggagttaaagacaacaagttaaggatgcggtcgagcagtcatgtagagcacttcacaaaaatcttattcgtcctttcctagcgtaggatcgctaagggcaacggtttcggagaactgctctcccgttcgacggtgcacgctagtggtcggaatgaagtagcgtacgcggttacgtagaaggaaggaacaggtgaaacctagatgcgctagtgtgttattttttcgatgaaagaacccacacgtatttatagaaagaaaccatgtttgagttatgtctatccaaaaccaagtcggttatgtagatccaaaaaatctgcaatagataagagtgtcagattaagtggataaacaaaattgtaaaagaaagtcgcatgcatgcaaggcttggacactaattttggcaaaccattcacgcgtatgatgtgcacccacacctttaccagaccagcccggtgaggtgaggcgagcgcatgtattcttcc

SEQ ID NO: 74882 - DNA, 594 bp, Zea Mays
ggcctttgtcgtcttatggtaacctcattacgttattactttacaaatccttcagggaggtgttcattgcgatgaatcgactttgtcgacctcatgtatagcttatctatacagatttatctttgttgtttatgttgaatgtgtgcaaccgagatgatcaatctcgggctactttgtttttagatttaacatcaatgcactttatgtcagtttggttgtggaagaaacaaaacagatgatggtgaaaaggatgatctaactaatccaagtaatccaatgtacatcaagaagcttttggttgtttaactttttggcgacatttcattgatgctagagaagagggcatgggcctgagcttctactgacctagtgtatggtctattatgcctcatggtagaaaggttggaacctggcaacaagatcaaagacgtccaaatttgtactcttcctactaattcttaatatgagaagaaactcctaaccctctgccgagttcatgtttaaggaaattttgatcaattgtccatcaattagctgttactagtttagtgtgcatatgtatcaacatatttgctaccttggtcttcatctaat

SEQ ID NO: 74883 - DNA, 913 bp, Zea Mays
cacttcttcagcagcaggagcagaagggtcggcatcctgattcaaacatgacactcgccgaagcctcctctttttcttcttcttcccctcggcaggagcagttaggtgactggccgagcgaaggcgctttgggcgagcaccatcagatttttgagcaatcaaggtcttttcaggctcggggacaattgcaatagctatggtttcagcagggacggaatcagatgaatcctcagccaacatgtccagcataacacttatttctgcatcactcgggtttataggcatctcaaagtgaacttgcctttcatcattagggagatcaccaagtgaagcaaccagagcctcgacttcttcgggagagggtcgcactctaagaccctggccactgtagctagcaggaggattggacacaaaactgaaaaaagtcttggaaggtggcagattctaggcagaatatgcaataggagcaccaatattcgacactttgcctctaagaatcatctccagttggctcaccaaatccacagcaggaatcctcttgttggtaacccaggtagaatcagtgacaccactatacaaataagccgggtacgctctatccttcagtggctgaatattcttgaaaacaaagtgtgcaactaccagtttagcagtcagacctctctccttcaacaagccaatttcagcaagtagaaccctggcttcggttatctccaagtctgtgggggattcagtccaactcggagcacggacatccggctatctccccgaccgaggggggagggacttgccatgattctctacaataaaccactccaagcgccatcctttgatgttgtccttgagtgggatgtcgaggtactctgtcttcctcccacggcgcatctccaaactcgcaccacccacgagctgg

SEQ ID NO: 74884 - DNA, 509 bp, Zea Mays
ctgattctgtccatgtaatgacacccctatatataataaagttgccaccttccacctttgcgtactgagttctttccttttccctgtatcccactttgtgtttgacgtctgatggctagtatcaagctctttattttgcttaattttctgtatcattcatcttagttttgatgagtgacttatgtcgtccgacttatacaccaagatgagttctctatctgactcaacctgtccgacttaacttgtctgacttatcacctttatttttgattctgagggatcatttccctttgcaccgaggcagtgataggtcggcgttactcgtatatatgtgcttactgtctgacgattcttggcagaaaaccctagtgttgtttccatcataacaaccttcttgaaaattctcctgctctgacgactccgcgcttgattcctcgctcacgagaagtctcatggcacctaagaagaagaagcagggggcgcaacggctatcaccccccctattgaat

SEQ ID NO: 74885 - DNA, 756 bp, Zea Mays
gtttcctcgacaggcatgattggcgactggatctcggcgaatttatcgtcggaataaaagctttgtcgtggtcccgcatgttgtcgtggttagggttcagcgctatgtattcgctggtgatttttaccttcgttcattcgcactacttcatattgcgtataacacctacctgtccatgaattagagcaccaatggcgcttatgcgcatcgcgccgacgagctcatggcggagcccctgttccttccgtcgtgccgcgctgcgtgaggtgggtgatggagcgacagccgtaggatttgggatgaacgacctagattagaagttttatacccctacgtcatattaaattccccgtgtagattgatgatccaatggccagggtgtgtcataatcgagggcgattatcggccgtggatatttgattgtgtggtcggcattgaataccggttcacagacgtgcatgcttgatcggacggctcaagattgaagataccccttcggccgcgtcgtcttacaaaagaaccccttcttttctactattataacccgtcatccactatattcagaggacataacaacaaggtcctgaagtttataaaacaaaccacggagacttaagaaataatgcccacactccatctagtgcagaaatgataaaataagcctagaaattgattttcaagtataagaataattcttgaatcttagaaaattcataacttgttcattttaactatgttttagtccgtcccagttgc

SEQ ID NO: 74886 - DNA, 340 bp, Zea Mays
ccgcgtcttcgccctacatgctctaaacaaataccaagctcagacaaaagcatggcgcgaccacacagtcatcccgagggagttcaacgaaggagacctcgtactcgtccggacagctcggacagagtcccggggtaagttggagccgaaatgggagggccctttcatcttcaagacgaaggcgtcccccagcgcgtataggctcacaacgccatccggcgaagacttagaacattcttggaacattgataatcttcgcaaattttttgtttaactcttcagggccacttcgcccttgtaatcagcagaacaagttttaagccggcccgcactcttttcc

SEQ ID NO: 74887 - DNA, 1522 bp, Zea Mays
ccgccataaagagcgaccagggaagcctagacgaccgaggcacatacagacaaacacaactttaccaaggtcgaacaccccagtgtaccacaatagagtagctccttccttgggaagctaccggtattcgacccccaccttggcctataaaaaggaggaggtcaccaaaacatagaggacgaaggggacacacatacatacatgcacacggacgacgagaccagaagacccagaggctgaagccaagggagcctaggcctgagagcactagtcgcctacaggaccctcaacacgatgggccgcatcgagacctaggctacgttggccaggggtcggcacgacatagagacgtcaatgatggcgccgatgctcttcggcacccacgtcgcccgccataaagagtgaccagggaagcgtagatgatcgaggcacatacggacaaaaacaactttaccaaggtcgaacaccctagtgtaccacaacagagtagctccttcattgggaagctaccggtatttgacccccaccttggcctataaaaggaggaggtcgccaaaacatagaggacgaaggggacacgaatacatacatgcacacggacgacgagatcagaagacccagaggccgaagccaaggtagcctaggcctgagagcactagtcgcctacaggaccctcaacacgatgggccgcaccgagacctaggctacgacggccaggggtcggcgcgacatagagacgtcaatgatggcgccgatgctcttcggcacccacgtcgcccgccataaagagcaaccagggaagcctagacgactgaggcacatacggacaaacataactttaccaagttcgaacaccccagtgtaccacaacagagtagctccttccttgggaagctaccggtattcgactcccaccttggcctagaaacaggaggaggtcgccaaaacatagaagacgaaggggacacacatacatacatgcacaaggatgacgagaccagaagacccagaggccgaagccaaggagcgagccaccatgacgtctaaggcttggcatagagcaccattcccgtagactttaggtctagccacacataagagacttgggagctcctccttctctcgcccgcttgtaacccctactacaaacattgagcaaccaggtgtcggtagcgcgatgtagggatgttcttcctgaaccagtataaatattgcacccactgagcgcaccattcagaccacataacacacacaaatttacttatcggaactggctcgaaacaccgacaaaccaacagctaatacataatgtgtatctccatctttcgatgaggtgtgcaacgctttgggcttggagcctagcaattgcatgaaaattggaaattaaaaataaatatgtcataataaatcaatcgtaaggtttgtagagtcttgcaagtggtatatgtttcccaaaaaatgcttggcagggcagtttcgctatgcgagctgataattcgacacgtgttaagcacattagttg

SEQ ID NO: 74888 - DNA, 717 bp, Zea Mays
ccaataatgactgaaaatgtatcaacacaggaaaatattttagttcgagagaacttggtggatgatcaggttgttatattgtctccatttccccgggtgttaatacttttgcccactcattttttatttactgacttctttgtcttgctctgtacgctcttttcagcgaccaagaaacaaccctgacattgaccctcctgccgggtcctcatctagccctatattaattgacaacataccggctcaagaaaacttaataaacaatcaggctgttttattgcctcaagatactcagaggcgggaaacgcccaatattgttattccaaatatcaatgcaaagcctccaaccaagctaaagctcaagcgaaaactttttggcgacacggatgagaactgtagcccaaccattgcacctgcctcgattggtagtatcaatactataaatcagccctctgctagtgccgagcttcttgaggatgatgattatacagatatcacaaattttggtatagtgaagaggaaaggcaatttgcagcctcttccttttgttgacagcactgtgggatcaagtggggatttttcaaagtccccatataacatgactcgcgctgctagtcctcatgttgatgcacctgaaatttccatctttttaaatggtatatatatgtgtgtgtatatatattttttacatacttgaactttggaaatttcctttgc

SEQ ID NO: 74889 - DNA, 764 bp, Zea Mays
cgtgcgaagcatgctagaaattctcacctcaagcgggggcaccttcgcaattcacaaagctgatcacccacatctggtcgttacaatgatggggccttgacataatcggatcattgcccacaacatgacgtaacctcaaagttgtctttgttgcattagaatatttcaccaagtggattgaagcaagagccatatcaatgattaggcaaagacatcacaaaagttcttctcgcagaacattgtctgtcgctttggagtctcctccgagttgacagtggacaacggaaaacaatttggcaaccaagattttctgggagttctatgcttctatcgacacgcgggcattctttgcatcagtctaccacccacaatccaacggagttgtggagcatgcaaatggtaaaatcttcaccacaatcaaaaaagactatttgaagataaaaaggccaagagggtggagcaattacccaaagcagtgtggccgctcaacacaactgagtcatatgccactgggttcaccccattaagattgatgtaaatagaggcaatgaatccacatgagctcaagcatgactcgccccggacaaaccctaaggctaccccagacatcaacaatctaacagcgaaaaacctcctcaacagggaccgtgtcaatgccttcgatgcattgagcaagtaccaagcagcaatgaaggcctggagagacaaagacgtcactcctaaagagttccaagagggggatctcattctcatcaggaccggca

SEQ ID NO: 74890 - DNA, 415 bp, Zea Mays
tgccacctaaccttgatatagagttttctattgagttattacccggaattgcacctatctcgaaaagaccttatagaatggatgtcaaagatttagtcgaattgaagaaacaaatagaagaattactagaaaaagggttcattcgcccaagttcattcgcttggggagccccagttctatttgtgagcaagaaagatggttcgagaagattgtgtgttgattatagaagtttgaatgaagtaacaattaagaataagtacccattacctcggattgaagatttatttgatcagatgaagggagctaagatattctcgaagatagatctaaggtcgggatatcatcagttaaaaattcgagcagaagatgtacccaagacagccttcactacgagatatggattatatgtgttttt

SEQ ID NO: 74891 - DNA, 574 bp, Zea Mays
agcgaggggacaatttgcccttaactttaaatctcctcaatccgcaaagcggtgacaccttgaggtacacataatccccttcttcaaattccagtggtcttcttctattatctgcgtaactcttttgcctggtttgagctaccctcaaattctctcgaattatacggacttgttcttctgcttcttgaatcagttcaggcccaaagaactgtctttctccagtctgatcccaatatagaggagtcttgtatttcctgtcatacagagtctcgaacggtgacatcttcagactggcctgttaactaatatatgagaactcagcataaggtagactcttatgccaactaccaccatgctgaagggcacaagctctcaacatgtattccaatacttgactagtcctttcagtctgtccatcagtatgaggtaggccaaactaaaattcaacttcgcatccatattctcatgaaaacttatccaaaatctgggggtaaactgtgattctttatccaaaacaatcttcttcggtacaccgtgtagagacataatccgagccatatataactctgctagc

SEQ ID NO: 74892 - DNA, 306 bp, Zea Mays
tctagccaaaaacatgtatgggttccattccccacttttttgtgcaaaatttatgaaacgaatctttattctccaagagccccctccaaaactgagatatattttgtttttccaccacaaccaagggattgtcttttatatatttatgcctgataatcttttcccacagtccatccgaagtctccaacctccataaccatttggtcaacaggctaatgttcatgtttctcagatcaagaattcccaaacccccttgatcttttggggagcacactgtcggccaattaaccaaatgatatttcctag

SEQ ID NO: 74893 - DNA, 648 bp, Zea Mays
gttaatgggcaatggctagagagagttttgtagggtaccccaacaaccttatatagcgtctagagggatatccatttacaagtcgtgaacttatcacatctgagtctatcttctatcattgcggacgctcccgatcttctagagttcagtcgctttcttcgaagtcaccatccgaatatcttgcgattcggttgcacacaaagcatgcctctggaacatctgtaatccttcaatgataggcatgcaaagataacaaccatgtgccacattcttagggattccacctagctccgagcatcatcttctttatgcgcgaagacacctaagaaacacaaaatactggtcgaaggttgcccaaggcctataaagcgcgtgaaggcacccaaggaccacttgagagtgcagctaaatttagcaagaatatagtcatcattcggaaaagggggtgagggcagtgttccgcatccaagttgtcgatcgacgacaatatgcaaaaagacaacaaaaagccaaagggactttgtgcttagcttacaaaaccaacatatcatcgggagctacaaggcccctccttcagaatgagaccatcctctcgatgattatacaacatcagttcaagttcctcgccttcaaacagcatcctaagct

SEQ ID NO: 74894 - DNA, 579 bp, Zea Mays
cggcgatctagtgcggtagcattcaagcagttgggtcgataagcaacactaacagtcaaggatgcttaaacacgacacagaaggggaggaaccgacctgaggatggctgaccacgatggagtgtctcacggcagcgactttgaccgatttgggggaaataccgaattcgggcgctacggtgggtaatcggggtcgaggagcggtgctcggggttcgtaacatgctaacggagcaggccgggtcatcaatttatagtgattaatagtggtggctccaaatttggggaaagaagttggcggccggagagagggggtgagtcaccgacgaacgctatcatcgctttcacctatgcaatgagcaggctaccaacggcgatctactgtgacgtggtaacactcctatttacgtggcatggctacgaagggcggcgaactctggcgaggacacctcggttaatcgtacggcaagtgggtatggtgaatagtcctgtgacatggtctgagctcatcccaacgccaagatcttttaccccaagtcattatcctcgcgccattggccacgaatcacagtgccagcgtg

SEQ ID NO: 74895 - DNA, 489 bp, Zea Mays
tataaaattcataagagctcacaaatcatatccctgttatttcttacaaatcatattttatataggttttatcaactaaaatatcaatgtttgttaggaacttgaaaacccggacttctgaattagacctatgagcttcagcatacatacctgaggttttgcctcttgtctaacttttggggcaacagattttttatttggttcagatatggtgcttcctccattacttttgtcactatcaatgctggagttgagactggtaattttcccgttattgcttgataccccaagcatgtaacgggaagcaacaactatcttctgctctttgataactaccttcctctgcaaattttccttttcactttcagacatatcagctgacttggaagtcctccgttgatgatccggtgcttccgtaatcccagagggagttgacatttgcatcaaatcctttgggtttccaatgcaagggttccttcctggaactgg

SEQ ID NO: 74896 - DNA, 444 bp, Zea Mays
gtcaatcactaaaattaattatagaaaatggttaacccaatttccctttcaatgacaacaaacatgtatttttccttaagattgtttttaatttcataaagaagttatttatggtctatatttcccatgcatataaaaattcataaacaaaatcaatttatcctaaaccctaacgcccaatcaaatccaatccggtttgtatcaatcattacgcccgatcggccatcgaatcgaccacacgccatagtcggtcgacgatgggaccacggtgaccggtaccgactgtcgtccattgccacataaacggccgatactgatcagtgctagaacccatctaccgtccatctcctatggtcaccttgccatgttgagcactcacaactccccaatgcaaccagctccctcatcgacgccacggtttaggtatcacatattcacatcgtc

SEQ ID NO: 74897 - DNA, 471 bp, Zea Mays
ggaaattctatttgtagttcttcttctctctcccaagtagcttcatcttcaccatgatgactccattgcactttgcacatttttatcactttattttttgtaacacgagtcaaagtgtcaaggatcatgatgggatgctccgcgtaagttagatcacctggcacactaagttcttccattggcaactgttcctctgggacacagagacacttcttcagctgagatacatggaacacatcatgtacatcagacagatgatctggtagctcaagctcgtaggccatctccccaactcgcctaaagattctgaagggtccaataaagcgaggggataccttgcctttaactttgaaccttctcatcccacgaattggtgacacctttaattatacatgatcaccctcttcaaactccagtggtcttctttggttatcagcgtagctcttttgccgagtctgtgctatcctcaag

SEQ ID NO: 74898 - DNA, 551 bp, Zea Mays
ctaacatgagctcatatacagggtgcccaaaaataaacatgaaaaaaccactcaaaggataaaaaaccttcatgggaacaaactctaggcatatcatcctcagctagttcacctcaacaaagttaggcccaaccatagcaacccaactaaaatcccccaacctagtccttctcactatgttggacccagctcaatcaccccaacctattagactcaacatgacaaagtagaacttgaccacgacatactgatcatagcaaacctggcatagtccctcgaccaaaccatactaactaggtcgggcccaagcaaacctacctaaaggttcctaaaaatgggtttcccaaccaaggcaccttaaacgagtcccgacccaagtctcctcagtcagtcgtcctaaacctcagttatgccaaacctggtcagcctagatcatgtgcctctgaaaggacattatagcctaggggtgtcatgagcctctgaaaaggtatagtacatttaggatccctttaccaatcgacacatgtccacctttaccaatggacgcatgt

SEQ ID NO: 74899 - DNA, 367 bp, Zea Mays
ctgcaatgccgaaggcaccctcagccaaattagctgagccgaagactgataagactgaggatccaagaatcgaagggacaaaaatattagaagttttaagctcttcggcagaagtgacggtgccgaaggcacaaaaagttcttgcggcgactcccaaaagaaaaaggatggcaagtgttctagatgtgctagagtcagtaaaggcttcaagttctattccttcagggaaaattgccgagtcttcaaaaatgcaaatcgaagctgaagcaaaatcggccgaagttgaagctgcgatgagccaggccagcgtcgaagttgggccttcagagcctgctgataaacaaccttcgggatttgaagagaaggc

SEQ ID NO: 74900 - DNA, 689 bp, Zea Mays
gtgtcgtcatgaccttgtttgggtgggtcgcctaagacaaatgaaaatgggatagaaaaatgaaaagagatttctgaataatgagagtctaaatccaactatctattcaaaccttctggctttatggctagaaacgaagttgcaaacctaaagagccaaccacagtagagatagatattcggagtaccctaccatgcatgcgtgtattcgatcggagccagcacaacatgtctttctcttggatgcatcttccgttaaagctccagacaatagcaccacacaagtagtactagaagagatcgtggtcagaatacacaagtgccaaattaagcttgttcagacatctatccagcgatgagctagcagcttaattagctactacagtacatgctagcagctaggaagtaggaaccactcctcctgagtcctgaaaactaactgttcaatggcttggcttgtgtcatcagattctgaacgcatcatctgcttttttttctattatcctttgagtggtgtggctgaagagcaatgctttttgtgtgccttgctttgcatcttctttggctttcctcttgtgtggcttcaggtgaatgcttttcccttctcatgctttattatcttccttcctcagtcgtagagctttggccttcagttggacttggatattctccatcatccttcaattcaat

SEQ ID NO: 74901 - DNA, 732 bp, Zea Mays
aagcagttgaaggctttgtgtccgttgcaagagacagagctaccgaaggtatcaaagattgctgcgataactccgaagaggagaaggatggccagtgtactagacgctgttatagaatctgtaaaggtgtcgactcctgcctcagcacctgatgcagagggtgaagccctaaagaaatctagcgaagctatcatggcgtagaccactactgaagctagatcgtacagtccctgccagagcaagatcttcggagactactgaagaaggtaccgaaataagacctttggaggctaccggagcaccattaatgttggaaaaagaagttgctgctaaagaatctgaatctcctgcccccggagtgcctaccaaagaattggaattcatagtgcgacatgctttggggaaaaattatcgaaggagcaaattgtagaagcgcaacattatgccagggatctgaagtaccctcgagggtccttggtgtataatggcgatgacgaagatgacttcctttattatctgccagacaataaggagatacatgtctgtcgggagatggcagacaatgtaggatatccgaagcttgaactaggcttgtctacgatgacgaaggaccagctcatagatagccttgcctacaacagtctgaaggtgagaatattttaacttgttggaaaacagattatttttgtagcttatttctttatcagtatgtgctcattctttgtttttgta

SEQ ID NO: 74902 - DNA, 411 bp, Zea Mays
ccccttgattcgatctgctaaatttcaggaaccgccccctggaatatctctacgtgcaaccgcccactcctggttgacgtggcagtctaggtgtgatatttgataaccaaataaataaaagtctaaaaaattaaactgccatttataactcgtcacgacgcgttcgcgcatcgtcgtaagtcacaagtcacgcgataaataacgcgaaacgcgagcgagcttgcgtgtggcagcccccatagcactttatttgtctcatgtgaagagtagaaaacactcccacatataagctggttctctcctatctagataggcgatatgggactaaagtctcgtgtcatctctacacaccaccttgacttccttattgaattgagccacacactaatgagcctaattccaacaataaat

SEQ ID NO: 74903 - DNA, 724 bp, Zea Mays
cccggagtcagagggggtagcccgaggcacgctgtagagtgtcatggcgggagcggaggtcgtagtggcggagaggcgaagctcctcgagaagtagatcgttcttcaccttcgcaaaagtggcaaacggcttcatgcgggtgaggatgggcgtcatgcgatcgaaacgagggctcaaaccgtgtaggaggttgaacacgaggctctcatcggtgatgggggccccgagggtgcggagagtgtccgccatcgtcttcatctggtggcagtactcgtccacagagagatcgccttgagcaagctggcggaaaggtgtctcgagatatagaatccgagtctggcggttgccgagaaactgagcctcaagggcaccccagatccggtgagccgtatcgttgacacacgaacgatgccatgaagttcgaccgtgagggtgccatggatccaagaaagcaccacttcatccatcaggagccaatcctccgtcgggtaagggaccggggagaggacgtgctcggcgagggcgtagcggcggagggtctgctggacctagtcgtgccaccgagggtactgactggagtccggcacgagaacgtcggtgatggttgcccggatgcttgtaaaggccgccgcctgagcgtgaagagaggcgcgaagagttgaggctggggcgggcgcagacttgaaggtgtcgacgcagtgatgggcggacgtgggagaaccat

SEQ ID NO: 74904 - DNA, 813 bp, Zea Mays
tttatgttaaagaaaactgatcgagggggcgaacgaccattgctccaacactagtccctcgaggggccagtttaacttggtgagctggtcctaaagtctttttctgggagatgatcgaaacactgccctcgtcagcttgaagtggtcccgagggggggagtgaaatgtgatcgttgaaaggtgacattttactgtggaattgttggtttaccaaggcgccttttcgtgtctataaaaactgttcatggctgcaacggaaagacttttacacgctggcttacagaaatgttggcttctccgcctaagaaactgatgcacgctttctgtttttcttgccgccggtgagctggcccgtgtgaagtagaccgcctgcctccgcatacggtacgttatgttgtcttcttctttgccaccgtctgtcgcgactgcgttgtcgaatacaccgtcgtcggagaagacagttagtgatccagcgacgacagtggagttgttaccagggcacactgttgagtttggaatatcaaggatttactcgggccgcgtgcaagagatgcatcgtttggggtattttgggaatggtgtggggcacgctccgagagccgaagaggttctagggctagagggggagttgattgttttttgaagcatttttcactgccagacttcgcttgcccgcacatcggtttatcgtcaaagtgttgtgacggttcgaagttcagattcatcagctaacgtgcgaacgacatggtggcattggtgaagtttgtgtgggtagagacttcgtacggtggggagtcctcggtcaaagtcttt

SEQ ID NO: 74905 - DNA, 337 bp, Zea Mays
accacgcagatccactctacccgagcaatgcatctctaccttctgtcgtcagagatctcgcccttccgcgtggtcccaagctctacagatggtggatagccagagattttgcccttccatcccgcccttcccaccatccttgccccaagccagagattcgcggccatccgcgataatcaatcagcacaaatcgacggccctggttttctgttccttcaatcaccttcctaagtcgacgccaacctaccatcgacggcgaggatggaggtccttaaatatgtccaaagcgaggctgccacaccaatccccatcctccactaacgaaccaatatcttac

SEQ ID NO: 74906 - DNA, 652 bp, Zea Mays
actggacccctagctcggctgacatctaattcaacccctaacgatcattacccctcaatcaattgcacaattctgggttgggaattcactgtccacgacaacggcggaaactaagaacacaccgacgtgttcttggttccccagggcgatctagtttaattcaaagggtatatgagtatcaggggactttagagaggctagaacatcacgcagaagagcatgagctaataggtagacatctggccacggcgaggtgttcacgggtgcggacaaactgatttgggcagagaaggaaattggagctctctggtggctaatcggaggcagtagcgggtgctctggcttcgtgatgacttaacggagctagaggtgtgctcaatttatagtatcccagagcggtggctcctaatttgggcatggcgtgctggcggccggagaggaagaaggtcactggtggcttagtcatggcgttcaccggtgcagcggttctgagatggtaagcctagacgtaccacggttactactgcgcagtaaagagccacgacgtggcataattgaggtcaccaaagtttccacgacgacaccggcggtccggccacgtcgcacggctacaggcgcggttgataagcttcacctcgtgaccaaatccgct

SEQ ID NO: 74907 - DNA, 560 bp, Zea Mays
atcgagatctctaaattcatctatcatgtcccccacagaggaatcagatgatctttgtgtgatggcggactctccggtctcgggggccggatcatccgtgatactatctttacgctgtggtagatgttcggtcttaaagactgaactgttttgtgaaagaccagaccatccggcctcagaagtcgaactgtccatgacgagggactcatgtattttatgtgtactcatcatttaaactttatttaggatttagtcgattctccatcggctctagcattacaggaatgaaacccttcttatttatacttatgaactgataatcagaaaaatctactcctgtgagacacacaacagtctcataagtccaaagtacaggggcatcggccatagcgatataggccgatacatcagcatgtacttgttctacatcgtcgcctacccattgtagcaacatttgatgtaatgtagaaggtacacattggttagcatgaatccaatccctgcctaggatcagactgtaatttccttctacatcagcgacgaagaatgcaacagcaagg

SEQ ID NO: 74908 - DNA, 1114 bp, Zea Mays
tgaacagtaaggaacatttgtagaaccagcagtcctgattaccaacttttggcgtttcaccgacgactgagaaaaccctgacttagaacttttccatgcctgcttcacattttgatgtattcgtttcttttcttccacaactatagccacacttattgcccgattgaaggtaagatcatagcaagtggccatcttcttctgcaattttgagttgaggcctctcataaaacaatctcttttcttgatattcatgtttacatgctcaatagcatactgagaaaggtggttaaatttcccaatatactgcatcacagtatctgccccttgcctaagtctcagaaacttctcaagcttcatttgcaaaaccccattaggaacatgatgagtgtggaaagcttctttaaattcaacccatgtaacctggtgatctggaggttgtatggcgacaaagttggaccaccaagtgctggcagctccgcgaagttgttgtgcagcaaatagagacttttgtacctcagtgcactgaataaggccaaacttctgctcaatcacctgcagccactcaattgcatcaagaggctattctcctatagcaaacactggcggccaagtctccataaattccatgtatgttgcattccttcgctgattctggagaatacgaggtccaccctgattgttttgatgatgagcaatctcatgcaaaaccctagcattatcagcagtggcattcactagggcagcaatggcatgtgccagtgtaggtggaattggtggtggtggtgggttgatatcagcttctgcaccaccacgcgatgtgtgagccccatccgacgcacgagtacgcataggcatctggagtaaaacaaactcatgaataaccatccataaccatgaaatatattacatgaggcaggtacatggagttttattcattacaatgccaaaattgacatagcttattatcttatgcctacaatagaggtcacgacaccatacacatgtcacattaaccctctgtgtcactagctacttcagaaacatcactacctcctggggactcaccacctggtacaagcataggagctgcttcttcctctaagactacatcagg

SEQ ID NO: 74909 - DNA, 362 bp, Zea Mays
tgattccagactccgtgtgtttcatgtcgttaggtgatggcgttagttaccagtgttcgtcggtgttagttacttagttatcagtgttcattggttgtgttcaagtatgcaattcagtataacatgactgatcgtaggggacatagtatgtagaccatgctacctaacttatgggtcaattaaccgatccagctgtctctacagacacctagcaaccttttctttatagagctcacatgcaatccgttgtcgcattcaaaaggattctaaggatgctttgcctcacctgtattggtgttagtggttttcagtgacagggtttatgaaaacacagttcgagctcgttttcttctccattattt

SEQ ID NO: 74910 - DNA, 667 bp, Zea Mays
gaaattggaattgaggcatgaaatgacttggaattgagtcgatacttcacgagaggtttatatgggtaaatatgagtgaagtgtgcgcttggtttgattttaggcgatgaaagtggaattgtggcactcggcttggaatcgatcgctagaaatggggatttgtggaaatttggagtctgggatatcagattagcatgaaatttggcaaataagttactagagatatcatgaaggtgcctgaaaaaattgggatagattggagcaaatttggctggtttggacattttatcgaacacctggcgtgcgagggtttaggtgaaatggccatttgagtgattgaaaccctccataaggagctaggaacctgcatggggaaacacagaggcactatggcacacatccatgcacagggattcacaagatgacacatatttggtttattggatcaaaggggtggagtttgggatctgctactcagagagacagagagaaaaagggggaaaacagtgggggagctcaccgagagggaagagcaggcactggcaggaccaatcaccaccggagcacggtcgccgatgagggagaggggtggagatcatcgtgaaatcgcagagatgagagagaaaggcgctgtctaaaggaaacagaggcgctagctcgggcttgg

SEQ ID NO: 74911 - DNA, 953 bp, Zea Mays
cgcagaggtgccatccgcagcagcagagctgtcggtgtcggcttctgttccccccgtgcctgcaacagggtggagcatcgagaccggcacagcaggacgcatggccccgcttggttggtgcgatgtagcgtccaccgggggtgtctctgagacagcggcaggaatggtactggcgcttgcagtattagtaggagaggacgtcagatcctcctcagtttccgtgctgagagacaaggagttctccctgttatcacatgctgcatgctcaccattagtagtttggttagtgaaatcaaacacgtgatcatctaactgttccttctcaagaaaaggcacaaggccagatgggagaagtgcaatttcagcacggagacgggcaccggcattggagtgaagcgtagagaaagggaaaacttcttcatcaaagatgacatctcgagaaatgtatactcgcccggattgaatatcaagacacttataacccttgtgaaggttgctataaccaaggaaggcacactgcttagaacgaagttcaagtttgtggcgattgtaaggtcggagattgggccaacatgcacaaccaaaggtgcgaagagagaggtagtctggttttgttggagtaaacgctcaaagggtgtttgattatcgatgactttgctaggcaaacgatttataagaaacatggccgccataaaagcctcatcccagaatttcaagggcattgaggcatgagcaagaagagataacccaacctcgactatgtgtcgatgtttacgttcaatgaccccattttgttgatgagcatgaggacatgatacatgatgaatgatgccgacttgggaaaagaaactatttaatttttgatattccccgccccaatcagtttgcatggcaagaatttttctatcaaattgtcgctcaaccattttttggaattcatggaacttttggaa

SEQ ID NO: 74912 - DNA, 407 bp, Zea Mays
tcgaaaactgaaacgagatggacacgcgattagacacaacatcagacaaaagaaatatgcttcggcatgatgcaacactcatgtcaacttaggttttttgtttacacgcgatacagacaccagtctctatactgctttgaaaattagaagaaggagcgaaacgggaagagaaaagagaataacgcctggatgtggtgagtatcggagaagaaaaattatacccctcaaattcagggtgttacaggaaaggaaggtgacagagccactggagcatgtcttggcccaatctgaccaggagatacaccgtcatgatgaccttcgttgcactagcggcttgggcgatcgtcgagtaaacggacaaccaaccacctgggtcttgcttgacctcgtacttgtcaatgttggag

SEQ ID NO: 74913 - DNA, 1324 bp, Zea Mays
tccaaacacaggtttgtaacacaggcactagccagcaaatattgttgaaattccaataaatgaagcatggaggaatttatctaatctgtaggctaaactgttaaataattttgaaacaatgcaagcgtatggatattgatcatactgatatttacccattatatggaaataagctttccgaaaaactgaactggtgacactgggaggctgagactcaattgaaattgatataaacaattatgactgtagtaggcttcaagaaatgaggcaagagtatacagatggaaaaggctaagtgtccattttgtcaaagttcttttggttcaccgttacattaaaataaaatcagcacatacctcaacacggatatcacatatcgctttcaagattagtaaacgaatagctggttctatagttttgtacgtctcaatttcagttctgcaagatggaacgattggaaaacttgtcaatttgaagttgcagtacaaggtttactcaagaatatcctgtgtgcaggactaacccatgagatgcaacaattggcagatcaccttctgcaacctgtagtttagatccttattaggtccaaccgaatggaatactgttattcatacttatctaaaattgtttgcaacatgggatatattgcatacccaatgccaccaatccttcagctttctgcacaggacagtcacccaggttccacgtcccatagccatgcgagttacaggaggaattgactgcaggtatgataaaaaaaaacatgagaatcaaggacagtgttggcatggcaaaaatgtaccatataaaactgtctaagggtatctaatcgcagctagtatgtatgatcagtaacaaaaatgcaattttgggccatgaatctatcgagcaagtgacaaaatcaccaaacaagaataatggtgcatgatgctaatattgcaggtgtgcagtaaagcataaaaaacagcagcaagcttctataaactgaaggcagcacagcatcccattccaaacttggtaacacaatacaggcaaacctagaaaatgaaaaaaaatggtaattgcaaaaaaaacttaaagcgttttggtatctgttcatgaagcaattaacagcatgcagcaaaaaaacatacacctcttccacacacacatacacagcgacatcgaagaaggggaaaacaagctcaagttgaacaaccaaggagcccacctttagcagtggcatatgcacatcatctagaatctcgttgggagtgataagcgccacctcgagctcctcagccgtgaaatcaccagtgatgttcagcagaggccggaacacctg

SEQ ID NO: 74914 - DNA, 352 bp, Zea Mays
aacccgcaaagattcctaagactaaggctaacgccataaggggaccgcggcttgatttgtgtattggttagggtctcttatgcaaaaggcttcgatcgaaggggtattgggctatttgggccgttggatctaaagcatacggcgcagattagtccggactcgtaaatgaaccggtacgcaactagggccataggatttgatatcaacggcttggattaaaaattatgcaggatctcatctcaggcgctagattaccgatcaacggacgggaggaatctcagtcaaagggtatcggccactcctagccgcacaatctaattacagcggacgagattagatggcgaagggttaa

SEQ ID NO: 74915 - DNA, 336 bp, Zea Mays
gtagtcaccgggtttccaataggggatattcttcacaacaaagaagccattggaagaatagccaagtgggcctgcgagctaggagctcacgacattgagtttcggcctcgcactacaataaagactcaagcactagttgacttcatatcagaatggatggagcaacaagtaccagacaacccggaggctgcagaagtatggcgaatgtatttcgatggctcgctgaagctgcagggagcaggcgcaagaatcctcttcattgccccaggaggtgaacaactcaaatatgctcttcagttatcattcccagcatcaaataatgcagcagaatatgaa

SEQ ID NO: 74916 - DNA, 420 bp, Zea Mays
tcttcagaagttctgaatattgttcattacaagcgtaactctactccatgactagaaaacttatttatgtgcctacacacgaaccgggtccactatacacacaaaccccaagaccccacatgacagccaacaatacgctcatgcccactcaggtgcacagatagcacggcgcttccgagcaccatggattgcctcctgtgcttggtctggcaacgtagcactcacatcctcacatgtgcgcgacgcaacggggaggtagcgagctggagctcctgctggctgtgcacgtgagagggagggggaagtggcgtgtaggtggaagaagccggaagagaggttcggcttttaaagggcaccatcgcgggtcgcggctgctactgatcaagaggggcggcgtcgaccattggtgcagggctgcgg

SEQ ID NO: 74917 - DNA, 758 bp, Zea Mays
ggggcactgagaaggtccatgtcccttgcattgaaggtaagcaggacatgggaccactttgtttgaccactaggctggtgacgacgatgtgatttaccctttagtagtaatccttctttggctgcttgttttcaaattctgagctagatcctcctgtaatcatatggattaccccctgaaggggtggctgggcgaagtcatcttcctgattaggtggcggagggggttgttggtggggtttgttgcttgtggtggtggtgatggtggcggtgacgggagagctagcctttcttagttatggagttggggtgttgatgggggaagttggaggggtgttggttgtagttttgatggtaatatggaaaacgattgatggttatcttcgtgttgagggatattaggggtggtaagtgtgggctatgtctctttggttgtttgcgagggctgctccggccatacggtcattggcttattttgttattgggcaatctttagtcgagtgcccaacgtcttcaccatgtaaaagatgcaataaagttttctttgttgttggggggcctctaccatgcccccatcctattcctgtgccaccccctcgaccctactacatggggtagtcgtgacagtgagggggacatcgcttggctgctgctgattggctatgttgtggacttgcagatgctgttgaccccgctcctgactgggatggttttgttgtattcccctggcccatgattcgctagattgtggagtctcct

SEQ ID NO: 74918 - DNA, 413 bp, Zea Mays
agatacacctcgcacctagtatagggttgtgttcaagacgccgagtagacacttcaagtaatcaagtagggtcatgatacatgttgtggaatggagttagttgttttagaataattattgaaatgctctgttcatatgataaatatgcatgtttataaaaatgttgtagtgtatgttgtgtatcagatagcgataataataggcaagccgacgtgtatgttatttagtggcctatgttgttgctctggttaaccaacttattagatggcttggttaagctcgtaatcgtgatgaattgcttgttatggtctaaatgcgtatggttatggtcgcgggtaaaaatttgtagcgttcatgtgatgtctatgttgaaatgcaaattagtgtatgaagagcgcatcgatatcgggttt

SEQ ID NO: 74919 - DNA, 357 bp, Zea Mays
taacaggagacttaatggaggctagaacattaagtaatttggtatgtactaacccaaggagtgctggccacggaggggtcccttgcggcggtggaagagaccgattccagggaactccgatgatctctaagggtggtggaccaaacaaggtggctagtgattcgttggcttcgcaactaagggacaaagagctgtgcttggttgatttggatgaagggggtgagagcgtggtgaatttataggccagtgagccaccatgatggccatggtgataaccatcaccggacatagctggcgaccaacgacaacgtcgggcgctgccctttcccatgagttcaccacgtgccgccgcgacag

SEQ ID NO: 74920 - DNA, 1318 bp, Zea Mays
ttttgctgctgtataattgtgctttgtctcttttttgccctccttttgttggttctatccgtgttttctttttttacatgtatgtgttcttattgtttatgtatttacttgttcttattatttacaattgttgcttcaggaatttgcagcgtgcttccccttctgcccacgtgctcgctccaccaaatacgctgctacgtatcaggtatgtcgcaggttctgcatgctccatgttatttcctgtgctttgtttaattgttatggtttacttgttacgtttgcacttgcttcatacatccatactctgatttatcctgtatgcttctcctttttggccatcttggctttacctccctacttgatgttacctctgggggtatttagaactgattccaatgtgatacctatgctcttgtcccatacctagacactccattttacgattctataaactgctcaccaatggaccatgggacatgtcagagtactggtcgctctcctggaaatgaggaagaggagacctaccacctctggtttgttcctttggccatgttttcctttctgtttaatgacttgcgctgttcttgagtcccctgctcgttgctcaatctgtttgcaagatgatgaccttgtttcttaaccaatggttgccacagacatacttgtattgtctccatcggacatgaccactcagacatccttgcttgaccaacaacgcatccctatttggtcgacgttttccactaagacctcgtacgtatcatgtacatctattgggattatgatgcatcacacgctcattcttatgctctcctctttgttgtgacctggtaaaacatagatcctagatcgttgttgcatttccctaaagaggcttccacctccaatagacaccgtcaaattgaagtgagaaggcaggcacgagcttgtacaacacaggctccatgctcgactctacccactcttgttgttcctctaaaggactcctacattgctcgcttgaaaggtcccctgctaggcgctacagtctccacatgcacgtgtcttacctctgttgtgttttgctgatccattgttgttttgtgttccttcagacaacaatccattcctttcttattatggtgggccgacgcatgaatgccctttttgcggcgccttcttttggttccaggagcgtgtcaagagtgcttctgctgtaactcaacggaggattgtctacaacctttgttgtaagggtgggcggatcaggttggaaccttacaaaaaaccacctgaacctctgcgaactcttctgaggtttgatggcgacgctcgctca

SEQ ID NO: 74921 - DNA, 517 bp, Zea Mays
tgtcttcgtcagtgccattaaacactagggatcctgggggatacttcagatccttagcatattgcctagcttcggcaacctgctcctctgatagctttttccctgccgcgtgacgcactataaattccaatccctcagtagaagcttcggcggcagggaattcagattctttgctggttctctcttcttctaacggtaacagagcttttgcagcatccaaaggcccttgttcagtatccttttcaacaaaatatgcaggccctgtttctgcgggaactgagggcccagctttagcttcaacccgagttacgacagcttgagcggtttcctttatatttttctcactcatgctaggtacttccgtagaggcaggagttagtacctttgtcgactccatgatagcgtctaggtacttccgtagaggcaggagttactgcaggaatttttgatacctttggcagctccgtctcttgtggcgggctcaaagtcttcggttgctctgccgatttcttcaatt

SEQ ID NO: 74922 - DNA, 436 bp, Zea Mays
aaaggagtcatccgaagtgccgaatgatacgaggaattgtaacaaaattccgcccaaggtaaccattgaacccaagtggatggccgctccgtggctaaacagcgaagatacatctcaatagtacgattcaccacctctgtctggccgtccgtctgagggtgatatgaggaagaggtgaggagttttgtgccgcaacgcttaaaaagattcttccagaaggtgctagtgaacaccggatcgtgatcggacacaatagactcaggcaccccatggagcctcaccacttggtcaaagaaaatatccgcaaccgcagatgttgtagcaggccgcttgatagcaataaaatgaccatatttggataaacgatccaccacgaccaacatagctgacttcccttgagactttggaagtcctactacgaaatccatggatatat

SEQ ID NO: 74923 - DNA, 515 bp, Zea Mays
gcacataggaaaatgtgtgcagataatggtagtaaagtgcacagcatcatgccaatgatgccaagcaaatatttttggtatgcaaagatgtatagtccaactcgttttaccattgcccatggtttacccaattactcatactaatctgaaattgggtttcaagttatgcaacattttttaggtattataattttgagagagaactattaacaatagtcaattatttgtgatgtaagttgccagcgggacaaaattttctcctcatattatataccatcttgttctataaagcgtaatgttgatctcttaattgtttagcaaatagagaagctttggaatagaacatacaacgccaagaatttattttatctgggaaaaatcatctgattcctaagctttcgacaaagcaaatggagataactgcttgacaagagcgaaagaaataccaatatccgcgtgggactagtcttcaacaacagataatactgctctcatacgaaggagtcatcatgact

SEQ ID NO: 74924 - DNA, 334 bp, Zea Mays
gtattttctctatgtagggtcgccgggatcgatttatcctgttatcaaccgggagcgtagtgaagggggagttagatggccatggtgccaccgtggggctgagtcgcgtcggggttgggcactttgggttgctcacgaactgcatatgcatggttagggtattcgggaagggttggtctctgtcttgaacaaattaggtcagagtttgggaatcgtgggctctagatcaggattccccagtggagctcggccgcattcgttgacggcaccgccgcctgctcgactgggaggtaaggggatacgcttcagacgttggatgagatgtgtacgcttg

SEQ ID NO: 74925 - DNA, 506 bp, Zea Mays
gcggcagcaggtacattacctaggtatggtgcctttcattctttttcttcgtattcgcgtctggggtccgtcgtccgtgtgttgttcatgtggacctccgtccgtccgagggccaacatcttcaatttataggccaagtaaggggccttcggaaggagccaccagtcaaaggtaaaactaagtgggtgaagcccgtgggccccatgatcacctagttgcgtcgtattccttatggtggatgatgtcgtcatcgtgggtcccgagcgtcatcatttgggctacaccgaccctaggccttcatagcctgagactagtcgttacgccctgctagcggtttgtgcacttaggcctaattccgataggtcacgagtgcaccgtacaccgggggacgtgcgggccgtaaatgcgtcgcaatccgatgggttcctaggctatgagtgttgccagtccgaggggctcgtacgtcatgaggtgtaggcagaccgacgccctgatgtggctcagcg

SEQ ID NO: 74926 - DNA, 376 bp, Zea Mays
ggcgttaggagttagctgatgaagataaatcccaaacttctccaaaacatccgcaatcatctcattcaaaggaaatcttaatcctgctttaaagaagcttttaaagactaccacctcatccttttctggcttcggagtaatttcctctctgccaaagcgaattagcttctttttggcttcactgaaatagcctaatttcatcaacttaggcatatcatcttcggtaatagtggacctcccaaactctaggtggttgggtttagatggcagggcactgtaatcatcttcagattcaccttcctcaacaccaacctgctcagcttcagtggcaagtgcaccttcgtcagaaatatcctctggcactgccagccccgac

SEQ ID NO: 74927 - DNA, 477 bp, Zea Mays
aaacatttttttggaacaactactgtccttaatccaaacatcagcaagactacaccacagaaaacctcttgtgaacaatagcagaaccgatatgtgtcattcgattgaccaggaaaaaaacaatagcaaactacagaagctatctatgcgcacacggcacccaagcctggaaccaaaatgcaccaaccaaatatccaacatgcatagataacacgtccctaacaaatgcacagatctgtaagttaaccaaggccaagcacacatagacaacatgccctcatgaatgcacggatctggaaccgattccaacagcgacacatggacatgaaccaaaaagatatagcagagcaaacctaggcctacggaggcggcgacaatggctagggcacgacaggcagcaggaacacaccaaacgctcccatgaggacggcggtttgcaaaacaaaagagcgaaacaatgaggacgacggattcgag

SEQ ID NO: 74928 - DNA, 475 bp, Zea Mays
aaatgtttttacaataactactagtcttccttcaggaccttctccgcaacttcatttagcaatttgttaacgacttcgtcaacaacagattcggctatattgataatctccagtgcttccttcgtctctagatcggccaggggatcaaacggttccggtggcagagataattcagctatagtagaaaaagttaattagttcaaagccataaaaacaaatgccaaagctaaaggccacgaaacaatacctaaacgtctttcgcgttctgcagcttcctcggcttgtttcgcttccactcgggcgtcatgtatatctttttcacttttcttcataatttcatgagccatttctcggccaccatttatccagatgtcattgtaaaattttccgcccattaaacttgcttcagctgagggatctttgtatcatccacggagaaggcaacttcggcctaggccagggtcttgacatggtt

SEQ ID NO: 74929 - DNA, 307 bp, Zea Mays
gggacaccgaaattcgtcgccggtgtgggctcttcgccgcatgtcgtgaccagggcgctacaccgcgtcattcacggtatgaactcctcccatgtatttgaattagtccctatcgcgcgtagcacctgtcgggatggagtttagggcactggagcacttgattgggatttctccggcgaggttcgccgtgaattgagggcggcgccgccgtcgtccgtgtccagagggtgaagacgatcgcgggccgttggatgatccctgagcggtttagatcaggccgcgtataccggttcggttcaacgtcaca

SEQ ID NO: 74930 - DNA, 425 bp, Zea Mays
ccatggatgccatgtagctccatcacttggcatgtaccaatctatcttcatgcataacacttaatggctaagattagtacacataggtttcatcaattatccaaaaccaaactagggcattcaacaagcatggagtaaggttgcagatacatagagtaacgggccaagtgctatgattgctgctttgctccccaaaaggattcatgtcatccgtacttaaagcaaaccttaagtttcttgtggcatctgcaaactcagggaactctctatcgattgctctccactaggacccatcagcgggctgtctcaacatattgtctaccttatggtgttctttgtgccatcgcagcaactttgcatgatctttgtttctgaataaatgtttcaagcgtggtattataggagcataccacatcaccttggca

SEQ ID NO: 74931 - DNA, 479 bp, Zea Mays
cattaataggtcctagtggaaaaagctgatagaacatacccagagtttgtagaggatgtgaggggcataatgttcaatttaagcatgtatgatatgaatccttttagcgaaatgagtaggagtcacatcgtattccatatgactttatgtatgtacaacctaactatctgactatgcctaaagtagaagtacattatgaggtcaatgcttatacaaggcccaaagcaacctgacaacgacattgatgtgtacctaaaaccattggttgaagaatttttactgttcttatatgaagtagtatgtatgtgggacgagcacaaataagaggaatttgacctacaagttttgcttttggtaaccatcaacaactagctcgaactgtcaaacctatctgggtagtcaaaacaaaggattcgaggcttgcacttattgtttggatgagattaacatcacgtatttaaagcattgttgaaatgttg

SEQ ID NO: 74932 - DNA, 584 bp, Zea Mays
gcgggatggtatattttcaagtagatcatgaaattcggggcggggttgaaccaatttatcatcggggactcaacatcacttacgaacccgcctcaacgtggctgctgccgtgcccatccttctcggcgtaattaagccctcctgtaggttcatcgtcgttcatctgccacggatctactagtcggaggggggaaattggggaaccgtgggtctgggccgtggaccagccatggcgcgccgccgtgtgaatcctgggtggtcctcgccgtcggtgttgggtgggtagaagaagcctctgccgttagatctgaatgcacggttgagatctgaacccgcgtatccttacgtcgtgatcgatctggtccgttgaaaccggatccgtcggctaggtttgggtaccggttcgatgtaatatagagctaatcttcgcccttcaaatctaatcggatggccgcgatcggcttctccctcttcggcatgtcaatttagcaattaagccctgcagaaaatagaaaccaacccgccatccacctccactgcgctctgtgtcttagaattattaccccgagccccctgggtttctc

SEQ ID NO: 74933 - DNA, 396 bp, Zea Mays
cattatcttgggcacaccgcatcaattaaaattttcattttcagtaggactttatctgcaaaatttttccttaaatggaaatttttattgtataaccaacttttttagtatattctagataaacaataccatttctactctctatgagctaaatccactctttgttagtgtgtcacagatgtttctccctgacacgatggattgcccataaccactcacaaaaatgacatgggtatcccacaattaccacctagagatgaccaagctttcaatcaccaacaagtcatctagacgatgtcaatcaccaagagtaacaagcacaaattctcacttcaccaaatcaagcctgataagaagagtggatgcatagttacacaataatagaatccttaatct

SEQ ID NO: 74934 - DNA, 531 bp, Zea Mays
ctcatctgtcacttgcacggttgggtgggaattgaggctgacagtcgctttgctgaactaaaatcactgagctgaaacctccaaagggtaataagaaaggatgctttgtctgtgactcatgggcaatacaacaaacatcagggcatgacaaggcgccaccagcctaaatcatgtcccccatgttcaccagccaatcttagaatattggttcatctgtcaaatgaaggcaatcaaacatgttcgtggctatctgtttgaactgataaaaaaacaagaataaacacaggatccccccatgtttgaactgatcaagaatctaaacccaacagcatgctatatgcatactcatgtgtgcctttcaagaaaggagcctactttttacccctcgccggaaaagactgacagccacaattgtacatataattagcagacagggttaatgattagcagacagggttagagacctacaaattgatttagaataaataagagttaataagttccagctggagtgctctttatgcatcagtg

SEQ ID NO: 74935 - DNA, 582 bp, Zea Mays
gccgaagacgatgtcatgacattggcctttggacgacgaggcaagaagagattaaacatggtttttgatgtaattggttttgtatacccggactattgctatccctcacgaaagcagggaaagaagagaaaagatgctgcttcagttatcgctagtactccgaaggtaaaacggttaaagttttgacacaccggcctaggcacattgatatggcaaaaatgccaaagcttgtccaaggaccttcttctgccgctgatctagatcaccctgctaccactgaagccagggtgaaatcagccgaagagccaatcttgaaggcagcaccagagaagccagaagccgagatagccgatgtgccgaagtgtcctgccgaagctagggcaaaaacggccgaagagccataattgaggaaatcggcagagcaaccgaagactctgagcccgccacaagagacagagctaccgaaggtataaaaaattcctgcagtaactccaaagaggaggagaatggccagcgtactagacgttgtcatggaatcgacaaaggtactaactcctgcctctacagaagtacctagcatgg

SEQ ID NO: 74936 - DNA, 472 bp, Zea Mays
gccatagctgtgacaagaggactgtgaagttagtatccttatcaggagaggaagtgttagtggagttggtcttgtctggacataggaaagaaagttgtcaccaagtcaccgcccatattgaggaaattgagccatcagaagttatcaaagtactatcagaattcccggatgtgtttcacgaggatttaccaggcttgccacctgaatggaaagttgcgtttgccaggatttaccaggcaccacccctatttccaagagagcctatcgagtgtccggaccagaattggtggaactcaagaagcagattgatgagttgttagagaaaggttacatcagaccaagtacctcgccttgggccgccccaatgttatttgtggagaagaaagacagggcaaagagaatgtgaattgattacagatatttgaatgaagtcgctatcatgaacaagtaccccctgccagaattgaaaatc

SEQ ID NO: 74937 - DNA, 310 bp, Zea Mays
tagatctaatcctagtcattcgcagagagatcaacggtgggggtgtatcttcttccccagactccacggctgacggcgcatcgccctgcccgacgggacatcaccggcgaggcccccctccagccataccaacagccaaaaccccacataaaacggtgctacacgatgaggacaacgaggcgaaccatatagggtagcgacttaccagaattcgtagcaagagctccctggtcgcgatggaatgcggaccgcggcgcggaggcccaccacgggatggtgcaggctccccaccatgacttccgtcgttctg

SEQ ID NO: 74938 - DNA, 284 bp, Zea Mays
cgcaagtgcaaccgcccgtttgtagcgtagtggcgggcatcggcagcgtccagggtgttgggaatttctcgctggagcccaaccaatctcaccaatccactactcgtcgtggttgggttcgtccgcggtgaattggaaggtacgtgcccgttcgtagcattcgccagacgatgggcatcgtgtagtgtcctacgagttagtgttttgcgtgtggtaccgagaaattgggagatccgatcatggcgccaccgcgctggacggcggtgttgccggtaagcctggcg

SEQ ID NO: 74939 - DNA, 320 bp, Zea Mays
tttgcttgctgcagatgaggatgggagccaacattgtaatgtagaagtcctctttcctagatctaggttgtcccagcctcagggtgatggcgcatgtcatgccacacgtgaatcagttgcatcagcttcctctgatgttgcagctgccgctggttctaccataaaagataaagccattgctgcactacccgcaatattggctgagatggctaaggatactaagagaaaggctcgatcttccgacctagggtgaaattatggattttggccagatattgaaaagaaagagatggttcagtgtatgttttgccaaaaagttg

SEQ ID NO: 74940 - DNA, 292 bp, Zea Mays
gctttttgttgcctcagtttttgccgaaggactcaagacttctgatgtctttacttcctcagccctcgtttcttctattttttcagtcactggcacttcgaccagcacttcaatatttggcaggggagctgtctctttagcttcagtggccgaaggagtcccaccgacaaatgcaggcactgtggccggttcaatataacgtggccggtgtgtgagaacttttacccttctcttcggcgccggctcgctaggagcggttgaagcagtttccttcgcagaagatgtattcttt

SEQ ID NO: 74941 - DNA, 803 bp, Zea Mays
cgtgaacccagggcatcacaccattttgacctgtgcaccgagtgagagagaatatggcttcaccggtgattttttgctacatcgccggtcaagccgtattcagtggacagggagcgtcgtcggcacataccccacgtttacatgacctattgaggtaagggaaggcgggactcaacgggtattcatcaccgaatatggggccgccaccgaggatccatacccagccatgggcagacctcactgctatcccatctctggtattgcttgtcttcgcaactttgccctattctcctcatagcatatgacctagccgcactcgaattggctcaacagaacgccataatggggcgctcaccagcgcggcttcgccgtaaaagctggtggcatcgggtgcccggcacgcgggtcggtggagaagatgatgcgtgaaccattgatcgtggcatcaatgatcaggagttgatctcgtgtgtttggagatctaaaccgtggttctggcaaatggcgtctgtgatttaattgtgatatagcggttccgccgtggcaggtggtcgttgatcgttgatcggagggttgtgagcggtttagatctcataaaatcctggtagtcggatctcgatccgatggctatcctagtgtaccacttggggatggttgggatataatcctagccattgatgcatgatccatcgaccctggtaaccagataccccttcaatcgcgagaaacttgtgaaataaaccctttgttttaaagtaatcaactcgccatccatcgttatttagagaaccttacaaccagac

SEQ ID NO: 74942 - DNA, 289 bp, Zea Mays
gccaagtgcgcataattaggttaatgagaacatatctataacatagaaactgtgaagtgcaatgtgtcataaccaggtgtgatgctcacgacagactatgcacttatgaaagcatgttgaaaacattttaagcaatttcccttaaggatttcaaagagacttaaggaacctccacctttggaacaaaggtagcttatcctcgttacaaggttaagctttaagctctttgacaataaaatcacttcacctagttttaacaaagatgcataaatgcaggaatgaaattatt

SEQ ID NO: 74943 - DNA, 1188 bp, Zea Mays
cggctactgttcccccacgccgtctgccaactcctgatgggacacgcgtacgacaaagagtggtatgacccccgggaagaaactatgcctcgcttgaggttggcctcagcctcgaaacaaactctgcctcgcccgagctcggcctcggctacctgccccccgcgaatcccatagaacgccactccttcaactgtatcctgcatggcagcgagccccaaagcaagctcggccatgacctcaggaagacttccgccttgcccaagcatggcttcggcctcgataataccaatgaaagaacgcccaacgtcacaagaagtagcaggactgacgtattaccaagagcttttctccatactcaccactactccaaccaatacgatttggatagcttccccatcagacaggctcaggtaagtaaccgagccctcagctctggcctcggctctgtgcatagtcaaagatacaaatacaggaaccgaacatcccccttcctgcacaagtcaacaacgagtacaagggccataccaaaggacataacggctataggggcttggccacacctcctctctcatacgcgacaaaatcctggcactcctggaggccctccttgaggctataaatagaggcgtccggaacttcaggtagggaggaggaacacttcacggtttcacctccacgacgacattggcacttgcctgaatcaaccctagatacttgagatcctttccctctcccgaccagcttatactccctactgcaagcacttaggtgcaagaaatataagtctcatccccctctgtggaagtagggctttctcttgcccgaactaggataaagacttgtgtctccttgcatcacccatctgggctagggcactcaacattcaattactatttggtaggattcttggttcaaaacaccgacacttttcatctacatgtgttttttcaaaaatgtagtccatatgtgtattgggcacccattttactgcaagttggtcatggattctaagatagactcaaacttgatattctccaacttgacttggatgcttttgctagcatctaaaggtggtggctaaggaggaggacatttaagggctctcttagtgtcttatccatcttcttggggaatgctccaacatgggttatatagggtttcaagcatgaatatcacgccaacaatgac

SEQ ID NO: 74944 - DNA, 293 bp, Zea Mays
cccaagtcatgattttatatttttcatactcttttcccctttctcttgaattttgtttatagggctcaattagggtttttattagggttgcacattttgcctttttgaaaaacccatttgttttaacatgatacttttaagtataagcttagtgggtcctttattcttaagtcaatttgatgttaatgctccattttggttcacataagctgagggttcttgggttagcacttgagagaaaccctaggtgacactggggtgtcacagccttccccccttaaaggaatcttgtc

SEQ ID NO: 74945 - DNA, 329 bp, Zea Mays
tgagcatcggaggagaagccatatcgctttcatcttctagctctctagatggggaatcgaaggccggtctcagtgacggtgagcctgcattgccagctctgccggccagcaacatcggcaccctgaccattgttggtcatctcatgatggccataaggttggttgatgctggctcctagtctattcatgtcatcatttgtaggagggtcgtcacttcttcttcctccccaccccttgtgtgctgttttgcggggtcggatcctcgaccctcccgctgttagcaatggccgagctgtggggctagctagaggcgtctcgttcggttgtgc

SEQ ID NO: 74946 - DNA, 1097 bp, Zea Mays
ctgccatatagggcctcatacggtgccatcttgatgctagcttgatagctgttgttataagcgaacttagccaaggcgagatgatcctcctagctacccttccatgaaagaacacaagcacgcaacatgtcctccaaagtttggatagtccactctgactgaccatcagtctgagggtgaaaagcaacactaagagaaagcgtggtacccaaagcactgtgaagactctcccaaaatttggatacaaatatggagtcccggtctgaaacaatggacttaggcacaccgtgaagccttattacttgtttcatatacaacggaaccaactctgaagttgcatttgtggtcttcatgggaataaagtgcgcagacttagttaggcgatccactacaacccatatagcatcctagcctcgaggcgaacgggtaagtcaaccacgaaatccatggtgatatgctcccacttccattatggaatttccaacggcttcaataaacctgcaggcctcttatgttcagccttcatgcgctggcacaccccacaagctgccacatacttagaaacatcaaccttcatcctcttccaccagaagttttgtgtcaaatccctgtacatcttggttttgccagggtgaatggtgtaaggcattttatgagcttctctcaatatatccatcttcacctctgatttttgtggcacacagagacggcctctgaaacgaaccaaatcattctcatcaatggtgaactctcaaggtttaccatcactgaccctcttttgagcttcctacaacaatcgatcctgctgctgtgccacgcgcactctatccagaagggatgatttaatgagcatttgagtctcctctctagcggtgcctacatagcacaaagcaaatcccacacggtccagatctgcaatcaaaggcaaggccactttcgggacaccgatcctgctaagtgcatcagccaccacatttgcctttcctaggtgatattgaattgacatatcataatccttaatcaactcaagccaccgatgatgccttaaattcagctcattcttaatgaaaatgtgcttgagactcttatgatcggtg

SEQ ID NO: 74947 - DNA, 513 bp, Zea Mays
gttccgcagccaagggaggatgaagtcgttgtttttaagagcttcttcagggcggggctttggttccctctacatgagatgataggagaggttttaaagaattttgagatatacgtccattagttgacacccaatgcaatcgttagacttagtgtctacatatggcctctccgaagcctgggtatgagtcctaatgctgaagctttctaccaggtgcacgagctgcactaccaaacgaaggccagagcggatggtcttcataagaactttggctgctacaacttcgcatatcggaaagatacgaaggtcccggtaattggctatcataccaagtggccgaccggttggacaagcaaatggttttacataaaagcggacgagaagaaaagggagaagctaatgactatggtcatgagtccattgaaattaagcttcaggatgacaaggcccttgtgccacatgcagcttggctccccatgctagctagccgaagtggaattcagagtggtagct

SEQ ID NO: 74948 - DNA, 547 bp, Zea Mays
cccagccacccgcccacgaccgttcttcgtctccgagttaatggaacatcaaagcatccgtttcttcttccccccattacctccattgatggccatgaagattctggccacctctctccctcccccggccgaccttccctctccctccctctcctctataaaaaccgagctcctcctctctcccttcaccctacccgagctcgcccccatctctctcactctctcctcaccgttagagccaccgtcgtcgtcaccggagttcgccacgccgtcgctagagcccgtggaactcgccggagctacgcccccgtcgtaccgagccttcacctagacgcacgcccaagccatccaccgttcgtcgcaaggttgaagacgaaacaaaactttttatgtatttttgaaattacttttgattcaatttgtgaattgtatatttattatgttgtaatatgagcatgttgtggttcgaaattcacgtgtatgcgtgctatggaatttttggtagatatatgcgattagtagtgcaccgtggttattcatgttagtt

SEQ ID NO: 74949 - DNA, 366 bp, Zea Mays
gtatcacactcggataggtatttggcaatttccctcttcattctggtccaccagtataaggatctgagatcatgatacatcttgttgttgccggggtgcatggtgaattttgaaaggtgagcttcatccaatatcttctttctgagctcagggtccttgggaacaaccaatcgatctccaaaccatagaattcctttgctgtcctgacggaagcatttgtatttttctgctttctgcttgatcatttccttgataacctgaacacccttgtcttcaatctgtgccctggctatttgctcttgtaatgtgggctccaccgagatgtaacttaaggcacctgaagaaacaacttccaggttcagcttg

SEQ ID NO: 74950 - DNA, 418 bp, Zea Mays
cttggcgcaagtaaaccctagactcaggctgaccaccgggtggactgcgggttctaaatcctaaaaacataaggtttctttcgtaaagtgtacccgcgaaaggggtaacttgcaatctgagtcgcccgatcctatacctatggcccagattagatcataaatcgagcgaaccgatacgcagcgtggcccctcggatctagatctgacggtcccggtttaatgaatcccagagtgatgaccatcatccgatcccgatcagacggttctcgttactcctatccgaaacgctacgcagtcaccaaatccggccatcaaaaggagatccaacggtcgggcgatcatctcccccaacccaaccctggacatggcggtgccgcccacccgctcggccacaagatcgccggagaatgcaattcgc

SEQ ID NO: 74951 - DNA, 301 bp, Zea Mays
gatgagtattgtgctctcattaaaaatgctactgggcaccttgttcctcctcgacctggcttgaatgtggtcgattgtaaataagtcttcaaaataaagtagaaacctgatggctcggttgatcgctataaggctcgactggttgctagaggattcaagcagcaatagggtgtggattatgatgacaccttcagtctggttgtaaatcccactacaattcgacttcttttatcattggttgtctcttgtggctgggttattcggcaaatcgatattcaaaatgccttccttcgtggttttc

SEQ ID NO: 74952 - DNA, 455 bp, Zea Mays
agaacttagggaaaaatgaccgattactcatactgtagctttgttcagatatgcaggtaatgactgttaggccctgtttgttaatgtggtatttttggagttccgtagtaatactacagtatacaggaatactacggtattttagtccaaatgctgtttggttggtcatggaaaatctgtggtattaataccatggtttaatcaatactgtagtatttttgtggtatttgatactctactcagatcaaagttttctctcggttgcttcgtctcggtgagtcgtgctgatgcttgtctgcgcaccaccaccactagtcgtgtagatgtacctcctcccactcaatctgctctccaacttcctcatcacccagccggactccttatctctccttcgctgtcgtgctcaccgaccaggccagggccttctgcttcgcctattcacttcgtcgccatgg

SEQ ID NO: 74953 - DNA, 476 bp, Zea Mays
tgctgctgcattcttcgtcaatgatgtagaaggaaattacagtctaatcctagacagagattggattcatgccaaccaatgtataccttctacattacatcaaatgttaatacaatgggtaggcgatgatataaaacaagtacatgctgatgtatcggcatgtatcgctgtggtcgatgcccctgtactctggacttatgagattgctacatgtctcacaggagtagatttttctgattatcagttcataagtatagataagaagggtttcattcctgtaatgctagagccgatggagaatcggctaaatcctaaataaagtttaaatgatgagtacacacaaaattcatgagtccttggtctcggacagttcggcttctaaggccagatggtctggtctttcacaaaacagttcggactttaagaccgaacatctaccacaacgtaaagatagtgttacggataatccggcccct

SEQ ID NO: 74954 - DNA, 582 bp, Zea Mays
gtgatatcaagttccaaataatcccatgtactgaaggtatacatatacaatgtttgtatcaagtcgtgtagaacacgcacaacattaggctacattccttgcaaaaaatgaagtcctcgggaaacttagccaaaatatatggaagcactctccaatgcttgttaaatatcgtaagacacatgttttccatgatacatttggggaaaagttgtagaacaaagaattcaaaataatagatcatctttggaaaaaaaagttgtagaacaaacaatttgaaaccatagatgacctttgaaactaaaattagtgtttctatgatattgaaggcatgtattctcacaagagggtattagagtacaactagtggatgaaaacattattgggcaaattaatgaccttttatgataccaaattttccggtacatcttcagaccatttgtgcgtttgagagctacataaaggaaaagtcagaaccctgaggcaacccttacttagacacacgggtatggaggtccattcttggtcctcgtgtgggtatagttgtatatccccgcagagatctttctcaataccagaagtctt

SEQ ID NO: 74955 - DNA, 658 bp, Zea Mays
ggaaatcactgcgtgcagtgcaaaacagcgactaatcattttcagcttctatttactttaagaattagtcgtgttctagatactcgacttattctaacttatatcaagacacacttaagcatagtcacacaatagatgacgtgacggctacgtactcatgccatcacttcaccccacaatcccaagtaacaaaataactctaactgaacttggcatttagtcgatcgattcctaacccatttttcttaccaccactacacgacatgcctaatacgttaaatgacttgttcacaattcacatacatctttaccaaaacattcccacatcgcttgcaacttaacctaagcttcactacacaatttcaggacatctacttacttcatgaatatcatcgtcacacacattgactcgatttgaattaaccacacatgtctatcacatgaatggagcatttcacaaatatcctaaaacaaactaacttcatcacacatctaagacatcttgcattacaaacctacttgacttatttgaagtgtctacttgaaaccgtgagcacaatcatacactatatgcgaagcataatttaacgaacgcataatacgcatcgtcacgacttgacctataaatatagagaaagcgatgactactctggcatgt

SEQ ID NO: 74956 - DNA, 491 bp, Zea Mays
ttagcttatggcatggccgctgatacggtagatgagtacatcaagttaggcaggtcaaccgtagtagagtgtctagagaacatttgtgaaggcgtcatacagtgctatgacgctgagttctgtcgtgggccaactgtcgccgatactcagcgtctactagctaaggcggaggagcgtgggtttcctggtacgttagggagcatcgattgtatgcactggcagtggaggaactgtccgatcggttggcagagccaatttaccaggggggacattaagcacctgaccatcatccttgaagccgttgcttcatatgaccattggatctggcatgccttttttggggttgccggttccaacaacgatatcaacgtgctcaatcagtcccccttgttcttggatgccattagaggaagggagcccacagtgcacttcactattaacggacatgagtacatacgggatactaccttgccgacggtatctatccctcg

SEQ ID NO: 74957 - DNA, 580 bp, Zea Mays
gaattttatccctagtagggtttaggagtcagagattggatcagcgacaccaaaacgcggggcaggatatgcatggctgtgatgcgactgcaactgtggagatgggaggttgtgttgcggtgccagaacggaacagagtcaatgaacgacaccgtgtgcgtgggacgacaggagacgaaatctcgtgaggatgggcgaacaccacacaccggacacggacaaacaccaagcagaaaagttagatgttgggacggcgggagacgaaatctcgtgaggatgggtgaacaccacacatcagacatgtgcatgcaccaatgagaaaagttagatgttgggacggcgggagacgaaatctcgtgaggatggggaacaccacacaccggacacgggcaagcaccaagcagaaaagttagatgttgggacggcgggagatggaatctcgtgaggatgggcgaacaccacacaccggacacgggcaagcaccaagcagaaaattagatgttgggacggcgagagacgaaatctcgtgaggatgggcgaacaccacaagcaccaagcagaaaattttgatgtattttgc

SEQ ID NO: 74958 - DNA, 550 bp, Zea Mays
gggatgaatggcaacagaaaacgtacccaccatcataggctctccttcaggtgtggtagccacttgagtatagtagacccgtccagttttcctttcacctttgcctgcctgagtgcttgccacatttcccttgccttgagatgtgcttccagaagccttttggaagtttgatttcttttgcttcggatagggacaatccttgatgaaatgcccagacttcccacggttgaagcagctattagatgaactgggtagggctaggaaacgagtaccaggggcactcggctgaatattttgagtagggatagctgttggacggatgaagactggttacttgaaaggatagacgggtggacgaggaaaagagcgatttgggttaaagggatgaatcaccaaccttgaccgcttttcggatccttgagaggatccctcactcccttcacatccaaacctttttgtcttttgctacccctaattctttgcctccatcgagagtgttgtgctcacggccctgctgaaagtgagatctagacacatggccatctttcgc

SEQ ID NO: 74959 - DNA, 548 bp, Zea Mays
taaacaatgtttttttgtttacatgatacataaagaaggatgtacgtgtccgccccccaactgtacccgatatttctactccagcatcacagcaggatacacagtttacagacacacaggtacatgaattactgttaaggcaacaacatattcgtgtactattagaaagtttcccagatgaagctgatattgatccactggttcatacaaatataacgaaacagaacaaaacacctacaaccccagtggtaatgtttttcttattacttgtatttctcatttaagggttgtattcatcgttttctttaaatagcatataaccattacaatttttttcagggtaaacatggtgacggtggccagaacatgccgaccaacacaaacgtcactcctaaagcaacaccacatacggaatcttccgcgccgatatttgacgcgacacctcaaataaaggtatgagtacaccgcctcgttgttttttctatattattattagtagtttactaaacttctaatccatttataccataattgttagtctactggcg

SEQ ID NO: 74960 - DNA, 517 bp, Zea Mays
tcatcaagaaacacgggaacaccattggggcaccgagagggagtagtagtaacgagtaaacaaaaagtagtgggggggtgcacgtccagcaagtcgaatgacattttgtgctcaacattttgcaggatcaatcaacgacggcggcggcaaaaaacggagagcggatctagcgtatctccgctaatcacttgattaccggccaaaggacgatacggtccaatacaaatcattcatccactaggccattaataattagacaaacaaagcacctgtgttaacgtgtggcaagcaagcaagcaagtgggaggatttatatgttgttattataagtggcggcatcatcattatagtatgtacacgatgcggtgccatgcacctggactactagtacgcttggggaatggggatgggtgcaacggtagaggaaggtctggctggagtcggtgtgcagtgcatgcatccggcccgggtctgggtgctcggtgggtggggtaggcggctgacagggagaggcggc

SEQ ID NO: 74961 - DNA, 287 bp, Zea Mays
ccctggacgactacgcaggagtgtgctgccgcacagagcgcacaacagcagctgcaccgggcgcagggtggctggaggcccgtggtgtggaagaggcagctccctcctccatggggaagtcctcggggacgaagtcgtggtgctcgacgatgtgaaccatggcgtcgagcaggaaaacaagcaaaaaatctaatgccaagccccctacctggcgcgccaaatgtcggagaggaaatctccgaccgggtggcggaatgcacctgccctaaatcctaagatgaggaggg

SEQ ID NO: 74962 - DNA, 1313 bp, Zea Mays
ggcgtatcttgcttcaaaatccttcttcatagtatttatacgctcctcaacttcttcgtctgtctttccctttaactcttcattgtctttgccgattttgaaagtgtggctttcctcaaatatcagtattgggttcagacacccaatccttttaccagcactagcaccgggcttggtaccgtaaaggatctcttgttgatcatgttgcattctacaagtcacacgtgcatgtgtcaaatgttgaaaatttatacggctcactaataataataacacatatatgtggaaaaatgagcgacacttacagtgcaaacagagtcaaaagttgcacatcgagtttctgaaggttcatcattaaccacatatcctcgaatgcaagaaaggccttttggtttgatccaataaaaacatggtctggtatatgcacactaatggcgtcaatgccaactgatgatgcacgcatgtaccagtcattcaaccttttagtactagcagggaccttcctcagtttctcaagagttagtagaggtctgcccgacacatattgtttaggcacatttttataatctgccttagttgggatctttatctttgcggccattgccttagccttttctgcagactccttgtgctcggccaaatcaatagtatgtgacgtgaggtcccgtgcaatccatttcaaaaatcgaactatgccagtagtagtagctttactcttctttttctcgaatgtggacaccaattttggtacatggattttagatttcattgattgtcgtgaatcccttgatggctgtggagaaggtggtggtgtcctaaatattgatgcttgtggcggagacggtggattagaaagaggatgaggagcagcatgtgaagattgtggaggtgatgatggatgtacaagtactaaagtttgaggaggcagagatggttggggatgagacgacgacggcgttggtggatcaaccaattcgacatcccttcgaggccaaaggatgaaatttttatggcttgtccaagtgtctcgattttaatgtcttaaatcactcttctttttcggcatagttcctacataaggttgcccaatctggcaccttcattcatttattcttgttccccggacaaacctactcagtacaacctgtgatgcaagacaactgcacctactcagtacaacctacgccagaagcgtgccaaaacaactgccacgtcaagttcttatgtgcataacttatcttgtttcttttactacatgtcctttgtttcagaaattgttaaatgcgcctttgtattcattgacctacaacaag

SEQ ID NO: 74963 - DNA, 683 bp, Zea Mays
gacgaagtccagcccgatgtcagcccagtccgctactggcactggaaggggcaacagcaggccgactggaaggtggtctgatttgttgacatgtggtgtaggcacggacgtagtccctcgtcagaagctgaatgtttggcataagttgattcagtaaaagtgaaaatctgcacacattgcagctacctgagcttatagttgttccggaagaggcatggttagagtttggtaatataaaattcatgccagaacaagaaggaaaactccaactaaacaatggactttctggtttgtcagcacaaaagaccagcggtaagcctgatttgtttgcatattataaggaaaaagaattatcatttgcaggtagtgacaaagttgcaaattcataagaaaacaaatcaaatggtgctgttaaacatatgcagccaccatgtaggcatcaagatccctggtgcagactgatttcacaatattcatggtgcgacttctcttatgtcttttcacttctctctcaattagtactctcgtcatctaaccgttgcttgcattgggttaatttggtttattgaattttagagatgtaatttcaattgaaatagctatgaactttgatacgcttgtagcaaataatggtgccatggatccaccctgtcttgaagctaattgcaatagaccaatatttt

SEQ ID NO: 74964 - DNA, 314 bp, Zea Mays
ctggtgggtactcgcttcgcgcaccgacggcaggggatgtgccgcctcctcgtgacggagctggagaagatgctccgtcaggtgggcgtccgcaggctggtgctgcccgccgtgccggagctgatgcccatgtggaccgcctccctgggcttccacgccatgacccgctcggacgtgatggagatggccgtagagcacgccatcctgagcttcaagggaaccaccatgtgccaaaagactctgcttgcttagcttcatttttcgattaggatcagctgatccagtaggatggagtcacccctaacaactcccag

SEQ ID NO: 74965 - DNA, 361 bp, Zea Mays
caaatttcgacggcctagatgctttggaaactggaagggtggaaatgggtagaattcaaacgcatccttgcatgggctcatatggaaggcacaatctccagcaggtctgggcataaaaattgaaaatgaacaccgaaaccgatcaaatcactatagtaatcttcgtttaccattcttcatgaaccaattaatcatgatggacatcgactaatatgcaagcaaatcttgcgtacaagcgtgcaatcacttattatagtcactgggatctccatccaacggtggatcaataatttttaatttgatcctcccatcaacatgttccaccagtgtgtaacattttattaataaccctctattcgat

SEQ ID NO: 74966 - DNA, 414 bp, Zea Mays
tcaatatagatttctgcatatttttctgccctatgggtggtatgcactagcaagaaatgagctgtcttggttagcctatccacaatgacccatatagaatcgtggtgccgggaggtattgggcaatcccacaatgaagtccatgcaaatgtcctcccacttccaagatggtatagggagtggctgcaaggtacctgctactttcaaatggcttgctttaatcctttggcaagtgtcgcactcggatacatacttagcagtttctctcttcatcctggtccaccaatacaaggatctgaggtcatgatacattttgttacttccggggtgcatggaaaatttggagatatgagcctcgtccaaaattttcttcctaagttcgggattcttgggaacaaccagtcgaccttcgaac

SEQ ID NO: 74967 - DNA, 851 bp, Zea Mays
cgccgatgctgtccaccaccacaacgctaacagcttctcgcccacgcacgcttccatccaaaatgattgcgactaaccaaaaagggcgaccgatcatttcggtcactagcggttactttgtcagacgccagtatacgtgatcgtctccacatggcagactggacctgcctatcgcctttccattcctgcgcctattggctactgcctttttttcttcccttctgaacaaattaaaattaaatgaaatgaaactaactaactactgaaatcgcaggaaactgaaggttctacgaggccagctcacggtgcatggcattggcattggcatctactctactgttcagtgttcacgagcgacgacatgctatggcgctatgctaccgggaaaaggagctagaagagggcctgtagctttcagcactgctgggaattgccactgtgtgtcctgtccctttctttcttgctcctgtctcaccacacattttttccctcctactgaatgaacactgctctggtacatgcagggcagatcagagtcggtcagtaccacagctaccagcctagtacgtacgtacgtatgtacaatcactagcattaacatgctgcccctgcttcgactaatcactgcattgcattagcagctgtatttgctaattgctaacagcagtaagctagccgcgtgtccctcggatacaatcatttcgatccatgcatgcatgcacgcgctgttgttgtctctgtcgagctgtcgtccttgagctcaacacgcggatctacaacccaattaattgtgctttgcttcgtcaggcaggtttgatcatggatatatatactcccatgggccatggagc

SEQ ID NO: 74968 - DNA, 427 bp, Zea Mays
gtctaatcgtaggcgctcatcaccaatcggacggcccgtgcttatcttctacctcccggtggccgaacgaagcaacaccgagtgcccagcggcggcgagcacaccagctcggcccaccggtgacgtccaaccccggatttgacgatggcggcatgaaaataggaacagaagcgagccgattaggggaggatttcgcggagggctctcaccgtgagtcgtgcgagcaggagcgtagtccacggtggagggcggcccgacggcggagtcacatgttcggcgagcaatcccaagctgaccagaacacaactcacccagatgtagccgcagtcgcgttctgcgagacctggcaaaacccccagacccccaatcgaggtcacagcaggggtgagaccgtggatccaagccggcggccctcggctctctctct

SEQ ID NO: 74969 - DNA, 1067 bp, Zea Mays
acatcagaggggtctaacactttcatccatacaaggcttaaaatggtgacatcttgatactggcctggtagctgttattataagaaaattatgcatacgacaaactggactcccaactcttgtcaaaggtcaacacacaagctctcaataaatcctcgaggactttgttgactctttctgtctgaccatctgactgggggtgataagcggtgctgaagtctagcttggtgcccaaagcttgctgaagactcatacagaattttgaggtgaactgtgttcccctgtctgacactatcttctgtggaataccatggagtctgactatttctttaagatatatccgagcaagggtggctcctctgaaggtagtttttactggaatgaagtgggctaccttggtaagacggtcgattataacccagatagaatcattccctttttgggtccgaggcagtccgattacgaaatccatgcctatttcttcccacttccatttgggcactgggaggggttgtagtagacctgcaggcttctgatgctctgccttagttcgctggcaagtgtcacaccgggccacatactgagctatctcctttttcatccctctccaccagtatctggtcttgaggtctaggtacatcttggtggtccctgggtggatagggtaggctgagttgtgagcttcatcgagcaggattcctcgtgcctctccctttggtatacacaaacggtccctgaaccaaagggttccttcttcatctgtcttgaggtccgggatttgttctttgcgagctctctctgcaagacttgtcgtcttggtgtccaggcgttgagccttgcgtatgaggtcttctagcattggcttaatttctaggctgccactatctcccaaacaagcattcagttgagctgattctctcttccagtcttccaagaagttggttgctttctccccgaaaggttttcggctgagggcgtctgctaccacgttggccttcccggggtggtagtggatctcaatgtcataatccttaatcaattccagccatcttcgctgacggagattg

SEQ ID NO: 74970 - DNA, 335 bp, Zea Mays
ggcaagcgtgtggaagcttacgtagatgatgtggtgatcaaaacagaaaattcggagaacttcatcgaagacttacagctagttttcaacagcttgagaagatatagatggaagctcaatcctgaaaaatgtgttttcggggtaccagccggaaaattgctcgggttcatcgtcagcaaccggggaattgaagctaatccagataagattgaagctatcatgaagatggaggcccctcgatcacagaagaaagttcagcgactcactggatgtatggccgctctaagcagattcatatccaggctgggagaaaagggtttgccattatacaagct

SEQ ID NO: 74971 - DNA, 448 bp, Zea Mays
tgcaaatgtgactgaaatagctcccattttagaggtgatgagacagtcagatattgtcgaaccgaaggatgcaaaagaaataaatacagctgagaaaagcgatttagaagctgaagttgaagtcaaggctgagaacgatgccgatagtgacaacgatgtagaagatcccagcattctccacccaaacaagcctagtcatattgagttcggtaaatcaatcgtaaaagtcgatgacttggacatgctgaaaagacttggttatattgggcagaaagatgataacatgatcagattttctggtgatgaaatcgtaccagagctgaagaatgatgaggttgttgtttttagaagcttctttcggactgggcttcatttcccaatgtatgaaatgattgctgaagtactagagaggtttgaaatatatctgcaccagctgaccccaaatgca

SEQ ID NO: 74972 - DNA, 397 bp, Zea Mays
aagtgataagacaatttgcctccgactttgaaaccttagctgtcatggtgcaagatgcttttaggcatggatgtgttggggcttatgaaggtggagacacatagaggatttgaggttttgaataggcatagggatggattaggcataagaatatgggttaatttggttaaaacacatgggcatgagaccaattgaattgattttcttactgtgagttgagtggttatcgagcagaagggtactggaggcttggtgaaaccctaggatgagctgaggtgttgattggagctttgaatcttggtttaggcattgtatcaaacaggtggtgtgcaaggttgtgggtgtgtagagaaataggcttttctagatgaaagcatctaggcccctggtaggtttt

SEQ ID NO: 74973 - DNA, 1072 bp, Zea Mays
aaatgtcgaaggagactactgttgaatccagtgaaggtggctttgtatgtttgaaatataccttcagattcagagagaagtttggcgaaccaaatgatgattggctgaaatgcattgaagctaccaacgatgagctacttgggacatattccaaggccgaagatgatgccttgtccgcagccttttgggggtcggggcaagaaaagattaaacatggtttttgacgcaattggcttcgtataccctgactatagctatcccttgaggaaaggaaaaaagaggaaaactgctgctttggccaccaccgctgtgccgaagggcaagaaaatgaaggctttgacacaccggctcggtatattgaaacggtcgtagtgcctaaacttggtgaggggacctcctctactatcgaagcagaacaagccactctcgccgctcggagcgctgaagggtctactgtagtgcctaaggtgcctacagtcgggccaaccgaaatcaaaggtgattcggccgaagagccaaaagtggagaaaactgtgaaaatgccagaaattctgagcccaccagcagaggcagaattgtcgaaagtgcaaaaagctcctgccgcaactcccaagaggaggaggatggccagcgtgctagacgctgctatggagaccacaaaggccttgagccctgctcctaccaagaaagctgccaaagctgtcaaagaccaggccggagccgaagctgggcctttagtgcccattgagatgaaggctgccgcgcctgaggataaagctgagcaacaaacttcagatagcggcatggcagtggggatggtatgatagaagaagcaaaatctcctgcccccgaatcttcgaccgaagatgctgattacattattcgacatgcttcggggaaaaaattatccaaagaagaagtcttagaagccagacactacgcccagaagctaaaatatccgaagggggccttagtgtttaatggcactgatgaagatgactttctatactgtctcccggacaacaaagaaatatctgtttgccgagagatagccaaaagtatgggattcccg

SEQ ID NO: 74974 - DNA, 339 bp, Zea Mays
gtcagaccggacctgtgcccccgaggaaagagcagatgttgcatatttctatcaatgactatttgcaagcttttggggctataaataccccaaccagcctactcgggtaaccaaacacctctagagttgggcaacattccaatacacttgtgcaacacatccacacaattttgagacatcgaagcatccaacctgagctgagatagtgattctgtagagggtgtgtttgagcaaacttctttcttggtgttgttgtctggttttctttgctcttgttttggtaatacgctgatgtaaaagttagcaagaggctccggatcttgtggagtgccttgcaga

SEQ ID NO: 74975 - DNA, 342 bp, Zea Mays
cgccttagaggtcggcgtactggatgccagaattctgatgcctgctagtgaggttgaatcaattcctggtgatgctcttcagattgtcccagttgatattccttcatcaagccaccaactagcttctcatgatttaggatttccttcgttcttctctaatcttcaggtaacttagctttttctgttctggcaatactcctggtgaatcactatttttgtactcattcgtttttaatatcaggctttggtcgatgggatggctagtcagttgagatctcatgatgcctctatcccagaaggatcactgtctctaacgcagtggaatccattgctgcttcagaa

SEQ ID NO: 74976 - DNA, 501 bp, Zea Mays
cccaaacgaactctcccaaaatcatgcactggctcggccgagtaaaccgagggccattcaccgaccccatctcgctcctatccctagaagcctaggagttgaaagccataacacctcgaccccttttgcctcctcggccaacactgctccttacacaaaactcagtgaggggagaagaatcgagggagagccacccacgacgaacgcacggtacaccatcgcctgggctttggcacgatgctcatgatcttcgccagggcgcaaacagaaacgtcggtagcgtttgttgaattggggatcatctctgcatcagggaatttctcatcggagcttggagacgtcgtggatccgccacccaccgtgggtcggcttctctatcgcctccaaactctggtaagacccccattatcttcaccatgctctgagcatcacgtagctttggccaaggtagaagttggtgctggggcacctagctgaccactcgccggtgaagctccgtcg

SEQ ID NO: 74977 - DNA, 649 bp, Zea Mays
gggtacaggatcaatatcaggaccaaccgtaggaatagagcaggaacgacgaatgtaggtttgggtgataggtggtttggaagagtaagaggaagatggcgtggatatagaaggtggtgttatggggatgagaacatccggtgtggatgtggaagatgatggttcagatggaaaatcaggaatggaaggaagacacatgaaagaagtggattctatgggataatatgagtgagtggacttgttgtgaaagaagggacgattttcattgaaactcgcatctctagaaattcgaatacgacgagtagatagatcataacaacggtagcctttgtgttcaggactgtatccaagaaagacacactcgacagattgagcagtcaatttagtccgttcacgtggtggtaacaggacataacatagacatccgaacacacgaagatgatcatatcgtggagatgtcccaaaaagaactttacctggtgttttgccagaaagtttagatgatggttgtctattaatgagatacacggcagtggaaacagcttcactccaaaagtgtgaaggaacaaaagaagatatcaaaagagtacgagcactcccaataatatgacggtgtttgcgttcagcaacaccattttgggcatgatca

SEQ ID NO: 74978 - DNA, 626 bp, Zea Mays
attcaacatagactagtaaatttcaagagaatagatataaaatataaacattcaagcaaacaataacttagtgctaaaaaatttaaacgtagcacggtaaatacctcaagatggtagagaacgaggcaaattcatctttctagtcttcatgccttgaaactgtcgcaatatggtagagtcatcaagttctttaaatattttccgctcgatgtagcacaccatcaaatgattgaaccactcatcagccatcttgtttcgtaaattaatcttgataattttcatcgccgaaaatgccctttcaacagatgctgtggacaccggtaatattaatgccaattcaataagtctataaaccaatggaaagaacttatgtttctctgtctcaaccatcttagaagccaaactagcaatatcagtgcaagtagaaaatgttgcatgccttcttacttgaagaatataagtatgaagttgttgtctaatttgtgcaaagtcactagtagagaaatcagcatcataaatctgagcacctcgaacaaggctatctatatcaaacctagagaagttattctttggatcaagacatgagaaacatgtcaatatctcaatagtggattctccaaatcgat

SEQ ID NO: 74979 - DNA, 386 bp, Zea Mays
cctctgggggcacttataggcgagggtgaggcgcaggtgtgcagggcagggcaaccacacgcggggcgcgcgctgccgcggcccgtccacgcttggccgatgaggcaagcgatcgaacgcatggcatcgctcggtctggtcgttttcaaatgccaattggcttgcgatcttctcgtaactctcccaaatccctacacactatttcttctttgtcgtttactctttgtttctcttacagcacttgagtggattagatctcggatttgcgagatacgagggggcgaagttgggtttgtcgctcggctgaaaaccgagactaaggtcgagtcaaatcgtgtcaaacggtttttgtttgatttcaaactttaccagagtatgttcaaggt

SEQ ID NO: 74980 - DNA, 511 bp, Zea Mays
ggcgcctggaggtattgggtaatcccactatgaagtccatgcaaatgtcctcccatttccaagatggtatgggaaggggttgcaaagggcctgctgccttcaagtgactagcctttatcctctggcaagtgtcacactcggatatgtacttggcaatttcccttttcattctagtccaccaatataaagatctgagatcatggtacatcttgttgctacccgggtgcatggagaatttggaaaggtgagcttcatctagtatcttctttctgagctcagggtccttgggaacaaccattcggtctccaaaccacaggattcccttgctgtcctgacggaagcatttgtatttctctgcctttgtttgaccattaccttaatcatttgaacacccttatcctcaatctgtgccctcactttgtctcgcaatgtgggttccaccgagatataacttaattcaccggaagggaacaacttccaggttcagcttgcacaactcatcgcacagggg

SEQ ID NO: 74981 - DNA, 808 bp, Zea Mays
gctccgagtcttcgccggatggtgaggtgagcctgtaagcattcggggatgttttggtcttgacgatgtagggcccctcccacttgggttcaagcttaccccgagactctgttctgatggttctggtgagtaataagtctccttctttgaattctcttgggatgacggtgttgtcgtgccatgccttagtctgtgcttggtatttgctcagtgcctctaaagcaaggacacagtctccgtcgatgaggtctttagaggttggttcgttgacgtcaggggtagttgtggggcttgctcgcggggatccatgctttagctcttgcggcatcattgcttcggatccatacatcaagtgaaaaggtgtgaacccagtcgctctggattatgttgtgtttaatgcccatatgacttcgggtagttggtccacccatttgccctttttgtcatcaagtagccttttcttgattgcgctgaaaatcttgccattggcgcgttcgactactccgttggattgcgggtggtagatagaggcgaacactgccttcatgtcgatggagttgcagaattcttggaagtcttggttgtcgaactgcttgccgttatctactgttaattcggatgggactccgaaccgacatatgatattctgctagaaattttttcgtgccatcttggatgttattgtggatatggccctagcctcgatccacttggtgaagtattcggcagcgacgaaggtgaatttgaggttgccttgagctgtgggcagtggaccgacaatatcgagcccccaccactgaagtggcca

SEQ ID NO: 74982 - DNA, 449 bp, Zea Mays
tatatatgtatgtccactttattatgtaggatagaagatgtctttagagcatagataggtttggttaagaaagggtagggctaggaaagactctatccaagattgtgaatcctgattcctttgaagatctatcctgaatcttaaccttccttgatttgatgaggtcgatcatcttcgatctttgttcttgaagtctttatccgaattaggggcatgtacttaggataacttgtaggtaaggacagatggttaacaggttggtggcataagataagtgtattatggcaacatctaggatgggatggatggtcaccatgaatatgctggcatttatttgttcatgggtggtttggtttgatgtactaatttaagttgaaacatggccagcagggtataatctatttcactagtattaactggtccgttaagtatttcactttagattagac

SEQ ID NO: 74983 - DNA, 790 bp, Zea Mays
cgctcccgagcatttcccctaaattaatttctggattggagccctacagtgctctgcccacggtgatagcggcaacaacggaccactaagtgcgttcccgatgatctaaggcagctcggttcaattgggcgggtcgatgagcatcacagttacataaggacactcaaacgagggagtagaaggtttgaactgacctcaattgcactggccacggcgagggtgttcttgcggtgggatgaaccgatttggggaaaactcgaaattcgtgagctctggcaaacgattgagggtgggagcgggtgctttggtttcgtgatgacatagcgcagctgacccggccttcaatttatagagggcttaagcggtggtgcttaatttggtcgagccgtgctggcggccggagagaggggagattactagcgcagtggattcgtgtcttccgtcgtggcgacttcaccggcgatgagtaactatcgcaagccgagctactgtgacgtggtaaactgccaggacaagcggcgcacgacagtgatcgatcaacgacggcgaggtcttatcccgatccaccgatgagcaagggggtacggcgggcttagccacggccgagctcgggctgatcccacgcccagatctatactttaccgtagttatccacccgccagtgaacacgaatcgcggcgacggcgtgaatcacggcgtagagatcgtcggcagcgagattgctgcgctggcggtctgatccaatcctggtactgtacaatggcgaaggatcttcagagcgcctgacaga

SEQ ID NO: 74984 - DNA, 351 bp, Zea Mays
tgcttccgccgtggggatcctagcgccgccgtagcatgtgaccaagaggttgaagaagtgcggtgtccgttggatcggttcccgacggctgagattagatcacaccttactccctttgccgcatggatccgagccgtcgattcagttttaaacggtgggaggcgagtctgggtttcattaaacactggccgatggatctagatccaaggggccgtatggcataccgatttagtcaaagcctagatctaatcctaagcgcccattcttgatcgtgcgatcagaaacccccaataccccttcagtcgcaccaattgcatataaacccctgggatttagggttttgaacccgcc

SEQ ID NO: 74985 - DNA, 371 bp, Zea Mays
gcggttgttgagcggaggcaaggtgggtgcggatctcccggccatttcgcggagacgggcgatgtacaacagtgagtgcgccgctgggccaacgatgggcctttggtccacacgctgggccgcacgaacccctagcacaggcgcactggtatggcatttgtttcattagtgccataccggctattgagagtgacggaacatggtttataagcgtagctgtgtatcatatgttgctcactgagagagatggaacgttgcttatgaacctgtgtatgaactgtttattttgttgcgcgagactaatggaggcagaacagccgttggcagaacgcgtcagaggcagaacggcagactactattgcttacttaat

SEQ ID NO: 74986 - DNA, 573 bp, Zea Mays
attggaggcgaggagcgatgcactgggcacgtaacaacctaacggagcacgctgaacgctcaatttatagtgtccatgaacggtggctccgaatttgaggagagaagctggcggccgaggagaggggatgagtcaccgtggcgatctaccgtggcattcactggacaaaggcgtacgactatcactagttaacttccacgactcaagacgatgtggtaaaatagtctaaggtgtggcgcgaccaagtgaacggcggtagccacggcgacgaccgcgcaaccacgtcgccggcaagtgggtacggcgtcagggcggccacagtgccccaacttcatcccttgcgtaagatcttttaccctaagtagttatccgtgcgccattgggcacgaatcacagcgccggcgtgaatccaggtgcgaggatcgccggcagcgaggtgcactgaacctggcatcttcttcagactactgtacaatcagagtcttcatcaaagcgcctgacagagtattttagaggacttgattctcaaacttttatgtggcaactccttaatccttctgcagcaaagttgat

SEQ ID NO: 74987 - DNA, 740 bp, Zea Mays
ccggtgagggctacatgattgactcttcggtagtggtctttcttctaccgttttgtgtcaaagtcggtgctcgatccaccggtaatcatatgaatgacccctcggaagggttgctcggcgaagtccacttgtttgggtgctggtggtggtggtggattttggtgatgtggtggtggcggcggtaggggttggatttcttggtgttgctggtacatgtggttttgctggtggggatggtaatgttcattgtgcaattggtgctggtgatattgctggggatggtaggtgtgggcgacaactctttggttgtcagctggttgatttctggccatcctatctttggtggccttggtttcagggcaatccctagtgggatgtgccgagtcttcaccatggaaaagacattagaaccttcgctattgtaacattcagcctttgcctctccctctagtgttgctgccacgaccctgttgcgtgcggtactcatggcgacgagcggtgtctccagtctgctgctgattagcgatggtgtgcacatgggactggttactgtttggccagcctgagtctgactgcacaggcctgacccatgtcttgctagactgtggaatgtcctcgggtttccgctgtgactcgacttttctctggtggagctcttcggaccaggcatattttttgaatagctgatataactcttgcaagtttttgggtgggtctcttatgcagtgactatataagac

SEQ ID NO: 74988 - DNA, 1235 bp, Zea Mays
tcttctttcgagcaaatacattatgttcttctgcaaagtaacaacttgtaaagtgtgctacctccttcaatttaaattgttctacaatacatccttcaactcttgccttattgcccaccatttctctaagcttctttaatactctttctatatgaaacatccacctgtactgaacaggaccaccgaccttagcctcatatggaagatgtatatagagatgctgcataggattgaagaaacccggtgggaatattttttccaatttgcacaaaagcaccgatgcctctttctccagctgttccatcacatctcttctgatttctttagcacacaattgtatgtagaaatagctaactttagctaatgttttccacatagcatcggaaatgtacccatgaaacattacatgcattagcctttccataattatgtagaagtcatggctcttcagtcccttcatcttcattgtcttcaaattcataggtcttctaaaaccagcagcataaccatcggggaatttcagatcctttatccacttcatcacttctttccattgcttaggtttaagacaatagtcagcttttggtttgcctccgttttctctaagcatttgggttggacgatcacatatcatggctaaatccatgcgtgccttgtcattgtctttcgttttatccgggaaatccatgcatgtatttatgagggcttggcaaaagttactctcttgatgcatgacatcaatgttgtgcatcaaaatcaatgatttagcataaggaagctcccacaagccacatatgtgagtccagttatgctcctcacagaaacattaataccttttcccactctcgtctaagacaagtttcctatgctcttctgtaatttctatcccactacatcacttgggcggtcccttcgtgacgatggtgcccttcctaaactcctttctttgccttctgaaggggtgattgaagggtagaaaacatatatggcaatcaatgtaacatatcttgccaccagcactaagacgaaaacaatctgtatcttttgcacaataaggacatgtcaatctaccatgcacgctccatccagagaaaataccatacgatataaaatcatgaatcgagaacatatacgcaacacagagattgaatttctgcttcttgaagaagtcataggcttccaatccttgccatagctcctttaactcttcaatcagtggttgaagcatacattga

SEQ ID NO: 74989 - DNA, 501 bp, Zea Mays
gagcaatactagagtatgtataaagggagagaagagtagctgaagatggcagtgatggagcaaaaggcaggcagaaaattaaacaaaagatggagctaggcagcagcatgcaagcaaagcaaggtatcgtacaataccctgccgtgtgatcgagtgtgcgcgttcttttgctttgttaattgttagttaggacggcaacacactgttatattagatggttggttcatcgcgttccattagccatgtaatcaatctccgatccaggaccaaatcactctccatcgtctccatccccaacgacgatccggataaaattgaaggtgcgtgcccttgcttcccatcgattttcctcgtcattttgttttatttgttcaatcgaatcgttaatttgattaattactagcagtagctaagaatttgattactactagcagtgtcgtcctccacgcgcgcggttgcatttccgtctctgctgggtgggttgatttgtgaaggtgcgta

SEQ ID NO: 74990 - DNA, 1019 bp, Zea Mays
gtagaagtgaagtggcgatccacttactactgagggatgaggttcacccctactcttgggtcatacaagatatcttatggtggtaaccttgatactcggttggagatgagactaggttgcaagtagagcttcactacctttatgttcaatcatctctctagtcattcctaattgatcactattgaaagctagagcaagtcctccttcatctatagtgcttcgcctaggaaggtgaagcctggtttggaggtcctaataaagcgtcgatccaatctaggcacctgagaggagtcgccaaaggtcataaagagcacatccttgaatgagaatggcagtacctacagaggaaacatcacgacatggcaaatcctcacagctacctgggatgtagatggttttgggactttttcaatactgagagtatgtggagggggtggagatggccatctatgataaacaagctccctcctttgactactaggcttagatggatcttttgaatttgaaattggtgcatctattgagccgatatcaaatgtcttctctaggatctttgtcaagcctcttcttgccatctgatgtggttaggtgggaaaacgatcctcccacattgaaatttatgcagagagtagcactagacgagatgactcgaacaaagttttgcatcaacataatatctaggatacctaatctagtcctggcaagactagacttgtgaagcgtgcccaagttgcttccagcgattcccttctcctttgtttgaaaagtagcacctcacataagagattgacaacttttggttgtgcaaagaaatagagatataaattattcttcaaattttctcaaatcccttctactttactcactaccaggttgtaccacaactttgtttctcttgttagtggtattggaaaaagcaaccaacaaagtattatccagcattcttgagatggtcaaacaactgtataactgctcaaactctcaaaggtgtaagtagagactttctaattccaatcccc

SEQ ID NO: 74991 - DNA, 404 bp, Zea Mays
ccggcgatccggccacgtcgcatggctataggcgcggttgataagcttcaccccgcgtccaaatccgctccccttctgatcttttcaccctcccggcactatcctgcccgagtccagcatgaatcaccgcgatcggcgcgaatccttgcgcaaaggtcaccggcggcgaggaggactgatcctgaagatcttttgcgcactgtaccatcagaacaccattcagaacacctaacagagcttatttgggggcgatttgctccaaatttcgtgtagcaacttgaccattcatctgtatcaaagttgtagctctataatctagctacaaatcaactatagagacctggctcatttacttattccttcgagcttgaattgagtccaaagtttagcagatctcactgtca

SEQ ID NO: 74992 - DNA, 337 bp, Zea Mays
ggtctgcagttgttgtgctcgtaaatgctgctgctttgataagaattggcaagtttcacacctctagactaacttggctgcatcactctttgctgttggccagtagaaaccagacatgaagaccttcccaaccagggtactagatggtgcgtgtatcccgcactgtacgacgtggatctcatctaacagttgttgcccaatagctgaaagaatgcacttcatgaggactcctgttgtgccccttctgtatagtgcatccccaatgtgggtgtagtgggctgactgccttgcgatgcattatgcggcagctttgtcatccggttcctcttcattattt

SEQ ID NO: 74993 - DNA, 507 bp, Zea Mays
gccggatgaggcatatatagtacgaatgactctaaagacgaacatgtccaaccaccagactctttgaaggacaacaaggacatgtgggtcacgacaggcctaccataggtgtaaagcggccagatgctcttgtcaggacataagtaggatcggagtgaaccccaaggcaaaccacatatacgactccctcatagaaaggctctagatgcccatctacaaggctcaactgccccttggtcatgtcagaagacacgacgttagggtccaggcacgacagcaaagacaggcctttggagcataggggacgacttatgaccagtaatcaaaagatgacttaccccatcaaattttctatgtaacaaatgtctatatgctccctcgactatataaggaaaatatgacaaccaacaaaaactccaggtgaatttagcatgcaaaccaaccagtatccgaataatccaataggcattcaaaagtattaacaaccgaccaagtagacacacaagc

SEQ ID NO: 74994 - DNA, 307 bp, Zea Mays
ttcggacgggactccgaagcggcagacaatgttttgctagaagaatttttgagcggtcttcgatgtttttgtggatactgccctggcctcaatccactttgtgaaatattcgatggcgatgaaggtgaacttgaggttcccttgagctgtaggcagtggtccaacgatgtctggcccccagcgttgaagtggccatgtatgggcaatgagcttggtgaatttcgaggggctgcctgagcgaggggagaacttttggcatgcttcgcatgaccttgtgacccgattggcagtgcaaattattgcgggc

SEQ ID NO: 74995 - DNA, 609 bp, Zea Mays
aaaaagagttgtcagcattctgagcaaagaagctgcccgatccgtgaaagcagacgaaaaggctcttaagaaggtgaaagtggcaccggagccgaaggcgcaagtccctaagaaaaagaaaacttgatgagataccttctgccgaaccgaaggtagggaaagcgccgaaggtgaccttgaaccctttgtcgttcactgctgtcgaggtggcagaaattctaaaggtagtgactgaatccccaccattcaagctgataagtcctctaagatcggaactgaccaaccttttacagaagatgaaggttccttcggctgtggaggagaaggttggagggcaaaagaaatagtggattgtgaacgtaacacaagctattgagcaaacgccaccttcagcttcggtggtgaaagtagcaattcctgtggatactgaagatgctggcggagccgaagctgaagaactcgcagccacaatgtcagaaattgacaagcttatatcagatgtggttgcggataagacaggtgtggctgcggaggaagacatgaccatagtgcctgagaaagggaagaaaattgatgagactccttcgaaagggaaagattttgaccttc

SEQ ID NO: 74996 - DNA, 412 bp, Zea Mays
aaagcaccccttctgccctaaaatttggtaattttgtccagaaaaaaccattcatcttctgacccccaaattttgtgacagagaatcatacaccagtaacaagccactttaatttttgcagaatttttggaattttataaaagcaacttgtagttcaaacctactccaaaacattaaaagaataaaaggaaggaatgaacctcatcccaatgagtctaacttgagaacttaccaattctccctaagacttaaaaataattcggtgggaccccaaaaaaataaacctaccacttaccttagctaagtttaacccaatttaccaagtataccacccaagggttttacataagtaaagttaacttgtttaaactcaaaagatcatacccctttaaagttgtaatttctaaaagca

SEQ ID NO: 74997 - DNA, 852 bp, Zea Mays
gtggccttcggcacccgaccgaaacgaaggctgaaccgagtaatggatgccctgaaatttgaataccctgactatgaacggttaaacaagggtgccgaagggccaaagcgaaaaagagttgtcagtgttatgaagatgcaagctgctagaatgatagaagaagatgagaaagctttaaaaaagaaaaaatccagcctgagacgaaggtggctgttccgaagaaaagaaaagttgcggctgcgaagccaagatcaactgatatagagtaagaagttccttcaacgcctcctgctgctgacgtggaggaaattttaaaggtaatgaccaaatctttacctctcaagctaagtccactagggccacaactgatgaagcttttaaagaaggaggagcctgcagcaatcaagaagcctgctgaaaaaaggcgaaggattattactgttattgatgctattgaagaaacgccactgtcggcctcggcgtcaaaaaacaccggctgtcgaagacactgcagctaccaaggctgcccccgtcgaagctacaactgtcgaagctgagacggccgaagatacaaatctagagggcactttttctgatattgataagatgctttttaacatggccgcgaaagaagctgctacagctgccggagagaccctggccccagtgcccgggaaagagaaggagattgccgaagatacttcagaggaaaaggattttaattttcaaaacatacttggtcaaaagttgtctaaggctgagaaggaagagctgagggattatgcaatatcatgcggccgaccaggagcattgctcttctgtggcgttgacaaagagagcttaggatgcctc

SEQ ID NO: 74998 - DNA, 616 bp, Zea Mays
ataaaaccttagttccaatcctaaatattctaactagaaaggagagattgatcctttatcagcagcggggccaataaggcgacccgttgcatatagtaccttcaacctttcaatgcattgggcaatgttgagcatcttctccatggacttcaaccagtcatcatcttgcagtggatgtagggagctggaaaaagtgggtggcttgtggctcatgaactcgtgatgcttatctctaggtggtggtggtggtggtagtgggtgttgttggttattgtggagctaagcttgcataacggtcatggtgttggacatctgctgcagtagcaggatttgggcggcgaaaaaggcttccgaccgagcaggcggaggatttgggggattcatctctagttctcgattgattactacccttcttcggcgaatgcgtgcaggttgatcgacacctcctcctgccctggtattgaccatctaagttagagacataaggtaagatagatttgtagataagacaggtgatcaaatacaaaacacttgacttctaggttaagatcttttgggtcacaataggtcaatagattagagtaccacctacctatcatattatactacctctaaa

SEQ ID NO: 74999 - DNA, 583 bp, Zea Mays
tttggccttttgacaaatttgacactgatggacaaaatcctccacatcagtcttcatacctttccaaacaaacaacttcttcagtagctgataagtggcgtgcactcctgagtgaccacccgtcgcactatcatgcaatgctgccaccagcttcgtcctgagagcagaattttggccaacccaaatcaaactgcccttcctgatgacgccttgggagagagagtagccctgttcatctgggctatggacacacaaccgagccaaaagtgactgcgcagccgggtcagtcacatatgaattcataacttcttggacccagagaggttgaacctcactgactgctgtcaatgtcatcacacagcccacacgagacagcgcatcagctactttgttctctttaccctgcttgtaaacgactttgaactgcagccccataagctttgccatggctttatgttgcaactccgagtgaagctcctgactacccaaaaaactgagagccttgtgatcagttcggatttcaaactcgctgcgctgcaaataatgacgccaacgatccacagccataatcagggcaataaac

SEQ ID NO: 75000 - DNA, 434 bp, Zea Mays
atgcctctgttggactttgctatgccttagtgtgcaaaaatgctttctattccattgatgatacgtctattgctttgccaccggctattgctaaccttttgcaagagtatatggatgtgtttccctctgagatacccctggattaccaattgtgcgaggcattgagcacaagattgacttaattccaggggcgagcttgcccaaccgtgctacctacaggaccaacctcgaggagactaaggagatccagcgccaggtccaggaccttctggactgcggatacattcgtgagagccttagtccttgttctgttcctgttcttttggttcctaaaaaagatggctcttggcgcatgtgtgttgattgtagagacattaataacatcacaattcagtacagatatcctattcctagattggatgacatgcttgatg

SEQ ID NO: 75001 - DNA, 603 bp, Zea Mays
ctgagcctgagggtggccgccatctcgctagctagctaccttctcggtcggtgctcgagagatggaggggaggagaggaggagcaggaagctagcgagccgggcggtgttggaatggggaagggcgggagggagagggcgggcatatataagcaagctggtggaaggggccttgtttagccttggaaacgaggatgggttgtaaagtattcttggctgtggctggctggctgggctgggctgtcctaattttaggctttgctatgattagctgggggtgattgcctgggcggtatctgaatgaatggtcagttttgttctgttgtgcgggagggacgagaggcaagcacatgtgttgttgtttgtgctaactgctaagcagtcatcagtttcatcgaacgattccgcagcggtgccggtccggacattgccttgttgtccgagctatcgcattggtcgccagacgatggttccggagatcattcgtttggttactagcgactgctagtacgtactaatttcccacgtaatgatgccgtggcccgggcatgaccgcagtccgcatacacccttccccgcgcagcctcgtgtcgtgcctcccgcg

SEQ ID NO: 75002 - DNA, 920 bp, Zea Mays
ctcggacatgtcgatcaggctccattatgaatcgactgagttatgacatcggctatgcattggctgcgccctagcaacacgacgcagtaattgtgtcgtacgaacttggttccatcatgtgattgctatgtagcactctcgtttattcggacaactcccgttgagtcgaactgcatcactgtgtcgtgtatttttcgtatgccctgtaggtactatctgtctgccgtgatcattaagccacaattgtgcctgtcgcgcacgttgcgtggacttatcgtgtaccccgactattgagccataattgtgcctgttgcgcttattacgaaggcttgttgtgttgtcgtagccctgatggccgcacacgcgttgacaccagacgctgaagcttgtactcgcgtggattgtggtgggttgttcaagaccctaaagtcatattatgcgcaaccttcgtaaacaattttgtttggctctatattttatttgactgtgttgtgtggcattatatatttatatatcgccaagtggccataacaactatatcaagctcaatagtgcttggaaatctgggaaattaaattgaaatacaatgaaacacagataagttaattctttgctctctcctcatgcataaagttttacccgaagtaacccgaagatatataatataatgcatgaaagcctttttggcatagaagacatcacaaattgggattctattagtaagcaaaaggccttaccaaataatttaagattataaatctcagctatatattgctcaaccagatgttagcacattgctctctttgtcgctaaatgacatgaagcaaactatgagataaaaggacatgtaatcgccagcaacacgaagttgcgagtataccgagaggttattctgagaaaattttcactatgttggtgtg

SEQ ID NO: 75003 - DNA, 501 bp, Zea Mays
gttatattcggactgtttggcgccgtacgtggaccgtccgaatgggttatctagggtttgcacggtatgtggcggcttgggtgcgggcctcggtaattcgcttctaaaaatgggatcggccgccgctggcccggacggtccgcgctcacgtgcggacggtccggacatgcgcagatcgacaaatttatcgccgatgtgcgtgggaggctgttgttgcctagggtacatgtctatcggccccccataaaggggttgtgattggtcgtgacaacctgttgccgatgaatcacgtgtgtattccctcagttcaacctcgtgcgaaggaagatttgcaatagtagacttatcaagcgcacgcactagccttttatgatcgttttgtatatcccatacgatacgttgcatctgctttcgctgttcgtctatgtaagccttaagagattggagctcattggtgctacttacattgggggtattcgtagtaggtcggagcgaagccag

SEQ ID NO: 75004 - DNA, 349 bp, Zea Mays
gtcacatcaagttactactccaggacagtgtgctaaacgctctgcgtaccaagacaccccttgggcacacccattgggtgtgtagccaggaatttaaaaagattttttgaagaagtcatatccatacaatatacacaatgaatgtaccaagacaaaaggaggagatcggctgaggagggaggaagtccaaatatatctactgaaccacaagtccaatcagcagatgcattgaagcacagagcggggtgatatccagctgagagccatctgccagacgtccaatccgtcaccgatcaaataaatttcagacctaacaaggtatggacagatagcattatttgaatttgca

SEQ ID NO: 75005 - DNA, 510 bp, Zea Mays
ctaattcaactcccttaggcaaatggagccctagagtggagtatagcaaaaaggctatgtaaaccacattgtcatgacttgggctaattataaacgttgtagtacacttaataccctacaaaaaattgtaagagagtgaacccaaaaagatttcagaaaactccaaaaaggtcaccaaagagaagaacataaaagaaaaatcagattttcataatttcaaaaccagccctctttcaaaaatcaaacatgttcacatttttccaaacctcaaaaccatatggcccaattgacaaaatggcgcctaaagacccctagaacaccctggaaaaatttgaacccaaccctaagtcgtttgacatgacttgacacggtttttactcggtctagaccgcttagacagagccaacttcacaccacaatatctctcaaccctgaccatatctttgcttggaactcacatggaaaagataggatatggtgtagagaagagaccgtacacaggatttttgc

SEQ ID NO: 75006 - DNA, 640 bp, Zea Mays
cgtacgaccgtgcatggggtccggtcataggaaatgatgcgaataaagatgtgtgccatccatatgcatgcatgcctcccttttccactcaaaggctttccgttcgtcggccatcgtcctccctacgcatggcactgtgcgagcttttttctcgatgtccatgcgcaatttttagtgcaatagtacaggcactgtgtaatcatgcatgctgcacggagtatagaatatgcatgcatgtatctagggagggagacgcggagaagcaaaggcgaacagtgcaggcgaggaaattaaagcccgtcgtggagactcgagactagataaccgaagcaagaacaaaaaaaaagagcgacaacaaagttccaccagctgtttggagccttggaacagaactagctagtgagcaatcagcatggaccttgcggtctacaatttaaggaaaaccaagtattattagcactgtgttttctctacgttatcgttactcttaaaccttagcttgctggagaagaattaaaaggtacagaatttgggtccgaggtcgtccgatcgagcctgagtccatgtcggcagatttctggcattttgtccgcaaaatttctgtgcaagtaccatgattagtggaggttcacgatcgccc

SEQ ID NO: 75007 - DNA, 274 bp, Zea Mays
ggaaaacagtggcctcggtcgcggtcgtgtagctttggttgttgtttaccaatcgccgtcaccagtcctgtggataacatcgcccctctcaactcaaaattatgggcttctgttcttattaacactgtaagtagaaaatgctgccaacttgtctgtagtaatctctggataaggacggtgcgaaagggcaactcatccgcctgtgcatatccatacgcggcgaggaacagtattttgatcatcacttacgagcaagtataataaaagctgttgg

SEQ ID NO: 75008 - DNA, 600 bp, Zea Mays
tcgcaccatctatgtagacacgttttctacttattgcgcacctcatcatctccatcgtgaaccttgccaaactatggctctagattcagcgtaattttgcccaactgttgtctcacacacaccctctcactcttcgtctatctatttgtctactctacatctttgtatgtttccctagatcctcactttttttgaatccattgatgaactatagggtcatattaaagcttcattgatgtcatcatatggttctagtgctcctgctacaaaggtaacctaaccctaaccctaacctgctaataataaccctatatctatacatcatatggttcttttcctaaagttgttgagaaggcgctgatgagtgaccatggctggctccaatgacgacacaattgaggtcgataccaatgaggagttgtttgtgtaggagagccagagatgacaatgatgatggcatgcacaaggaacatggggccatgttcggtcatagcattgaggctcccatcgatgtcagcgatgatcattaaggcagggctccaaacatagaggacgataataatgccaagagctcacatctctctacctcttttgtgtgga

SEQ ID NO: 75009 - DNA, 484 bp, Zea Mays
ttcccagcacaatgatattgtgcgcattgctaggaatttcatcatcaagatgaacctcttcgtgaggcaaatcaccatgagggtgagtccatcggaggagagttattacagaccacgtgaatctgcaatcagaatatatgctttgactaaggccaatggatcatattcgcaggcgtccccgagaatagatcaaatgccaataagtcaaatgtggatataatattaatcctgggtatatccacatctacatcaggtagaagcattcagaccaatatggttactcctcaacgatttctggcaaactccatatacacaggagtacacaccgaatgacaggttcagtttggcttttgtgcgtttaatagaatattaaggcattacattatatgggcattcctccctctaatgccgagatgttctaaaagcatacatataaaatccccaaccacaatcatccagttgtggccaatgtatgctattgtgg

SEQ ID NO: 75010 - DNA, 754 bp, Zea Mays
gaggacatggtctccgtcgatgagatctttggaagttggttcgtcgacgttggggactgctaatttgtttgttcggggggggggggacccgtgatttaactcttgcggtgtcatggcttcagatccatacagtaggcagaaaggtgtgaccggttgcccggcactctgtcgtgttcagggcccataccacttcatgtaattggtcggcccatttgcccttttgtcgtcaagaagccttttcttgatggcactaaaatcttgccattggcgcgctcaacaacaccgttggattgtgggtggtacaccgaggcgaagacaggcttgatgccgatggaaaagcagaaatccctgaagtcttggctgtcgaactgtttgccgttgtcgactgtgagttcggacgggactccgaagcggcagacaatgttttgccagaagaatttttgggtggtcttcgatgttattgtgggtactgccctgacctcaatctactttgtgaaatattcgacggtgatgaaggtgaacttgaggttcccttgagctgtaggcagtggtccaacaatgtccagcccccagcgttgtagtgaccatgaatgggcgatgagtttggtgaattgtgaggggctgcctgagcgaggggagaacttttggcatgcttcgcatgaccttgtgactcgattggcggtgcagattattgcgggccaataaaatccctgatgaatcactttggcaacgagggccctaggtcctgagtggg

SEQ ID NO: 75011 - DNA, 1028 bp, Zea Mays
gcgacgaggtggaggtgcccgatcagcggaacagccggaggggaaggaggcatcggcatcatcgtctgctcggttgctcctcgcggcaacggtacgtagtgaagtagtagcgtagcacaacgaagagtaggggagggaattgatcaccacctgtgcctgccggcggcgaatgacatttgcctcaactaaaagcactcgcgcggcagcagtgtcttatacatgtgccctgcaggcgcgtgcacaagaagacaagatcgcagctcgggaggagcagtgggtagcaatatagtatcgttattttacggttcagcgtccgcgatgattagccattaatttagaggtcgtacagtctaacataatgacaccacggcattggcatctatttcgtcaaactccaattatcactgtatctggctaacagtgactcaaggtattaaactatctccaacagcttactcatacacatacttacattcaaactctactctacaaacaatatacttcacacagtacaaaacagtgcttacgagtaatcatagaccgtccgtgctagcgcgtccgtgctagcgcatagagcttcgtatatgagctagatttcgtttcatggaagagacttcgtcggggggagagatcgtagggttgctttggaatcagtaggctacctaaagcgtctctaaacgacgtagagttaaagaggtaaaaattaagactaacgtttttcaatcgcatgttacatagtcaatgggaatcaaaccatcaacctcatcctcatgtgtaccctactctaccactccacacatcacttacttcatgtctagattgcatttttgttacccgcatattataacaactgagtgcaaactgattgtttgaggctgtaaacgaattcaaacaaaaaagttatcaactacaaagttgagtaacttttggagttctacaacttttattttactattttcccatctgaggtcgtttgcaaaatttgcattttaaattcgataaattcagatgcaattttgagagccgaa

SEQ ID NO: 75012 - DNA, 465 bp, Zea Mays
caagctcacacttactcgatttagggtgaccactataccctactaacggagcaatcagcttatgtcggcagtgacttaagacggtgcaacatgctcacacttacttgacttagggtgaccactataccctactaacggagcaatcggcttaagtcagcagtgacttaagacggtgcaacatgctcacgcttactcgacttagggtgaccactataccctactaacgaagcaatcggcttaagtcgttaatgacttaagacggtgcaacatgctcccacttactcgacttagggtgaccactataccctactaacggagcaatcggcttaagtcgacaatgacttaagacggtgcgacatgctcacgcttactcgacttagggtgatcactataccctactaacagagcaatcgacttaagtcggcaatgacttaagacggtgcaacatgctcacgcctactcgac

SEQ ID NO: 75013 - DNA, 716 bp, Zea Mays
gagaaatggtatatcctgttttcctgatattctgatactctcaaaaagactgaaaatacagatttcgccgaacaagtgtgtatttctctaggaataagcatggaatgtatgtgaccgtgatgtcataacataataatagaagaagaatcatctaacattgcatatgaaagattggattctgaacgaggatgtgagctcttaaaggcagggaacctcacaggggggaaaagagagagagagagcaaaatgataaatgatctgtggcctaggaggtaaagaatgatgcccaggcccagataagatgtgatgaatgaaaccaccgtgggaggaggcgatgatgaaacaacaggcagaaaaaggaataagatccggccgatcttgggaacccgatgttccactcacagaacgcaagtggagccaacttttgcagacaggaaactggcacatggcttggacaacgacgccggaatgaggcgacgctgttacagccttgttcactccgtgcgaatcctcagatgcgaacttagtacatttgtagaaagtttgcaagatcagccaccaagagctagctattcaccgtcatggacgccaagatcagccgtgatgtactcatgtactcctaccacctcgcgctgccgcaagaggcattcacaccagcgcaacgcctggcctacgcgaggacggcggatcgcgtatgagccacggggtgcgcgcgc

SEQ ID NO: 75014 - DNA, 644 bp, Zea Mays
tgctcctttattggcacgagggatttaattcaagagcacatagccttcagggtatggccacttgtggagagctgggatatgccgaaggagaccaccgccgattccagtgagggaggtctggtccgattgaagtataccttcagatttagggagaagtttgatgagccagacgatgactggctgaagtgcattgaagctaccagtgatgagctacttggggcatactccaaggccgaagataatgctttgtcggcagctttcgggggtcgtgcaagaaaagattgaacatggtatttgatgctattggcttcgtataccctgattaccattacccactacaggggcaagagaaaaagagaaaggttgccgcttcgaccattgcagctgagccgaagggcaaaaagatgaaggttctgacccaccggccgcgttacattgaaccggtcgtggtgcctaaagttggtgcgagaacctcttcagctgccgaagcaaagagagctactccgattgtgcagagtactgaagagccgattgtagtgccaaaggtgcttacagtcgggccagtcgaagctagagatgataaggctgaagagccaccggtggaaaaggtgataaaaacgctagaaatcctgagcccaccgaca

SEQ ID NO: 75015 - DNA, 910 bp, Zea Mays
ctatgattgtgcatgttgtgtggcgtattacaaataaaagacaagtaggcttcaataacttaactagtacagtgcttgtgtgtcgcgatgacacccaaattattcaataaaatgttagtgtgcaatgcagaagataacaaaggaatcgggcggccaggtgatgcagtcatgatgcaacgcgactctcctccaccctcttgttcaacctcctcgtccgtgatggattcaggcgctgacgtgacaatggtggggatcttcgatgccggctatagcgagtgggtggcggcgtgcccctgttgcggtggaacatgtagtgacatggctcgcctcctccgccctcctgtttagcctccttgatcatgatggattcgggtgccaacacggtggtggcagggatctccgacgttggttacaacgattaggtggtggtgtgccccccgctgcggcgaaacctgcaactgctagcagccgctccgctcggtgaggtgagcaaagccttatttatgcagaagaggtcacgttgctcgcgcgttgtgctattgctgttggttgtttatttgttgatcgtgtgctcttggtgcggtggaacctgcagcgacgtggctcacctcctttgccctcctgtttaacctccccgcttgtgatggatccaggcgccaacacggtggtggcagggatctctgacatcagctgcaatgattaggtggtggcgtgcctactgctacagtgaaatggcgcccagtgaggtgagcgacgccttatttatgcggaagaggtcgcatcgctcgtgcgtgttctactgatatttgttgttaatttgccgcccgtgcaccattttgttgctgttggttgttgatttgctcgtaagcatatgtgtgacgtctagcgcggggccgccacacagccatgc

SEQ ID NO: 75016 - DNA, 703 bp, Zea Mays
gtattactggtgttcatgggttacagatgagctgtgcgcggtgagggatgatttctcctattgtctagtggtggtgtagttgctataagatggctaatgagctatgagatggcaaagggatgcgacgagatgagatgcgtttgtaggggtactgcctcggccttatataggtgaccggacgactttccctttataagttgtgatgcctatctaactctatctgaatatatctttaaagcggcagtcactcttgcttatctggagttcggtcgcctttcatccaggttatctcccgagtatcaagctcttcgagtacacacaatctacctgtgtgaggcatcaatgctccttctgcgtcagacacgcataactcggctgtcccggtctttgtctcccttggtcaaactcacctagcctgattatggcctaatggcatgccttgctaggcaaaccatcagaggcccataaagcaactcatggaacatttccatgctcataaggacccaagggatatctatctctcacaggcccgtgaggctcaagccaatttttgagggtaattagctcgagtctccaaaaatgagccatgctctttgattattccatgcttttggcttcatctttgttctgggtgtagcccccgagctttgagctaatttgagcatcaatcaactcaaaggtcctcatggtcttgcttttgaag

SEQ ID NO: 75017 - DNA, 561 bp, Zea Mays
atttgtttgaagattgaaattgaaacttgaaataaaatgaaataagaagaaatcaaaagaattagaaaagaaaaaggaaaaaaatttcctgcgcgcttgggcctaaactcctaggcccaatactactttctccaccgcgccagcccactctattcctcttccttttcttttcctattagggcacttccatgtggggcccacaaaccaacctcaccactgtgcgcctgcgcttccgcattgagtcactgctagtgggacccgatggccaggttcgtcccttccccgaactcgacgcaagcttcgaccagatttctaaatccaccaaagtccacccgggaatcttgcgccatgacccgctctcctcattggtgcggcatgaaccatctggtggggccgacttatcagccctcctctcgtgaccaccgcatgcccaacagatttctgttggagaagaccacgccggtttcacttgggaatcctaccaaccggatgcctttgtgctcctataaattcctggccaccaccatgcctcaaccatctaaccctcatctgaggtaggca

SEQ ID NO: 75018 - DNA, 413 bp, Zea Mays
cgggttgggagtatcctccctaccgcgggaagtccccgcaccatcatgtgcgtgagtccgtgatggcatctgaggcaaagaaacatttggaaaaatattacatgccaacatacaccatcatattacattaccaaaatgtaataattatacagactctagtgtacaactcaactttattacttattttacataagcataacacttagactatactattctagtcttcttcatcctttattgctccatttcctgctgcaggagaccgttcgtcagcaaggttcatggaaggagggggcctaaaaaggtctagctccccatcaggtcctccatttgttgttcccgattgtccggctcccattgcagcaatgtctgaaggcacgtccgggtgtagtcgagcatacaatacatgcact

SEQ ID NO: 75019 - DNA, 832 bp, Zea Mays
ctttctaataccttggaaataggtttacatagtttcatggtgatgaaactagtttcacttattttataataaatatagtatcatatcataaaaaatcatattaacatactaattaatgtcatgaaatgtctcatgaaacttccattaagcatgaccttataataaataaaattctcaacaacattcctaatagaagttagaaaagcacccatagaccagcttctgaaatttaatatactttttactgctagaaacaaccttgctcacaaattagatgcttgtttgaagtactggccgattcaaggggactattgtggctacaaccccacccggtcgtacactaaaagttgtagaagcacttcagatcagtttcaatgtccccttcgtaacccaccacgtaccaaccacatccgtatttgagaggacaatctaatcttttgctatctttacagggtagatggcatataaaatgccatgttagtgactactctttcaatgattggtgatttagtgccatctctaaagatggcaaaagattaaatatccccatctcacacacgcgcaccacaatactagtcttgtctttgtctgcatcctaaccctagccgaccgatgtctaccgctcatgctccccattagtcgtgggctcgtcattgtctatctggcgtatgcccttcatcccctccatggtgcgcccacggccagcatgcacccatgcctaggctctagatcagtaggcgatagtggctaatcagccaagttgccgacttcaagctgggtaccagtcgcttgccttcaggctaccagcatcacgattgatcggcttagtaac

SEQ ID NO: 75020 - DNA, 817 bp, Zea Mays
ctagaactggaacaaagacactactaagaatctggaaataatttttttctcaaacttttgagtgcggcaatgtgttcagctcggatttcatcatgcattgcagacatgtcttgcttgaggagacaagcgtaagtttctagcatcttagactctttttcgagcaaccttgcttccttctcatcctttgctgcttgcagagataattttgatgcctcgatcttgtcattgcttatcttctgttgcatttcaagaaccttcatacgattggcatggcaaccattttgaatcttttcaaatctgtctaactcatctaatcggcttaccttgtcagtagcatcataagcagccttcttagcacccttcttagcaaccttgtcagtagcatcataagcaaccttcttagcagccttctgcccaatcggtctcgggagctcaaggtctttagcttcatcgactatagggttgctgctgtccatctccttccttttattactgtggtcattataagagaaccactttgcctcattacgcaccatgttccaaacatccataaacacaaaatgaacccctttattttcttcttcatagaacttgtgagctttatcgatccacatttggtctgaatacccactagtgtatatattcctagctttcaaccaacaatcattgaataggtttgtccatctatttaatttgtgccacctctcctttacctgagttttagtcctccatctgattttctcagtagtaagattgtactcgttcaccacatcctcccaatacttatctcctttttattgtttccactcaatgaatc

SEQ ID NO: 75021 - DNA, 422 bp, Zea Mays
ggatttgaattctttaggggaaattcctatacaatattctgtttgaaacacggtgaaatcatgttgtgggcactaggcaagttgctaggaaacagttatggagggagtagtgctagttcaactcagagaaaaagtaatataaacagaccagaagaaacgagatacgctgatgtgatatgtattatgtgaaccttgaccttttgatgcctggaaagtaggctgttatgcaaccacacacggtagcttatctgattcgtgcgatgtatctagctatattgctaattggacacctcacacccctagtattaagccacaccatttcatactgctggccgatagggctggaaacgaggcgaaatgagactaggcttggtcgcagtatgacctaaaaaatgtggcttagatcggctgaacgagccagc

SEQ ID NO: 75022 - DNA, 577 bp, Zea Mays
gatgtctgggtccgccgtggtagatccatttcccagataggatcataacaaattgagcaaatgacaacaaacttcatccaactccgccgattgtgtatggccagcgtccgtggcttcggccatataaagcatgggcactgtgcgaacccctcccatccatcgcaagccaccgcccgggaggaaggaagaccaccatagtgtgtggagtgcgaaaagcgcatagaggggaggagaagccaccgacgccaactcgtgcagttatcgttgttgcgtcttcacagaggggttgaggtggaaggatgaggtacaccgatcacgcgcgtagcacccttacaccatggggttgattggagtcacctctattgctcgctgggggtcgagaggagatccaccaccatagaatcgggttcacatcgctgttctgccctcgggtgtgaaaccaagagcttcactcagccgcgcaaaaggtgtatgtaacttctcttgggcggatttgcggtcggggctaccaggattgcttgtcagagttcaccccacccgctgatccgtagagcactgtcgaccggcttgaccacga

SEQ ID NO: 75023 - DNA, 1752 bp, Zea Mays
ccgtccactaggtctcctacaccgttgtctccatcacgcgcgacagcaaaggcagttttgcagcggcggacagcaccgcagggggaggcatcgtcgcgggaggggcagcccctttgcattggaccgctaccttagcatcttggtgtgggtccaatagccaaagagggtccttccgcttcttccactatgcatcttggcgatctttctccatcactattgacacaacagcaccaatatttctcccataaggaaagattctcggctcacgagctaaacgggacgtaaaatagtcaccgtcggcgacctgggtatagggtcattcctgtgccatcgacccccggtaacattcaccatgcgcgaagatgtttcccggagctcgggcgaagacatcacctccccgtgaccctcgcacatcctcattaactcctcaacaaaaatcctagaggccctcggccccatctcatcatccctcgtaccttgcaaatctattttccttttttgggtagctgcaactacagccttccccttcgaggttccctctttaggctgggtcttcacctattttcctcggtcattgccggtgtcagtagagtccccctcctagtagggaccatatggcaagctattcaactcaaaaacatggttcatcctcacattggaaccgcggatatcccaactctttatcatctcagtattcagcacatactttccaaaaatcttaatggcctctgactccacctcccgcacgaaggtggccgcatcccgcccacgcaagtcaacaatgaaggctaggctctgcaccattttatcccctagcattggcatcccgcgaggtctaatttcgcccaacacccacccgtgcgctaacgaccacactccataggcgatgaactcttccaccaaataacggtcgctgctcaatcggaccgtgtagtgaaggacctgctcgtcccgatcccccttcttcaccttaaagtgtggaaaggccacatagcaaggagaacacaaaatgaccgggggcaaggtaggcaacccttcgacattcccgggcgccacataaaaccaaaaatcccaccagttaccccatttattcttggcacaagtaacaatctcaaccactttagccgaagtctttccggtcctcggcgtgaaactgcaggacccaaactgagcaatcaaaccacctatcttgcttttctgccagtgcaggcaataatttttggtgaagacctcagtagacggttctccaccatatgaggatattgcccatacatacttcgctagtgcaaccatatcattcgtcgtcagttgatgaacttgaacttcaaacttttgcaaaactttaattaacaagcgatgcgccggcaagcgaaggccggcagcgaaaaatgccttgaacacaaccaactccccttctggcttagggacatcttcagcccctggagcccgcccgactccgttcccaaaatagcccagacgctgcatctccagcacgtggcccgagtaaatcctcgaggttccaaattcgaccgtgcgcccatgttgcagttccaccaccgctgccggatcgctaatcgtcttctctgacgatggcacagtcgaggacgtggtcgcaacagacgacgacgaggaagaagacgacatggtcacgtaccgttggcggcggcgagcagtttgcttgacgcgggccagatctctggtagagggagagcaaaagagggcaagcaagcagagaggaaagctagggttttt

SEQ ID NO: 75024 - DNA, 292 bp, Zea Mays
aacatgctcacgcttacttaactcggggtgaccactatgccctactaacggagcaatcaacttaagtcggcaacgatttaaggcggtgcaacatgctcacgcttacttaactcggggtgaccactatgccctactaacggagcaatcgacttaagtcggtaacgacttaaggcggtgcaacatgctcatgcccatgcaattcaggggatgacttctatatcccgcaaactaatctcataatcatggcgcgtcgtttcattactacgaatttacgaactgatgaattctgata

SEQ ID NO: 75025 - DNA, 637 bp, Zea Mays
tgcagctgtgagccagggtatgctatttcagggtgagagttcctgtcacatgatggtttagcaaggttttctgatcagggtgagtgtttggtgagcaaggtagccatgaatacagattcatgtgatacgatagtgtgggatgaagaaatctgtgacaactctttctggcatgagggtttgttacaacagttagcttcgagcagtaagagcatagattgatttatgttgattgaatgaactacgatccacagatacccgtgggttatgattaaataaatagtctgtgtatctaaatatgtcatacattagggacataagatgctaatgcaccggtgatctgaatttggatttttttctgtaactaacactaatgcactagaaatctatgttcgttaatgtacataccatttataaatatttgctgattgctagggttgctgtgttgggtccccgatcccggcgaccgacttctcagaaagcagcggtggcgaacgacgcgttgtgctcctgaaaaaccctcaggtatggattctcagatttgggggaaaagcactttgctgctgcgcaacttccgcagctatttctgcactctattcctttattaaagtagtggggattacatgggagattcacccgg

SEQ ID NO: 75026 - DNA, 690 bp, Zea Mays
gtttacactaaataagtattaattcaagacatgtgagttgacattgatcacattaatagatatttataaagcgtaagttaaaaatataaattagtttccaactagaaagctaaatttaaaacatcagttaaaccaataattaataaattatttaaattatgtgaaatgatgaaacaatatttttaatacatggacatcattaatatgaacctaacacgatttgaacggtccaaaatagatttaacatgcaaaaggtgttgtaggttggcggtagtaggaaattctaaaatcgagtggtggggacgtaattctctattggctagccgcatgtgggggagatgccgcatgcaatgcaaggtgcttttgttgtgcaagtagtggatggacgcgcgacccatgcagtttttgtataagcacaaagcaaagaaatagtcaagtgcatgcagcctgcaagggattgtggaggatgttgtcgtgcatgtacgtggggcctacacagtttttttctttttgtgttttatcacgaccgctcacatggtcttcgcataggctttcttcttcctggagcgacggacgcgccagacatctaggcgagggaggttgccagcaaaggggcagatcatgtaggggctgcggcaccggtggccgggctcgcccacagcggccgagcaacagcggcaatgaaggcag

SEQ ID NO: 75027 - DNA, 438 bp, Zea Mays
tagggaaaataaggagcctaggaaaattggtttcacaattttatcattttcctaccattttctataattgttttggctctggagataaaagaaaaagaaaaaaacagatgaatagcactgggccgaatccagcccaggtcggcccactaccagaagaaacacgtccacgcgtgcacgcccgcgcccgccgtggagtttttgcaacagggcccttgcagtttcggttattcgttaagaaccccaggcgactgttgaacgtctcactgacggtttgcagaaacatccccgagcttctaacctttctcagtttgagtccacagcggcgaaccgtgctgggagctgagctccggcgagctagaccggccggacgtcgcgacggctggagctcccgagcgacaggaacacaattgaactcctacggatcatttcccccaaatc

SEQ ID NO: 75028 - DNA, 703 bp, Zea Mays
agcttctgagggagaagttcagagctgaagggagggaggtgcgggcgcggccacgggagacgcatgaggtttcggatcccaacatcatcacgccagggacggagttcatggagaagctctccaaagccctcgagtactacgtccgttcccggctcaacagcgaccccgggtggaaaggcatcaaggtttactacttgttctgtatgtagtttccctttttttttttgcagtggttggagtaaatattttgttcttttgacagctcttgtttagcccttaacaattttaagacgatgtttgcctcgttgtgtaaatgcgccctttgttttgacaattacttgataacctcaagatccttgatttctcaaggtaatactctctgattcaaatgtacctggagaaggtgaacataaggtcatgtctttcatccgaggacaacggagcctggcaagctatgatccaaacacaatgcactgcttgtatggactggtacggtggactattaaaatgaatatttgaatgttttctacatcaatgatcttctaattgttctctttattgagctccttttatgtctctgagtatcattacaggatgcggacctaataatgctcgctttggcatctcacgaacttcacttttcaattctgcgtgaggtctgattatccatcctcggtgtcaactcctggcttcatccatataa

SEQ ID NO: 75029 - DNA, 274 bp, Zea Mays
tccgttaaggttagtcaacaaagatctaggaacccaaaagtcctttgtgttagcactaggtaaactcattacctttctaacacaagttgcaattttgggttgcctagttacatgagaatcaattgacaagttaggagtgaaattgttaccaatgggacaatccttgcattgatgtcccttcttacggcatgtgtagcaaaggcgttttccaagatttgacgttttcttctttccttgtttgttgcctgctacacggttagtaaaaactttcttt

SEQ ID NO: 75030 - DNA, 624 bp, Zea Mays
aaaagaggaaaattgccgcttcggccatctctgctgtgccgaagggcaaaaagatcaaggttctgacgcaccggccacaatatattgaaacggccgtagtgcctgaatttggtgaagggacctcttccgctgtcgaagcgggacaagctgctcccgccgttcagagcactgaaggattgactgtggtgccaaagatgcctatagacaggtcagccgaagccaaagatggtgtggccaaagagccaaagttggaaaaaacaacagtgttgccaaagagcccaccggtagaggcagaactgcgaaggtgacaaaggctcccgccacaactcccaagaggaggagaatggccagcgtgctagacgctgttatggaaaccacaaaggcattgactcctgcccctgcgaagaaagttgtcgaagctgctacggcccaaggccgaagccgaagctgggccttcagtgctcattgagacaaagcctgccacgactgaggataaggctgagcaagaatctccaaatgccggcatggcagcggggcaggacgtgacggaaaaagctaaatctcctgctcccgaagctccgtccgaagatcttgattatattattcgacatgcttcggggaaaa

SEQ ID NO: 75031 - DNA, 512 bp, Zea Mays
ctgacaaaatctgcgtagcctgtgggttaacaactggtagcagaaaacgatcagctagctgcattccacataaatccccatccaaattgcgcctagaagcccttctcatagccttcagagtcgcatcctcatctacccggggaagaccgtcagcatctaaaacattggaacgagtacttcttctaatgaacagaccattatgaaggggataaaattttgaacctattccagaagaccacagtgaaccaactaagtcatcatcacatgcatctcttgtttcctgagtgtcctgcaccagggaaccatacattccctgagaaacaataggcattagcattttattctgcatagatggagataaagagacatgttcatatgagatgtcactagttacctttctcagatcagcgttactcgaagtagagtttcccatagtcacgcacaagtcaatctgagcggtaacaggtgtcagcaatgtacctgctcccacctcataaaccaggttctgaacc

SEQ ID NO: 75032 - DNA, 625 bp, Zea Mays
gagcaatcggcttaagtcggcagtgacttaagacggtgcgacatgctcacgcttacttaacttagggtgaccactataccctgctcacgaagcaatcggcttaagtcggcagtgacttaagacggtgtgacatgctcacgcttacttaaacttagggtgaccactataccctactaacgaagcaattggcttaagtcggcagtgacttaagacggtgcgacatgctcacgcttacttaacttagggtgaccactataccctactaacggagcaatcggcttaagtcggcagtgacttaagacggtgcgacatgctcatgcttacttaaacttagggtgaccactataccctactaacggagcaatcggcttaagtcggcagtgacttaaggcgatgccacatactcacgtctattcgacctagtataaacatgcttacgatcactcatcttagggcgatctctatgcctcacaaaaataggaagaagttttgaaactagcatactgcatttacttctgcaatcgtaacaactgttgaattcaaacaacagaaaaacaaaaacaacattcagtaccaagaacacgctctaacatagtattcgggcatattaaccacatacacatat

SEQ ID NO: 75033 - DNA, 506 bp, Zea Mays
atggaactgggtggatacctaggcgaagaagtgtgtgagggtggtgaacatgtcggacttcaaccgaagaggaaaagtccaaagaaaatgggaaaaatcatccaaaatcaccaagtagtatctgtaaccagaaagactgagtacaggggaggtccagagatcacaatgaaccagatcaaaagcctgctcagcccgagaagaagtagtaaatgggagacgagtatgtcggcttaactgacaagcatgacagaggccctcaaaatgtcccctactacatgaaggatctaagctattggtaagtttgctcatgacgttaggtcctgggtagccgagacgacgatgccaagtgatggcggaggtggtggagactaggacgggaggtggagacacgtcggtggtggaaggctggagcgtgtagaggggcctgacgctgtcacatcgggcgagaggggtccaagtggccagatccttcacagaaaaaccagaggggtcaaactcaatggaac

SEQ ID NO: 75034 - DNA, 721 bp, Zea Mays
actgcctccacaatagctaatgaatgcagcagcgcctttgggcactcatattgttcagctctataccggaacgtctggcagcccactgtaaactgtccggcaccccaccggaccgtctagtgacccatcgcggatcgtccggtgtccagcgtgtagaatggcaccatgtggacaacacgcagccacactgcaccacaacaacactaccctccacctttggcctaacaaagccaaagcattccagcgcctaggacggagtaccactcgacgtacaccacacaccatagaataccctcatacatgtaaccgacataaccgcataacaacgcccaaccatccgagcttcacgttttggggtccgttcctacaccaccggctactatgaataaaattcgagaagaaatagcgaattattttgagatagactagggattaacatgtccggctcaggatcgtcatataggaaaccctatgatcgccgatttgacaccatcccatacccacgagggaccaagataccagatttctcacaaattttttgttgaatacggtaagagaacgcacgaggacataggctagttattaacacaactaggggaattggcagacagggagatatttcatgttcgactattttctttgtccctcactggtacgacttttgcatggtatactaccttaccaactaactttattagctcctggggcgatttagaacata

SEQ ID NO: 75035 - DNA, 968 bp, Zea Mays
cgagaagcactagttatcatagactctatggagtagcagcgacattttcaccatacacgcacgtcgtttgccgaccgtaagcatctagtcgtcctagtgcacattctcgagcgtgagggcggcaccttgctccgttccatctagtagatctaatcggttacggttagtccttgtccactaaggatatgcttagtatctacataattaggccctacatatgggtcggacattccggtgatgtgttggatgccctacgtttgcttgaatagggatctttccggggatcggctctcgctggtttttaggcctctgatctggctagcattctatcatttgtcacgcttgctaggcccgactacgcgcaggatgttccgattagcttgatgtgagtagggcatggtttcgaatgccatcaactctgtgtgtctttgatacatagaccgaatctgatcccgagaaacaattggctctttatagccgatacagcccgaggagccgagcatagctcaaatcaaagtttgcatgtgtctgtttgtgcaagaaaccgattcgaagcacattgacatcttcctgaccaggtatagatcaggtggcacgcctagcgaacttcaaagccaggtcgtgtactagaatctgggtcactgaccgagggaccggtgcccaccaaccgctctgaaagcctcctgtcccctcgtgttgcatgccatctctcgccggcaaagtcggaagacaacacattctggcacgcttgggggacattctacatcaactcccgctgtctagatatcgaaggctccggcacagacatctggtttgacacaagagaagcccatcacgtatgaagagctgcctcaggaacactaagcgagatatgatcaagtcaaggccctcttcgaagccaatctcatcggctcttttgagaggaaccgtaaccatggcatcaggtggaaggggttctcacctgaagg

SEQ ID NO: 75036 - DNA, 1214 bp, Zea Mays
aacagtgcatctgtcctgtgcgcttaacctactggtcgtgaagccccagacctacatcatcaaacgtggcaaaaccatcacaatttgtcaaattacagtttaacactttccctaaaaaacaaattgtgttgcaattgttttggattctggtgcaaaacactcaatcatttgtcacatcatcatcacatcacatttgaccgaagagactcctggctgcagtggaagactggttaggtttggcttgcgacttcattccctcctcaacaacatccctattgtttgatagtggaaaaaagaaaggattaatgagtagagcatcaaagtatggcaaagcatggccctgtccactctaatggaagccatgttctttggacaggaaatgatactacatgaaggcgctgagatattcttggttctctggtttaagattagccccttcataaaaggcaattgcagcttcaaaaaacctctgccacaattgcacatatcaccatctaaagataaacaagtgggggatgaattgctaatcaaatcagagctccaaaacccacaaacctgtagctcgtgcaatgccgcaccttccctgtagcaagctatccccgaatctggtctcaatgttcgagattgctttgcatcctccaaggcagtttcagccatcccaagcaacaaccagcaaaggctcttgtttgaccagagtgtggcattgctaggatccaagtcaatggcctgaaatgcatcgttatcccaatcatttagataatctgttaaacttttgatgctgagcgaaagaactttacataggattgtgctgaaccctctgaagtcaggtaaacttataactctcattattttgttttgctctacacagtagctatctatgtggaaaaaatgtttgattcatagttacctgtgtgtaagcatccaccgctccaatgtaattttcatttttataggcatcataacctctcaaattagcttccatcgaatccccttttgcgctagatgacacctgacaatatattatcagagttcattagttaaaaacaacagttacattgagtcttccattatttaagatgatgtaccatggttatctgccatataaaatctataacctaagatagtagaatccttgactcatcgaatgtatatatgatcatgacataccccagcagattgcggtccggctaaactggctgaattcagagatgtag

SEQ ID NO: 75037 - DNA, 297 bp, Zea Mays
ggagaggaagcaggggggagttaggtgtggatcagattctgagtcgacctcgcacacatacaagaacgagcatggatccatggcacattgcatctactcctccggcgagggagaagaacgggagggaggagagcagggaggaagaagggtaaaaggggcaatgttgatgtacgttacacacgtgggtgtagataatgactgaggacaattttttagatctagtaatagcagccaccatgtatcacgaattataatggcatatttagaatactcgaatttcataatgccatatatctg

SEQ ID NO: 75038 - DNA, 341 bp, Zea Mays
agttggtccaccttccactcatgacctacagacttctaggcctgcgactcactcataacctatcgagcctaggtctgagcgtgctggccatctaccgaccccgcaacacgatgagccgcgccgagacctaagctacggcggccaggggttgatgcgacacagaggcaacaatgatgatgctaggactctttgccgcccacgtcgcccgccataaaagtacaaccaagaaagcccagacgaccaaggcacgaacggacaaacacgactttactagggtaagatgtcccatttgaccatggcgcagtagctccttccttaggaagctactgatagccgacccc

SEQ ID NO: 75039 - DNA, 614 bp, Zea Mays
aaataatctacggattttaataagagactagtgtaagggaaaaaactacaaggatcaaatgaaatgacgtgctagatagatgaggccatttggattagtctcccattatttatagggctattacatattcccaacctatatatcactaggaaattagaggtataccacttaatactaaaggcgatatagtccaactcaaggtttgtagatctgacgcatcaacgcaagttttatggtgatgtcacatggtgcctctagttcccatcagaacttcacatgggttttgaggaccaaacccaaaaaccaatcgccagtggttttgaggcctagaccacttgtgagtagcgtacttcatatactcgcctcatgatcttgatgtcattgtttgtcctcgattgttcggtcaccaagttatcttccattaccaccatcgtcttaacttagtcaacatggtatactccccatatactattgcacttatcgatgccctcaaatgtcagccatcatggccagtcttctagcttctcccatcctctagtctaagcctcagaacccgtccttcacaccttttagtctattaacatgaacccactcgacattcatattcgtcgtcg

SEQ ID NO: 75040 - DNA, 497 bp, Zea Mays
agcagtggccactactttgacctctgcaatacgtgcttgtctgaaccacacacgttctgtatccattatcagctccattctagagactagagagctactgcctagtgccgtctgattaagaagcatcaggaagaaatatcattttttattgggaaaaagaaagctttattaaactcagtaaatttcaatccgaggataccatagactaagaagacctatggcctctacacagctagggtgtaaacaaccacactcacacacatacagaaaagaccagtcaaacctagctaaacatggcgaactacgtcatactccattgtcttcacaacagaccaccaacatagcaaaacttaggtcccggctaagactctccgaagacaatgccactccaaggagaacatgatacgcacacgcaccatcgttgtcgtggtcgaaccaccgaagaccagaccaaagactttcaccacagagagtcgatcattttccatcaatcagtg

SEQ ID NO: 75041 - DNA, 654 bp, Zea Mays
gtacaatggattcaacagtgacactctagggcactctgatgcatgggttaagtttgctggcgaattcgtggcgcgcacatttgctggggagcctcgtgtggcgaaatgcccatgtactaggtgtcgtaacctaatccgactggagaagtttgacctctccattcatatatacaaatatggctttaagccaaattatctgttgtggcgcgagcatggggagatggatgctcctctagagtcgaacacagatgaggacgtagaccgaatggaggacatgctagatgacatcaggcatgagtttccagcactggagaccgatcgaccccgccggaagtgcagcagttttacaagttgatagaagccacggatgcaaaggtgcacgagggcaccaacgtgaccgtatttcaggtcataacatgacttatggtgatgaagtccaagtacaacatctcaaataactgctacaatgatatcgtgaagcttattattgatgtcctcccgctgaaccataagatgccagagaacttgtatgaaagaagaggtcacgtttcttgctctagttattgcctactccgtactcgtgttagccggtgtttattattgcctacaatctccctcctaccaaatgcatgaaagaaaaggtcacgtttcttg

SEQ ID NO: 75042 - DNA, 636 bp, Zea Mays
cactgatactttactccctacccttcctaagttccttgtcttttaaacttgggtcctcgactccggccggcggcacgaatgaacctccctgccatgccacggcggtggagagcccaagcacccattagatactttccagacctaattctaacctaaaccgagcagctatgggcatggatgtagcctataaacccccagaacgatccaatcgcgcctatgacggggtctcggttccgcggcgtctgcccaaacaatacaagcactggagggttcaaattaaaggtacatggagtactagtaggacacggggcacacgattcttccatgaattgacatcggtccaacagagttttggtgggttgacactagagcagttcatgtggcgtcaaactcgtgttgcaatcaaactatgaaagtaaagaccaaacagattccttggtgagcttcaccagcctataaggacactagaacattgcttcttatgtgttgagccatactgtaatcgcctagccacgtgaggttgatgcatcggcgacgtggtcaccagacacgttgagtggcttgaccaaaggaattggtcgcgtctagggtatagtttggggaaaggaaagcaatagaactacgttgaagctacac

SEQ ID NO: 75043 - DNA, 432 bp, Zea Mays
aggttattggaagacacactagcagtattggcactaggatcgactccttacaaaaacagaaatcacgaaagacattaaggaggattgccttccacatccgaccatgacaccctaggaccaaacctcgtagcagcattagaagctacacctgtctttgttggcccgacattgatgactcccacacatgactccaacgtagcttctcctactctcgcaccacatgtaggagaagggtcatctatcaagcgtgttgtctagccttcggtgtcaaataactcaacttgcatgtttttgactattgcacgtctggtgctggcccgacattgatgactcccacacatgactccaacgtatcttctcctactctcgcaccacatgcaggagaagggtcatctatcgagcattttgtctagccttcagtgtcaaacaact

SEQ ID NO: 75044 - DNA, 352 bp, Zea Mays
ccgacatctgcgcacgccaaatgcgcaagagcgcccaagacgacgatgttggtgcaaagaaccgtgttattttcgccacacacagggtggatatggtgaagcgagtgccatgtgaagacggtagagcgtgcgatcgagatggaggctgcggcgtctgtcgtcgaatctgagatcaagtccagttatgaccggaggatccccaagattaccgggcccgcgacagccagagatctgtgcccgcgatgataggagatccatgcccacctccttgttgattgtttcctcctcgagatagagcgtaacattgccgcctctgtcctcgactatttcaagaaggtctatggccacaccg

SEQ ID NO: 75045 - DNA, 620 bp, Zea Mays
aagaaatactctaatatttaattctttgttttctattggtaactcgtatcttgatgtgttaatttttattgcagtgctttgtgcaatcatgccatggagaaaggaaccatctggtagtgaaaaagggaaaaagagaaaacgggtggatgatttcattgaatcacagagaggagcaatggataaatttgtaaagagtaattctagtgcatcgatgaatccaaacaatgaattggcaatagttgtggaggaagaggaaccaggtattgagatttctgaagaagagggaaatgttgacaccaacaacttcgatgataacaatgtaagtggcgctgaaaatcccaataattcatcagaagcacggacacaacctactagtgttgatgaggagccggtttatacttatgatatctatgatcctagaaattgggatcttcttgataataaagcaatagatatattagttgagaaagggcctataagagagcaaggtattgagtttcctctagatgatgcctcaagacatttctcatatactcattattatagaaaattaagcaatggagaggtacatgatagaaaatggttagtttattcaaagcatgttgacaaagttttttgct

SEQ ID NO: 75046 - DNA, 771 bp, Zea Mays
gaattgctcaccgacatgggatcagcgccgccatgccgcatcgcaccgtttgcagggtagttgctcctagggaccggtaagaccttctctgcatcctccgctttgtccttctcgttgcgtagcacccattgttttgtggattagggcattagagcgtcggttgtggcctcgctgacgggtagcaccgccgctgtgttggatggaggtgagggggtgatgcgacgaccgctgattagaaaacagacggtggtgattagatgtggaaataacccttcaatgcattgaatctgggccgtcgatcgcctgatgcatggattatatgacgtggtcagatccgtgtcgtctggttctgcgggcacatcctaggttggatggtgtaacacatctttgggtatttgaatccgggccgttgatcagatctcagacgtgtgaggttagttcgagggactttagaatctcgggtgtccactcgtgatctggcggtcaggattgcgtaccaattctttatcatgtgagatctatccgaccctttggatcgagatcgcacggtcctggttctcaaatacccctttgccgagccatattcataaaagagaccctgggtttaattagaactaacccgccgtcctcagccaatgttaaataattacatccgcacccaagcttttgcatagagaaccctagactccctggtatttgtctccgcaatccagaatcattaggaaaattcagaactaaatcagaaaatgatttctagtataaaaataattc

SEQ ID NO: 75047 - DNA, 515 bp, Zea Mays
ctgaactaaaattaattaagagtttaaatcaattgtgaagaaacatttggattatgatccattatcactcctaagtgcggatgtttttagggacttatattgttaagtgtgatagaacacgaggagtcttaggagcttacactgcttggtgcttcaggacgcgaggggcttcgaggtttgtaccgttaggtttataggatagtagaggcccccacttacactgttggatgcctcagggcacaaccacatccataaacaatgatatcgtagcttatataagaacaagcacatctaagctctagccttagatctatgatttaatgtgtgatagacgaaaagatttttcaacctcagtttaaaattctcataatggactaaactcagaacctaagttatgttattaaggccctgtttgtttcagtttttttcagcttctggccatcaaaagctattgcgaattgtcaaatactcatcttttcagctcgcttttataagattcgatttggtaaaaatta

SEQ ID NO: 75048 - DNA, 516 bp, Zea Mays
tgaagtcaacttataacagtaatggtagcaaattgtctgaaaagaatctagactgaaagctcgtagtatgaaggtggggggaatccatccataaagcacatccaacattgagaaattgggccctttctttcagatacattgaaattcttttgaaatacacgagatatttggcatgagatatatagacaaaacaaaacactgtaaggttcgtgatacattcatttggatgtcttaatgagtattccaattatgccatgggccccagattcatagtaattcattttatgatgccttctctgctgaaggagggagttctcccaggaaagtaaggtcaaaccaggcctattgtattgtccttccgcagaaggccaaataatttcgcctacatgatccacgtttgcatattggtttagattgtcggggcagtcatggtgaccagcggcggatccaggattggatcaaaggaggtgctataagttaaagcatgtttggcggagccaccagtggctattttgg

SEQ ID NO: 75049 - DNA, 1425 bp, Zea Mays
agccgatcatgtcactgacagagctaagaaagtcgacttcatccaggagattatattccggcttggggtactaaatagcatcatcaccgacctaggatccaaattcataggggtagactttttttacttctgtgagcaaaagtgcattataatcacgtatgctttagtagctcatctaagaggcaatggtcaagtagaacgagcaaatggaatgatcctaaagacattgaggaagaaagtttttgacaagaatgaaaagctccctagaaagtggatcagagaactaccatacattgtatggagccttggaactcagcccagccgggcactgcaaggtaacactccattattcatggtgtatggatcaaaagcagtgttacttatggatttagcatttggggcgtcatgctaaggttcaaggatgtagcagaagcaactcggcctgaagaaatcgacacactgcaggaagaacaactaaacacgatgatccagtcggctagatatcagcaaaccatgaggtgctaccacgacagggcaattcatttctaggtgttctcaatcagcgacatggtgctttgacgaatactatcaagagaaatatgtcataagctatcatcgccaggttcctaccagctatctcaaatggatggtactttgatcgggaactcatgaaacattgaacatatctaaaagttctacccttagcagtgccatagattctaaatggcaaactattgcattttcctcgttcaaatacttagttacattcttcatactactttgttgtacctataactaccaccaacaaagcaatcagcttaagttgggatccgactaagtcgttgttagatgctcagacatatagaaaagggtgattactaaaccccgccaacagagcaatcaccttaagtcgcgattggacttaagtcggtgttacatgctcacacatatagaaaagggtgattactaaacccctgccaacaaagcgatcgacttaagtcaagatccgagttaagttggtgctacatgctcatgtataaagaagaggttaattactaaaccccgccaaagaagcaatcgacttaagttgggacccgacgtaagtcagtgctacatgctctctcacagagaacaaaacagaatcctaggttccttgaaattcgatgcttgcatcacggagagggccagtattcaacaaacactaaaaaatacaatacaactaggagctataaagttcaacctaacacatagccaagcagcgccaccctttacaataccctgacctatcttgggaagaagctcctgcatcaagttctgacatcaaagtaatggccatggtaatatcatcagggacagtaacatcagacttctttacaagcagtcgagctatacataccaccttatccattactttgtcataagcag

SEQ ID NO: 75050 - DNA, 595 bp, Zea Mays
ttcggcgacaaggacaggaagaggaaggctggcagttggttgagagcaggagaagacatcgttttgctgtgccacttcctcgtcgagggtcccaggtggatcttcgaggcaagtgctacaactgtctttctgccccccatcttgtcgtagcctttcgtagcccaacgcagtgtttccggtgcttcaagcctggccaccaggcgacatggtgcaccacccttcctgagtggaagtcagtgtgatagcggctgagtcatcaagggtcgtgccctccgttgtggcaacggttgtcggtgcagaggggacccgggcttcaggaggaaggtaccccatggctcagcacaaggaatcggtatgggtaagaatcactctgccattagaagctctgatgaaggattctaatgaggcattcgactctcagcgctacctccgcaacaagaggaaaaggagaagatcgaagaaaggaaaggaacgctctgtcgtcggcaccagtgcgagacatgagtctcccatcccacctgatgatgctgatgccaaccgctctccgaaggtgcaatgctggccgtgggacttccagccgttgccagatgcttca

SEQ ID NO: 75051 - DNA, 419 bp, Zea Mays
ttaagttattactataggatataaattggatagaaatggaaaaaattgtaaaccattttgatttgttttggatttacccactcaattcacctcaatccacatagattgagatgagaacgaataagccgttatgaagtttggcaaatgcacatttactcttacatattgtcggtacctaggaacagggtatccatggcgatgcccatagacctctttctggctcgttcaccgagaaagcctactagacggcccgtacgaccaagtccccgtcgagcaagtctatgaggcgagccgcacgaccaagtccccgtcgagcaagtctacaagacggtcaaacgacttgctcggtgaggcgaacgaccaagtccccgccgagagagtctgcggggcgggcgaacgactgagcgcccgacaagcgg

SEQ ID NO: 75052 - DNA, 480 bp, Zea Mays
ctcacttcggcccatctccagttctcagtgtggcccagctgaaaaatggcaccgacgcctggggcccactagccagtcacctaatcctgtgccgtgtgaatcccaactgaaataccgggccaccagtcaggttctagccacacgcgtgcttgactcgagtgtcactgccgggtgggacctcatccctgctcatcttctatccgcgctatgagttcgacgaactccgagatcccagttggactctgcctccttcattagcgcatggaaatcgcaacggccccgaggaatcgcaccggcagcgcgattggggcgggtcgttggtggctgaaaacgggtataaagcttttgcctccctctgtcgttgctccccttcccattgtgcttaaccaccgtgagatcggagtaccgcgccgccgcggagaacttcgttgccagcactgtaccaccttcggagtgtagcctggatagtctctgtgacgc

SEQ ID NO: 75053 - DNA, 814 bp, Zea Mays
tttgtcaaaattcaaaatattaaatttatagagttttctataccaaacaagttttatgtagatatttttaagttttataggaaagagtagaggaaaatttagaaaatggttgtgagccagggttatgacttctgatggaattatgagctagtttggcttggaccttgataaccttgaatctattcatggattgaggttggttactacaacaaacctgtagagttacactaggtgtgcaaaatggattaactcacccaaccctaagtccatatggaactagtagaaaaatttgtctcaaagaccgtatcctcaaatctgaaatctcagacttagtacagttcagattttaaaaaaaatgtatgattggtctaactttggggcccttttgtggatgatcagtggagtattgggccatacttgttatagaataattgtagattatctatcagggctcaagtttgtttaaaggtgattggttgagtaatacataaagggtggagttaatgacacctaaagatgggctgtcagacgcttggaatttttcagatagggaataatgaacatatctgaattctagtgtttggcttaactttggaactatatggtgtctgttctggacagttttggactgggacctttatagaaaagttgaagagtagatattggtgtacaagtttgcttaacaatgattaacttggtaccattgcaaaataagtagtaaaatacccttaaagttgccttggcagtctgcaagtctgggtttagtttcagtaaactgaaactatggtccctgtgtgatgtgcctcactttggg

SEQ ID NO: 75054 - DNA, 648 bp, Zea Mays
gtccactggaaccagaactgatgaagcttttacagaagaagaagaagtcttcggctgccgagaagcttgctgaaccaaaaaagcgaagaattagtcattgaggctattgaagagacaccgccatcgacctcagcgtcgaaaacagtagcaaccgaagctgctcctgccgaaacttttacttctgaagctgcagcagctgaagccacagatttggaaaacacactcattgatattgatgaaatgattttgaatatggctgaggaagaaactgctgcagtcgctgaggaaaccccgcccacagtgcctgaaaagggggagaagatgcctggaaaagagagggagcctgccgaagatactttggaagaagaaaatttcatctttcaaaacataattgggcaagaattgtcaaaggctgaaaaagaagaggtgaaggagtatgtcatattttgcgggtaccagccaggggcactgctcttcggtggtgttgccgaagagagtttaggatgccttcaggaccgagttgggggcgaaggttgacaccactttatcgaaagtgtgtttcccgaagctcgaaactgatctcagcagataccgacgatagcacatcgccggtagcctgttctattctaactttaaggtaaaattctt

SEQ ID NO: 75055 - DNA, 664 bp, Zea Mays
caagatccacggtccaaaatctctcccttgcattaaatcgttctagcctttggatttcaatctacggccaatacaacccctcttacctcaatccttcatcgcggatccaacggtcctcccccatcttcttcacgcgaggcaccaggcaactgtgttgtggctgttcccagctcgcgacggtgtccgccggccaggagcccgagcagccccggtgatctccaccctgcccgatccgcagtcgcccctggctctacggcgaagtctccgctggcgagcaacgaaccgaggccattcctccctacttcatgcacctgaggaagatctgcacagggtgttcttactctctctccctcaccgctctgctcaatggaggtgctcgggtctgatggagggggaaggaggggtggaggcgcatatatactcctatagaacccagcgatggccgaggaaatcggagtccgttgtggagtttgctgtggagtttgttggccgagagctcgggtgtcaatggagtctttcagccgcgccgttgaatccgcagtattcggccagaggagatctcggccctctttgttgctgcagattccgaaccgaacgggtcccacctgcagaccataatggacgtgcgcgcacgtgcgagatcgcagatcggcctagtgtggag

SEQ ID NO: 75056 - DNA, 670 bp, Zea Mays
agcaccgtccgccattactgtgttcactgagcattgcattgacgcaagaatcaccacgggcgtctgacagattggtgtctcggtcgattcggatacgctggtgatcgctggtgtgtggcggagttggtaccgacaagcaatcgtgcggtggacaacgacggcattgtgaatctctcgccggagtggtactccgccccggttccgcctcgccccgtcgctcgcctatcccaattgctctaattccggtaagaacaccctcggtatggttcacctactcttcttctctacaaattatacgatagtcgataattgggggtggaatttccgaactgtggatgatggtcggccatggtgggttcggcgccgtccgccgtcatgggcagaacactctgctccatcaatcaccatagaagagaaccgagctaagtcacccttgtggtctcactctgaatcaccatgcgcggggtggaactagaactcggatcgctgggccgcttttgcgccggcgatgcgccgctgcactcagctactggaatttgggggaaaagggtgatcgtcgatctactgatgagcggctacgattgagccttagtggtaccgatttgggcataggatctgggccgttgcgatccgatcgtgcgaatcggagtgattccgctgcatgtttggt

SEQ ID NO: 75057 - DNA, 399 bp, Zea Mays
ttccaaaacctacaaataaaagtaacagcacgatggctgacattcacacatatatcaacggcacgataaccgacaatcacatttaatcgacatccatatccaccatcacattatatagaaactattttactatcgccacacaatcatatctaatcggcatacaactaaaactaggaccccctacacaatcatatctatcgccacacaaacattatatagaaactttctacgtactgcgctactgtgctactatcgcttttattgtgaagtggaactacttatgtatatcaacaaaaaatacatcatagtttggctcaatcaaaacaataataattcatccgtcaaaacaatcatagttggctcaatcaaaacaataataattcatagacctatctttag

SEQ ID NO: 75058 - DNA, 829 bp, Zea Mays
tcgcaaagggtcttccctgattcgattgaaagaggaggcaatcttgaataccatgtaagggtcgggccttcgaggcgatgatgaatgatttggccatggtgtggtcgtccccctaaggatgcgacaatagactgataggtcattatatagtgagtagggtctatgctaccgttgtactacgatttcctactatagtgttattgttttctcctcctctttcatgatcagttgtctcattatggcatgcatggtggttctctgcttctttgctgtgatgacttctctctatttctaaagatggttgtttctaaggcggtggcaatgcagtgtcagttggtcttctgctgaaatctcgaggtcctcgccttcttctaggtctttcatcctcatgtgttatggggtgtcccatgggtgcgaactcgggtggtgggacatcacttggtagctgtctttcgaagctgctagtgtcaatgctaccttgtggcgtgggcgggtgttcggtgtgagggtgcttgatgctttctgcttcagttctattgttctcacctgcggggacaaggtgttgtcgacgaaggtaattttgcatttcttggcagtgagggctgccttcacgatcttgcccgtgggggagttggccctagtggttgctttcttaggagccatctcgagagttggtctttggagcacagacggtggacgccaaatgttaggcttcgacaggtggaaccaagcactcagagacaaaaggggagctccgcgcatgataaaatgttaggtggggaactgtagcgtcttgttatgcgtgtcctgtttagctacatgatggggg

SEQ ID NO: 75059 - DNA, 295 bp, Zea Mays
gttggttctacgtccacggggtagtatatgtgatgatgacaccttagtgtagacatcgtcaaagaagttacagaaaagctaaaatttgtccctgacagagagagaacgacgagcttattgtagcactaaacgtagcagagcattctaaccataaaagaggatatgggagtacgccatggaagtttagatttgtggatagcattcatacctacacaagtcatcaaagaggaaaagacaaggaggtggtagagtcaaaatctagaggaagaacttgccaggaccaaagcatatattc

SEQ ID NO: 75060 - DNA, 1875 bp, Zea Mays
tcgtttcttcataacgatcttagatcgcaaaataaaagaaattgtgaggccttgtgccgaaggtccaaaaaacaccttcccaaagctcgttatgaatcattgtactattatccccctgactgatggggtctagatttaggcgagtacaacgtttagattttaaaaatctaccggtataaaaggaggcgacacccggtagattcagcacaacatttgctgctttgcacctgctactattatagcttgctctgccttcgaagcttgctttgaatgttttttcaccttcaaactagccttagcgagtcgcaagatacatttttcattagaaatggccggagaacagtctagtgctgatgtgtccttggcaccttcgtcaggtgcttaggagacgaaggttgagaacttgcctacaacagtagaggctaccgcctctcaagccaaagctggcgctgtgaatccatctgaggatagcgatgacattgatattgaagaagacagcactaccattcgtcctacgaagccaagtcacgtgaacttcagcaaatcaaaaatcaaaggagaacacattgaggtactgctttggctatattgataatgtcgattgggtgcggctaggaggcgatgatttagtgttgaagccaaaagagggcgaagttgtcatgtttcaaagttttctaaagattgggcttagatttcctttggataagacattagttgtagttttgaaaaggtttaacatataccttcaccagcttacaccaaacgccatagtgcgtttaggcatttttatttgggttatgtagagtcagggtattgagcttgatgttgaagctttctgcgaggcctttaaccaaattcatgaattacactttcagacgaaggcaactaggggccttcaaaacaacttcggctgctataactttgcttatcggaggggtgcaatgttcctggttcctgcataccgaagcaaatggctgaatgagtgggcgagagtggttttatatgaagaatggtttgaatgagcgaactgataaaaggaatcacccagcctcctattatcacatgctttggttataaaaaaccaacatgctatatcaacttcaaagcttaggctgctataattgctttcaatgttgtttgtacacacattggaacaagacatcatgttcaggagtttttagtatttaaaacatggccactaggggttgaatgggagatgtcggagatgtttgaaaaagatgcttcggacgcggagcctaggttgatcagacttcgctacaaatataagtttgaagacaagtttggggagcctagtgacagatggttagattatgttgaggcaaaatgcaatgaaatacttggtaattatagcaaaccagaggccgaagctttgcaacaggctttcatgactcagaaaaaacccccgactaaatcacgtttttgatgctattggctttttctatcctaactatcacaacatgtttcaggattggaagaaaagaaaaaggaaagtgaccacgaagcggagcaaggtttcaaagatacaggctgaatcgacacctcaagctttggaggaaattctggtacaaagggtcttctgaaatctattatcacttataaacttgttgtgttaatctcttactattttttatcattttcaggttgtgcccaaagtttaggtgtcggttacgcctgaggaaattcctcttgtagaaaccgaagagatgaagattgaagatgctatcgctctaatagtcattcctttgaagctgctttcagaaaagtgaggaatacaaagaggaagagcggatagcttcagtaatgagctcattctttgatattgacaaaggggagtatgaggaaaaagatactgcc

SEQ ID NO: 75061 - DNA, 302 bp, Zea Mays
ccgaaggagtaaacttctcagcgctggccccaactgagttagaaacctttttcagtcgctgtatgcaacagctgcaaaattccagacatatgttccgaagctcttccaaagattgtttcagcttcgtattttcagcagcttcagcttcatattttgattgcaagtttttcctttcctgctcgaagctctctgatttttgcaggagttccttgtttaatctaatattcttggactgcgcttctgcaagggaaccttccactgcttagattaggacatctttcttttcaagagaggcttcgtat

SEQ ID NO: 75062 - DNA, 606 bp, Zea Mays
ggccagcgtgctacaggtccgttcatgtccgctgctctcttgtttcacaacccttatgtgcccttgatgcttctcaacccgaccgattgagctagaacccattagatccccgggaacgcattagattgtccgttattcacacggtcaccgtgggcagagaggttgggagctcgaaccatgcaattgatcgaggggaaacatttgttagatgttgaattaggtatcaaccattttagagcacctgctattgcgtgtcttggccagtacaggctcgccggagctcggtctgccgccgtgctgcgtcgtggaccaagagctgtgaagaaatagaaatccagggggtttttgtagctgtcagtgaaacgcaggaatagtgtcgtgaccccttttcaagttattcaaatcgccaaggtcctctgcgcaaaattaacgacgcgggcacgggcgcacgcgtgttctcccttctgtaggctgacttgggctgatttgagcccaacactgttcattagtttctctttttcttttctgccaggattagagaattcctagaaaattgtagaaaaatgctaaaaatatgggaccaattttgtttaactcctcaattcc

SEQ ID NO: 75063 - DNA, 529 bp, Zea Mays
ttacatgtgcgcgtgagtagcttcactgtcactcatagcactggtaataccctctttcttgtaatcaccacagtcgtatcgtcgtgtagcgctaatcagggttcaatatgggctatcggcgtgccagtttggccagacttcggcgaggaccgccgctgacagtcgtacaccgccaccgttaccgggagaagggaggagaaagcagcacagtcgctagatcctgaaccaatggtcaggattagatcacgaatgtcatttcgtagtattaaattaggaccatgaaatgggaatccaaaggttcatagcgtggtcaattttgggcagtggatctctgatccaagggctcatattgcataccgattcatttgctcacagggtctaaccctagccggttgtcatcaatctgatggtcagggttggccgataccccttcggccatgcaatcttgcaaagatgcatttaaagcttttatgaattgacccaccatcctacctaatataaagacctttactgataagtgtcacacccg

SEQ ID NO: 75064 - DNA, 500 bp, Zea Mays
tcttgatgggccacccaaattcctcccaatgggcctctgtcagacgggagaagttggagtccgagaaagatgcaagtgcacgtatgagagaaacccgtcgcctcctgtacgtgtagtgcgcggtaatcggtggacgactcgtttgaccgtagcccagcgcgacgggaaacgaaacaagaggaatgtgaagatcatgggctcgtgtagtttctctgtaaccccattcagtctgcaataaggctggaagggggaccctatgaaaatgagggagagagaccccatagaattcatcttcttccacgagacagttcctgcattccagagaactcaattgcacacacacagaatccaaaggacttagggtattatgccatcgcatgacccaaacctgaacaatcactcgtgtccccgacgtgctttgcacgtaccatcgagttgcaatcgtcgccgccttccttaaaaaacgtatgcggccacccccatagcttgttactagtact

SEQ ID NO: 75065 - DNA, 281 bp, Zea Mays
gtcgatttcaagaggtctacaaactcttccccaagccactaaacagtgtcctcctctgacatctttccttccacgccagagaaatccttttctgatcttgtcaatagctttgagcgagcctatgggtatgtcgactgccatggctaaatagataagcatgacggtcatcacatactgaacctgcactcttctgccagcccttatcattagatccgctttccatctagaaagttgatcagccactttgttaataatgggttgcacctaatttttggacaaat

SEQ ID NO: 75066 - DNA, 453 bp, Zea Mays
atttgattgatcgacacccggtacttgagaatcggttggagcagattacaagacgacttggtagatctcgatgaatgatctagagactcgacggatatgatcacaacatgattcaccagaaaaataattgccagattcggacgaaggagaggtaggaaaacaagatctgctaggatgagcaacagaaaggctatgaagattcggataggatctatggaaagaaacatggccttgatagggttcgtgcaactagaaaccaacaacaatttttttgacacaacaagtgcacaaggagacttgggttggtctagcggtcaagctgtgggggtctataagctgtgcaggtgtaacttcaagggtaaaacacgcaagggttcgaaaaacactaacacaagcatgtgttttttattataatggtttcactagggaaccactagattgtttggagtaggg

SEQ ID NO: 75067 - DNA, 642 bp, Zea Mays
gtgcaagttagaaatcttttattcctagcttcccatcacatgaggctagcagtgagatgtttgtgcctaacccatcaactaaaaatgggccctcacaagccaagtcattatatggtatgccaatgaattcatatccaggcaaaccaccgcctccacctttgccatacgatagacgaacgacctggagcatgacggatcatttgaccctaatgcacattgtccgacgcctcatgccagattgttcggtgttgtgcctagcccacaacatgataggttagcgatgcagagcatgactagatagtccatgcataaccatggaccattcaaccctatcgtagaccattcgacaccttacgctggagtgtccggcattgcactggactgtctgtccacctaggtcggattgttcacatacacatatctataattggctactatgcataacacctagtttccccatgcaccacagcaacaatacctctttccacctacatcacatcaaagccgcagcatgccaccaaccattcaagggaccgaatatttttcgacccctagggagcagagaggttcacctcacaccacacaacagagaggacagtcaccaatatgccatgagatcatgtatcgaatgccgcccttgtt

SEQ ID NO: 75068 - DNA, 641 bp, Zea Mays
ccaggagtacattcgacgcaggagcctccgtcggccctcgcggtcgtgcctacactcctcgtcggagggggttaggcttccagtgtcccaatcacttctccttcgtcgttgaaggggaagtcaagactcccaaaatggatcaccatttcgggaggtcggttgtcgtcgcagcttgccatctggagcttggatgatctcatcgcggaacacgcaagttccctccctggtgcgccaactatcggtgtttcgtaccttgcttcgacaagtaaatttattgtgtgcattctaggcttcagagggtgtgcacggagggagcaagatttatactggtttgggtagaacgtctctacatccagtcgtcagtggcttgcatgaccggcaccattgatgatcaaactagtagtaggggttataagcagttgagagagggaggagaggctcccagatcccttatctggggtggaagtggagcttagaagctataaggtggagtcctagctaagtattggcttagcgggccttcggcctcctggtcctcgcaggtgctcctcctcctgttcatccttgtgggctcgtctccgcctgaaggcgtttggtcatccctcactccgtccttccgttccttgattcgtcgatcttgc

SEQ ID NO: 75069 - DNA, 681 bp, Zea Mays
cgatgctccagctctaactatgtcgatttacaagttctctatgtaaccattctggatggccatcggaccagtccggtgagccactggtgctctgggtgaaaaaagcctgagtttgagtcctctgctcggacggtctggtgccactggatcggtctggtgcctctgtcaacatctcttttttttcttcctttgtccaaaacttcttcaaatatttttgactaactttgagggtgttcctatgactaagacaaacatatatagtgacattccaactagtataagtcatagttcttggatttttattctctgtaacttagaatcttgtatttgcttaaactagctccaaaagtgtgattttgcaaatctgagctagctaacctccttagatgtatcaaatagattcctaggcgtgtttagaacttttcgaaagtgtagaagttggtatagttcgtcttttccaagatttaccccttttggttggttctgagctatttctgacttacaactgtattgactggacttatgcacatgtgaatcaaatactagacaaactagttagtccataaggttgtgatggtcatcaagcaccaagataaattagataaaatagttaaacccattttccttttagttatcctttcacaaacaatttttcaacaggtatttactcccttctctcca

SEQ ID NO: 75070 - DNA, 984 bp, Zea Mays
tcatttgtggtgggtaaatattgggccaggcgaggaacccactcgagtggcttcctcttagttcgcttggccctcctctctggctttgccttgctcgaccacaggctcgatgcctcgggatttatataggggcaggcgcttttagggtatacgaatcccttaccctcctgctaaccagtggcccccagtagtccgaagactttttcctcgttactctctctgactagtgggccttaggagcccgtgcatcttttcttcgacacttgttgaccacatccttaggccacatccatcaaatcactggattactcccctccacgttattccatgtacagatgtaccccctaatgctccaacgactgtctctctctatcgaggaaaagatcactgggcctatagggcccactagtcagtagaaggacatgagaaaggtccactccagaagcacccaccttcgggtgatcctgatgcaccaagcctaagattaggagaggtgaggctagaagggggattgggcgaattgggagaacgtcactcgagtgggatagtcggtcctccttaagtgaccgaccacattaactgcatctggcaccgagccacactgagatagtcggtctccttccactcatgacctatggaccctaggcctacgacccactcatgacctaccgaccctaggcctgagcgcacttgtcgtctatagaacccacaacacgacgagccacgaacccgagaccagagggcttgaaggactacaaagaacagagccaagcagcatgctaccacgccgccctaggcttagctaggttgagagcaccaggttcatggtcatttggtcatttctcgtttaagagacttggaagcttcctccctctctcactcgcttgtaacccctactacgagaattgagcaacaaggtgccggtagcgcgagccaccgaagactggatgtagggacggtctaccgaactagtataaatctcat

SEQ ID NO: 75071 - DNA, 617 bp, Zea Mays
cgcaacatccataagaacaacattatcagtattaagaacagaaaatggattataagatgtacctttgttgatgaacgcgtctttagccattgctctcgctgtagccttatctgcaatcttcatctcatcgttggactccagcctgctgcttcttcagacaccttctacaagctccccttccatggaccctcctttcttaaccccagcttctttgccagcatcttcagaatgagtagcacttatactcatttttcctttctcttgagaaggggaaagaataagttcttcatctttgatgaattctttcagatcttgggaatccaaaagatcatcctcactttcattaaaatcatcttcctcattacccagattgtctagataccctttgtcaccttcggaatttttcccagccttcagtccttttgactgttcagtctggaaaccagaatcattaccatgcgctaagggatcctccatggtagcttttcccttatcatccatgccagttttttcaccaccacttttggcctttttaccagatttctccaaagaaggatcaccaaacccctgtctatcaaccgaagccctcttgcccagatttatggagtcatcattcc

SEQ ID NO: 75072 - DNA, 336 bp, Zea Mays
cccgatttatatatagtttcttgtgaaatccttcgtgcaatccttccatttcatccctaaattacttggctacgccagtacattcttctcttgaatttttccttttgctcttggacgaaatattttcgattccatctctcttcgtgccttgaacttttccctcatgcatgacatgcccaatccagctacaaattaatggcgaggagctatgaaacgcacggaacatatatgcctcaacaggcaattaaacctctggcacgcacttaaattggttatattaatttcaactcgcttgtgcaacggtacaaacagatgatgttgagttgtttaatttcc

SEQ ID NO: 75073 - DNA, 672 bp, Zea Mays
gcgacagttaaatgatctgaagatggacaagaaccagaatcttgcatatgcttcatatattatggctctgattaaagccaaaaccagattcgaagggcggtgtgaaactgctcacactccgttcaggccattcaaaaataaaattggttttcttactaggcctctcacctcgtttcctgatgatgagggagcgtagggagatgcttttgatgatcagcctgaagcgcatcccgctcagcaaatgccaccacctccacctccatagcagtaaggacaatactggcagcctgcacctggctattttgatccctatattcaacaaatgcatcaagggctctagactcatattgatggtcagtttcaaggcatgatgtcacatgttgatgaccggtttgatcacatgcaatccacatttgatggccaattctctgatttgcctaatcgatttactgttgttgacactcagctggatggggttcatacacagttcaacgatcttcgttctcatattcaatctactgtgcatgatccaattatgagcagaatgaacaacatgtaacaaatatttcaagataatatgggtgccttgtccagccaatttgaatttatgtctaccagtgacaacattcactcactggatgaaagacaacaacagtttcagaatgatttcag

SEQ ID NO: 75074 - DNA, 344 bp, Zea Mays
gccaggaataagctctatggcaaactcaacttttcgctcaggtggcatacctagtaagtctttagggaacacatctgaaaattctgacacaaccttgatagtctcgggtggatctgcctccttgctatcaatagccatctggtgacaacctcctttccttggctcggttgagactagcttagtcaccacttcttctcctagtggggacaccaacttaactatcctcttatcacagctgataactgcttggtacttatctagccaatttatccctaggataacatctattccctgagtacccattactatgaggttagcggggaactctatcccccttatttcca

SEQ ID NO: 75075 - DNA, 569 bp, Zea Mays
tcgccaaattcaggcactatggccggttcaatatatcgcggccggtgggtcagaaccttcattttcttgcctttcagcataacagtggtgaccgaagcgacactttttctcttcttcccttgccttcgcagcgggtagtgatagtcagggtatacgaagccaattgcatcaaatactctgttcaatcttttcttcccccggcccccgaaggctgcggacaaggcatcatcttcggccttggaatatgtcccaagcagctcgtcactggtagcttcaatacatttcaaccagtcatcatttggtttgtcaaacttctctttaaacttgaaggtatatttcaatcaaaccaggccaccttcactggagtcgacagtagtttccttcggcatatcctagctctccacaagtggccataccctgaaggatatgtgatcttgaattaaatccctcgtgccaatgaaggtgcaaacagtactaaaggccttctggcatgcttcaacatcgctatcaatatccaccttcggccttcggaggccgaagcgagaccagatggggcgctagataatttc

SEQ ID NO: 75076 - DNA, 757 bp, Zea Mays
agtcatccatcaaacagagtcagattgatgccatgaagggaagatattttcgtgacatgtctattgtgagagttggggggggggggacatcgccgcccctgcacccgaggaagatgaagttgttgtttacaggagcttcatgaaggaaggtcttcggtccccattgagcaaatttttggttgaagtatagaagacatttgagatctttcttcatcagattactcccgaagctataatcaggatgggtatttttgtttgggtcgtgagaagccaagggctagaaccaagcacaaagtgcttctataacatgcacgagctactgtacgagatgaaggccactggaaaggagcaatatcacaacaatttcggttgttatggcttcgttcctcgttctgatgtaagttacccagttccaacatttcgaaaaaggtggtccggggcctggatggaggaatggttttatgttaagaataatctgattgaaagagaggacataaaggggattatccaatgccctatatggtctcgcttcggcctcagaaggccggctactatgcttgggaatgataccgaagcatgccagaaggctttcaacaatgtttgcgccttcattggcacaagagacctagttcaggagcacatagcctacagagtgtggccacttgtgaatgactgggagatgccgaaggagactgctgacgggtccagtcaaggtggtttggtttacttgaaatacaccttcatatatagagaccag

SEQ ID NO: 75077 - DNA, 663 bp, Zea Mays
gtaagcgctagccagacatgctcaggaacatagcctcaaaccatcgctggaagaatctgttcaatccatatgtgtaagtcatgactcttcatccttaagactcgcagagtagataagttcaccccactactcaggttagctgcatatacatcagagaacataaacatcttgatccactgtagtacttccttcctctaggccctgcttaagacgaaatcggccttaggccttctccatgtctttccaccactaggcgacttcatctcttattttggtctatcacataacgttgctagatccactcttgcctttacattatcctttgacttattagtaatgcccataattgttgcccatagtgcctcaacgatattctttttagtgtgcatcacgtcaatgttgtgtggaaggagaaggtcgtcataataggggagccgagtcaagccctacttatgtgtccacatatgctgctcaccatatcccacaaaaccacctgctggattggacacgagcccctctatctattgacgaatttcagcaccagtcatcgttccaagtgggcggtctgtcactacgacaccttccataaagttcttgatgtataggcggaatggatgatcgggagggagaaattgtcgatgtttatcgaacaatgaatatttg

SEQ ID NO: 75078 - DNA, 841 bp, Zea Mays
acctatccatcaattactcaatgtttattgcaggtctgtctctagctccgccataatcttcatcctccatttcttcggctgtatttgttccgcctgcacactggccaaagtgaagcactctaagggcggcttgtttgttttgctctctgtccactgggattgggtgagtttcggtcccaaacaagtaaaaatctttcatatttttttttctaatatcatctaatacgtatggtacaggaataaccgaaccatacctaagttggaccgacaaactaatggcagctcatattatagcttaatgaatcaattaactgaatattaaaccgatcgagctgatggcagcgaggatactaattgaggtcaactgtttgatgagttaatgcatttcgtattttctaacgacttaaaagctttcatgtacgagttcatgctatttttttatatcattaatcctaggcttgtacagaagactgaaatggtgtagtgggatacatggtcgatcccttcgcctacgatctggtaattatggtggcgggtgagagtgaatgattaccggtggcaacgatcgatcgatcggattttacctgctgcatccattccattgcatgtggagcccctatcgatttgtctcgattggggttgcacgccggatgctggaacgcagaatgctctagttgattgtgctgctgcgtccgtaggatccaacactgatcattcgtgcgtgcttcgtactggtgagtgttttatagtcagcatgcatgccatgcactgcgacgcgacactaatcatgcctgcatgcttggtcaatcgatcacgtacacgtactagccgtttaacacct

SEQ ID NO: 75079 - DNA, 635 bp, Zea Mays
gcttcttccgctggatctcttggtgatccttctccatcactattgacacaatagcaccaatatttctcttgtaaggaaagattttcagctcacgagccaaacgagacgtaaaatagtcatcgtcggtggcctggggtatagggtccttcctatgccatcgaccccggtaaccttcagcatgcgcaaagatgtttctcggagctcaggtgaagtcataacctcctcgggcccagcgcacgtctccatcaactcctcaacaaaaagcctagaggccttcgaccccatcttttcccctccgtaccttgcacatctattttcctttgtcaagtagctgcgaccacagcctttcgttttgaggtaccctcttcagaccgggttttcacctgttttcctcagtcatccccggcatcagcagagtccccctccgggtaaggaccatagggcaagctattcagtttaaaaacccggttcaacctgacattggaaccacggatatcccaactcctcaacatcccagtcttcggcacatattttccaacaatcttaattgcttatgaccccacctcccgcatgaaggcggtcgcgtcccgtcctcgcaaatcaatggtgaaggctgggctctgcaccctttgatc

SEQ ID NO: 75080 - DNA, 873 bp, Zea Mays
gagaaatagagaccttatgtgtaaacctgtaagctagtctcatgcacctttagatgacgatccaatatccatgattggacgagttcgtgatagaggaaattaagtgttaaatgtgaccgtccgtgtacaattggaccgtgatctaaaggtcaggaggcttgcttgcgttaaagtctatttgcacacagtattcgttcctaataaaaaacaggagtatctcgttttgctgcatggaaagatataatagcctctgcttgagtgcttgactgaatcaccggcaacacgccaaaaagccgcggtgacctaaattatcgctgtttgattcaaaatgactaatcgatgcactgagatatcttttgacgtgagaaaatgaaagggaaggttgccaacaagctagtgggctacttcgacagctgctgcgtgctagtagcctgcatgctagcagcagctagcaccaccgtcgcccgtagtgaactcactcgcggacggaatgggcgtgggattcggtcgaatcgttagctcgttttgtttctatctctcgtgaccgatgctgcggagctttcgtcaggtacatggagtcatggagaaggggaacgatcacgcgggcatctctgaaacatggtagggtaattagagcaggacgtaatgctcgttggcttcgttcgatttgtggtgagctcggctcggctcgttagaatgttttttcacgagctgataaatatttacataaaaattgataaatatattatacgtatggtttatgagttaaactaatgatcaatgaattgtgtctacgtgttaaattgttctatatgaatataatggtataggtgatgaatatgtatgtgaattgtgaattgatgagtgataagt

SEQ ID NO: 75081 - DNA, 625 bp, Zea Mays
cgggaagttggacgaggcgatcgcagcattcgaggagcttgcgcgggaggaccccgccgactatcgccctctgttctgccagggcgtgctgtacctcgcccttggaagggaggcggaatcagagtccatgctcgagcgatgccgcgaggtcggcggcgacgcgctaatcatagatccgtcagtgatgataacgccgaacgtggagacggaattcgatggggagaagccggagccggcgaaggtttgacctgtaactctgcagcggatgatctcataataaggtaacactggcattttggtaaccatagacgaataagaatgagggaaatttcagaacatgttccggtgatactaattagctagaggaaaatttgacacggaaagttccttattctgtagaatgtgcctttgtggtgagtaaagatgtccatttcatatggcctttgtgatgagtatgtctgcattgaaaagttagtgctttcattcttgataatggacacttcgatttgattcatattcacatccattgaatctttatattcggttcttgtatactcaaatgtttcatctgatggttatttgttgtttcagtttcatgtgaatttgattgaaatttaataaaaac

SEQ ID NO: 75082 - DNA, 447 bp, Zea Mays
tgatcgcggaccgtccggccgtgctcaagtgccaaacatagtgctcaacaatagtcctaccctccaagcacgagcgccttgaagcctaggtggctccacgcccttgggtcttgtttggttcacacctggccttggagtgcaaggccaggcatgttgatccgatcgccaggcgctcaaaatcaactgcctaggaaaatgcgtggcctaggcaagtttgctaaggtcagaaccaaacaagcccttggtgcctccctcgatgtcttcatggacccttttgttctagattaaaaccagatcatgtcccgtcttaaattcatgtagatcaactttacaaacactatttcatacctcctcattaagttgcttgaaaaatatccaccatgcgactggttacacaacataccgctttggttctctcgtgactaggatggtaatggatcaccatcc

SEQ ID NO: 75083 - DNA, 487 bp, Zea Mays
gtatcagacggtgacatcaggggagccacgttagtaaggctcccgtagactgcaagtcccgctccgcttcagatcaccccacgctttgtatgaggccacccacttgaaatataaaatgaggttgcagaacatgaacaagggatagaggagcatttggccagaactctccccttcctctcattcccacacttgcacactctgtaacacgctttcaagagcaatacaatgatcggcactacactggacctagggcacgaacctaaaccagtataaaccctctcaagtcacttgattcaccatttcgagtgagtccacgctagcctctcccatcgaacacaaattctactctgtcatcggttcccaaaaccacgacggttggcgcgccaagtagggggacagttagcgtgccaagtgaaattttcacttcgatggctcagtcatctgctttaaccggtagcgaggccttcgcaccaaggagctgtatcac

SEQ ID NO: 75084 - DNA, 447 bp, Zea Mays
acaacatcaccctcgatagttgacttagaaaagctgttacatgcacaagctctgataatacagaaagcatctcaactcacctcctcataccagcaagtgttgacaagtcgaaacgtcactagaaatgaaacaactgatgaacagacacaaaaggatgcacaccaacagacaaatgatcttggaacatgttgttgttgtgcgtactatggaattccttgttgctagatcagtacaaacgaaagtgaaactacaaaacataagaaccgaattttgttttctggcataaaaagacaatggtctccctaagaacaactaataacagattctctaatacctaatgcactgtcagtcgatgaattgctaggtattccaaaaaggaaacatcacaaggatgcccaactccaaaaagaatcacgtgagtgttacattaatggatggactatcact

SEQ ID NO: 75085 - DNA, 373 bp, Zea Mays
ctcgtcgagcctgttccggaccgcgtgttctttttcacgagatcaccaaaccactcctcctcgcgacagcaagtcgcttgcatctgctatccccgactacctcgtcgacctttcgtctattcccactgtctaccctccgtctaagtctacccctccatcaatctcacctcgcgtcgtctcgtcacgcaatgctcgtgcgtacaacctcctccccgccctcgccatattgcgcagacgcaaccgcctcacatgctcctctcgctgacacctgaggcccctgagtcaaatccgtttttcctagattgttatttgttttacacgcacgcatctattcagaatcaattgcggccacctcgttttgcctcgcctcgtc

SEQ ID NO: 75086 - DNA, 412 bp, Zea Mays
gccaacgggatgatacttgatgcactcaggaaaaaggtgttcgacaagagtgaaaagcttgcaggaaaatggatttgagaactaccgtatgtggtctggagcctgcgaacccagccaagtcgggccttgcatggaaacaccccattcttcatggtatagggtcagaggcagtattaccaacggatctgatcttttgagcacccaggctaacatttaaaagcatagctgaggcagaagcaacaaggctgaaagatgttgatacattagaggaagaacgactgaatgtggtcattcattcggccagataccagcaaaccttgagacgctaccacgataaagcagtgcgacatctatccttcgcagtcggagacctagtcttccatcgagtactgacgagagaaggacagcacaa

SEQ ID NO: 75087 - DNA, 666 bp, Zea Mays
cgtcggacatgagggctatttccgagagccggttgcggccgtcggacctaaccttatgtccgacggtcctgtaggaggccgtcggaggtaagggggccgtctgacgtttctccgtttactgtagtgagtactctcgtccgtgttgatctggtcccgagagggaggactgttcgggccataaggccggactgtctgtcatgctttggtgccaaacatgatgcttaacggaaggttcttcttccctgcgttgggcggtctcgctatgccattggtgcaacctctgaagcgaccatctctacgcaagttagtccattatttggttgttttttgcaagttttttttcaagtccgcgtacagtatcggtaccactagttgtattcctcttcagtctcctgatcgatatcaatgacaccaattggtttgcattgtcatcttcgcagctagggtgcttgtggtaatccgaattacatttctagccttcttaagattttcacttctctttttgacacatcagttattatcaagatgaaaatgggcttccattctttttgttcaggccagaggctcactttacggtgctcttggtggctctcttcttgcataccgcattgcagattttctaggtggactaaaaaaactaatttatttctaaaatggtcccaaata

SEQ ID NO: 75088 - DNA, 785 bp, Zea Mays
atctttttgtccttcggctcaactacattggatgaagcggcagtcttcctctttttctcttgcccttttatcggataatggtaatcagggtatacgaagccaatagcaacaaataccctgtttaatcttttcttgcctcgacttccaaaggctgcggatagagcattatcttcagccttggaatatgctccaagtaactcatcactggtagcttcgatgcacttcagccagtcatcatttggctcatcaaacttttccctgaatctgaaggtatacttcagtcggaccagaccaccttcattacaatcggcggtggtctccttcggcatatcccagctttccacaagtggccataccctgaaggatatatgctcttgaattagatcccttatgccaatgaaggcacacacaatgctaaaagctctctgacatgcttcgacattgctatcaatttccaccttcggccttcggagaccgaagcgagaccaattggggtgctggatgatttctttgatgtcttcccttgcctttaaatcatttttaacataaaaccactcccccatccaggacccaggccatcttttccggaatgttggtaccgggtggcttgcattggggcgagcaataaatccataacaaccgaagttgttgtggtactgttctttgccagtagccttcatctcatacaagagctcgtgcatactgcagaagcacttcgcactcggctccagcccttgacttcttatagcccagacaaaaatccccatcctcatcacagcttcggg

SEQ ID NO: 75089 - DNA, 882 bp, Zea Mays
aaataataagcttatttgtaataaatatgaagtaaggaattcaaaacaagcatatgtgacatgttataagatatgaattagaaatagtacatgtcacaacatgacaaccatatacgataacataaagcttataatacaaaccaagagcaaaattaagtgcatatgaaagtatcacacacaaaaatcatatgaaagaaccaaatatgaatcactcatagctcccctctttcactcaactcacacatactctccactaccccccttttgcatcaagcgccaaaatggctccaaacctaagggtcctaaggatgagaaattgcaatcgtgcaaagaaatggagggtgggtgtgaaatcaaactgaattagtagggtatgctcatctaatgaagcaattgtttgtctagaaggatgtgtttgtgccttaggtgctgataaactagccggaggaacataagggatttgtgggggtctaatgaggccattgaggaaggtaaggtctcggtactccaagtaacaggtgcttttgaagatggaggctttgcactaaagttatgtaaaccatatgtggagccctagtaacctgattggtggacgttgttgaaataggtgacacaataacaattatcactaagatgaacgatgtttgaagtgtaatgattggaattacctcagacaccccatcaaaacatatagtctgatctagaacgggtgagatatgctagtagggactctagcccaagagttctcgagactatattactagggccattggagtctaaagtgtaggctaaggagccatattaactagcaatggtgggactactactctagactattggaacaggttgtgacaatagaccatgttttgagtgtgatctgcc

SEQ ID NO: 75090 - DNA, 573 bp, Zea Mays
caagatgtgggatccgtaagaattatggaataaaccaaggtcagcgtcataaatcttgaggtcataccatgttattggtcatgctagccgctggtgtgatacctcaatgctataatctgtaataccgagacgtgtaattttagcgccaagatagaacgagttgctctagggtttaaacctaattttgtgtgtgtggaaaagactaaaatgaacaatgtggtgtggttatccattgccgcttctccagtcaagactccaggaggcaggagcagagagctgcagcgagagagcgcagcgctgttcgtgagacgatcgaggtaacatttgggcatgtacgacgatacagtacatgcagagggatgggacgctatcccatgcgtactgtactggtacaggccatgttgtactacgtacccatccatgatgaatctcgctaggcgctcgatcatccatccagtcgccaatgcgattcacgccccgcctccactcactccttttatttacaacctgtcaggaaccactgcctgccatctccgactccgtccatgccccagccgccctggtccgattcgc

SEQ ID NO: 75091 - DNA, 372 bp, Zea Mays
ttcgattaaatgcaggggctcttatgcaagattccagggccaaaggggtacggtaaactaccaaccgtcagatctattttcaatgcccaggattagatctccttatcccgcgaatcagtacacgacatcgaccatccgatctgagattaaaggggcagattagattcccttaccccgcgaatcggtgttcttccgcgacccatggatcaaaatccaacggtgcgaatttaaagatttgtggccggttctggtctgcccgatcgcatcctacgactcaccctcaaccccgaagtggtacgcaccgggtttaatcgcagccgcatacaccctatccaacggtgcgtgctatccctcagtactatggactcggcg

SEQ ID NO: 75092 - DNA, 577 bp, Zea Mays
ggcgctgataactctatccacattgactcgataatatccaggtggaattaaactcccatggattcttggtgtcatgttagggtccataggagaaacaaaaccgtacgtgcgccaccaggactgtgctatcccccatgggaatgtgtagctcacatatataccgtaaaaggatcagtgatgtcattatggggaagtgcagcaatgcgtcatcctgtgcaacaacaacaccacagtggaagtgcagctgcttcttcgctaagaggggctgactccctgctgctttgatggtgactgcccttggctaccccactgtagcaccacttgtcgtctgagacctcctcttggatcatcgcgtccctcattcgttctcactcctgtgactcaagcatcgcctcctctagcctgcagatccactctgcctcctcattcttctttcgctggcggcttctataggtctcagcatcctgagggaagccatgccgccacggaatcaagcctttgcctcacgtttgcccagggtgttctggagtctggagggcgcacacgtcagctcatccttctcttggttcggctcaaa

SEQ ID NO: 75093 - DNA, 870 bp, Zea Mays
gtacatgtgaaaataggcctcacatcgagactgccacagcttagggttctctccatcaaacatcggaaagttcaacttcggaagattgcccaacgaacccaaacttggcggaccctgaccataaccccccgagaaatcccggtacgtgtgatgcatcgcaggcacatattcctcatggtactgaaatggtacatggtgatggaagggagcctgatcatgcgtaccattgttcgggagttgggtttggaatgactccccaaaaccaaactcccgatgatgtggaacatagccttgctgtcccgggtcgtcaacgcgtggcatggccgcaggtgaccgctgcgccgtcgacttgaactgacccgtggttgctcgattgtctgattcgtcccgctccagattgtgagaaactctggcgagttccgagcgcactgcctctacagacgtctgaatcgtctcaatcaagccctccatccttgggcgccaagactcgaacaccttggtgacattctccaacaccgccagacgggtggaggtatgcgccacgatttcgtcgacgcgctcctgctgggctgcctgcatctccgtaatctgggtatcgatcatctgacccagtttatcgtgcagcttggcgatgttctccgtgttggcatggaccaccttctccaatccaccccatcgatggtcctgggactccaaacgatcgcagagttgctgcaggatcttggactgggcggccaaggtcttggactgcgtctcaatggacttgggctgcgctgcaagcgccgtggccaggttgggatctgacgccccctccatattcgcgcccctggtgaagtggaggaagtctgccagaccgaaatggtctttgat

SEQ ID NO: 75094 - DNA, 299 bp, Zea Mays
gccaagttgattcacataatctaaaggtttatagatatgtgtttattttattaactaattggcaagtataaataccttgagaacctaacccttctcttttatctcaaaaattgaaatttattacaggttttagaacagcaccttccttgtgctgcttatgaacatcccttgtgcgtgcaatacgatgagtgctactttggctctagtctcgatagtgtaatgacaacccttaaagacaaaggttatatcatcaataatcgagctggacctttttcttcaagcatgtggaactatattgg

SEQ ID NO: 75095 - DNA, 484 bp, Zea Mays
cgttgtcgactataagttcggatgggactctgaagtggcagacaatgttttgctagaagaatttttgggcagtctttgctgttatcgtggagactgccctggcctcaatccactttgtgaagtattcaacgtcgatgaaggtgaacttgaggttcccttgagctgtaggcagtggtccaacgatgtccagcccccagcgttgaagtggccatgtgtgtgcgatgagcttggtgaattgcaaagggttgcctgagcgaggagagaacttctggcatgcttcgcatgacctggttactcggttggcggtgcaaattatcgggggccagcaaaacccctgacgaatcaccttggctgcgagggcccttggtcctgagtgtgagtcgcaggttccactatggacttcacagaggatttctatgccttcggtttcggttatgcatttcagcataggctggttgattccctttttgtacagctaaccctc

SEQ ID NO: 75096 - DNA, 368 bp, Zea Mays
ggcggcgtgcctgtccattccgttggcaggtagtgcgcccgtgctgcggagagcactgtgctcatcatcactcgtacgttgacagagaagcttcgctgcacgccagtactacgcaagccatggatatcagggcgcaaggagattgccctggcgactagcattagttgctccaagtattacatctgttatgttcctgggcccgcatgtcggggctcaacacccttgtatgtgccccccttgagctataaaaggggaggcacgcagtgttatagggcaagctcactcagacacacttagacgcagctcaggctcacaagttcatacaaactctcaagctcaatacatcacacaatggagtagggtattac

SEQ ID NO: 75097 - DNA, 461 bp, Zea Mays
gaaatccgagcaccgttgtgaacactttcatcccaaattcacgaagcacatgtgtgatcactataaattgaaggctctctctgctccaccttcttgttacgaacccaacacaccactcctcactcccgatcatgaaccatagctcgtgaagtacagattcccccccaaatcggccagaacgttgtcgtgcggcatcgcgctatggccagccattctcaggtacgttcacatccctctgaaccatgtttttgcatcctctagtgctagtgaagctcacagtcttagtcaattgaacactaccacaccatatcttagggaacgccgcgttgtcacccgggaacaccgtcgtggacatggctcatatcgatcggccgttcctggttgtctctatccaaatttgcgcaagcaccgtagtcccagtaggtcactgattcgttccgagtccttgaattgaatatgac

SEQ ID NO: 75098 - DNA, 475 bp, Zea Mays
cgagcattttccctaagttaattgcacggttggtgacctactccgccctgcccacgagaacaacgaaggctaaggacttttgctcgtgttcccggcaatgggtggcggcctaattcaattggacgggttggagagcatcaccagaatacagagacatgagaacaatgcgcgaattggatggtgccttaccagaacgggctggccacggtgaggttggtttcacggtggcggaaacttgatttggggagactccaaaattcgtgagctctggcgaacgattgctagcgattttcggtggctgggggcgatgaccttgcggggctggcgggggcttcaatttatagggctcaacggcggtggccgggaatttcagtggggacacgcggcggtcggaggaagaagaagagtactggcgcagtggattcgtggctagcgccatggcaattactccggcgagccacagagagtcgcaaag

SEQ ID NO: 75099 - DNA, 905 bp, Zea Mays
attggttgcctacaagacccgcaacacgatgggctatgctaagacctaggctacgacggtcaagggccgatgccgcacaaagatggcaatgatggtgccagggctattcgttgcccacgccgctctccataaagagtgcaaccatggaagcccaaacgtccaaggcacatacggacaaacacaactttaccaaggtagaacaccccgttttaccacagcgcattatctccttccttgagaagctaccgatagttgacccccaccttagcctataaaaaggaggtggccggccagaacacagaggatggagaggacggacatacatacatgcacctggacgacaagaccagaagacttgaaggttgccaaggagcgagccaccatgatgtccaaggcttagtagagagcaccagtcccgtagtctttaggtctagccacacataagactcgggagctcctccctctctcgtccgcttgtaacccctactacgagcattgggcaacaaggtgttccacttaccgcatcaaaacgactgtggaactcagatatcttatgtcgaccagctttggtcccggtgcagggtccctcccgatccccgcgataatggggagacagaggctccctcgtgggtggcagatgcgcatggagtgaaaacctgtctgccccttgaacaccctgaccttgtcgaggaggctcattctcgaccaaggggagcttccacgagagcgtcgacgcccctaaaagggggcccatcgaaaaagggctctctggggaggggacactgaccgcggaagtccccagaagccatgcttgccgaaactgattccccgcgagccctcgaagaaattgtgtgctgagcgacgatcgagggggatgattgggcccttgcagggaccaacgatga

SEQ ID NO: 75100 - DNA, 383 bp, Zea Mays
cacattgctttgcttctctcattttccacacgaactcttcagccaccggctcacagcagcagcgcatgcagttaagttccactgatattttggcgttgtcgacacgactcgagatcgatccagagctcaggactcgctcatggtcaccgagcaagcgacaacggatagggacaccgagcgtcctgcatgtgcagtgcagaggaggggctccgagcacctgctctcaatccatcgtcagacgtttcgtcaagaacgacggccggccgccggcctgatattttggtgtcgtcagagcagaggtagtacgtagagaatcactcaccgctcgctcccgtcgatctgctgctcgatcgtctccgtcgtacaacgaaacttgatactgg

SEQ ID NO: 75101 - DNA, 656 bp, Zea Mays
ttgtttcaagtgtggcgaacatggccactattccaacaaccgccctaggcgtaaaccatagacaccccagaagaacaacaaccagaggaatgaccagaacacccctactcgtggatctacacagaacaagacttcgcagaaccagagtagaggaagagtcaaccatgtgacagcaaaatcagttcctaaggatgccgacatagtgtatggtatgtttcttattaactccatacctgcatcagttttatttgattctggagcatctcattccttcgtaacaaagtcattcgtagaaaaacataatataccaaactatcccttgaagaagaaactattaattcgatcaacacgaggtgaatttagagccactcactcatatccttagactaagattgaaattagaggcctaagctttctagtagagctgataattttggaatcaagtggaatcgatgtgatacttggaatatactacttgaccaagtatgatggagtgatatcttgtgccaagaggatggttacattaaccagtccacaaggagaaagaattgaagtcaatgttagtatgccagcaacagcagagacaatggtaaatcagttggaagagaaatctttggagcacatcaggatattgtgcgaatacccagatgtatttc

SEQ ID NO: 75102 - DNA, 1096 bp, Zea Mays
acaagcaatagataaaagaaagcctttggggttactacaagttcctgttgctcaagtcacaattaccatcagtcaaagaccatgtcacaatttactagggacccactcaactcactccaagagctctataagctcttcaaaaaagtttgcacgttctaagaagttgcattacaaaaagctataaacacaacggaagccaaaagacacaccacaccaggagccgaccctaggccaaaaatcagcacaacaagatcgacaacaaccccaagtaaataacatcaccaattagtaacaacatggcgaaggcccccttgtaaccaagagcacacgtaacacctaaaaagggggacaagggtcggtagaggtcatgatcacagtaggggatccatataggagcgaaggccatattgcgtcttccatagagagaatgtcgagcatcaaaccagggactaccctatcacaaggccaaagaaataatgacaaggtcggttctcgaccaaccaacaaggcaatagtgcacacattccagcaacaatgcccctactaccaaaacacccatcaaccttgcaccacatttcccccaaattaccacccacaattaccccaccaagaaaggttacaatccccccttaaccccaaaacataccccacacactagcttgctcctcaaacccccgaagatgaaggccacttctctcaaccactagcccacgacatcataaacatgatatctagtgagtccagtacaaactccgacaataaaagacaatgaaaagattactaccgaagggttaaccatgttgtagccacatgaatcgtcatacaaacaaaatggtcccatgttctgctaaccttcgacacgagatatgtggaccttcaaagtgctccacatacgaacgccatgctcatcaactacaatatagaaggatgggacatgcacaaggtcctagtccataatgaaaggcatgcatatatcatcttcatgcatgcctttgatcacatggggatcaaccacaactagttgcaacagaccgaaaacccaatcaatggttttgacggaaggacaaccctccccatagggaaaatagcactacca

SEQ ID NO: 75103 - DNA, 581 bp, Zea Mays
gttgttcatttaaatgagataagcttcgttggtctgtatatataaaaaactctgcatgctgcaaataagaacgccactgggtgattgccagtaagattgctaaatactccttttcatatgttgaaagtcccagattagtaggtcacaaagctttgctaacaaatgttaaaggaaggccatcttgttgcaagactgcacctatgcctttgcgaagtatctgtttcaattgaaaaaggcttgttgaaattgggaagggctaagaccggtgcaaaacagagggcctctttaagtgcttggaagactgattgttgaactgttgttcacacaaatacaatatttcttgagtaatttagtaagaggtttagcaattaggtcgaagttctttacaaacttcctatagtatcctgctaacaccaaaaatcctctcaattctttgccattgtgaggagctggcaaagactgaatcgtggccaccttagaaggatcagtagacacccctgcttggctgaccacatgacccaaatactaaatctgttgttgtccaaaggaacatttcgacaacttaacttgccaagaatctc

SEQ ID NO: 75104 - DNA, 544 bp, Zea Mays
gtactgtaccgaagaggccattgagtcaggaggaccattttgcaatagtatactaaaagaccaggttgcaataggtctgcctccatcacgacacgagggtagactgtatggaagcggtaggatgggacggaaatccttcatcccactggattataatacagtacttgaggcacatcacagcatcctacatcagctagagataatggagccatttatccaacaacacatcaatgatcttcgcgagcaaaatcctgggcaaacagatgattgggtaatgaagcgacataagctgcggttcaacacatggctaattgtgaaggacattccacacggagatacaatagaagaacaaaccattaaggggttggcgtatggaccatcacgctaggtcacgacatggcaaacatatgacattagtggatttacattttgtaccaagtccaaggacaaaagaagcatatcacaaaacagcggtgttcgatgcgaggccatagacgatgaaactggtcatactattacatattttggctttattgaggacata

SEQ ID NO: 75105 - DNA, 1029 bp, Zea Mays
gcggtggcgtaagatatttgttggaggtgtgcgggtatatgccgtaatatggttatactcgcgacgaggaaagatgtatgtattgtgtaacacgactcttaggtcgctattatataaccgtgtgaaggatgctcccgagggtcatgtgactaaaaggggttgtagtggcaaagctagaagtaagtttaatatttttaaatgattaattgatagcacctatcgacatcgtcatgatttttgttgtatggcggatcgatgccttgtcgttgtagttttggggaattttcggaaatgtgctggtgctttactgatggggttgaatgtacttgtgatgtattagaataactgcgtgtcgtacgagcatccgaaaatggtgaaagttggtgtatgttggtaattagaaaatagtcacgacgttagccaatagccaagcttatgccgaaatgtaaaatatgggaactttgagttgaaattatgcttatataggcatgtggattaataataataattggaagaacagtcgttcaaattggtcagtccaattaagaatgattttgcgtgtgaggtgaggtggtgacatgccaaagtagtcaccgcttccctatgtttataagtcgagtcaatacccattaggcgttcattaaatttcatgtcgcacatagtgtttggttgtattcgtgacaaggaggtataggttttactcaattagaagtttggttgatgtggctaggaaatttgtttcggcttgggtaatgaagtggtgacgtgaccaagtagtcccctggttatgagtcaggtctagatgtgttatgccttcgccgtgatacccatcgcatatgctaatttgatatatatgaaaaatgaaatagacgcatcatatgatttagtggtgctggtattgtgatctaagtacattatatatgtgtgataaatgttgggcttgaggattgtctttcgggcgaggaaggtgtaatagacttatatgtgtagaatgattaagctagtaataaaaaatgacatgaataaaaa

SEQ ID NO: 75106 - DNA, 1424 bp, Zea Mays
cacacctttcaaaagacatttgcactggagaagttgaaggagaggtggagggaaaaccactagtgatgaaccaatctaaggagggacgacaaggatcaaccatctaggaaaccccaacccctgtcggagcaagcgagagtgaacagttgcccgcgaaatgtgactcttcgttctcttgcggaataattggagtagtattacattatgaagaagacttgaaccaggaagacactgacaaccgacatcactagtcagggagggtcctatgaaagaatccatcaatcttggattgggtgctttgaaagtagcacaaatttctgaataattcctagagtatgcacaattagcacagaactgcctatttcggcataaaggggcctgatgaccaaaagcccagcaattagaacagaaggccctatatgagcgcgagctacgagagagaagaggcatgggctcacgagaactattagggccaatctatcaaatactaagatacgataagaaccttttacctttcgagagatattcaaatttgaaaaatcattgttaaatggtcagagaaaacctgccttgggcctagagacatcgttcgggcgaggagaacaaagaacccgattagagacagaattcttatgattagactaatttcttggaaataatcgaaagataacaaggacagtcattatccagactcaattattgataaaagcgattaaaaactcttcacgtgaattggacgccaatcaggatcaacaactggatgttaacgaggtttatgagagactcactaccaggaagatccatctcctagttcaaaagcatgaagttccttaatagaatatggaccaccatcgttccatagagaaaaaagaccttgaagtgatcacattcatagaatctcataaaacacagatggaaaccaatacttctcgaagaaactgaagaccggaaggaccttctagcaatgggagtgaccttaagatgatctagactgccagccccccacacataggcttgaataagaaatctagggagaaatccagagagattgaatttagatttaccaaatgaggccaacaaccaaaaaccacgacgactatgagaatccggtatggatattaggagacaaaacttagaagccatattaaattccaatgatttacctagaatgaaatccaaatcacacaagatcggtgggaatgaaacttccctagcatcttcaagtgaggaatcatgaatcaccaaggagaaaaggcgaagactcgatctgctggaggagggatcaccaaagggagcctaacaccaactagagttgcctctcccattttctcttttttctcttgtggaacgctaagttggatgtaagcctaatagaactcggtttcataaagagagtgcaagcatcaagaggatatactgttggg

SEQ ID NO: 75107 - DNA, 896 bp, Zea Mays
ctactatttcatgtgtcatgggtattttgcaccgaggtcctttccctttggttaattcgcaactccggtccaagactgcatgcaggcgacaaactcatgtcaaagcctgaaccgcgcgcaaaaaccggtggttgatgaacctctccggcgaaggtagccttcacgaatccattccttaatggaccggtcagacctagttctgaaatcgtattgatatcgcgcctaatctaccctgcccaaggctacaaaagctttattattaccaaaggaatacataacaggtgattatacatattatcagcatcgagttcgacggattatgataataggagatattgacggcatgctcaccaatttttgcagggcacgatctttatccagacggtctcaggccgagtggctcgcaggtgatcactaactgatttgtaaatgaagcagcctgtagagtctgtttttatcgggcgctcaggctattcagctggactcgcagagaatggtgcacgcggcttcaaccttttctatccacgtacaaccagctacagtgagggaaagtctgaagagtgagctgaggttttcacagaggagcacggttgcagctaagtcactggtttggggagatttttttttcttcttttgacgccaccgactttagagtttttaccgctcaccattatcttttttccaaatattaatacttattcacatgctcatttcgcataaaaaacatagtactacaatggccgagatcttaaacagaggttcatctaaaaatggcaccctctgaaattaccacaatgtctactagggatggatatgttttcagagttttgcacagacctgatctgtctcagtcggctgcagactcaatttttatccctccctttctccaatttctc

SEQ ID NO: 75108 - DNA, 925 bp, Zea Mays
gcatgagagtcgtccgatcaacaccggacgcaccaaattagatcgccaggggtttgaatcagtacgcgccgttggccttcggatccaagatccacgacccgcatttccccctgcgatgacccattagatctgcccgattgtatctcaacggcgtggatcccctgcttgaaccggcatgatagaatctaatctcagccactcatcttctgatctacagtcacgatcgctacaactatgatttatccgttgatcaactctacaccgtccaaattggatccgacggcgcagacgctgtctttccccctcggatcccgatctagcttgtgccccaatctcagtcattggcccggcatccgatggccagcgttcgtcttccaccacgcgcttcccaggtcagaacagtggcggccagtcccacgatggagaccaccgccggcgcaatgcctcggtcgcatagtgcccgaaacccaaattaactaacgctacactaagagggcgaccacatgaactggatgaggggcttattaccttggtttagggtggatgcgacactgcccacacggtggcacggttctacggcgacgcttaaactacaaccatccgtttcgaccaacggattccccgattacaaccccaattgaactccactcgttaagggaacataagggaacaaggttctcaccggggaataggtcgtggacggcgcaatccgcggtaccacgcaagggggcggggatgatggagcccgtcgagaaattgtggcccgccgaacgccacacgctcctaagccaatagatgagcacccccgctacggcttaaggaagctcccgtacacaggccgcggtcccttcgacggtgctttggcggcaatcgacgacgacgaggtgtggagggaaaggcggcacgagcgcggaaaagaggaagc

SEQ ID NO: 75109 - DNA, 1044 bp, Zea Mays
cgctaatggtgggctgcagggcactcggaccatgggtataaaacctcctgctgcgaccctctcgcctttcgttgagactacctagggagccacggatttgccagcgaactagcgaaggaagtttgagccgccaccgtcgaccggcgaggagacttcgattcgggccacggaactctcggtcgcggttcaatttgcgtgggtggaggttgtgcgtggtgcgggagcgttcgttgcagtgaggactgggcggaattccgcgtggatctcatccgccgccgtgcgattccgccactgacgccattgttccgcaattggagctctgtgccgcaccattgccggtaagaaactgtcctgcctcccgctcgttaccccttgttacacaacaccgagaatcataggtagatgctcgccctagctacgtgaatcgctcgcgggaaccatagcgtctctgcaccgccacccccggtcagaccctgcctcatcgattggcttcacctcacacatcatttagcacctaaaagcttgagaaaccgagcactagagcatgggacgcatggttcgccggtgaagctccgtcgtagtttgtggccggcgccgtcggggccagctgggaaagctttggttagcgtcgagcgttggatgagctatgggtgtctgtgattagatctaggtggcacttcgctcgtggtaggatcgtgtccgtcggtgggcagatcaacgcttacggaagtttatgactttgttttcctcgtagcaataggatgatgatcggacgacggagttcggataccggttcgtcatggcttagatctaatttgcagcgtccatttgcgatcgtgcggccgatattacaatatatccttcgcccatggctttttgctaaagagaccccagggaaagacataataaacccaccgtcctatgcactgttccctgtgtcttgggagttttactcagcccctaagtgttctaggaaatgaggcgcagtccagattattaggaaatcaggaaaaagaattagaatatgagtttttaatatgaaaa

SEQ ID NO: 75110 - DNA, 1381 bp, Zea Mays
ctgaggccaagcccaggctctcttttttctccgcgcgctgccaactcctttctcctctgcgctgagcacccttctcctccgcccctctctcatcggtggggatcgccagcgatcgaactccgacgtgttgctctagctggtgctgcttcccccttttcccttggtgagcaactcctctcgcagtctctttgttctctggctgtcatggagctcacctctcacaccccctctcaatctcaaattccttcaaaatctctgtgaaatccatgaatccatgtgtgtttgtgtgttcttggagtttccctgcaggtaatcttctccctttgggaggttttactcacagaaatagtcgtttcaccaacgttctaaaacctcgtgcatcaagtgctcagtgaaatgcccaaacttgtcaaaatagcgcaaatcgaccccaaatttttctagcacacttcagctactactagtacctcacacaccaaattccacacctatccgatattccagacacctgtttcacaaccttttatctctatggtaatccgttttgagccgagtgcgaaaaatgtttttcctctgccaaacatcaaaccgagcactcacttcactcattttcatacatatatacctatctatgaagtatcggctcaattcccagtcatttcttgcctcatttcgaatttcaaccctctatggcacaattcaccgttcaagcatcgttctcgcgccgtttgacctctgtttcttcaaatcactccatttttgtatcataactctatgtgtaagtatttattcacatttaatatacttatgactatgtgactaatacatgctcacatcttctgtcattttagtgatttcacctgctcgcctacgcgtctcctatcctgcctggttcctctctctctctctctctctctctctcgagaagttcctaggtagctatcactctattcaagctttacctactgatctctactctcgcttatcttttctccttatcttgcagcagtcaatttaggatagtgaggacgaagaatgtcacaccgtgtgggggaggagatgacgaggaccttcctcgccccttcagacaggtcaagggcatgactgtctaccttgagtagcaagagggaagaaagaaaaggcatcttgacagagccactcgtgcagtgattgcagcagtagatcaggtagagcagggaggccagttacggatttcttctgatcagattgccttctgagttcgtcgccttgggtctcggactcgctcctccactgcttgctccactccttccgacccagtctccactccacctcccacttcgctagctcctgccgctctcgagccgtccactactcccgctgcttccaccacctccaccac

SEQ ID NO: 75111 - DNA, 800 bp, Zea Mays
gtggaagattgggatcaagtcacggtgcccacaagttgagaaatttttagtagctcccattcaccccctcttgcctcatcggttcttaagtgtcccatctcaagggcgccagaccaacgaggtcttccaaaatacttggcttgatggtgagggtgactcgtgcaaagtgcttgtgcgcatatgtgaccgaggtgtctaggtcttctttgaccatgctaacgaggtgcacacctttgagtgcatgtcgcgccacgactagggtcaccgcgtttccagccgcttcaccaacggtcgcatcgacctagagtatgtgatgcctataccaccctagcatgtctctttgaatggagaattgatcattgtcatgttatggctcactctcgctttacttgcatcacaataggaatctccaacattcacgtcggctaaagtaatccctgtcgccctttgaccaagtcaatgggagttaagtaatccatgtcgatcaaactgcagcccacgggaatttacataactcctgtcagcccttagagtggtcgatttgagttaaataaatttcgttgattctttaggttggccgatgaggtttacctaactcccatcggtctttgaccaagccgacgagagttaggtaattatagggtctgtggccacaacctttctcttacccgtgcccttcaccataaatatccgtaaccttctctttagcctgcctctatggtctcccgcataccaccgtggagctgtgctgctccagcccgccgctgtcgtgccacctccacccggcccacgacactgca

SEQ ID NO: 75112 - DNA, 452 bp, Zea Mays
caataatagaattatagaaatgggaatgaactaattaggacattacatgaattttctatgaattaaacaattctttggatttgtttttatactccaaatccattttctgtattaatttctgaatttactaaggatcctggactgggcgtaatattatcgagaagttcagggactaaaacagaaacattcctaagactcagtattcccacagtgtggactgcgggttagtttctaggtttcctagggtttcttatgcaaaaaggaaccagcgaaggggtaaggagcaaccagaaccgttggaccagacacgcgcggctctgattagaatcgaaccggtacggctcgggatcccttggattataaatgaacggcctagattttatgaggattgatttgctctgaaccgcacgatcaagatctaaaggcactgatccattcacgtgaacgggtat

SEQ ID NO: 75113 - DNA, 411 bp, Zea Mays
ttaagtttagcttcgtcaaaaagtgaaaacattgaaatggccagagtgcgatcgactgctagagtgtctcgcgagggagacgaggtcgaagtaactgagacgtcaccaatatcagaggtgatgaggcagtcgggtcttgttgtatcagaagaacctgttgccgaaggtattctgactgccgaagctgagggaatcatagttgaagagggaagtggtaatgaagacgaagaagattacaccatcttgatcccagaaaaacctagtcaccttgactttggtagatctactgcgatagcagatgatatggttataatgaaaaaattgggttactttggagaagccgagagtaggcttgttcgttttgctggcgaagaagtggtcccagagccgaaggatgatgaagttattgtg

SEQ ID NO: 75114 - DNA, 375 bp, Zea Mays
aagcttcaagttttttgggccctatatgattcttgcgagagttggcaaagtggcctataaattgcagttgccttcttctgctactatccaccctgtgattcacgtatctcaactgaaacgactgaaacgtgcagtgggaaatcgaccggtcagtgctgctttacctgacactttaagtcacattcaggttactttgcaggcccttgatcgacgcgtcattctacggggaggcaaacaaattcagcaagtcctcattaagtggtctcaaggcgatgatgctttagctacttgggaagatgaggaagctttgcgtgctcggtttccgactgcagccgcttgggggcaagtggcatttcaaggggaggacaatgtcag

SEQ ID NO: 75115 - DNA, 895 bp, Zea Mays
gagctatttgcatcagttccttggcatggggtgaattcccctgtttaagttttgaactgctgaggaaactgcggaacatgttgatggaatacttggttaagagtagctagcttatgtgttgtaagtctacacgaagtgtagcggctctacttactgtaaaatgatgccgcagaattcagaatcaactgaattcatgcaattaatagtaacacagtcacatgcatgcatgtggtattgttggcaaacccccctggtgctccacgtctatcaacaaaggcaaagtccagtcaaaacaatgtgtagttttgagaaagaaataaatcctgcaatactaggatcagttaatcaagtttacatagagtttgtaaaagattttcatggttattgagcttattgcagcttacatattctaaccctaaccctataattggtatcatttttttacctttgttttttgtgcttgtccctagtttagcacttagcagtgacctctttgtagtttcatgctttcagtgctcttacaaatgctgagttatctcaaaaataacaaatataatggctatctttttcttagttgttgcactttgaattgatagttaatgatacaccgatgtggatttcatacctgcatgtgaattgaagagcacactagaattgaagggcaatagtaacagcaccgctcaggtgattctcaacctcttcacttgtagcgcaaactccagttctaaaccatgaagcacgcaattgcgaaaacaatggaaaactgtaaaatttatgcatttgcttcaagttcagctggctgaaacatgggtggaaaggattagctgccccctttctgctcatgtgcttcgttctctagaaacaaaatatcacaacaaccagctaaaaaaaatat

SEQ ID NO: 75116 - DNA, 533 bp, Zea Mays
gtttgttacacttagagtgcattaactaggcaaaaatttcaaacaagttgtattaatgtgactggtcatgggtgaaaccctagggtagggcacttaaccttaaaccaagcttaggagtgtaataaggctcaagtatgagaaaacttcaaaactcatgataagtaatcataagatatcacatttaatggacttgtgtggcatccaaaccctaaaagtgccaaaaaccctaaaaagacccctggaaaaccctgagttgaaaccatagggggttatatgtaaattttgcacaattttggatccaagtgcaaaagccaaggtattagggtacctcaaatcatgtgtttctcatgtttgaggatttgcaagccaaataataaagtttggacctatttgcaaaaaggacaccccatgtacctcatatgcctaagtataaaaaccaattgaatgaggctggctttggagctctacatctttggattcttggagtttttgttacgggtcaacacataaaacttttagagctactataggag

SEQ ID NO: 75117 - DNA, 747 bp, Zea Mays
ctcaccttttcgaagtcattccacacttttgatatcttccttgaggcgttggcatcagtgctacaaccagtatcggtactgcttctatctgcagtagggaggctagtggagcctatccctgttctagtaccaggagcatcaatgtagcaaatgcagataaaggccagtgcatcctgctccaagttgtgtgcctaaagtcgatactcctcttcagtgtccggatcaagatccatggcgacactggttcctcaacggctgcgcggcactgagatttagatcgatacctccaaacaaaaaccaaacacgacgaacatcactagaagtctagaaccgaagaaactaaaccatgctaagtaaaaacgatctagggacttaccaaacgctgctagagcaccggagtcgccttgcatcccgttgaccgatgagaatgaggaccaccagaccagatcatgccgaggaggggagccaagaatcagggaggaattgaggattagggatttagggttaggatggcgacaccgacttagattcaccaaaattcagaactgaagaaacatcgttagatctgaagaacaaacatacagggacttaccaaacgcaaccggagcatcggagtcgccaatgacgacgaggataaggaacaacagatcgtaggaggtagcagccgaggaggggtacaaagcatcagggagaatttgagatttagggttagggttagagcgtcatcgaaggctcgaagcttaccga

SEQ ID NO: 75118 - DNA, 425 bp, Zea Mays
caacaggattatttaaaaatcattaaatgaacaagacgacactatctgcagcaaaaacaatgaatgattcacacatatttaatattctgcacatgaacgtgcgttcgtcatagcaagcagccacacatctacagcaaaatgtgcaagggttccagcagccctcaccacagatctctagagggtagaaaaaggcggtagagccatcgtcaagtgggtactggctactgtggctacaagcaaaaaggaccaaaaacctccactccagtatgtgtcatgcatcatttcatcatcagtcgtgcgagcaccaccctcttatcctcttctcccactcgcgcgcctcgcaccccccggcccaaattctacgcctcctccttctccttggcgcatttcttggcgttgccctagcccccgctggctcgccgtcg

SEQ ID NO: 75119 - DNA, 401 bp, Zea Mays
tggcgttgctagggcgcgtcgaacacgtggttgtgttattctgcccaagttcttgcgcctgctgagcagccaaacgtgcgaatcttgccatatgacttgtgtaagatttcttccctgcacctagagctatctagttcatgtgagttccaaggggagatcgggtctggcttggaagatatggtggcgccaagtctggtctgtctgcactgttcatctcgtgacaaaacatatgccaaaccatgtcaaacaaccctggtttggtttcaaaatttttaggggtgtgccttgggtagtttggcttctttttattattttgaccctaaggatttggcgccagcaacttaatgaacatctccaatctttggaagtgggctaatttttaacttagagaaaaattggat

SEQ ID NO: 75120 - DNA, 323 bp, Zea Mays
gatgatttgatgtttgtgtcggtgatgctctcatggttaccaagtatggttttataggttcgatgttgtgattttggtgaactaaaatattgcgtaggatgagtttagaatttttatcgattatccgacagatcctattagtgtgttgtgctgattgtgttgatgtgttgaagtcaatgagttgctttaggagtcacccaatccatattagtggctggctaatgccatagttggaggttacctatttttctccgagtaattgaaatctagtaacatcgataggtcttctgtttgaaatctgaaatctacttaatagaaggtgt

SEQ ID NO: 75121 - DNA, 342 bp, Zea Mays
ctcaatatcatgtacattcaaaccttcgacggactaggaatcgattgctccgcgctgcgaccaagtacggcactattccacagtgtcatccccagaaaccaagcctacccactcagacatgttacactgcatgtcacgtttgacgatccttccaacttccacaccgagcggctacagttcgaggtagtcgactttccggggtcctacaatgccatacttgggagaccttactatgccaatttcatgctcgtgccaaattacacgtatctaaagctaaagatgcctaggtcgcgagggctcatcacaatttctgcttcattcagggctgcgtacacctacgag

SEQ ID NO: 75122 - DNA, 562 bp, Zea Mays
cttacagaggagtcctgcttttgacaagaaagaggagagagagggagatctgcttccctaggtcggcgtggtcggtcttctataaggtcgtgtgtggtcgtacccctagtttgccgccatccatcatgctggtaccagtagcaagtccattgttgatgtcctagcggtggtgcgtggcgtggcagatctcgcgagtcagtctcatggcacggctgtacgaggcgtggcttcgcttgtcgtcatgagcctcgtgtcaccttccactgtacgcggacacatacgcttggtatgttgcgttgtcccatattttccgatatacaaatcactattgagactccggtgctgaggtcttccatgactgaggttggccgaccccacatggtagtgtgggttcacctgaactgtttgcaagggtgtacagtcatgctagcagtgacgccttggtgcccattttgtatgttgtgcgtgtgtccggatgcggcctggtgatgaagcatcttgtcacaactaacgtgagctcatagcactggatttggattttcatcccgccaagttgctcaac

SEQ ID NO: 75123 - DNA, 1223 bp, Zea Mays
accctatcttgttgtaccaaagcaagtggccagcttcttggacgaagcaatggtcttaaacaagagagaagatatcaaggagattattcagaggcccattatgtctcattttggtataaagatgctggcaattgtaatgactgaagaagctcaagcttgtcttgtggcttttaacgccgtgtgcagctacatcggtactaggtatctaatttaggaacacatagcctttagggtatgtccccttctaaattagagggaaatttcgaagattgaagagggcagcccatctaagcaaggggctaagaagggtggtttggtgaatttaatgtatacatatcgatgcaagagtcagttcggtgaaccagatgacgaatggatagaggccattgaatcaacgtgtaatgaaattttagaaaactatacgaagaaagaagacgaagctttgaccgttgcttttggggtttgagggaagcgaagattgaaccgagcttttgatgctattcattttgtttaccaggattactccttcccggcagatggtaaggggaagaagagaaaaggcgctttgaaatcatcttcgactgggccaaagcaaaaagagtaaagatttcagtgaaccaaccaaaatcttattatgaagagagggcggcagtgttgcctgagtttaggacttttggtgggggaagctattacccaaactacatcagctgttgagtcgaaggtcctttcttctatatggacaaaggtaatgattacttggctttgcgataacttggatatatttttatcaggatgtttttaccatggttttatttctgatatatgaggaggagaaggacactgaggaagaagttgttgaggtgcttattaaagatgaggcgcctttagctagcttgcagcctgagctgtagctagaggcgcgactgaaactagaggcccagccaaagcctaaatcgtcttctgatggcacacctcagaagggaaagaggatggtcaacgttttaaaagctatcttgaagcctgcgaaggtggcgttacctaccgagccaaagattagcaggcctcttctcagcgcacctgttgctgagtgtatgaaggatgaattagctatggaagtgattgatagcccaaaaaaataatcttgatttaaaggaagatgttgtttcgaagatttatacaataactgatgcccttaaggaggagaaagaggaagccaaaagttc

SEQ ID NO: 75124 - DNA, 435 bp, Zea Mays
ctggatgcttctttgttcgcagaaatcaaagaattccgagctagtgaaattggatcctaggtcagttataatgctattcggtattctgaacctaaatattatatcttgtatgaattccactgccttagctgaagtcagagaagcgatgggtttgtactctatccatttagtgaatttgttgatggcaaccagcacgtgagtgtatgctccctgagctttcttgaagggtccaatcatgtccagtccccagcacgcaaatggccatgttatgggtatggtttgcagttgctgtgcgggtaaatgctgctgctttgataagtactgtcaagctttgcacctctagactaacccggctgcatcactttttgctgtcggccagtagaaaccagacctgaagaccttcccaaccagagtcctggatgctgcgtgtatccc

SEQ ID NO: 75125 - DNA, 531 bp, Zea Mays
ccccccccttaaaaataatctcgacctcgagattaagatgaactagggaagaggtggggaaattctatttgtagctcttcttatctctcccaagtagcttcatcttcaccatgatgactccattgcactttgcacatttttatcaccttatttcttgtaacacgagtcaaagtgtcaaggattttgataggatgctcagtgtaggttaggtcttcttgcacactaagttcttccattggcaactgttcttccgggacatggagacacttcttgagttgagatacgtggaatacatcatgtacatcagacagatgatctgatagctcaagctggtaggccatctccccaactcgcttaaggattttgaagggtccaataaagcgaggggataacttgcctttaactttaaacctcctcattccacgaattggtgacacctttaagtatacatgatcaccctcttcaaactccagtggccttcttcgattatcagcatagctcttctgtcgagtcagtgctatccttaagttc

SEQ ID NO: 75126 - DNA, 948 bp, Zea Mays
atgatttggaagtgcattaccatcctggcaaggccaatgttgtggcagatgccttgagcagaaaggcccaatgcaattgtatgagcatggatgcaagggtcaccaccctgtgcgatgagctgtgcaagctgaacctggaagctgtttcttcaggtaacttgagttatatctcggtggaacccacattgcaagagcaaatagtgagggcacagattgaggataagggtgttcaaatggttaaggaaatggtcaagcaaaaggcagagaaatacaagtgcttccgtcaggacaacaagggaattttatggtttggagaccgattagttgttccgaaggaccctgagctcaaaaagaaaatactggatgaagctcacctttccaaattctccatgcacccgggtagcaacaagatgtaccatgatctcagatctttatattggtggaccagaatgaagagagaaattgccaagtatgtatctgagtgtgatacctgccagagaatcaaagccagccacttgaaggcagcaggccctttgcaaccccttcccataccatcttggaaatgggaggacatttgtatggattttatcgtaggattgcccaatacctccaggaaccatgattccatttgggttgttgtggacaggttgaccaagactgctcatttcttaccagtgcacaccacccataggacagagaagtatgcggagatctacattgaccaaatagttcgtctgcatgggataccaaggactatagtctcggacagaggagcaccatttgtggcacgattttgggagcaattgcaggaatcacttgggacccatgtcatacgaagctcagcataccatcctcaaacagatggccagacagaaagggtaaatcagattttggaagacatgttgcgggcatgtgcactacactacagaaaggattgggacaagtgtc

SEQ ID NO: 75127 - DNA, 538 bp, Zea Mays
ctatgaacactctcaaacgtcgaaaggactcgtactagagtcttaacattcgacaattgcgactcaccacgacactagacatgaagcatgactgtcgtgtgcgacaaccatgaatccgcgccaaagtctcctaagggtgcaatcggattagcactaaataagtgtgaagacgcctaagggctagaagtcgtctaaggacatagaatccacaccaaagttgcctaagggtgtagccagaatagcgctaaataagttcgaagacacctaaaggctcgaagtcgtctaagcacacaaaattcacaccaaagtcaccaaagggtgcaaccatattagcactaaaaacatgtgaagacacataaggacccaaagtcatatgagaatacagaatctacgccaaagacgcctaagggtgtagtcggattgtaatgaaaatgtgcgaaaacacccaaaaacgatagtcacctaattggcgcaaccagatcatcatagaaacccgaagacatgcataaaatatatacaaaactataaaaaatgaaga

SEQ ID NO: 75128 - DNA, 768 bp, Zea Mays
aggacacaaaataagacgaacagattcaaggtttgaactgcaagaaccagggattaaatcaaacaccaagtaacagggaggatttttttgtcttgctttccttactttttcctataacattaatctggaacctcaaatttgggggagaaatcgaacagattgaaggcttgaagtacaagaatcagggattaaatcgaacagcaagtaacagtgagggttttttttcctaaacaccaagtaacagggaagatttttttgtcttgctttccttactttttcctttgctataacattaatcctgaactacaaatttgggggagaaaccaaacaaattcaaggcttgaagtacaagaaccggggattaaattgaacaacaagtaacagtgaggttttctcccttggtttccttcctttttcctttgtaacataaaccctaaaccttaaatttgggggagaaatcgtagcttgggtaacaaacacaagggagtcagcagcaaagagcactaattgtaacaaaagacggggaaaaatgaagtcattttgctggagccggggcaattaaccttttatgtcgaagacactagaagacggagacgaaaagcggttgtagtctaaggcaatgaacgaatccaaaaatctaaggtgcaaatcgcatgaagcgactgacaaatctagctgaaggaactagatctggtagaagcacaaagcatcagggacaaagaaaacaaacctttttcgtagcctgacaaaaacagcggtagacgaagc

SEQ ID NO: 75129 - DNA, 893 bp, Zea Mays
gtttgtttcggttgcaggatgaagagcctaacgagagaaggattgggaagttgtgcgagtacgcttcgaaaaaccctcttcgagtgccaaaggttcactccccttgcttcctcattggaatttcgttgtttccatgccaggtgtggaggttctgaccttttgagcgaattgatcttgctgctaaacttagacgacccttcagaatacagtttgctagctttgtagcttctgtagtactgattataaatgcaatcgaggatcgagtggtataacttatcttgaaactggagatgcctcatggatcattgttctaggcctctaaacttaatgttttcagtatagttcccttgtctccttggtgccctcatttcagagtagtagtccttgttaaacatattgtcaggcatgattgcctcttaagcaaattcaggctctgtaagcttgctgtcttatgcatgttgatatctgagcagatcacagtttacttggagcagcacatttaccgggacttaagaagtgagcagtacggctttgcaaaagtggtgatgttgatatatcgcagactgtcggtttcctgtaaagaacagatgtgagtcttcttttcaagtttctcttgctcatatagccctgtattctgtgaagttaatatttttatttggtttgcaatggatacttcttacactttgttattacctttgctggttacaaatgaaattgttattttcttaattcaggcctctgtttgcaagtagcctattaagcattgtgcacactcttttagaccaaaagaggcaggacgatttgcgcattgttgggtgtgaaaccttgtttgattttactgtcaatcaggtattcctaatggactagatgccaatgcccgttagcaggattaa

SEQ ID NO: 75130 - DNA, 547 bp, Zea Mays
ctctatctctctccctttttgtgcaaaattcaaatctttgtgaaatattgcaaatccaattggtggaatgcattgcattatccctatcatgtatccctgcaaacttttagctccttcgggagggcattcccacctcaaatggtcatttccctaaaaccctaattcctcgcccttcacgtgctcggtgaaatgcccaaaccagccaaacttgctccaattgaacccaaatttttcaggcaccctcacaacacttccagcaacatccttgccaaatttcacgccaatccgagatcccaggcttaaatttcaccaaaattcccgttttgagcgatcgtttccgagccaagtgcccaaatccctatttcttcgcctaaattcaaaccaagcacacacttcactcatattgacctatataaacctattcgtgaagtctcggctcaatcccatatcatttcgtgcctcatttcgaatttcaaacctcctatgtcactatttgtctgtcaaacgtcgttttcacgtcttttgacttattgatcgtcccgtctcg

SEQ ID NO: 75131 - DNA, 849 bp, Zea Mays
gcactaatgaattgctctaagtaacctaatcacttcacaaaacgtctatgctaatcactgagtgatatttgagcacttgagtgtttatagttataggaatagagtctcaacactagcaatgtttattagctcccacacatgcaaattgttggttgggtgggtttatatagctcccaagtccaaggctagtcattgaaaatcacaccataattgtgtactcactcaatgcagagtattcgcatgtcacactgaaatcttgtgtactcccaagtccaagtctaaggctagccattgaaaaccacacatctatttagtcattggacatgtatagtgcgtacacgtcaactagttgttggaactacctgttgtcgaccattttagtatgggcatctggtgattttaccagcgttacactggatacattcgttgcattatagccttccatgggttgttgtgcaatctctatgagtatcctatccgacatggtatctagtggcagactagacatgtttggtaccttgtggataaccccaaaacgttatagacttctctaaatattctatattgtgccccatctggtgtgattcctagtgaacccttgcttgtaggtgtactctttctcactagcccttccttctgtatagtgcaactcatatcctatgttttatccaatgcatcacaagacatgtctggtgctactgagaagcctgtttttaagtcacctaatgtcttttttgaggtgtttgatcatcctaaacaccactattaccttcgtctaagtctacgttgcatcctttcaaatataaccaaagatactgcaaataatattagtacaaatggttatgttga

SEQ ID NO: 75132 - DNA, 301 bp, Zea Mays
gagccctctcagccagccttgaaatgaagtggctcagagcagccaaagatcccgtaagcttctggatgtccttgacacgggagggaggcctcattatcttgatagccttgattttttctgggttagcttcaatgccctggtatgaaaccaggaaacccagcagctttcctgcggaaacgtcgaagatgcatttctccgggttcagtttggtgtgggttgcccgcagcttgtcgaagaccagggttagatcttctactacagtcgacccccttctagtcttgaccacgatgtcatcgacgta

SEQ ID NO: 75133 - DNA, 415 bp, Zea Mays
ttgagaacggtgtccggcaagaaccccaaaataaagaagagctggactgaggacgacggtagaggtaggtctctaaaatgtcaagaagggacgaggtgtaggggggcacataataaactgaaggaaggtactaacccagtttctgtggagaggacaacagcgtcggcgactatgtcgttgcagtgctgaagcgtacgcagtcgtggggtgctgggttcaccgatgaggattacacaaagggttgcatcccctgctcgctgtagctgcgcgtgggtccgcacagcgccaggggccaccatagcagcggcagaccggctcccatgcagaaggtgaaggtggatcggtcctatgcggctcccatacggtggacgaagcacgattgggtcgaagcagggcaacagtggtagccaacggc

SEQ ID NO: 75134 - DNA, 492 bp, Zea Mays
cacccgaccacactatctctaattccattcatctcctgtcctctcgagtaccagctctatatttgagcaacctcaccgtaccaccgcaccctgccccgcccatgattcgacattgtgcgagtgtgcaaccacgtcgtccagccccgccgaggatctacatgcgtcaccctgcgccccagcccgcccaagcttcctccgactccggcgtctcgatcgatctccagcgtctcgcgctcgatcttcggctacccgtgaccctgactgcgccctccgatgatccttccaacttccctcagtgtccctttttcttcaagtttcctccgattagtcaaatattgtctttctcagtgttgcatagttgattagatgaaaacttaattattttaacatttattataacaataattaaatgttatgtagtctaaaaaacatatccaccggatatccgatacccgacggtacccggtgggtacggatacaggtacagtttct

SEQ ID NO: 75135 - DNA, 418 bp, Zea Mays
ttgacccgaacaccccgagaacggccggtccacgtgcacggcggaaaccgagcacgggagtacatgttcccgccaaaccatggtcgatcagagcaaatgggcgccaccatgagcttcgcaagcatacagaggcatggaaacgacacttgaattgaataggaactcaccagagtggcccagccacgtgcgggctgttttttgcgatgcggcggaccaatttgggggaaatcggcgtcgcggtggctctggttgaaattggggttggggattgaggctacttggccataagaagctgtgctatcaccgtgcgcaaacgatttgggagaaggtggagggagcggtgcgaatttgactttgatttagtctctgtgtttgcgatgatcacccttcgccgtgaacccaatggctatttatagcc

SEQ ID NO: 75136 - DNA, 948 bp, Zea Mays
atcgctctatttggaagcatcctagtgctcgctactagggaaggactccaaatttgctatccaacatcacctttccctccaatcaacctaaatcaactaagggtcaatcctagttaacctatggttggacttgataaaaatactctaaaatgaatgccaaataaccttcctgagctccctacaaaatattaccaacccctaggtcaaggccaataacacaatattgaacctatctccccaaaccaaatttcctaatttttagtgatctactagatcgaccggtgctttggcaaaccgtttactagataatttattctacaaaatcagtttatatgagcattatggcggtggtggaagccggaaggtgctcacaaaggctacaatggaggtgagagtgtgggcactgaaggttagcatttgcgtaaccctaaaagtagtggatgatttaatttgtaacataacagaggggtgcaaagtatcgcatgaagctgaagccgaaagccgagctagaagctgaagcattacacaaaatcagaagtgctggtccggtggatttttgttgagttgtgccgagtcctaggaatcgggggctgcatctaatgtagataactcggctaccaaggaggataactcaggccaattataatgagtattaataagatccaattttcagagtcaaatatactcgagttgatcactctgttaagtcagactcgaaggctactattaaaaatatatactaggggtgcctaatacattccaacaaaaaaagaggttgatttgtgggcctcggggacttggactcagacactagggtactcggcccacatgtcagaacaagatccgcctacatgaaatagataacataagacatctttagcacattctgatctataagggagtccacatgtaggaggtgtcaatcagtttgttcttcatccttatcta

SEQ ID NO: 75137 - DNA, 571 bp, Zea Mays
ttggctttgtgtctgagtgttttgagtctgatggtgaatctgggagttcgtttccttggacggaggagtcctcagatgaaggtttggattattttgttgcgttggatgtagctgcggcggagacttcgccgcgtgtggagggtgtcggggatcttgctagtgcgagtactgggtatatgcggcgaagggtggtgggaaaacgtagtgtgggtgaatttttgcgaagtggtaggcaccgtcgtatggggatggagcgtggccgtctccgagtagaccgggttggtaaacgagaattgttgtcctcgccgattggggcgagcataggcgagggggatcttcgggatctttttaagggtgaggaattgaggataatgttgttcaattacagggagatgtgtatcatcctgaaggttgagccgatgtaatatgtgatgccctcgccgtgtgtatgtaactgtaatttgtatggaaatgtggcctgtacgccgtattcgtacgcctgtgttgattcggctacgcccgtgggcgactttgcgcggagtgtctttttaatgagagacttcgattaacg

SEQ ID NO: 75138 - DNA, 812 bp, Zea Mays
ctaataacttacataaatttcattcatgtcatatctagctttcagattctgaagaaccccgggttcgtgcagataggcaagctttgtcatgtcatcgactccgcatggcgcttcctcgggatccttagcatgaacattagacgctttcaccgtaacctaaacaaagggccaggtttcaaaactcaagtgtgcatgtcatccataactgttaagtgccttgccaattatagaaggtgtgcctcagcataggtgcggcccttcttaaccgtttgccttttatatacaagcctagcagtgccgaaacttgccaacataccgtcttatcattggaacatctgaccgtaaccgtgtctccattgacttttacaacctccccgtcgatccaagcgacaccggggtcctcgacccaaacttgggatcccgccgcaatggaagcttgcgccgcctgcaggaaacacagcttgacattaaaggatcgccgcacacctctacctccgatgtgagtgagatggaatacagaatataaaatgccaaggcctggcagcctggtgcatgcgaatggccgcattgcggctaaataaggaagctctatgcactaggttgagtccaccgcccattaggtggcgtgaggtagagcagtgccctgggcacgacgatcagcaacatagcaaagcacgagtcaacggccgtggcactagagttcgtcggaaatggcaccgtcatttctcagtcgccgtccagatctccattacaacgcttggagcgggggagatgggcctccattagcgttccaggttattattgggaagagg

SEQ ID NO: 75139 - DNA, 611 bp, Zea Mays
aaatgtacctcctttaggttcgacaggggtctaggtgcactgcgatattacctaccttcgtcggttgggtctagtacgtgtaatttgacatagatcacgggaaacacaaggacgccttgacagagagaaaggaattagagaggtttgggccacgagagcataatacactgcgtccttttttgggtggtcagtattgcttggaaatggctaagtgccgataggtaggattttcgtgagagtctaagagcgggaaaagagaactagaaagaagtccgagtgtgtgagaagaggccctacgcatgggccaccctttccctttttatagaccaagggagagagggttacagctaacaagtagaaccaggctggtagcctgacccaccctatttttatggagaccctattgacattagtcttaggtcctatagaagcacactctacacatcgtggatgtcccatacacgtgtagggcattcacacgttgtggaagacagaggacatgacaggttgtggcacacgtcatccacgctaccacaatttcccacctatgccacaccctggaatgttcgatcctaacaactagggagtggaaaggtgcagctatagtagcg

SEQ ID NO: 75140 - DNA, 612 bp, Zea Mays
ataaaccaatggatgcaggaagaggaccacccaagtccatgttgtaggagaaatccctaccaaatataggtggcaatcacctcacatgcctgaaaaaatgttaaaattacaatccatgtgcttgtttggggactcaaatcaaatcaaagtgtaaaagatgaaatatttcatacaaggtctgcaattcggatagagactggatgtcacctgaaagggaccctgacaatctgaaacttgacagtcttctgcaagaacaaccaccatgaaaccacacagtgagggatgaattgctcatctataaaaagagcaaatataccaatcatagtaatatctaaaatggagcaatacattactattaagataatattagtattaaaccactagaagccatcgatacaagaaaatattaataagaaaaacaagcttcttaactagctaacatctgaggtgcgaacaaaagagaattacactagagaattctaaagccatgaatacaaaagagaattacactagatgagcagattaataattcttatatgttatccaccaacacatggtatcagctagctaacatctacggtcttggatatttctctttccaatggtatgccc

SEQ ID NO: 75141 - DNA, 389 bp, Zea Mays
cgcacatgtgcaagtgcagcggcgatcaccaacaacacctggatctggcccctcgggagggaccccatcagggaggagagatcctagggttgtcttagggtcggtagaccacccaagacacctacatacaacggagagtcgaagagaggtaaagatggacatggaagaaggctacattactgctgctccaagggcaaaaattaaaggaatgaaagataggttgatttggttcgtttgttcgtgtgcgtaattagatgtaccccatcatatacgaggaggtctagacccgttgttaggagtctcccaacaaacctcgtgttttagatcgataaacacgcatggaaaagggagacatctcgcctaatctgatctacacttggatagtgcag

SEQ ID NO: 75142 - DNA, 747 bp, Zea Mays
ggcgagcctagtccatgccctacttgagctaatccgaccctaaatgccctctgcccatgacgacgacgaacaccgagggcaggccgagctgttcccgacgactaggcgtggcagcgttctaagcatggggagcatcaccatacctaaaggaagctagaacggatagtaattgggctggaattaccataggagaaggtggccacggaagagtcctcttcggcggcgatggcgaccgaattggggggaaatcgaaattctctggctacggtggctaatcgagggcgaggggcggtgctctgggttcgtaacaagttagcggagtaggcgggggcgtcaatttatagcgatcaacagcggtggctccgaatttggggaagacaagctggcggccagagcaaaggtgagtcaaccgagttcgctcaatgtggcattcactgtgcaaagacttacggccatcactggttatcctccacaactcgcatcgacgtggtgaacggcggcaaccccggcgacggtcggacaaccacgtcgctggtgcaagtgggtacggtgagactggctcgatccactccccctcatatctttttacctcccgcggttatccacttcacacagggcacgaatcgcggcggcagacgtgaatcgcagtgcggagatcaccagcggtgagttcactgaacctggattcttattcagtccactgtaccatcgtgatccaattcagtcgttctgacaaagcaacttgca

SEQ ID NO: 75143 - DNA, 312 bp, Zea Mays
aactcgcatgacaaaaatcaaccaacaccataaacaactatcgtcacatagaattcaagttttatatcaatacatgatacacgttgaaagaaggaaactatatgaataaaaaagaaaacgtatcattaagttcttattgaccgaggcaattgtatccttctagttttgagacgttgaaatcgtcgaataatgaggtcatcatcattggattttaagacctctttatcaatataacaaattatcaaatcattcaaccaatcatcttcaatcttattacacagttctctcttaagtatattcatagctaaaaat

SEQ ID NO: 75144 - DNA, 469 bp, Zea Mays
acggttcccaagcgaaaacgtcgacatttgcccagaggaaggcgacgagcgcgagttcctatttctctcccagattgcccacgatgcgggtggtctgggaggagtccgcgccgacctggatggtcttcacgggtccgtcgtctgctccgtacggttgcacctttggcaccttggtaggcgccttggtaccagaggtcgaggggtccctccctccgtcgtccggtcgagcagcttctgccgccagggcatgcagcttctcgacagccatcaccgcagtggcgcggtcgccccacacgatgaggaccctagcaggggacgacatcttaaggaccaaatacctataatgggcaatggccatgaaccgctatagggccggcctgccaatgatggtgttgaaggggaggttaacctccgcgacgttgaactggacgttctccgtgcggaagttttcctcggtcccgaatgttac

SEQ ID NO: 75145 - DNA, 652 bp, Zea Mays
gagcagagctcagtgcctttgtagtctccagtacaacatctagcacgttaggcattctcctcctcttgggagttgcggcagaagttttttgcaccttcaacaaacccgccgctcccagtggactcaggatttatggtatttttgtcactttttccacctgtggttctttggccttattatcttcagccttggctggctcaattgtagttatcttcggtactacactcggctctacagcgctatgcataattgaaacactttcttttgctttggcaactgaagaagtacctttgccaaattcaggaatcacggctggttcaatgtaacgcggtcggtgagtcagaaccttcatcttcttgcccttcggctcagctatgatggccgaagcagcaatctttcctgaagcagtaatctttctctttaaccctcaccctcgcaacgcgtagcaatagtcagggtatacgaacccaatagcatcaaataccctattcaaacttttcttattccgaccaccgaaagctacacacaaggcattgtccttggtcttgaagtatgccccaagtagctcgttgctagtagcttcaatgcacttcagccagtcatcatttggctcatcaaatttatccccaaacctgaaggtatacttcagccg

SEQ ID NO: 75146 - DNA, 804 bp, Zea Mays
catttcatgtgctgttgtcttgtctcggttgcctgtccgtgttcgtcatggcaatcttcttggttgccggacaatatcatatatcttcagaaatgctgctaccatgcgtgtgcaataaagtgatcttctgactgaactgaaagacaggaggctagcagccacaggtttctctagtgtaaaatctcgccacagctgtggtatcaggagtttggcgccaccatagcttgacgtgttgtgtctgggaagcgctgtataatgcattcctggcttttctccaacagcctagacaaacggccacgtagagcagaaatacctcttccacggcactgtagcatgatcaataaataatgcatacgaagtacaatttacgcttcaggaaagaattgaaccaaaaatgaataccaccctcctttttcgaggcatccagccacaaagtaacgaccgcttcctagaacctacaaacccattctagaaaatgcccacaaaccaaccgtcagagcgaaagagaggtcaatttgcgtcggttgttgcacatccaactgttttacatgccgccgcacaagcactgtacaagaccgaggcggatttagggggtctgcggtggtcagctgactccaatctctactactacataagtatgtagtgtagacgtccacaaccagtggtgcacggttctgccaccatcctccccaccgccgccgtggtttcctcgcatcccgcccgcccgcggcgctcctttccatcctcgagcagtcgcgacttccttctatggcgctcctttccatcctcaaccgcggtttcctc

SEQ ID NO: 75147 - DNA, 533 bp, Zea Mays
agcttcggactgctccctcgcatcatgttactgctggttctgaaattgccctggttgctgctggttgtacggtgaagttggtgtcggggtgggtagttgaggtaggacccatctggccgaagagtggcttgctgaagcaactgaagctaaaggctgctggattggttgttggttgtgaacatatttttggatatatggagagtaatacgaagtagtatgaataacctgcttcgattgattttgtcttgcttcggcttcagctatttccttctgcctttgaattgtaacttggcaagttcttgttgtgtgccccttatcctctccacagaataggcagaacacccttcttggctgagagttgtatctccctctgaagcttcttcctcctctgcctcttgggattggcggtctgaaagaactctagtgtatctctgttgattgagagtggttctgctgcccttgagtatggctgttcttgtcttcactttggcctgggttgtggattgttctgacgtgtcttgggttaaatcttc

SEQ ID NO: 75148 - DNA, 350 bp, Zea Mays
cttttcacacctaattcacttaaacctaaattggtgacttacaccaactcggtcatgaacaaacgaccgaatcaatatgttcatgattaccatccattctaacctaacatcaaaaccatatcttaacctacttaatatagtctatcatactcacagctatcttagatacatgtccctaactcagatgataacaccaagatcgaaggagatcaacctcgttaaggaaggataggagtcaaaccagatctccaaatgcgtcaggattcaccattcaaaatagaagctttcattgcccttatcttttcttaccccaacctacccttattctaaccatctcttcttgcctattt

SEQ ID NO: 75149 - DNA, 348 bp, Zea Mays
gttgaaggccattaggcatgcttgcacttcattcccaattgcgattgatggtcttctaatgccgaagcgcgaccatatggggcattaaatgatgcccctcacatcctccctctgattcagatcattctttacgtaaagccattgcttcatccaagagcccggccatttctttcgaaatgtaggcacaagataatttgcctcagagcggggcacaaaactatagcagccaaagttgttatggtattgttcttttctggttgcctttgtcttgtaaaataattcgtgaatattgtagaagcgtctagcattcggctctagcccctaactcttcatagcccatataaaaac

SEQ ID NO: 75150 - DNA, 462 bp, Zea Mays
atattatccttagttataacaatatatatacaatgtgtattaatgcatattcatttatgccttcagaaattgaatatccgttgcatcccttatgatgtcattgtctcaacttggataatgagcgatcgacagcgggatgttgttgctaggttgggatttcaatgtatatttgatttgcgtactgatgcgttagagagcagatctctcataaggtggttgatggataagttggatccagacgacatgacaatatgcccagaggctagtaaagaactgaagataacaaaagagacggttcgtcttattttgggatcgccaagtgctggaggtggcagggagttcactgattggtatggtgaagttgacgctgcttcaaaactgagacgggatctcaaaatttgtaaagaagagtttgatgttgttaagcttaaggacaagctagtgcttggcaatgatgatgag

SEQ ID NO: 75151 - DNA, 341 bp, Zea Mays
aaagcacatgtgatgatggtcacaatgtggatattgaggagaaaccctaagtaacacctagggtgttacacccgcttgccagtccctctcccctccttcaaccgcttgcccacacggaccgcgcatgacgcacgccaagatcgccacgcccacatcgcctcccagcgccaaattaccgtctcgaccccctcctcaagtgcctgcatgcacctagttcccctctgcctcattcatttccccctgcacactcacccgagtcgcgcgtgcccgttcttcaagcttgccagagctcccccatcgccaggactcctgcgcccgaatctgcccctagcagagcttgt

SEQ ID NO: 75152 - DNA, 329 bp, Zea Mays
ctggctgagagggcgctacccttcttcaagctcttacggaagtccggcccattctcttggaccgaggaggcagagcaaggcttccaagagttgaagcagcaccttgtgtccctaccaatactggtagctccggagccaggggagccgctatacttgtacattgcagcggctacagaggcagtgagcatggtgctggtcgtcgaaaggacggcacaacatccctaggggagtcagaaagttcccctaggagaaggtggtggtccgaccaccacggagcttgagggctcgggaccaaccgcaggggtccagaccatccagaagctggtcta

SEQ ID NO: 75153 - DNA, 874 bp, Zea Mays
atttatttatgcactaaaaattgatttctgatattaatttctgatttttaatgctctctggattgggcctcaaattccagatagcgcaggggctcaagcgcataagaacccaagacacaccgcactgccctgaggacggcggttcataacacaaaactccagggactctttagcaagattaccgagccgaaggggtaagttctattctggaccgtttgatcaaaatgaacggctaggattaaaacacgtcgcctgaaccgcaacgcatccgaagtcgttagatcggcgaccgacggacgacaagcgatcacaccccgattcaatttacatcgtccgatcgacggccaacgtcatagattaaatgcactgaatggttatcggcatcacctaatccataccctccgcggccagatcgacggcccggatcaatcagagcgaacagatatcccgtgcttcagatccccgccatccactcacgatccgacgacccagcgtaatcgcccccaaaacaccctgtccctgactccaccagccggtggtgcgcaccgcccacgacggcgtctcgccggagttcggccgattcggcgagccagggcaccaagctcaccccagatcggtcccaagcggagtataggcgagagtgaactataggaacaagttattacctgcaatcccgacgtcggaagccgcgaccacgtaccacggcggaagggaaacgccgaggatcgattacttgcgcctagatggttctccgagcatcattggctctgcgcccacactccacacggcgaggcgaggcgcgaggtccttactccgagggtggtgcgtcaattgaggcggcgaatcgagtttcacccgagacagcctccggagg

SEQ ID NO: 75154 - DNA, 350 bp, Zea Mays
acggaagggagtagataatctcacgagactgcctttcgatgcccaatccgaatgcgatggcatgcgctagcccggcatatagtcaaatcaaccacaccaacaccaccaacgtcccgaggccatcttggcatgtcctacatgtggactatgtaaagttgtggccgcgtaatggttatgaatcgtgatgaccaactgaatgcttctttagatagcgtttggttccgtgactagtaacgtacgtagcaaggaaaacagatcaaggggggaagtgcgcggggagtcttgagtctcagcaggtgccttgatttgtttggttgcgtatagcaagggaagcagcagtggcagaatgc

SEQ ID NO: 75155 - DNA, 983 bp, Zea Mays
cgctgatagcagccatttgttactgatactattcatcaaggcgcgtagaaaattgcttgtgcaatttgatttcgtatttgacagcacaattctatcttatataagaattaaattatttaaaaaatggttttagattttgatcagcgaagtgtagatacgctattagtcatgtatgtctcttaactgtggatcttgtctcaacacggtgaggttctctctggactgttcgttacagtcctggacggaaggtggttcgattccaccaagatcctgtagtccttatttaaataaatacacaagataatataccatcagaggtttgaggaattcagacacatgatgtgcttggaagaattcttagacgtgggttcttggatgttgaagtagattaaagaagaaaacttggagagctagaagcatgttgctcgtccaacaagacaaacaagataagtgcatcatttaaagacaacaatcaagaagacgattgaggtctcttcaagtgaagatgaatcaagcttcaaagttgaggacgagttagacttgttcatgacgaaattcaagaagcacttgaagaaggaagatcttcaattatcaagaagccattttctagacctgttgtatcagaatagtttgtgtgcatctattttggatgtgaacaatgttttttttctattgcaaaaaggtcctaagtattgttttctatttaagaaaaagaataagcttaaaagtaggggtagaaatagtctaaatattttctgaccgtatgattcatattcatttacaagagttcaactgtttcagtatgtttgtatcctgagtccagatattcaatattcgatactgaagacatagttaacaatatttgtatttaaaaaataaatagtatatttttctatcttaattaaaatatagagtatcttctacttttctttaaaaagttattactctaaaaaaataagagcccaagaataaaaacatttcta

SEQ ID NO: 75156 - DNA, 710 bp, Zea Mays
gccagtttggttagagagaagcaatgaacagtgatccgagagcgaagaagataggccgtgcagcacgtggctatgaaaagcttggtcccattcagcatttgcaaagaccctgtcaagcttaataagggttgggtttgtacgctcgttgctccaagtgaatcttctattttgcaggttaatttccttcaggtcacaacagtctagcatatcactgaaacggttcattaggctaaggttcaaacgcctcttattcttgtcactagctttgtaaattagattaaaatctcccaaaagcagccatttaatttcggattgcggttttagatcttgaatttcttggagaaaggttgtcttcatgctattgcttgtaggcccataaaccacagttaataggaaggcagtatgggatgctgttagcttggcctttccagaaatatggaaatcgcctactgtaaaatcagtcagctccacatggttggtatcccatagcaatgcaatccatccccatgtgtcgctggggcctcctgtcggtttgtagaagaatttgtctaggtggtggcctccaaggtgccgggttgttgtttggtcgaaggaagacaatttagtttctttcaaacaagctaagtgacacctcaatgaagtgattgtctcttggaccgtgtccttccgagcctgggaattgagacccctcacattccaacaagatcgag

SEQ ID NO: 75157 - DNA, 598 bp, Zea Mays
tccttccatatacagagaaggtgccgatattgtgggaggtgtgttgcagctctcaccggctccggctacacagtctccgtgattggtttctgtacgatggtagtctagcctatacccgaaaagttaggttctttgagcataggctaggcccgtttataggcttttgtttggttatttatattggtttatctagaaccggcttttgtttggttatttatattggtttatctagaacggatatatctaatatttggttgtttacatcagaacatgtactaagacaaaagtgcgtaaataaaatttaaaatatacacaacatatgtggtctagttttctttaaaaaaatatcaggaacacgatgtagccgatcgagcttgcacgcgcgcgtacgcccatgatgccgcggggctcgctctaggcgcttttaaggatcgtatgggcattgtatctatgcatatatacaaccaaacaaatggtgctttgaggatccgcgggtccagctgcatgcgcggagaagtgaaccaaacaaccaaaataggaaccgaggtggttcccgtcgtccaaattaatctcatcgtcttttccaaaagctggcggc

SEQ ID NO: 75158 - DNA, 1069 bp, Zea Mays
gagaagtcgaaggagacaccacttggtgaaacaagtacgatgccaattctttgcccttcattgcaaaccgatccatcaaaatataaagtctaaggagtaatagtgaggtatgacatgtctagtttatgagtatcattaatccgatgttctacaataaaatccgctacgacctggcctctcatagatttcaatggctcataggccaagtcatattctatgagtgcataagcccacttaccaactctaccactcataattgggttatgcaacatgtatttgatcacatcggcttgaccagaaatagagcaatgactatacagtaaataacatctacacttggtgcatgtataaaacaagcataagcataacttctcaataaaagtgtacctcgtttcagcatccaccaacctccgacttagatatgtcaccacatgctcctttccttcagtttcttgtgtcagaacagtctcaatgaccttatctttagccgcaatgtataatcggaatggcactcctgctcgtggtgcttttaatacgggagccgaagataagtattttttaatgtgatcaaatgcttcctgctgctctgccccccaagcgaattcggcatcattcttaagccgaaggataggggtgaaggcatcaatcttctcggctaggttagaaataaaccttcataaataattcaccttgccgagaaacttctgcacttcgaccatacaggtcgaagatcccacattccgaatagacttgattcggttagggtctatctctataccatgttcatggatgacaaatcctaaaaacttaccagccgacactccaaaagcacatttacatgggttcattttcaaaccatactgacacatcttatcaaaggctttgcgcaaatcagctaaatgagaactaaactcagcctattttactacaatatcatcaatgtagactttcacagtgtttcccaacaactcgtgaaagatcaaattcatagccctctgataagtagcaccggtattttttagaccaaatgtcatgacaacccactcaaataaaccaatgaagcctagac

SEQ ID NO: 75159 - DNA, 610 bp, Zea Mays
gagaggtagttgaatgtcttggtatttgggagtattgctactggtaggtttgggctatggtcttcactggttggttcggcattgttcttgccattctttctttggtctcctttgtggccggacaatccttggtggactgcctaacgtctttgccaaggaaggcatagtacaattttctatcttgcgtaggcctttgcctcgcccgtggcctctgttggtcttgtccccttggcctggttattgagggtgattttggttgcacgggggcttcaacctactgttgttgattggtaatgttgtgtacttgttgttggcgatcatgctgctgctatggcttttgacccctagtcaaaggtttgctgcaagagtggagatatccttcgactttcactatgtttctagcttgtagtaatgcagctcctctgaccttgcatatttctcaaaaagctgatagagttcctggagcatgcttggggtccctggtgtagtggttgtagatgtggccagcttaaaggccgatgattgcatagtacacgacgatgtggtcttcgaccgatgggagctaggacttcattaacaagaatttattgtagtaatcgcaaaggctttc

SEQ ID NO: 75160 - DNA, 705 bp, Zea Mays
taacaaacaacacattataaaacagatcaggcgtataggcacaaactcaccgacgatcgaaaacgcaaaatggtgttatgtctcctccaagctgcgacaaaattcccccaagcagcaagtacccagatcactggaaaaaatagcccataagaattagccgaccagtaaggatatatctctatacataggtagaggctagtgcctcttttagagactggcagactggtatgtcgaatatcaattccaaagaatctagattgtagtaaaaattggtaagctctaaacatgctgggcagcaggcaggaaacctagaccacccagcatctaactgcacataagcataaaaaaattggaaatgctgaaacgtccatgtaagaagccacaacaatgtgatcgctagctacatgctccttaagcgtggaactttttcttattgctgggcattagaaaatatagtgtaggtaaaaggagaatgatgtgcataggtgcacagactaaccgctgatcgaaaaggcaaactggtgagtgtctcgtccacgctgcgccacaattcacccaggcagcaagcacccagagcactaaaaaaacagccaaaaaagaatgagctaaccagcaaggacttatgtacacagataagcacgcaaatatacatatgtatgcagattctttgctgcattggccatattttgttgtcactttaccaac

SEQ ID NO: 75161 - DNA, 291 bp, Zea Mays
atcttttatggaaggaggaattaaataatttacggaataaaatttacgtgtagtttagttcgtgtataattaaaaggtatctttacgggtgaataattaaatattatacaaagaaaaatttacttgtcgttctcaaattattacagccgacgttgttcaaagataaatagcaggagcaggtaggaggaggaagagaggtaagacttgggaaggaagaaagttttgtgtatcttcttacatgcctcacccggcagccattccctcatacataagcctcccagcgcccactag

SEQ ID NO: 75162 - DNA, 804 bp, Zea Mays
agagaaccaaaatagggcaacataattaaagtgatagagtcttctttcctataatccactctcaaagaaaagaatggttagaggaagaatgtttattgtatggaaaatatttgagtaaagtttcccttgcatatttttaaaaatacatgttacagacatggccatgggaaaggctaacaccacggtcatagctgctaaaatttaggaacaacattgggagaggaagaggtcgaacatcatgggtgccctcacctatggctcagattgatggtggcagctttcattgaagatggtttgctctttgatttgaagagtaaggcaagcgttgtttgggttatggaggagcgacaactagatgatggatgtgttgatggcttaggtaggtgtgaagtttaatagtatgggcattagggtcgatttatcggcagtggaatgacaactcgctatagaggaaaaatctcgactagcatagtgtgagcggcaacatcatcacaatgcagtcagaacttcttgagattggcagggcaacttggctcatggtggggcacacatttagctttgattgaagtgaatggctgatgtgtgcttaggcaggtgcatttggtcttgcctaagtatttctttgcacttaggtatcactttaaggtttgcaacatggcactttaactcggtagctcggtgtgcacgacaagtctgctttatggcattgggttgaggtgggggctcaccggggtgcagggttatcaaggatgctagaggcgggcttgcgatttcttcatgcatgtttttcgtcctagatggtta

SEQ ID NO: 75163 - DNA, 565 bp, Zea Mays
tctggtaagtcgctccatcgtttttgagaccgaacgacctggaggtatagcagaaagctccaaacggggtgatgaatgctgttttttcctcgtcttcctttgccaggctgatctgatgatacccagagtagcaatccaagaaggacaacatagaacacccggcggtcgagtctaccacctagtctattctaggaagtccaaagggatccttcggatagtgcttgttgagatctgtatagtcgacgcacatgcgccaatccactttattctttttgagtacaagaataggatttgctagccactcaggatgtagtacttctctaatgaatcctgtcgcgactaagcgagctagttcagcacggatggcttctctcttgtcggatgtgaaacgacgcaacttctgtcggatcagcctcgcctggggatagagcttcagtttgtgctcgcccaattctctcgggactcccggcgtatccgcaggttgccatgcgaatacgtctcggttgtcttgaagaaactggacgagcgcgccttcctatttgtcatccagactggagctgatgat

SEQ ID NO: 75164 - DNA, 443 bp, Zea Mays
ccgaaaagaaagtatgcatcaactcttcctcgtatgtcgagtcctgtggaggctcgttagatggaggaaaacctgatgaagatgatggaccctggaacagaggaggaggaggcggagggtgaccagagccggaaggcctagggtcaccaggaataggtccaggggcggcaacaggaggagactggaaggagtcgtcaaactcttcggcttcatcctcaggagtaacgaatggcacaccatactcctattggtgccattcattaagaggcggaggagggcgctttggcatgtgatggcccatggaggccatgaagcctctcatgtcatcgtgcaacgcctgagtctcgcgcctgtgcacagcctcctcgatagcatgactatggcacattgcgaagaccacgacgatccccttatccaggcgcacaaacaggcctcgactgtga

SEQ ID NO: 75165 - DNA, 429 bp, Zea Mays
ttataagggagctggcccccaacaggtggcccaggagcaatttacacagtagaacaagaggtgtcgaataagcccgacgacactagatcttcctaaacttgtatctcctcttggtcgttgtgctggctcccaatgtcctatcctctcgtctcgtttaatcagagctctgtcgtagcccatggagtaggttgtggcgtagtttgatacgctgtcgtgtgtaggggtggacagtgtcctcctatcttctccccctataatctctttatgtatcggtaacacacaaggagcaatgaagtcacaaagaagggcgcctaagcgacgcattgggtcaataatcttgccttggtaacgtggggtcagagtgaaatcctgcatgttgcagacctgacgcgccacacacgtttaatgcgggggatacactacccgtcg

SEQ ID NO: 75166 - DNA, 571 bp, Zea Mays
ccggtatccgcctaggatccatcttcaacaacagatattaccgctctcatacgaagaaatcatcaggagcagagaggatacaacaggtctctacaagatcttcatatttctatcacaaattatcatcactagtagtctagtggtcaagacatatgactcttctggctccgaggaccaaagacatgttaatgtctaatttagcttcaagctctgtggtgatgtgggatttcatagttatttgtctactcttctcacttctggtagatcggaggtagataatggtaagcatgccaaagggtggaatttagtgtagttcggctacataaacctcaggtatttgtccattcaggactgacctttaccacttagcttacaatgtataccaaacttgtcaaaggactatcctgagtcaattcagtgactataagtatttacaattctgagagatgtatgcgacacaagcatagaagtcctagatagaacgagtaaagtggtttgacgggaacacactatggttttcacaccaacatagtgaaaaatttctcagaataacctctcggtatactcgcaa

SEQ ID NO: 75167 - DNA, 642 bp, Zea Mays
gaggttggtaagctgagggaagcattcaatgaggtgctatggaagatggttgaagattatgaccttcaagctataatcagtaaacaagctgatgagtatatgaatatggctggccatgccttctcatcgccattagcaattagagaatagcaaaaaaagagccccaataagttccattacctcattaatcatttaagttttgtatggctggcaacactaattcaacttctcttctcttttttagtttgttggtgggatgcatatggtggccttgcatttgagattcaatcctttgcaaagcgcattgttagcctttgttgttccgcttccggatgtgagcgcaattggagcacttttgaatttgtaagtaaaaattgtcatttcagtttctatcttgttttaattgattttaggacatcaccactgattccttatttaacatatagattcatacaaaaaggaacatattggagcaccaaaggttaaacaatttggtttatctccaatacaatagaaagatggcagctaggttccaaagattgcgtgagggaaatattggtaaacctttaatttagaggatttccaatgtgacaatgagtgggtggacaatcaaaatgaaacagttagagaaggggatgatct

SEQ ID NO: 75168 - DNA, 361 bp, Zea Mays
ctggtatatgcacggcgatcagggactggtttttgttctagcttaattgagcaatctgcacattaacaattgaaactacttagataaatgaggactaataacaatcagcaccaaagatgttgtgaaccatgcaaagggctcacacagaatgactttctgctgctaacgcgtattaaaaaagcagcacatgcatgtctacaatattaacgttgcctacaccttgcacgcttttatcagtttgacggcaatatgattgctccattgtagggattcgagtgacatgaaatagaagcagagtgccttgaaaggagctacgcatgcatgctgaattcgaagcagcagtttcaaaagaaaactttat

SEQ ID NO: 75169 - DNA, 295 bp, Zea Mays
tcaaagttgtgccaaattcccttgaacacgccctggaaaagtttgaactcaaaccaatttcatttgacacggttttggcgcagttttacctcgggactcaccttgtgacactgccacctttgtgacacgacaactctctgtacactgccccaaaccgctcgacttccacacacaaatgacaaagctctgtcggggagcaaatcttgtgcagcgatcatgcccaaattcgcgaagatcttcaacctatgggcgcttgaactcgggcagaagcaaaaagccacgtgttcgatcgctt

SEQ ID NO: 75170 - DNA, 1117 bp, Zea Mays
ctcggatgatcaacaggtcgctgacgaagctgagctccacaaccttctgctttctcagtctgctgcaggcctaaaagtctcttccaagacgatgaagttcagaggttctatacagggtgtggaattattaatcctcctggattcaggcagttcacatacctttctgagtgcttcagtggcagcccaacttacgggttgctcgccggtagatgtcccaatgccggtacaggtggccaatggtcataacttgctctgttcttctgaattacgggagacggtatggttcctcaacgagtatcagttccagtctacactgaaaattttaccactgaccacgtacgatatggtggtcgacatggattggttggagttgcatagtcctatgtctgttcactggttggataagtggcttactattccctaccgagggtccatcatcaagctcttgggacttcaagcaagttcatcacagtgtgctgtcatggagctttgccacattgccactctgccagacaaagacaatcagctcgttcaagatttacctgaagcgttgcaacaccttattgctcgtttctcccatgtgtttgctctgccgcaaggacttccacccgcaagagactgtgatcaccacattcctcttttgccaggcgtcagagctgtacaaatccgaccataccgatacgccccagccctcaaaactgaaataggaaaacaggtagctgagatgctccaatctggtattattgaacgcagcaaaagtgatttttcgagctcagtgatcctagtgatgaagaaggataacacataccggttctgcgtcgattacatgcaccttaatgctatcacggcaaagacaaaattcccagttcccatcatagatgaatttctggatgaattgcatggggcagcgtggttctccaccttagacctccgagctggtttccaccaaattcggcttgccccggaagaccaacacaagtcagcgttccaaacccataatggacactttgagttcaaggtgatggcctttggtctgtccggagctccagctaccttccaaggcgcaatgaaccgaaccttgggtccactactgcgttcctgtgtgcttgtgttcttc

SEQ ID NO: 75171 - DNA, 561 bp, Zea Mays
caacgagatcaccttggcacctttcttgaccagccgcgaatctagcacttcttcaggcacctgcaactcatgtgacatgtcaggcaaatcggcgcttacggttatatgcttgccgagaactggtttcaattgtgaaacgtgaaagatgggatgaactgtgctgcccggagggagttgcaactcataagccacccgattcaccttcttgatttcgaaaggcccaaaatatcgaaatgacaacttttggttcatccttttcagtaaccgattgttgacagtagggttgaagcttcaggaacacatgatcacccacttcaaaattttgctccattcgcttcttatcaacttgcttcttcatctggtcttgggccctttgtaaatgcattctcacctgctgaagtacctattgtctggtctgaatcaagtcctgtaggtcaggtactgaacactggtccaccgatatcagtctcaactgtgaaggagcatgtccataaaggatttcaaatggtgactttgccagtgctgtgtgatagcacatgttataccaaaactccgctaggg

SEQ ID NO: 75172 - DNA, 1309 bp, Zea Mays
ttagagagattgtcttagggctagtaactagctcttattattgcgggtgccctaagcaactggctcactaactccttagagaccaggcaactactaacaaacctgaactgaaaactcaaagagtgactcttaacaggctcgacactagactactgaatgtgcaggtaatacttccatcagtgttagattccatgttatatttgacttatccagatgccaagttgggtacccacacctgaatcagtttgtgccggtgcttttattttccttttaaatgccaccaatcagttgacacatgcctttcgactgtaaaattaacaaagatggagcttcttgcatgtactgatctaggatgagttggagtctgggacattggtcaaacatcactagctgtgccaaataacatgagcaatcaaggtatttttgttggtaacccagcagttagaattattgcaacaaaaaaaacgccctatattgtttaactcaaaagttgggggatgggcggatggttgatactgacaacaattggagacttgggaagttagaagtgccttaggaggaatttagcattatcattagactgaaagtggtgtttgatcatgggtttaggtctgcagcatggaaaacatggagctagactggtagagggtgtcagcaatataagtttatgagtccaaatacatcattgtcctcctaaaaaaactctacccctagggaaatgacctcccccaaggcattgcattaagaaggagactcaacctcccaaggcattgtattaagaaggagactcaatcttccacagggccaagaagatgctccaaaggccgacttgtatgaggacccataaccagccgacagcatggccatattgttgttttcctaatattggtaaactatattcatggcatgttgaagtatcatggcaaaggattcacaattatttctgtttttgataggccatcaacactacagttaattaaaggaaagattagattaataaaaatgtaaggatgaacctaattggtaacccgttctctaaagaggtatagggaattggcaaatgaataatggatgcatttgcaatacttgaatattcaaactccacagtttctctaggcataggatggacaacaattcagatcgccacatatactaggcggaacatatgtaaagaacttaaccatcaagattttttatcgacaagtgtgcactggtctttgatgttatgaatatattttgatgtaaagctcctaacctgctggttaggccatcaggagctctgaatctctggtgtacaactctttccttg

SEQ ID NO: 75173 - DNA, 603 bp, Zea Mays
gctcggagataaaagctggtccttgggctcctgccgtgaacccctggacccagtacccaagccttcgccaaacaccattgtcgccgccctcaaaatcgcgccacacctatcgtgagacccgaaaagccccgggggaaggtccgtattgtgatgttgtgccctcttgacgcatcccggtgaaagattcacgatcggttgtgggggaatttctcgccgtcgggcgcatctaccgtgcgtccgctattcatcggtgcctgggacctctgctctacaattcctggtacgtgatgctcatacgtgttcacctggacccactgtaccatctgcgcgtatcggaacatagtattaggtttcaattcactgaatggctatcaccggtgaggggcgcggccgcaggatgaatcgccgccgggatagattgcggcggaggtaggagacgcgacctggtccgttgatctgggacgaacggataggattagatctaggataacggttcggtttagggttgttgtagccgttcgatctatatcgtgtgggcgagattcggtttggggcttttaaatcaggagcgccagatttagatcgtgcggtggtcgatcggta

SEQ ID NO: 75174 - DNA, 905 bp, Zea Mays
agagagatatatctaataataaccatatgtataagatagtattggaaatctttcaatttcttaacttactaatctgctaaggggcaaacaacatatgccatgtgctatagcaatcttgggactttgatgcaaatgctctagccttttctgttggcgacattaggtggtggagtggcagcgatgaagcttgacagaacaacaagttcctttcctttctgaccctgcctccctagagcctatacaaacaagtcagattgagaaattgagaggtagattaggataggattcttgcctggcttattcttttatcctggcttccttttatggaggagcttgcaattgagtgatactactttgcagcaacagcttctgtggcccaccatcacaatatatgaagttgttcggtaacccactgtattagttgaaaaagtttagtttagtttactagatggaattgttggcaaataatttgtgagatattgaggatatatgtgttgtccatttccatgtaatctttgtagactaacattttattaaataatttatgtcactttggcacccacaatacttggggtatcttagtgattaagcagttgcatatgttgcattcatgattatcttgtgtgttatggaacaagaaatttgcttttttattgtttgtacctaactttcggggtttgaaaatttaaagttaacacaactacaacctccctctctacctctggtgcagactgcaaacccacatgtattgcaaaattcagctgataatgaggccatatatgtgacatcagaggaagctcctcatccatcgcttgcattagatgcaatgaatttagacatggctaccacacctgacctagcacaaccattggagagtaaaccaaggtagtcatagccaccagaac

SEQ ID NO: 75175 - DNA, 468 bp, Zea Mays
cttgattagtcctttcagtttggccatcagtttgaggatgataggctgaactgaagcttaacttcatatccatattctcatgaaagcttttctaaaatctggaggtaaactgtgagcctctattagaaacgatcttctttggtacaccatgtaaacacacaatccgagccatgtataactctgccaactgagaacctttataagtagtcttgaccggaatgaagtgagccactttggtcagtctatccacaatcacccatatcgaatcgtaccatttcggggtgcgaggcaacccgacaatgaaatccatgccaatttcttcccatttacattcgagtatctttaataggtgcagtagtccagctggactttgatgttcagctttgactctttgacacacatcacacatagccacgtgtgcaaccacatctctttttagcccataccaccactacttctgcttcaaat

SEQ ID NO: 75176 - DNA, 474 bp, Zea Mays
caaattttaatttgggcaatccttggatgaggtcaagtgagctcaagcaacacattgaagctcaagtgacctagcctcctatgccacttacaaattagagaggaatatcctaccaaaagacatcgagaggggccgaccgaatgagaaaaatcaattcaaaaaacacgaccaaatgaggagacccgacagacaagatccccctaggcatccaaaacacatgaaaggccccacacaaagtgtgtctcatagtcatcctcaagaagttgcaaaacagaaagcagattgaaatgcaaattggagaccaaagcaatatccttgaggacaacgttcttgttcacccaaatggtgccacgagaacccaccttacctctcaacttatccttgaatgtcatgtattcctcaccaatcatgtggctgaggctggagaaccatttggagcttccagtcatgtggcgcgaacaaccagaatccatg

SEQ ID NO: 75177 - DNA, 512 bp, Zea Mays
cccgacggcgactctcccttactctatctctctcttctgcgcaatccttgctcccacggacgcccgtggtctgccaatggtggtggtcgcgagaggcggaaagagggtagaaaggagattttgggccgtggcttcttaaataggcggtagtcggatcgagcgcagaaaccacccgcgcgactccgccgcgattccgccatgcacggcgctcgttagaagagagctacgcacctggacccacgtgtaagcgtcgatggaggggctgagcagagggcccatgcggtcagccaatccgaggaacaagcgcgcctacagactggaattgctagcactgggccgcgtgaagtaaagccaagtgggccgagcgtgcgccagattcggttggatggtgaagttagatgggcctgcagtgagcattcagcccaagtgacgtggtaaagtcccttttgttttattcttttgtaatttcctgttcacttctttctatttccttttcccaatttcaaatattc

SEQ ID NO: 75178 - DNA, 493 bp, Zea Mays
gtgattgttagctaaggaagaggaaaggaggttttctggtatgatacatagtatatatttcatgaatttggaagtggaggaactgttcattggatggagaggacaaattacaatggggacatttgatctaccatcatgcttgaggcggttttctcatatggcttgtggatttgacgttcttcttttggggtggcggggtcaaacaacgacgtcaatatgctcaacttatcatcgttgttcactgatgtgcttaaagatgaagcatctaatgtgaactttacgataaatggtcatgagtacaaccaatggtactattttgttgatggcatctaccttcggtggtcggtgtttgtgaagatcatttcccttccgtaggctccgaagtagtggatattttctccatgccaagagggtgcacgaaaagacatatgggaagtatttggggctctcaaggctcgattctatattcttgctgtcccaagttgttcctttg

SEQ ID NO: 75179 - DNA, 417 bp, Zea Mays
ctttttggccgtgctacacatgtgtgggggcattttcgttgttttattacaaggctatgcctcattaaaaacctcaaccccttcatgaggaaaatattatgggcccaattgtttagtgttttgaaaactacatggtcatctgagggccctttcggtcgaactcacttttatacatagaacgtgtgtaaattgtccacgctccaactgtggtccagttgtacgcctatttggttggttagcctataggagtatggtgaagtcttcttggtgacgatgtagggcccctcccatttgggtttgagcttccctcttgcttgtgtctgaggcgactataagaggactaggtcgccttcgtcgaactctcgggttttgacggacttatctctccatgccttggttgcctcttggtatctggcg

SEQ ID NO: 75180 - DNA, 751 bp, Zea Mays
gatagtagttggggctcataaccgggcaaggaacggtgttgtacggatggctcgactaaagacttgtggacctagcggctctagcgaggggcttcgacctcccccactgtcgtagcgaccaccccgtcgaggttggtagccatgcgcggcatgtcgttggtcgtcgtggtgtagccgtcctccgaggcggtcatgaacaccatggttctggcggttgtcgaggaggaaatctcgaaccgtgggggctgtctactttgttggctcggggtggactgaggcctccctctctaggcgagagggcctcgctcgttgctctgaggtaggctcccaaagccgggaggtagagctctcggtcagttggaccagcgcactctaggagtcccctgatctcaccgtggattcggcgtccctcagtggtggatggctccggcatgtttcggagcaagattgctgctgcaatgagattctggctagccctatgaaaggccggaggggcttcaacctcgacatcttccatgatgcgacgatggacgtcgcattccttggcgcgtgctcccttgttatgagatctacacgccgcttccctctcgagaacttgccaaagctattgtagccactactgttcttcctcgagcttggcgtgcagctggtcgaggtgggctatgtgactccccacgggggtctaaggctcaccctgctctcttggctccccagcatgctagggtggtgccagggcattgtcctctagagg

SEQ ID NO: 75181 - DNA, 323 bp, Zea Mays
ttcaacataaccaaaatcactaggagcatatagtcgttcacgaggattaaatttgtacactaccctccaatcaatcaaactcttcttctgagattgatatgtcatataatacacatgctcgcattggtgggcaaggattatagtgttgtggccttgtatttgatcattgtgtttgacttccaccatgccatattggttttcacgtgttgcactattgggcgtaaaccaatcacaatcgaagaacaccactttgagttgtttatctctgaaaaacttgtactagagtatatcattaatgactccataataattagtcacattcc

SEQ ID NO: 75182 - DNA, 937 bp, Zea Mays
gaaggaaacctgcgcctgggccaaaacccctttgtctcggcccaccaacaccaccgcgcagcccatctgccgtccacagtcttaaccgcgggccaaattcctgaacgccagcccactctacgttctttccttttctttttcttgtgtggcgcttacatgtgggtccgcttcgtctatcgttctcctcctccactcggacttgctgccgcctgccggcaacagtgcccgcggaaaccgcacagggttgttggtcgaggattcccttgtcacgcgcatataaatggagccctaccactccccttcctccatcaaatcgaggccataaccaggccgatgggtgactcgccaaacgccaggggggtttggtgctcgtgcggccgccatggattcaacccggctgcgcggtcgttcggatcgcgtatggtggtcggagtgcctaattgaagaacgctggagcatgtggtgctctcgacgggcgcgattggtgggcttggggtgatcaatttctcactggcaaacaaatttccgccgtgggccatggtgcatcgtgtgcagacggttgtgccgcgctagttcatgtaaggatgattcgttcggatccgccatgatcttctgcccattctgcgcttactctcgtatggattggggcactggggtggctgatgcttctcctcgtcggcgtgccatgccgtgttgggcggcgcggctgccaccgccgtggagcttgggatggcgagtgggcacgatggactgtgaccgttgatctggccaggaccggcagagatcaagtcatgggataacgataaagcgttctgaatctcgaccgtccgatttggattgatcgggtgagatctggtcttaggggttttaaatctgggacgttgcttttggatccgagggcttggattgcgtaccggttcgataaagccaagatcta

SEQ ID NO: 75183 - DNA, 744 bp, Zea Mays
tttagctagtatttttaattccagaagaacctttggtcgtaatgtaataatgctccggtcaagcaaataatatttggttaaatttcgttgatgtgtgtttagttcatttgctcttgttttatgactatgaatacttcatcccgaatgatgaattaaattaatgatatatttatttagaacaagatgtttacttcccacgatggagaccgatggtgaaccatgcctcatcgacagcgctgccacgcacacaatactaagagagacaaaatattttcagacacttcagaaaagggctgaaaatctaactactattgcgggcaacaaaggtcgcatagtaggctccggtcgagcaattgtcgtccttccaaatgatactaggatcttcattgaagaagctttcctatatccgagcgcaactcgtactctcctcacgttcaaagatatccgtcgtagcagttatcatgttacaactgcacgtgagggtggtgctgaatacctccacatcacagcaccggatgaatgtgagattaaagtggtagaaaaagcgcgaggcacctcctctgggttgtattactcaaagattaagccacccccagaatatgttgcgatgtccactatattaaaaaatcccgagtctttcagaatctggcatgaaagactaggacaccctgacttaaggatgatgcggaacatcataaataactctgctggccatggcataaaaactaaacaaatccctaagga

SEQ ID NO: 75184 - DNA, 1184 bp, Zea Mays
aaacttttggggatattcgtttttagccctgtagcatgaccaaagatgtctaaaatgctgataattgctgagatatcctgatgagagggccgcatgaacagaacaatatcatcagcataggagatacaatgtttggcttgttgagaggcaatcagctacaggatatgttccctgaaagcataactgaccatggcattcaaagcctccatgacaaggatagacaacatgggggacaaaggatcgccctgacgaagacccctatgatgcagaatgtattctccaggctcaccattcacaaggattcttgtagaggaagtgcaaagcagcagactaataaggttgcaccaattttgaccaaatcccatgtgatgtaacatgtcaagcaggaatgaccaggatattgagtcaaaggccttgaaaatatccaacttcagcaggatgtgaggctctttcatgttgtgtaaggatctggtaagttgatgcaccagcaagaagttgtcttgtatactccttcctttgataaaggcactttggttgatagagaccatacttgggaggtggggtgccaaccgagctgctagcactttggttaccaacttagcaaagctgtgaacaaggcttattggcctatagtccttgaccagcagggcatccaccttcttaggcaggagggtgataaaattcgtgttgaggagtttgaatttggagacatgcccactctgcacagcaagcaaagcacccatcatatcttccttgatgatatcccagctaaccttataaaaacgacctgtgaactcatctggcctaggagccttgtccaaaggtagatcttttacaactgaccagacctcctccatagaaaaaacaagctcaaggtctctcaaatcatgttgttgaatgcccaggctgtgtaggtacagggtgtagtccctatgttcagctgtaccaatcaggttatcataaaaatccaaggttgtttgctgtttttcttcctgggaggtgacaatatgttcctcaacctgaaattttgcaataaagttcttttttcttgcggtagcgggcttgctgatgaaagaaagaagtatttgcatcaccctcttttagatacaaaatgcgagagcggagcctcgcaatagtgcgctctaatgatgccaatccgaggcaaagatgtttcaattttttcc

SEQ ID NO: 75185 - DNA, 770 bp, Zea Mays
ctgggatgccctagtccgataagcaattatgctcccccgcataacccaaactcgactttcgatggctactaagtgctaccataaccaatttgagtaggtggggaagaatcttactagagaccgtggagcaatggcccagtccacggcgagatgtagcacggtggcgaggttcctgctccgatgagcaatctcccacacgccgatgggcaatccaacccgagtgaaccacgatcacgcgcggtgagtgcggcaaagccctaagatctccctccaatggtgtgccgaggctggggatcgtggtcgtcaatggcggtgaagtcctcttgtttcccctcacaattactgtacaacgacgatgatgaatgaaacacgacggggagagaggatttgggacccaaggtactcagcttttatggttctcgtaggccggtccgagcgcaggcaacggactcccgagtctacgacgaggttccaccatggtcgggcgtggttgttggatggatgggctgacggctcgggtccacctaccggtgataaaccagcgccacacggaccagccgagctgactaacccaccgggcccacatgtaagtcactcagacggggaaaaggaaaagggaggaaaaggctgacaccatggtcccagtagtcagcgcgatcctccccagttggacaccggactgcggctgacgtgtgggacccagatgtcggcaccgacgcgccaactaggccacgtagctgagggggctgatggaccgaggtgcaaacttc

SEQ ID NO: 75186 - DNA, 543 bp, Zea Mays
tatctcattctttagttgagctcgtgcaaaccggttgaaccagttttacccagttcgtttgttgaaaaagtttccacttgcctattcaccccccctctagacaactttcatagggcaagatcatccgaagtccgcgcgagggacagccacattcaatgtgcatacctaccctactcaggcctgcgggtgtatagggacaacaagatcacagtcttgtcaaagattcaccaactgtgattacgcgtgcgaccaccgtacatgcatgtcgtctgccaactcctaatgggacgtgtaatatgaaggggcgcagaccatcccttgggcgcaaacttcgtctcgttcgaagcagaacttgccctcaagacaaaactctgcctcgcccgaacccggtctcggctgcctactcccccgtgaatctcgcaggaggccactccttcaattgtgggcgtctgtgccacacgtcttcaaatctcagaacgggttcggtcgcgacctcgggcggactttcgcctcgcccgagcccggttctaacctcgatatccg

SEQ ID NO: 75187 - DNA, 449 bp, Zea Mays
cgcggcgcacggtcggacgacggctatcaccggcgttcttatcggcttccaccgcgatgacacagtacggtggccggagttctttaacgactggagcttatccacggcggtgatctccaggcgttgtccactgaccctgagcacaagtcgggccggcagtcgcatgaatcgcggagacaatcggtcgccggcggtgagattcttctgccgcggctgatctgatccgtttggttactgtaccatggggagatggtattcagtctatctgacagacaaagtttgggcctcattttctctcaaattcacatggcaactaatccgaggctctgcagcaaaagtgtagagcaatacaccatctacaactttgtaatatgatgatgccacaaaaacccattggatcatgcttggatttaagcttgaagttgatggcatcaatctgttagtctgat

SEQ ID NO: 75188 - DNA, 485 bp, Zea Mays
gtaacttcccgacaagtaaattaggcggttgctaggtgaacaccaaaaaatgtgttgtgtctggtttagctgaatatttacattgggtactacaaaaacatcaatagaggtatgttatatagagtggatagcgtatttacaatatggtgagaactaaaaacaactaaatgaacgatttcttcttgccctaaaaagactactttcctcatgcgcaaaacagtccaacaaaaacatttaactgatatccatcatcccagcttgcattcatgcaatcatgctaacggcaggtaagtagaatatagttcatcatgccacaaaattcatttgatgcatagaccgtaataacataaatgacgcactatttcagaggacttcataacttgttttgagtatagttgattttggaacttggaaatccataaagcactcgacaatggtagacagagttctcctagataatatacaactccgccagtaggggaaag

SEQ ID NO: 75189 - DNA, 575 bp, Zea Mays
gggacctgatcatagggaagtggccctagaatgaaggaagcaaatggtgactaactgctaatgatggggttactcaaagcattcgaagccgaaggctactatggcttggggtcctggggtgggacatattgtggaatgtagggtgagtagtacaaagatgtactaaatagctcctttgactgagatggctgagcagtagcagcagcaatctcttttttcttctaggtggtgaactaaaatgtccctgttgtgtggcctttatcttcgccacaaaacacatagtataactttcttggttgtgtgttgaaccttccatcgtaagcttcagccttctcttccccctcttggagctggtgggcggaaggtgctttgagaggactgttgctaagtacttgactattgatgctggcttgcctaccctagagactgggttattttctcctcactttgattactaaaagatatcaaaaacaaggcaacacaagtaattaaaccataatcttctcccatcaattagctcttctccgaaggttaattccagggagaagacaaatggtgaaagcatatgaattccg

SEQ ID NO: 75190 - DNA, 1143 bp, Zea Mays
ctgccttcataaagcttttcctgtacaaggatcgcactcaccgcatgatgggcagccgccaaatagagtagtagatcatctcctggagttgggcttgacaagatggcaaggtctatcaggtatgatttgatatctttgaatgcagatgcctgctctaggccccacgcgaagtccctggccccttgcagcacctttagaaatggtaggcttcactcggcttacatcgagatgaatcagttcagagctgtgatgaggctggttagcttttgtacctcttttcactatctgtggtggatgcatttttattatggccctaattttattagggttctcctcgaagcctttcattgatactaggtaaccctagaactctgtccctgtggatgcccaagacacacttttctaggttgagctagaatctagcctccctaatgttagcgaaattctctgccaggtctgccaagtgatcagctttgctttttcttgggacgatgatgtcatcaacgtaggtgaatatgtttctgccaacctagtccatgagtatagactgtgttaggtgggagaaagtggacccggcatttttgaggccttcaggcatcctcacaaaacagtatttgtcgaagagggtgatgaaactagcgttcgacttgtcctcttcactgaggaatatctagtggtagctggagaaacagtcaaggaggggcatgacttcgtagcttgtttccgagtcaacaattttgtcgatgtaaggtagtgagaacttgtctttggggcagaccatctttaagctagtgaattcaatgcacatgtgccactttctatttttctttttcaccatgaaaacatttgggagctaggctgggtaatcgcttggttcaatgaattttgtgtctaggagccgcttgacctcggccttggctgcttctgttttctcgtctgacatttttgcgaaggtgctgcttcttggggcgcagggaggggttgttgtgcagcctgtgctcgatgatactccgactaactccaaccaggtgaagacatctttatttcggcgtaggcagtcgagcaagctagcatcctcctacggggttaggcattcgctgattaacacaatatgattgggtagggtcgtgtcagggggtaatt

SEQ ID NO: 75191 - DNA, 301 bp, Zea Mays
agatccgtgcttcagttcttgcagcgtcattgctttggatacgcacaacaagcggaaaggtgtgaacccagttgccctggattttgttgtgttcaacgcccatatgacttcgggaagctggtctgcccacttgcctttcttgtcgtcgagtagccttttcttgatggcgctgaaaatcttgccattggcacgttcaactactcagttggattgtggatggtagacagaagcgaacacgaccttcgtgccgatagagttacaaaattcccgaaaatcttggttgtcgaactgttttctgttg

SEQ ID NO: 75192 - DNA, 747 bp, Zea Mays
cgcccgccccgccgccgcttcgcttggataaggatgcatccactcccagttccccttctcttcatctttgggtcggcgatggttatctctatcttccttatagatctgtcgcggttagtagcaccagccaccacggctccaagatgagcaatgcggtggcctcgctgctggcgctggcagtggttagagcaacctgtcgaggaagacctccatcctctctcctcctcgacttcccaccccttgcgccgtgcgcgtaccactcaccaccggccgtcagtggaagaaggtgtcccgaaggccgcctgctcttgccggtcttgtggagcgagcgtctaacccgagcaggccagttccctttctcctcatcttttggtcgacgttggtcatctccatcttctttatagatccgttgtggttagcagcatgtgctaccacggctccaagatgagcaaggcgccctcctcccaaaccaaggcggatccccgggccccggcgttggcactttcctccacaacgaacctagccaacttgctcccaaccggtgtcctgctcgccttcaaccttctggctctcaagtccccattcgacggttgcgtctactacgtcgtcaccagctgcaccggcctcaggctcctcaactacctgccagacgcgtcgccgctgcccgagggagtcaccaggcgttccccaccacaaggcacaggcacacgacatcggatacccatcgtcgccaacaccgtcgcaaag

SEQ ID NO: 75193 - DNA, 311 bp, Zea Mays
gtgagattctatgcagccgcgttttctaaattttatcccctaaaaaattagataggaaaaaaatgagtggaatgtgttttacggcatgctttaaaagatcttattctctatatattcttcatctcgagcagcgtcctctaaatttgattctctatatctatcgcgctaatagatttgataaactaatttgtttattcatcatttcgtgtaggaacaaaatttaaatttgatttgtcatgataaaaacatgttcgaaatatttttgtaatggaaaaattactcattttcatatgtagcaaacaaaatttgcc

SEQ ID NO: 75194 - DNA, 495 bp, Zea Mays
tcaacaacaaagggaagaattcaccatacaagatatgaaatttattgtgcggtattgaaagtagagatgggtgaatagactacacctaaaattttcaccacaaactttaaaataaaatcaaattatcagttcgactgtgcaggtcagttcaatcgctaccaagggcggtgaaaccactctggaccagtctaactgtaaataatagatctaggctatgaacaacgtggagaataatgatacatttctttagatgaagtgggaggcagaccgacgcctccgctgtggtgtggcgccacacgtagttaatgtgatcgatcgttttatgatgggtcggtcttgggccacacgcgagatccactcgagtggtttcccttcaacgcgtctgacaccctgtccggttccgccacgcccgaccccaggctcagtgctgtagagttcgtccgaagccgggttcttccagtgtagatgttacctatttcctccgactgatctttg

SEQ ID NO: 75195 - DNA, 637 bp, Zea Mays
cagagagcatgaacaaacctgaaacatgctaggcatggcgaggtcacttcgcgcggtgtttcggactaatttgggggaaatcccaaattggggttctctggtgagtaattggaggcacgagtgggtggattggatacttgaatacctagcggagctgagggtgtgctcaatttataggatccatgagcggtggtgactaattcagggaaagacgcgcggcggccggagagaaggggtgctctggcgcaagcaattggtggcttttaccgtggcgagctcaccggcgaacaccgaatatgcataatgcaagctactgcgacatggtgaaacaccaaagcacgtagcgcaaagtcgcgaggtggctaacgccggtgagtttaaccgaagcggccgtgactcaggcgggtatggcggccggagtagaatagtggccgaagttcatccacggtgcgatatttcttacccttctgcgttatccaactgcgctaggcacgaatcaccgcggcgggcgcgaatccgagcgcacagctcgtcgacggtgaagtttagtggattgggatatttcagtgcactgtaccattggatccttattcagtcagcctgacagagtaacttgcagggagatttgctcgcaatt

SEQ ID NO: 75196 - DNA, 467 bp, Zea Mays
gtttcgcacgtgatcacgggtattgcgcgcaccgtcgtcgttgtttgcagagtcctcgctctgtttcgcgcgtgtcgcacgcgcaatctacgcgcattagttaatcacttcgctataatcgtctgtacgcattagtcaattaattctcgtattaatcatcgattaattgataattcattttatctaaaatatcccacacaagtaatttatgttaagtaagttgaacctagaaaaatatagttttcgcgtttaagcgtaatataggttgtccgttcgtcacgtcattatttagccgcggattgttaactattcgatgtgtcgtgcgcgcgctagcgttcgcttgcgcgcagtgcgtcgacgggactccgtctacgttcgtctaccctcgtctacccctaaacaactcccttctaccccccgtctacccctcgtctaaccccgtgtgcgttcgtgtcgttcgccatcgc

SEQ ID NO: 75197 - DNA, 318 bp, Zea Mays
aaaggagcaggagaagacaagggagaaggaacttaccaaactgcttccaacatctttggaaagagggaggggtgaatcctcatccataaaggtttccaacgactacgccgtgacggccttgaccagggcttcgatcttggccagcgcgagtggctcgcaagaatggctattggggtctttggaaccggaatactagtgcaaaggctttttatggaccattagaggctgaacccagtgctgcataaagttgcactctagccgcgtgccggtgtggccttattgcttcggtgcatcgatatctttcagaagttgtgccac

SEQ ID NO: 75198 - DNA, 487 bp, Zea Mays
tggaactcacacagaaaagcaaatcttggtgcaaggaagagatcctacacggaaccctcactgagataggcactctagggcagctaaacggacgcttgaactcaggacagacgtcatcctccacgcagtgcacgccacgagcgtcggtcggctcggccgatgctccaccccgtgcccgagcccaaatcatcgcctataagaagcctcgaccctctgccttgtcctcccgcacacccatactcttccaccggccaacgagtgccagtaatcgcctgaaaaccaagcacaacgtcccgcaaggtcaccgacgcgacgaccaccttagcccggtcgctccagcccaactccgccgaatccagttccccagccaacttccctagaggctagcaaagcttcccagccgctcgaaccaaatagtacctcaccggagaagccagaataccttgccggacctccttcacccactggagcacgtagacaaggcaat

SEQ ID NO: 75199 - DNA, 913 bp, Zea Mays
gttggccgtcggacataagataatatccgacggcctcgtaggaagccgtcggagatagcgtgaccgtcggaactttcttcgtttactgtagtgatggccccaaaggagcaggttgaattgaagcggcaattggatgatctgttggctaagggattcattaggtctagcaagtctccatgggcttccccagtattttttgttgagaagaaggataaaagcaagcggctatgtgtggattatcgcgctttgaatcaagagacaatcaagaataaatatccgcttccccgtattgaggttctctttgaacagttgaggggtgcccaggtgttctccaaaattgatttgaactctggttatcatcaattgaggattcgtaaggatcatattgagaagaccgctttttgcaccaggtatgggcattatgagttcatagtcatgtcttttggcttaactaatgctcctgctgcttttatggaagcaatgaataggatgttgcatgagttcttggatgactttgtggtcatgttcctggatgacattctgatttgttctaagactgaggctgagcatgagcagcatctccgtctcgttctaggtgccctaagggagaatcagttctatggcaagttgaagaagtgtgcattttggctgtccgaagtggctttcctggggcatgtgattaatcagcagggcattgcggttgatcccaagaatgttgcggctatggtggagtggaagagaccctctagtgtctctaaaattcgaagtttcttggggcttgctggatattatcggtgtttcgtaccaaatttttcgagcattgctaagcctttgactagacttttggagaagggtgttctcttcgtctggtccagcgattgcgaggtcagttatcaggcattgaagagcaagt

SEQ ID NO: 75200 - DNA, 508 bp, Zea Mays
aaattctaagtatagtgagttgtgttatctagcagcaaaagaacctaatggtgtggaggattccttgagagaacagttttggagggatccaatgttagatgaaatgaagtcaattccgtccaactaaacctgggagctagcagtgctacaggcctcaagtgggtctttaaggtgaagaaagataatgaaacacaaggtcaagtagtaacaaaaggctatgcttagtgtgagtgggtggactttaaagaggtgtttgtgccgatagcccgtattgagacgataaggttaataatagcacttgcatctagaagtggttgaaaggtgcatcataggaatgccaaatcagcatttctcaacagagacttggttgagaaggtatatgcccaacaacctctttactatcggagaaagaagccaccgatgaaatctgagcaatagcattggaacagacaaccgagaaatttcaggcaacatggcacaaccagacttcgtccaacatatccttgtg

SEQ ID NO: 75201 - DNA, 529 bp, Zea Mays
agttggttcaaaacacaaacacaattcaatgagtttagattgtatactttcatttgccatataatgaggtcacacggtcactcgtcaacctgccatggacaatacatttgttttcagtatacaaggacacaaatcatggcaactcatcaaacagagtttacctaccattaacaaatatgttagtaagtctcgtggatcccatgtcttcacacagcgcaagcggccaacaacggagtggcacgtgcccaggctagctaggctcttgcttcaccactgtacagatgcacgggctaggtcaactagaccgacacgttctatctggtgtacatgccttactgaggctgtcatcatgtgtgtgattgcgtgagtgagtgtgtatatcggccacgatgattatatgactcctagttattgatctcctcccactcctcgacttctagatcttttttaacggaggagggaaatataagctatcctattatggtcacttcctctgctctagaaactctaactcattagtttgtttgct

SEQ ID NO: 75202 - DNA, 440 bp, Zea Mays
gcacgtttcatggctgggttacaccgcaacattcagcgtattattgagtttcagtcgtaccaaagtcttattgatttggtacatcaagccaccaaagctgaacgccagctgcaataagatgctaagagcagcaagcccttgtcatatggtgcatgaaccatgactggaggaagcaaatcgatctcaaggtttactgctgcatcctcagcaacaaaaggttcaactggaggcttgcgatccaatattcaaggcaattctagtggaaagaacggtgttgctccaaacacgagttataaaccagccgcatccacttcaacatcagtgggttcaacaaccaagagtagtggtattcagtgcttcaagtgtggaggtcgtggtcatgtcataaaagagtgtccaaataatcgtgtgatccttgtgactgatgatggagaatatac

SEQ ID NO: 75203 - DNA, 347 bp, Zea Mays
gtctgtggatggatctcaccgaggattgctgtggtaccgcgcgcgggtcacatgcgccggatagatagaaccagccccgagtacacatacgactaagatgggccgggttcagtgggcacggcgagggccacgggctgcgtacttgaatggcccaccggtcccagatcgtccatggaagtttgaggaccctcacctactcgcacaacaaacggttcaacgtgagcagtcacggtgtgacaaagaacggtaccgataggttctctcatctctccgtttgtgcacaggaattaagaacaccaccggagcaccgcggtgtcacagttcgccacttttgaaccggccatcgc

SEQ ID NO: 75204 - DNA, 1230 bp, Zea Mays
atcggatatgtgttcctaagattgatagcctccgtgagactatactgaaggaagcccatgactgtgattactctattcatcctggtagcactaaggtgtatcaggatctgaagcaaaagtactggtggtatgggctgaaaagagatgtagctgcacacgtggttgtgtgtgatgtatgtcaaagagtcaaagcggaacaccaaagaccagctggactactgctcccgttaaaggtacccaaatgaaagtgggaaaaattggtatggatttcattaccgggttgcctcgcacctcgaagggttatgattctatatgggtgatcatggacagattgaccaaagtggctcacttcattccagtcaatactacttataaaggttctcaactggcagagttatacatggctcaaattgtgtgtttacacggggcaccgaagaagattgtttctaatcgtggatcccaattcacctcaaggttttggaaaggccttcatgagaacattgctacgaagttgaacttcagttcggcctatcatcctcaaactgatggccaaactgagagaactaatcaagtatttgaggatatgctaagaacttgtgcccttaaacatggatgcagttgggacaagagtcaaccatatgctgagttctcctataataatagttaccaagccagcctgaagatgtcaccatttgaagctttatatggcagaaagtgtaggactcctctgtattgggatcagactggtgaaaggaaattctttaggcctgagattattcaagaggtagaagaacaagtccatataatccgggagaacttgagagtagcacaaactaggaaaaagaggtatgctgataatcgaagaacaccattggagtttgaagacggtgaccacgtgtatctaaaggtgtcaccaattcatggaatgaggacatttaaagtcaaaggaaaattatccccttgctttattggacccttcagaatctttaggcaagttggggagatggcctatcagctcgagctacctgatcatctatctgatgtacacgatgtattccacgtgtctcaacgcaagaagtgtctccgtgtccccgaggaacagctaccaatggaagagctcagtgtgcagagtgatctaacttacacggagtatcctatcaagatcatcgacactttgactcgtgttacaaggaataaggtgataaagatgtgcaaagtgcaatggagtca

SEQ ID NO: 75205 - DNA, 757 bp, Zea Mays
aggacacgatggcatcagatccgttcagactcttggggcggctcatgtgcgactaggctttgatagtggcactgccaatactcttgagtgtggtcagtaaagacgtcaatactgaggtatgcatggggcatgcacatcagagaggtcgtatcctctgaccatgtagatcacatcgtcgattcattgtcagaatcagagtcaatgttatgtagaccgggctctctatggttctgtgggatctccttgaagtccaccatgaaccaaatatttttcttgatctatggtacgataatacgagacactcggtcagggaagaggatgtgatagatgaggtaggcgaggtcgatgttgaaccacgataagaagtggtagtcgcacgataatcatgtggtacaaactattatccttgtgattgaagggcaagtggtctgccatggccacaaagaggacgacaccacaaatctagatgttggccttggtgccatcatagccaccacacaaaaacattttcagcacgatgaacatgggcatcccacaaacggtacagagcagtgccttctgttgtgccatgtagatgagggatgagagcatggaatcaaaaacctttatgttgcccatggcatcaacaaggatgttgtcggactagttgttgtggtggtacacggggagcgagtggcattagttgagtgcacacatgagctactagaagacccagtgcactgaggcctcactgataccgcaatcgttgcgatggatg

SEQ ID NO: 75206 - DNA, 545 bp, Zea Mays
cagagacacacagacacctttctgcttgcgttattcaatattacaatgtatccaatttgtagaatccttattagattttgtaaagagagaaaagaggtccttgtgagatgataatggctattactgcaccaggttttgttagatggtatgcactggaccaagtttgacaccatcattccttggttcataattagtctttggccattccatgctacaatggttgcatggtgtgattgcaaactgtcagatgtctcttgactctctgttctgaaattcttgtaccaatggagggcggtcgctttttcctggttctcataccaacaggtcaaatttcatataggtgtatcttctggctccacaaacagggtttatctataagtggataaacatgagataaatatcatggtctaaagatgaagcctgcaaagttcatcttatgtccatcatctcgccatgtcatgatctgccccttgtcaagtctggtcattgaattgccagtgctttgggctcttagatttggattttgcctatttagcagtaacatt

SEQ ID NO: 75207 - DNA, 335 bp, Zea Mays
cgccagtgaatactagaaaaatcactgggagaaaacagttgtggagcttcattcttcaaaagagagatgctatgaaaaatctatgtcatgtgtaggaaagataaaaaccagcttcaccaatattggcgcatactcaaatgaggccaacttcgtagtaggcgatcccgaaggtccaatcgaatggatcaagggcgaagccaaagcctttgaggaggttttgagtggccgtggagatgtctgcgccttctcaggtgccagaggaattgcggctatcttagagaaggcaggatgcgagcatgtgaaggttctggcccaagccgaagctgcgctttcta

SEQ ID NO: 75208 - DNA, 362 bp, Zea Mays
gggggatatagttccctgctgatctaatagttatgggtaaccaggatgcgactatagatgtcatcctagggatgaattggctaaccaaatatcaagccagtcttagctgtgtcaagaaaatggcgaagttagtgtccttatcaggagaggaagtgttagtggagttggtcttgtctagaccaaggaaaggaagctgtcaccaactcaccgcccatactgaggaaatcgaaccatcggaagctatcaacgtagtatcataattctcggatgtgtttcccgaggagttaccaggtatgccacctgaaaggaaagtttaatttgccatagagcttatacctggcatcacccccatttccaagaga

SEQ ID NO: 75209 - DNA, 474 bp, Zea Mays
accatttttttctaaaacgttagcacaggacacctcacatcagaccggtacacaaagttatagcatccaaagttgttacgatactgctctttcccaattgccttcgtctggtaggacaattcgtgaatttggccgaagcagttggcaactgcttcagcccttggctcctcatagcccaaataaaaactctaactttaatcaaagatttgagagtaagctgatgaaggtatatctcaaatgtcttcagcacttcgaccaacatcttatgcaagggaaaacgaagcccaaccttcataaaacttttaaataccaccactttgtctgcttcaggaagaggaacattactctctcctccagccctcactatggatatatcatggaaatatctgccttcattgcttcaatttgcccttgcttaatagtggatttgccaaaaacaacatgacttggcctccatggccaatcttcggcatc

SEQ ID NO: 75210 - DNA, 1030 bp, Zea Mays
gaaactcttatttatgtgtgtatttgcttaaatgattaaaatcataaataaataaatggaattatacttttttgtcttggagattttggttgtacatttcatttaaatttaaaacttcaactcagattcaacgttgaaattgaaatagaaaaaaaaagataggaaaaaaaacgaacctgacattggacctggcatcctgacgttggactcaatccatctccatcccatatagccgagctacatatcctagtgttacctgatttttttcctctatttatttatcccttgccggagattaaatcaacatgatctcatgcgtgacgtcaattattcccacgtaacactgcctgtgggccccttggctagcggtgtctctcagatgcgagctcgttaaacagacgcttccgtaagcatcaccagggtggttgcgacctgtgcatggctgttcagacttggttccctcggagtatatgtctggcaacacctttggccatggcgcagataatggttaagctaggctgccaggctaaaccttagtcgagcggagcgagagaaagacaaagaagggtatgtcgtcgcggcaggcgatcgtcgcgtgcacggccaggtctgagcgcgacatgtggtatagaaggatagcaggagatcaggatcgtgcgcgtgcgagtttccatgcagaagaccatctggggatgcaagatccctcgtcgaagatgcaaagctgtcgatctgtttccagccatatgcaacctcgccttcacctctacaactgtggtgagtcacccgatctaatcatggccccgcggtgcgtagaacctcttgcatgaaatttagttcgctggaaaatctgggtcgtgggattggagttggccggcaatggcaccgtcgccctaggcgctctcatccctcgcgtccgtcggtcggagtgaagaagacaaccgggatccattgatccgggagcgtacggctaggattagatcgtgtatacccgttcggccgggacgcttcggggccgttagatcctggttga

SEQ ID NO: 75211 - DNA, 660 bp, Zea Mays
gtttagtgtctgactgcacacccggtggtaccctcatggtgcttttgggtaggatggtgtcgctgattgtaactcgatggttcgtgccagaagcacgagaaagagagtcaagcgattttatgcaggtacaggccgctttgaggggcgtaataccctacttgctggggtggctttgtatgtgtggtgtgtttacaagtagtgtttcccgtatggagaggtgctaattgagatgaaaatgatggggttcccccctaggccttatatagacgactgtggggcattccctacacacacgttgatcacactcttccaacttatctcctagctaatagcgaacagactttgcttatcttgatgaaaacctggtggctccgttccgagctatctccggcatttgagggcgtcgggcgcgggaaaaacgaacggcttcctcgggatcatgcctaatcccacgaacgatccggacgtgagctcatcaccttcttgggtcgacccatttcaactgtagtctttgcccatccaacgatgcgatgaccttgcaggacgactggcttgtggccccaaatagggttttcgccttctagtggacctgggggtatctgtccctcacaaccccgcaatctttgagttgattttgaaataatcgactcaaaggtttct

SEQ ID NO: 75212 - DNA, 628 bp, Zea Mays
ttggagtccaaactagggttttgagtgcaccaaagtacttcaagtgcttaacctctcatgttcctcaccccttgaggcataatctccacttagcaaaactactctctcacacctaggccatatggtcaacagtttactatctcatggagtgtctcactccccacttgggttaaaccctaacaagcataccctatactcaagcaagtaacacatcacatgttcttttgaagttttagcctagtaaatgcattttaactgtatcacaaacaatgaaatgtcaatgcatatgatgacatgttagtgttttagttctcgtatcactagggatgttacactctttctccatctactctctctctctttctctctctaagagagacaacaatatgtaaggtctaccccgtaagatataaaagggaaggctcctcttcctctagcacaagagcttactagttgtaacacgcctaatactacgatcatcactacaatggaatagggtgcggactctaaccagtataaaccccatgtttcagatttctcttcgagcccctcgtggttcatcatttgatgtgagtccgcgctagcacccctgccaaacacaaatctattgtccttctgtttccgaaac

SEQ ID NO: 75213 - DNA, 313 bp, Zea Mays
gctgatgtgcccttgccaccttcatcaagcgtccaagagacaaaggttgggaagttagttacaacaatagaggctatcgcctctcaagctgaagctggcaccgtgaatccgtctgaggatagtgaaacattgatatcaaagatgatagcaccaccattcgtcctacaaagccaagccatgtggatttcgataaatcaaagatcaaaggaggacacattgaggtacttaaccgctttggctatattgacaatgttgattaggtgcggctaggaggtgatgatttagtgccgaagccaagagagggcgaagttgt

SEQ ID NO: 75214 - DNA, 729 bp, Zea Mays
cgccaagtcttgtttgtctgcactgttcacgagcgacaaaactaatgtcaaaccatgtcaaacaacctcggtttgaattcaaatttttcagggatgtgccttggataatttggccacattttgttatttggtccaagtggttttggtgccagtacaagggtgaacacatttgatctttgggctatggttggttttggggacttagagaattttgaatggctctagtgtgctccccacttgatggattgttttggggtttttgttgggccttttgtaatacttctcttaatacattttgtagatttgctaatatacttcatctttggtaaaggttcccttttgtgatttggccatttgcccactctttcccctttaatcccatggttagggtataatggcttaagaggggaattagggttttagaacattgtttatgggtgaaaattgtatgaaggctagggttcctttcttgtgatgatcaatacttggcttaaccatgcttctaagcttttagtgccttcacttcctaaatttagcatatagggtaagaggccaaaagtgtgctcattgggctagggccttgggtaacacctggggtgttacactgtggtggatcaaagtcttcccagcattccattataagctgatcaaataagctacatcaaagttatgcaccatccgatcatttgcccacaagacccaaatggggcattgaagcattcgcatggg

SEQ ID NO: 75215 - DNA, 306 bp, Zea Mays
ccactagactactcgcttgttcttataaataaagaaagttagagtgcataagttggtcagttctgttaaggtgttcccagccgccattctgcgatctgcatggctgttctgcttctgccttctgcgatctgtgcttctacgttctacgattgacgatctcagtctcggccctcaggttacggcacacaacgacgccgacgtcagtcgtccggcaactgggtagcgtcgcagcgaacgagcgatcttgtcgcctgatccattgatgcattgagtaagtccataagttttgatagattaataattcat

SEQ ID NO: 75216 - DNA, 281 bp, Zea Mays
aaagcatgttccgagcagtttcaaaccttttggctttggccaaacgctgccccatcagccggcctgcctcttctgtgaccaagcagtgaaaacaaccaaccatgtgctttcttcctgtgtgtttgcctaggaggtctggtccgtctggactttggtgctacaaagattaaatccgattgtgaggccgcttgatgctgatagttaaattccttgtggtgttgagcatccacatctttgcctaaagaggcatggaagggattttggccatgtttgaatgcacc

SEQ ID NO: 75217 - DNA, 308 bp, Zea Mays
gtgcagcgtgtatatgaccatgcaagacattatcttatattgtatattgtacacggcagggtttagagtaaaatttgaaataggaggtaaattaggaaggctactgtaaacaaccttacatgaaagacgaggatacataaaaagtaatcgaaaaaggagaatttggccaacaaccagtaagatacttaaaaagtaatcggaaaggagaatttcggtcaacaaccagtagattatcgatttatgatctgcaattcacaattgaagcctttgttgctgaagtttatcgtgacaatagaaaaaaatgtcat

SEQ ID NO: 75218 - DNA, 473 bp, Zea Mays
ttaatatgttcttgcattactatataactctgtgatgcatcagacacagccagaaccatagcaacactaacaaaaaacaacctggtgctagttaatttatcaaacagttcacaacttttcttatgctctacactctaattcaacaaaagaactcgacaattcataaaattccaagtcacctctaataaaattaggaagtaaggcccttgatcgtaaaaacaagatccgcagtcactaaatgccttctgaggtgttggaagttgtaaccggactacaaagacactgactttttctcttgttttattgcatgacaaggcaaaaaatttctctatattataacatctgtagttaacgacatgatcaactgtaccgcaacctgctctagtttacacaattattggattcttctcgatttttaaagtaatattcacaacatggcaacatccaacacaacatgatcttctatggactaa

SEQ ID NO: 75219 - DNA, 544 bp, Zea Mays
ctggggacaaggcattttgatccatttaatcgttccctaatggccggtttcaaggaccactccgatgtttcccagcaatacatcgagccgactatagagactctgtcggctgaagaactgtaagaattcgagtacactgagcagctgattaagaaggccaaagcaaagtacctgaccaatttcaaggtagacagaaatcagaaattcgtcgaaaccaacctggcgtcactctgagctgctgcagctaccccggacgtaagttacacaaacgacatccaagctcttagatcttacgtggatgatcgatgggaacagatgcaacaaatactagggggtgtgcaagaggattatagaaggctagcacgtgcgttcgataaatttgtcattactaattttccatcgcacgattttgaaactaaagaaaacccacaatatccatcggctgcaaatgggcatatgtccgatcccagctactttatgggatgtcgattaactcttacaccggacagctacatcctccaccacctctatgggaaacagcctg

SEQ ID NO: 75220 - DNA, 347 bp, Zea Mays
tgtggatcttctctgcgtcgaaccgactgacgtgagcttcccgggcattggccagctagtccaactaccttctaaccccctcggccgccacccgtgctcctatttagcgtccctaggatcttgtccgcaccaccccgagccctaggaaccctgacctcgtcgcaaacttgagagagaggggaagagaggtaccgacgcggggaaattctccactgagccgtcgtccgtgccgctagtggtgtccagaatcgtatctagacccggggaaaggcctccacaacatagttgtcgggactggcccctgcgtccccgggaaatcctcaccggagtttctgccgacgttcgag

SEQ ID NO: 75221 - DNA, 510 bp, Zea Mays
ggacggggtctcattttctggaaaacgtaggggctacggtgcaaatgtttctaagacttcgtggactgtttctgtgtaccgcgggttaatttctaagaaatccaggggctcttaagaaaacatgccagggccgaagaggtatcgagggttttcagccgcacgatcaagattctagggccccgattagatctagcttttaatgaatcgttatgcgctgaggattgtcgattacgccttctacggtcaggattttatgagacgaaagggtacgccaaaacagatcgtggccacccaaatctaatccgacgctcagcatctaattcgtcaagatctaatcctggccgttcactgcgatccgacggtgcacacaccatcttccttatggcgctccccagaaccgcatcaaccatctgaacagcggtgctcccaggtgagcacaccgttgaaaaccgatcccggtctgtccttcgccgctttcctccctagaaaatactatacggtgggcaagcc

SEQ ID NO: 75222 - DNA, 537 bp, Zea Mays
aggtaattggctgttgggatcgatgggaggaataatcgcagcagtggaattctgactcttccgcttgggcgccatctcaatctcgtcggcgaactgagcggaagcgagatcacagggaaacagagaaggtctggaagcagaaagtaaggctagggctcagaatgcagaggcatgcgacggcgcggtacaaaatggggttttcccaggtcaggtacagattctaaaagtgcccagtcatcactcggctgttacttctaaaacgccgatgtgccttgatgtaactcagctattatttctaaaacgctgatgtcaccggtcttcactcggtcgttgtttctaaaacgccgacatggctcggtatagcttgggtgttacttctaaaacgccgacgtcaccagtaatcacccggccattatttctaaagcgccgatgtggctcaaaaggactcggttgttgcctctaaaatgccagcatcgcaaaaaaaccattcggctattacctctgaagatactgacagtaaatcagccattttttctc

SEQ ID NO: 75223 - DNA, 487 bp, Zea Mays
cgaaaaagaaggtatagaaaatttaatcttagcataagggtcgtcaggagcacgattgttattaccttactggcggtgtggcataccttctgtgttttgatgaagaagacggaggcgcaaatctctggtggccgcttcatcataattaccttcttcatcaaacactgcatcatcgggaagacgtggacgaggaggtggtggcggtgcttgttgttgcgtctccaaaacagcaagtctgtcgacgatctgggacaatcgtcgatccagcctctcgtaagtcttgccaaggttcatgtcaatgaaggcatcatgcactgacttgtggaccgtctcctgcatttgctccttcaggagcttgttgtttgcctcaagatcttagcggttaacacattcatcgaagtctgtagggaaccttgcttcttcttcgtcgcctaccatcgaaacacaaaaacaggaaacaaacggtgacggttatccctaataattt

SEQ ID NO: 75224 - DNA, 569 bp, Zea Mays
gttgcagcttcggtcgcaagggagtagaaggtcttgacgtggaactcgtacatggcttcgacgagctcgatgctgggcaccagcaggcgcacaggtgacgacgaggcatggcagatttcgacgaggcgaagaatgacggcaaagcgaccaacaacatgactgatgctggcgtaggagatcggcacagcgctggcaaactgcgaaatctggcgagggtcggcagtgcttaccgtgagcagagcggtggacacggcggtgtagcagcacgacatagatgcggaggtatcccagcaacgcggtaggaagatgacggcgagtgagccgcaagtgagctcgtacggcaaaggctggcgagatggctgcacagtgttggtcttcggtaagggggactgtgtattggcagagaggtgtgagcaggggcatcggcgaattccggtgagcagggacatagactccggcgaggcaccatgacgaaccgagagcaaagcaaaggactgtgcagcagcacgcgcgtaccaacaccgcgcagcgagcagcacaatagggaggcatggaggagcggttcgcag

SEQ ID NO: 75225 - DNA, 445 bp, Zea Mays
tgaacatcattgagccttgagctgttggtcgggcttgacaacaaactgatttcctttgatgatcgatgagaaggacaatcttatctacacatcctatgatgccattgtgccaggatagccaatccattcctagaattacatcaatcccctatgaatctatcactattaggtctaccagggacactacctcacttaaaaggattctgacttgagaacacttgaggtgcctaagaaggtctgatcctggggttcgggtgatcaggggaatatctaatggtgtagatggaatgttatgcttttccacaaactaagtggctatgaaagaatgagatgctccagaatcaaaaagtactgtggcaggggtcaattttatcaagaacgcaccgagtactactccaggtgcctactaaggttcctgtgcgtccctctcgtgcacccccactcc

SEQ ID NO: 75226 - DNA, 329 bp, Zea Mays
agagatgagaagacaccctccacaaaaaactagtagagacgttagtgtagattcagcactgagccccttcaaatctccttctcatccgacagttgattttgagaagaaacagcaacaggttatcgagttgtggcatgaatgcaacgtgcccatcgtgcacagagcttatgattttgagaagaaacagcaacagatgatctggccacaggtgcaggcacttcttgccgtatgcatggctcttaggttcagcttgcgtttatgaattgtggacgaagtcgaacggtggtttctggtttgtcttctttcacctttttcagcaacttaatggt

SEQ ID NO: 75227 - DNA, 531 bp, Zea Mays
gtgtcattataaaactaagctaaggggcaggtgattcggttaatatgcatggctacaagcctagatcatattaaatgatcctctccaatatattcccaatgattattatcattcatcttgcatacttattagtagacctggctatcaaaagttgcgaaagccactaatcaagggatgccacgagtaactagtctctccttcctttatctctcacttccttttctatacatggcaatcaggcttgaagtggtattgatttgctgagatgtacgtatcctatagcttgagagattgatgagagtggtcctgtgtttgttaagcatgcgcttgcagtttctcatgtgctttagagccgtgttctcaacatgtgtttggctgcaatgatctcagaacatggaacgaatgcatgcgccaacaaaaaagatgatttggaaccgtccctccagatcgaggtgttgaaagcattgttctggtatacgtacaaaattgcgcgcatccacatcttcccacgtataaacgggtggtaaagca

SEQ ID NO: 75228 - DNA, 712 bp, Zea Mays
atacggatgacatttagtttaaaacctataggctcaccataaatcggtgttgtgtcagtcacacttaggaggatttaggatacctataggcaatataaaacattatcattgtataacttgttttattttatagcctcaaatatggatgaaaatcgtcgatggatatatggtgattgaaataaaagtcaggctcatttagctaaacagattgctaagactaacaattttatcaatcgtgtcatttctttgttgtctgttgacaagatccagcgtccgcacagcaactatcaagatgcaaacttatatgacaaagtcaaatgagtaaacacctatgtcgaaatgatttcgtgatagattatgaaacgatgagaaatacacaactgcagcaatagaggaagataataatagcatgggcattgataggatgcacgagacgcttaaagatatacaatcaaagattaacctaaacattgagagtgagtcaacgttagagattaagaagtttcccaggtttccccaaagcttcaaaagagccattacacgaacgcacaaaagtaaccttactcgctcttgtgactaatcactagtcccatgaatattaagtcaatttttttcctctccaacaattattacatgagcttgtgaaattatttggtaaggttattcttaagcctcgtaagctaccaaagacatgtacaatctaacacactat

SEQ ID NO: 75229 - DNA, 575 bp, Zea Mays
taattttgccagactcttcagtactagcaggtagcatgcagaaatccctaaccaggtggtgtcaattgaggataaatgggattaagtggtttcatggaagattggaacactatttaatggtggcatacagtgatctcgggtcaacaggtaatcattttgcatgcatttagaatttgagtatttctcgtgcaagttggcaatgatattttttgccatggcacttttggtttggtggtgtttttcttttcctcttgaatttctgattctttcaagaaataaaacaagtacgtcaacttgttttgtatggcaaatattgcttgagatttgtctttatatcttataataagtctcacggtcaagcttggttttcactgagcttgagtttaccacttgactagacaaattgttgatataaaagctatccccactctcacaaaggtatcattatcacttcttgaggaatcaatattttttattggaccaaatatataaagggattgttatttttaagtataattagattagtcattgactgtattttaaaaatgagcttatttggagatacaaatgttgct

SEQ ID NO: 75230 - DNA, 341 bp, Zea Mays
tgttgatgtacatattggtctgttggcttatgttagcattcagataatacttatgtccatatgcagctcttagcaaactcttatatatgtcgtaccagatatgttttagatggacatatttatatatgatagttatgcactttatcatttgtcttatggtttttatatcttcttcagtgatgttcttcaatgcatcagttgttttattccgttatctactatatgcgcctgattatccagtgccaatgcgctgcctttctaagttcatttatgtacaatattttcagttcttctctgtattgattatgcaaaaatctgatactgtttatgcatataactga

SEQ ID NO: 75231 - DNA, 536 bp, Zea Mays
gctgaccaaagcagcgtaggtggatagcggtgttagagacttatgagctgatagagtcctgaaccctctatcacctgcatccatcaccctgacatgaatgtgagtgatgtagtagcaagcccgaggagactcgtacactcgccttgtctcatacaggggtcggacataggttcccaacgcgtgcagaacatcctgcaacaggttagggaagtgccatgtctcgaacattgaggtataatgttcaatgacaggccataaccccacgtagtgatcctgctgttcatcgttggcttctttgttgatgtcctcttcttcttcgtcgtcgtcttcatcatcgtcaccagagtcgtctgggtcgtcgcctccgggagcaggggcttggactgctggtgttggcggtgctgaagctgacgatccagctgtgaaggctagtgattctgccaacgggttgggcgtagacagaaactcctccgagctatcttccagaataactccgttctccacacaaatgtgagggagatccacagggatttcct

SEQ ID NO: 75232 - DNA, 302 bp, Zea Mays
ggagaggaaaatggcaaactggaattcgatgctgtagagtagattgtcctttacctactctaagggcaaaaccaacacatgacaggaagagctatgttgtcgttttcttcccacgaacaaaaacttattcttgggtagacatgctacttgttcttccaatagaggaatgtcctttgccacttgtaaatggaactcatcgtaaatggagaaagctggtgaaggatttgaacattcctcgacgattcaacatgcaaaatcttgccgtttttatgataaatttaattgatgagcttcatatcgag

SEQ ID NO: 75233 - DNA, 350 bp, Zea Mays
tggaccttgtggtgggggacgagcctctatcatgtccatgcgtgtaacaagttcagtaacacatcgatcaagccgctcataggatgtcgtcgtagagtcctggtacttattgaaagcttcagtcatcgtgtgtatcttctccttcaattccagctgagagacgcactcatcatcattaagcttaggacccttctccttgtccatttggatatttggtcctgtcattgttagcacaaaatagaaacaaaagtcaacaaacaaacaatatgaaccctacaactactctcaggggtggcgatggaaaataagttatgaagtgccttaccctactcttacaaggttcttgccag

SEQ ID NO: 75234 - DNA, 1588 bp, Zea Mays
gcacaacacgacgagctgcaccgagccccaggctataaaggccaggggtcggcgtagcccaaatggtggtgctcaggccccaggcttctcgcgccatccgccatagagattatgaggcagccaggtgaccccggggcccacaagcacacatggactccaacatggatgtaggcaagcatttcaagcttggccggaccactaggtaaatccctatgtctcatgtgtggtctgctctatgttgttctcagtctctctattttggttgatttgatttgcacttctatccttatctttggtacaagttgttcttgaagtgcaggctatattgagatagggacttcaattccgctgtgacctactcgatgtgatcttcattccgttgcaatccagactttgagtagagtaagaagttctatgttttttgtgctattttttattcgcctgctcaccaccctctaggtgacatccagatcctgttcctaggcaaatgtaactttcagttccatccactaaggagttgttcactctaaaagccatcatctttgtcaccatcactgactaccctagtcttttctcattgtcagggcagatcaaagggaagaccaactacgtagtttgtcttgtcgatacttgctacacttatcatcagggatcttgtaagactatgtacatgaggcatagacgattcctcatgaaagggcataggtaccaaagagctatgatgaataggtacatcgacaacaatgacgagccacaacttgatgagacagagaagatgaaatacggggaaaaggtgtttgagatggtgaaggacatggatcaagtcaagttcgaaaagaagaagaagaatgacgggaccacaaaagggaagaagagaaagctggatgaaatggagaaacccatcttcattcctttcaagaaacattcgatctttttcaagaacttttcataatggaaggagctacaagcgccccatgcaatcgattgcatacatctggagaagaatgtctttgaaagcattatcggcatgctgctagacatcaagacaaagaccaaggatgggctcaaatcacacactgatcttgtcaacctcgacataaggccaaaacttcacccgagacaacctgagaatgggaatgtcgaactactagttgtgggctacaacctaaaggatgaagagcagatgatgttttgcatgtatctgaagtaggtgaaggtgccaaccggtttttcttctaacatcaaaagtctggtctcgatgaaagaccacatgttgaccaactttaatatccacgactgccacatcatgctgatggtgtttttgccaattgtcatcaggcatatcagaccagaatacataaagatagtcatcacatggatgccttacttctttaaccgtataacagagaaggtcattgatgaagatgagatgtctagactgaaagtcttcgtcactgagactctttgctagctggagatgtgcttcccaccattgttctttgatattatgccacacctaatgaagcacatggtagatcagatacaagaactaggtcccatatacctacaccatatgtggacgtgcgag

SEQ ID NO: 75235 - DNA, 443 bp, Zea Mays
aagtttagttcgtagaaatcaaggaggccgcggaaaaagggagaaacaggaagagcaaggccgcgaataagaaagggaacgtaaacgatggattcctgggtatcctctgtcggaacagtgaccccgcggcaaattcgttaagagcatagctcttttggaagcaaaaccccaacatcgacaaggtgaagaaggtcagattctgagataacgtacatgtggttacctgcgaatggcaactagctgttggggtcgatgggcgggatgattgccgcgacggagctttgcctcttccgtttcggcgccatcgcaatcttgcagtggaacgaaaaggagcgagatctcaaggaagcagaggagtggttcaagacggaaatgtgaagttagggcttagaaatcataaacacacgtcggcgcaagtataaatggggtttcctgggttgggc

SEQ ID NO: 75236 - DNA, 480 bp, Zea Mays
ttctatggtgccatggtggctagaggtgagcaggatgccgatgattccacatgcgaagaggaggatgcaaatgacccgatcaacgacaacaatagttctacggcgccatggtggtctactagcggcgaagactaggtagtggaacagacacaaccaacaaagcagccaggcggagccgtgcctactcactcatgcgtcacggagccgaacgcgtgaaaacggagttgaaggcagtggagccagcatcattgcggtgattttcgttggggccattctccagttttgtgaggggctagagctaactcagtttgcaggctaaatgcacgccatttttttcctagcatggagacgcgccctcgccgctagtgcccccacacctccccaaagcccgcgtaggggctttcggtgaaatagctatccaaatgtggagggagagaaaaactctcctcatatgaccttattcgattgcgtaggatttag

SEQ ID NO: 75237 - DNA, 341 bp, Zea Mays
gaaaattttggatcccggatttttctgattttggaagcccccacaacttgaggtgcacggagttgaccttgtggccgcttcagcccaccaagcaccagcaggggcaacaaccacaacggtggcagtggcactaggaactcaatccggctcggcgcaacatttcttcactatcggctcattcggggagctgcaatcgtcagtagcttgatgctgtggcgagctgcaatcgtcagtagcctcttcaccgctgctatagccgccggcgcctcgttcgccttggcatctcgtgactcggtgtcacactcggtattgttgagctgtctattttccttcgtttcttc

SEQ ID NO: 75238 - DNA, 283 bp, Zea Mays
ctccattgaatcccctgcaggttcttagctccttcgggagggtttcaccacctcaaatagccttttcaccgaaaccctaaacctctgcacaccacatgctcggcaaaatgcccaaaccagccaaaaatgctccgattgaacccaaatttttcaggcaccttcacaacacctccagtaacatatttgccaaatttcacgccaatctgatataccaggcttcaatttcacttaattccccgtttcgagcgatcgtttctgagccgagtgcccaaattccattttc

SEQ ID NO: 75239 - DNA, 511 bp, Zea Mays
gtttggacatagcattggggtgggtgcctgactgcctggtcagggttcgcaccgagatccttggacggaagaactgaggcgatttcgacacaatcttcttgggctcaaacaggtgaacggagaattcaggtcccacttcatccgacgatcacgcatccactccatttgccactgacctctctgttactgcgtccaggggtaagatcttgagagagcaacgcaagaacagagctcactagtagctgtatagcaatcttcgttttcttgttaaaaagggagaaaaacaagagagcacagcagatatttttgtattccattcctgaacctggtctcactttccattccattccattccattggatgccaaaccaaatcacaacccgtggttgaaaccaggacaagctcgcaagaatttggcatcagcagtccctagtagccgtttggaccttccgtagtctgaaaccaccaaagtttggccacggaatctgtagacatgaaaactaacaagaat

SEQ ID NO: 75240 - DNA, 815 bp, Zea Mays
catgaacggacctagaacgagctagccacggcgaggttacttcgtgtggtgtttcgaaccgatttggggaaaatcaaaaaattggggttctctggtgagtaattggaggcacgagtgggtggatgggatgcttgaatacctagtggagccaagggtgtgctcaatttataggatccatgagcggtggtgattaattcggggaaagacgcgcggcggccggagagaagggggtgctctggcgcaagaaattggtggcttttaccgtggcgagctcaccggcgatcaccggatatgcataacacgagctactgcgacgtggtaagacaccgaggcacgtggcgcaaggtcgcgaggtggctatcaccggcgaggatgattctgaagcgtccgtgagctaggcggacacggcggccggagtgaatagtggctcaagttcatccacacgatgatatttactaccccgagcaacaatcggtacttcgttgagcgcgaatcgcaacggcgacgaggatcctggcgcgggatcaccggtggtgggatgaactgaactgatctgatccgaacactgtaccatcgaaaacctgattcagagcgcctaacagacagagttgcaacgcctagatctcggattttcgcgtaagaacttgctaatctgtctttaacaaatttgtagcacaattaccaagctacaaatggattatagcaactatccttgatcgagcactagatcctactcctatttggcccaaaagtctggccaatgtcactggtgacctagtttcagtcatcagagtgactgacagcacacctttaag

SEQ ID NO: 75241 - DNA, 816 bp, Zea Mays
gaaagttcacagattcacattgttcacaagctgacaactctgattattgaaatacaagttcaactcgaatatctcgaaaaatgtttgaaagggaaaatgatgtgtatgacaagtttgtgttctaagacgacaatcctcataacaaagaaacgacatgactcatcaaacagacagaaacaaccataatactgaacataagcctctgttgtcggacgaccagcatctaagtgcactttttaagatctatctcgtaagctttgcgaagccaagcgatccttccttcttttgtctgcagtgttgcaaatacatctctatactttttctcaatcaatagatgagtggcaaacaaatgtagttcgctgccttctggtgatccatcatcgataacttgttgcaactgcgccttaacctcaactcgaactgggtcattgtcagcagaggtaatggacttgttagtggtcattgaacgcgactcaaaagcctccactagtcttttcatgtactcttccctcgaatctttttttttctttggtttaggagaatcatgccgcatcttacgcttcccagtcgcatttgtgcatgggtcaggtgtgctgttttcacccccacctaaagtggcttcgaaatgatcatcagatgatgaattagcatcctcgacgccatgaacaagggttctttcatttgtgcagacaatgggtccaaacataacctttagctcatcctcattctctaggggggctgttttgaacataatacaacctggcattgcctgcaccaacatggtagttcctagtttgagatggccaatactattgt

SEQ ID NO: 75242 - DNA, 366 bp, Zea Mays
atggaggtggatgagcgtgccccggtggcgaacgttgacatctacgaggtgcgacaccgtgtgggagaacggaatttggaaatgtgttatcaagaacacattgggctcgctgggtaggcaagtttttttagtaagtataatggtatatgtaagtttcgctaaatatgtttaaattttttgttagagctagaaagcgtatttagctcgctcggctgatcgagattgttggagtcgatgcagatgaggcgagtcagtttgccaaaacgcgtcgaaataattgatagtttgccatttgaaatgttgcctccttgctataattactactatgacaatggattatggaatccataaaatatggttccgatg

SEQ ID NO: 75243 - DNA, 512 bp, Zea Mays
agtctagtgatgagtggagattcacacgtgtgacatttagtgctatgtaaccctatgaaagcctacaaaaagtttgacatcgaacccaactcgataagcatttgaaacaagcgaggtggcaacacagcagaggcactgaatgtgttcgttgtgcactagatatgtgtcattagacatgggtctgtcctatttagaattgagtctacactagtgcgtcttgtgtataccatacatggtgcgttggacaaggcacccagagagctatgtagatgagtttgtgaggccatacactcatcgaacatgtctgatgtagcaccaaacactacatctaatagggcacctagaaaggttgcaaatcgagtgtgagaggatgagtactcactgaacgaatgtagtgtggcacaaacctaacatcggacagagcactcagagaggtctataaactgtgcacctcaagtggtatactcaccagacgtgtttggtgaggcattggtcatggcatagaatacccg

SEQ ID NO: 75244 - DNA, 389 bp, Zea Mays
ccagctaccacctccaccacaacaacaacagtaataaaagatttaaccaaaatgagctaaataacaactaatccattaaattggtaagtacaactcaaatgaattaccattttctacatgtctacttggcccttaaacaaacttgagcaggtccatgcatcttcttcttggtgtctgaccttagtcgcatgccctacttcccttgtgcctctgctgtcgcctcggctcgcgacgtctccacgagcccccacagtgctaggtacgacttctcgtccgcgacccagaccatcgtgcccaactccaccgtctattgccccatctctaccaccatggcctcgaccccttagttgaggggcgggacaaggtctgggtggagtgaagggcaagac

SEQ ID NO: 75245 - DNA, 535 bp, Zea Mays
agcggcctccttcggcatctcctagtcactaacaagaggccacactctataagtaatatgctcttggactaagtctcttgtgccaataaaagtgcatacactgttaaaagccttctggcatgcttcaatttcatttccaagagtagtgcctggccttctgatgtcgaagcggaaccaaatagggcgttggatgatccccttgatatcttctctttcaattaagttgttctttacataaaaccactcttccatctaggctcctggccacctcttccaaaatgtcgtgactggatagctcacatcagagcgacgcatgaagccgtaacaaccaaagttattatgatattgctctttgctagtagccttcgtctcataggacaactcatgcatgttatagaagaattttacactcggctctagtccctggctcctcacgacccaaataaaaatccccattctgatgatagctttaggggtaatctgatgaaggtaaatctcaaaagtcttcagaacttcaactaaaaatttactcaag

SEQ ID NO: 75246 - DNA, 399 bp, Zea Mays
atcgccgtggctctgcccgcgcgggtgagctcgccagcgcggttacagctccacgagtctcatccaactctggccatcggcctataaattgagctcagattctgcttcttcaccacatcacgcacacaagcacttgagcaattgactcaatttcaccagaagaactcacaccgtccacaaatccattccgccctgttcttcgcgctgccgtgaaggactcctccgtggccagcactcatcgggttagtacctaccaaattgcttcctgttctagcttgtcttcaaccttctgttgctctcggagccggccaattaaactttaccgaagcctacactccggaacaccaaatcgtctagtagaacgccgccgcgacgccctctcggtcgacccacttttct

SEQ ID NO: 75247 - DNA, 422 bp, Zea Mays
gtcggcgccgttggatctgtgtagggcggtcaggattaaactaaggagcagcatcgtgtagacgtagatctcgacatgcacggcggttattaggtcagacgtaccgattggggacggtgtgatccgcgcccttggatggagattcgaaggccatgattgaatctcaggaaataaaatcctgaccaccgatctaggcatcagcggtcagatgtgtgtaccggttcagcatactgtgatctaatctcaaccattgatattggatcgggtggccaagaaccggtcataccccttcggtcgagtacgttttgtaaaagaaaccctagtgtttccagtaataaacctgtgatcctagtcagtggtaaagtaattgcgtagaggcccaagaatttatagatggcaccctgcagttctctgtattgttg

SEQ ID NO: 75248 - DNA, 339 bp, Zea Mays
tgcctagtgaaccgatgaagatgcgagaacataagaacacacaaggtttagagcggatagcaggggatggaagcacatgtagacatggcagcctcgaccctctcctgattagggtctggatggcacttgtggagatccaggttccatccgcaattttcggacaagtagcggcactagacctcccttggcagaagggacgaatgtcatacgtggggggtccggggccgcccacaggggtttgaccccatggtgtagtcgccgagcaattccatcaaaggggcacgtggtgacacgggtccgtaggtcagtggccccatcggacgggatcagacatcgagt

SEQ ID NO: 75249 - DNA, 522 bp, Zea Mays
gcagggacataaagaggcagtgtcgcagagatatggcatcaatcaagatatgcatgaatgcagtaaagtattatcaatattatatcttgttagtaagacgatgcatagtcacaagggtcgaagtggacagttacacttcagtgatgagcaggtacgacaaatgtggacaaacaaccatacatggtggcacgccgattaggcaggtggtgtagcaacaaaagtaaactatagagataatgtggtggcacgttgaccaagcatagaaacaaaaatggttggtcgatggtagatatagacatgaaggggaaggttagtgccacgacaaccatttggtggtagaggaaaacaaggacaaaggatagatgtgtcacgtcaaccacgatcaaagagcttgactatgtacgatggttggatggcagggtggcaaggtgtcatgctaggatgcatgatattgatgtgtgtccactggtgggatgttgttcttattgaagcacacacccattggatattgtcaggttcaca

SEQ ID NO: 75250 - DNA, 772 bp, Zea Mays
cagcgtctagtacgctggccatccttctccttttgggagttgcggcagcagttttctgtacctttggcaattctgcccctgttgatgggctcagaatttttggcagtttcaataccttttccactatcggctcttcgtccgcaccatctttggcttcggcaggtctgactgtaggcaccttcggcactacaatcggctcttcggtgctctgcatggtcggagcagcttgttttacttcggcagttgaagaggttccttcgccaaattcaagcaccatggccgattcaatgtatcgcggccggtgggtcaggccttcatcttcttgcccttcgtcatagcagtagcgaccaaagagatagcttttcttttcttctcttgccttcgcaatgggtagtgatagtcagggtatacgaagccgttggcatcaaatactctgtttaatcttttcttcccccggcccccgaaagccgtggacaaggcatcatcttcggctctgctatatgctccaagtagctcgtcgctgatagcctcaatactttttagccaatcatcatttggctcatcaaatcggtctctgaatctaaaggtatacttcaaccggaccaacccaccttcagttgactcggcagtagtatcttcggcatatcccagttttctacaagcggccatattctgtacgctatgtgctcttgaactatatcccttgtgccaatgaaggcacagacgttgctgaaagccttttggcatgcttcgtcattctgatcgattgtca

SEQ ID NO: 75251 - DNA, 661 bp, Zea Mays
cgattggttttttctttgggagttgtaggttccatacctctatgtcatttgggcatgtgatatctttcacctttatatggagctaagtaactaggacggttaggatatccttcatcgatgacacaatactttcgtacaagtgagaaggaaacaagttattgtacttgtatattgaaagtgcaaattatggaaaatcatttaagactcattacctcgaggcagatgtggaaagaaattctcatcaacttttattgcactgtataggacacttgtgtcatgcatagatcctggttgccccgtcgacacgtaagtaaagcgcatgtcggagtcacatacaaccaaaatattttgcgtaggtgttccaaattttccaatatatcttacctggtcatctagtgaaagacatacccgtatgcgtactgtcaagtgcaccaatacattccttaaagtgtgggcaagctcttctgtcatctcttattcttcaaaatttggatttgttggccttatgaaatcctttcccatagccatatagcatttaggaccacatcaaattttctactaattgtttcacctgaacgcttgaaccgattttgacttcttctatttgactcgttgccaccacaaacggataagaaaataactaggctatcatttgtgctca

SEQ ID NO: 75252 - DNA, 762 bp, Zea Mays
gtcgtggagggagtcgagggcttccttgtgtggtcgcatgcgcggtaacatcaacctgggcaatcgagggccacaggggtacccgtaattgctcgccgtcgcgctcatcggacgacgaatccgcgcggtgcgtgggcagtgatcttcttcgcctctatcctttggtgagtattacccacccatttcgttttagctctgcgagcgtgtatcatcaatcagggagtatttggatgcatggtttgcgcctgggtgggtcgccagagtgttgccgccctcactctgcgcaccgccgtggtccggtgctagaggtaggagagggatcgggggccgttggattggttctcggcggctaggattagatcttgtggcctccgttcggcttaatcaatcgcagccattgatcaatgatcatgcggtcggtgtgggaaagaatagatagtgtgccgcagatcgtaggattgggatccgacgtgtgagttcgatctagggttcatagtgtctcgttctaatctagactgacggtttcggatctaacaactgtaaacaccgcataccccttctccgtgtcaaaattgctaaagagaccctaactaaaatagaaatcaacccgcggtctgcactggtgagagactgagtctgggaatttttagatattagaccccgagctttatagtatttgaggcccagttcagagctcatgaaaatcaaataaataaatttagaaatggatttttaatataaaaacaattcctagaacttatt

SEQ ID NO: 75253 - DNA, 785 bp, Zea Mays
atttggagttcatatgaattttctacaaattaaacaagtttctgcaattaatttaataccaaaaatctattttctaattttattttcctggttttctaatctctggactgggcctcattttctgaaaagtacaggggcctgctcacaaaaaccccacagacacagagaaccccgaggggagaactgtgggttgattccctagaagtacaagggcgcttatgcaagttggccacgcgaaggggtaggcacggtttctggccgctggatctcactccgaggatctcgatcagatggcgctttaagtgaactggtaatcaaccgaaaccgttggatccaaagccaacgcccaagatccaaccacgccagtgcccatcccacccctcggatgggcgacccacggtcaagatctaaagtgctaaaagggggtatcaatggtttaatcccagccgttcaaatcaaatcaacggacgcgcacatcgtcttcaacccctggctccctctctctcttctttttctccttcctcagttgatattccacggccgaacgccataagagcagtagcgagccaccccgagctcaccatacgagcactaatctctcccgccaatgtactatcctacggccataggccctcttccacctccgacacgccggtgaggatgacccgcccccaacatcttagtctacgaagctctaccgacatgacttagtaaattaaaagggttttagggattgatgggtctcaccagaagctcaagcgccggatcgaccagcccgccgtggc

SEQ ID NO: 75254 - DNA, 357 bp, Zea Mays
ctggaggatagggaggcgtcgttcgactctgatcccacacgacaggccggcagggtgaggcggaccacggcggcgcgagaatggttggcctacctagggtttggccatttgagaatatgggcggaatggagtgtcctggtgcggaaatggaggttgtgtgggacgatgggttgattacaaacaagtcgaaggacttttttcgcaaaaaaatggcgcgggacgaccgttgaaactggtgctttaatatagtatagaattagtgtcatgtcatgtgtacaacagtacctagttccctgcgatgttataacgcaggatgatcgttgaaactggtacttagttccatgtgagatatttgta

SEQ ID NO: 75255 - DNA, 468 bp, Zea Mays
gcgcgcaccaatactgttaagtacaggggccaaatcctaattttcctaagactcaggtaacagtgcttgggacggcgggttcattcattaaaactacgggggcccatgtgaaaaatggttctggcgaaggggtacagtgagatcttgactgcccgatcgccactaatcggcccagattagatctccagtggagtgaaccggtacgcagcgtgagacgacggatcagcgatcgacggtttaaagtgaatcttgggcgacttgagcccaaagaccatacgatcagatatcttcggcccacactgattctaaccaaagcgttatcctagacctaatcgcggtcatcgtcaccaaatctaacggtccaaacttctcccccaatccaacacggcggcaccgcgcattggctgcggcagatcatcaccggcgcatgaccagatcgctccaaatgtgcccaggcccaaatccgag

SEQ ID NO: 75256 - DNA, 966 bp, Zea Mays
tctgtacaacaagcccctatgatggtgtagtgggctgactgccttgcaatgcgctctgctgcagccttgtcatccggctctttatgtacctgatgataggctctctccagtcattgggatctgcctctggctgactcaaggtgttgcattcttccatctggtctgtgatgatgcttggctgtgatatttcttggacgaagatcccaggcgaagcctgggcctgactggatcccagcttcgataatgcatctgctgctgcattgcgatccctttccacatgatggaactccaatccttcgagcttgtcttctagttttcgcacaactgcatagtatttgcccattgaatcggtcgagcagtcccaatctttgtttatttggcttatgaccaccagcgagtcgccatataccatcagattcttgatgccgagtgataccaggatgctcagcccatggaccagtgcttcatactctgctgtattatttgatgctggaaacaatagctggagtgcatacttgagttgttcacctccaagagcaataaagagaatccctgcacccgctccttgcagctttagcgagccatcaaagtacattctccacacttcagcaatttttgggctatttgggacctggtgctcagtccattctgatatgaagtcgatcggtgcctgagtttttatcggcgtgcggggctagaactctatgtcgtgagctctgagctcacatgcccacttggctatccttccaatagcttctttgttgtggagaatatcacctatcggaaatcctatgactactatgactttgtggttgtcaaagtagtgttagagcttgcgagcggttagaagtaccgtgtaaagcagcttttggacttgaggataccttattttcgagggcctgaggacttcggtgatgaagtaaactggatgctgcactgggtatgcatgtccttcctccgcccgct

SEQ ID NO: 75257 - DNA, 319 bp, Zea Mays
tgtttttccacgaatgactttgttacgaaggaatgagatgctccagaatcaaataaaactgatgcatgtatggagttaataagaaacataccatacaccacgtcggcatcctcaggaactgattccgctgtcacatggttgactcttcctctactctggttttgcagagtcttgttctgtccagatccatgagcaggtgtgttctggtcattcctctggttgttgttcttctggggtgtctgtgggttaagcctggggcagttgttggcacagtggccaagttcgccacacttgaaacaaccattgggttgaaccgggg

SEQ ID NO: 75258 - DNA, 474 bp, Zea Mays
aaaaaatagaagtagcatcctagaaagctcaaccgagaaagatcacgaaacacgtcacatgaggatttgtcattcatagatcagtcacgaggatccactctttatagaccagtctatcttgagctggctcccgtgcagcatgagggtccgccaaagacctttactcgtgttttaagctctcctagcttctacacgaggatccgacctctatacgtcaatttcatcttgtatgcacactagtgaaactagctagtaacaccctaaaattctagctagtaacaccctaaaattcgcttccactctaatttgaactcaggacctaaaaagtgttactcagaccatctaataaactcagttagagatcctttcgcttgataagtacatatcaaccaaaaattaattgcatacatatattaccagagtaagcgaatcttagaaaaattattagaagagtgataggtcgatcgttttttt

SEQ ID NO: 75259 - DNA, 903 bp, Zea Mays
tcggcaccgtgacacctttgcctgcaaattctttatgagcttcattgagtctctaagcagtccaacacgaccaaggaaaaggaggtccatcataagaccaaagtacttagccttgggctcaatattgtagaacctaaccatcctatcaaaacactaacagcatttaagcaccaagcctccgtgggcacaggagctcaggatgcagatgagagtcgtctcatttgtttgaggtccattcttctccatctccatgagcaaatcaagggccttatagttgtacgcctgtacccatgcaatccatagtcgttgatcattgagttctgggatgcaacactcctttcggtcatcaaataaaatatctcctttgttgtccccattaccccacacttggcatacattgtcagcgtagcagtaagaagtagtacattaggaagaagtctctcccacctctcacgaaccaagcaatgcacccccaccttcccctctcgagatcactcaggtttccacaggataccaaaaccctcacaaatgtcttgtcatttgtttttctttccccccacagccatcattgcatcaaacagattcaaacactcaagctagtctttcaccttcgcgtatagcgcaagaagccaagaacaacattctatgacaccgtgatccttgttaacatgctatcgaaaaccattcttgccatctcattgtccccagtctaggcatagccatccagcatcgagttcgaagacacaatatccctcacatgcattacatcaaacagcttcttggcactctccatgtccccagtatacttagcaatcattgaggtgagacctagccaacgatgcctgccaccaaatgtcctacgccatgaccacttcccccgccgcccaatccggcaaatctggc

SEQ ID NO: 75260 - DNA, 856 bp, Zea Mays
cattactccaaatatactacgtttccatataatttgaataattactgaggaaataatttgcgaagtttgacatttggtctcctgtacattgcaataaatgataagtttaaatgacaagttattgtattaaactttgaatatgtctgttataaattgagaaaaattatttagaaggcttggagtttatatccacataatattaagtaatacaatttagggagaacatatatgagactaaaatggagagactaatctttagtctctggaaccaaataggttcttagtgaatctaaaggccgaattttattattatagtacagtttcttaaaaggtgctacattaacttaagtttattggagttcataaaaaataaacaataatgcaaccattcacaagataccattatttttttttcttttccacttcttctcccaacacttttcttctgtctcagtcactcgtctctctctaccacatggtcaccactccaatctctccaccacacagtcctggacgaggaacccgccctcatgcctcgctgttgcctcaatcttgcctcatgccttgtcgctaactctgatgcacatagacacctgcacacattcctagtctaccccttcttgcatggggtcgcgttggcctatgcatgcctcttcacacgcaactgggttcagactagcctcttctagaccgctacctgtcggcaaccttgtttcctctaatacatggtggtagccacactaaaatacagttaatatgatctcagaaaactacaagcctctttagtacaactacaatagtgttcgcaaacaccaaaggataaaagttattctaatctcactcaaacactagagcc

SEQ ID NO: 75261 - DNA, 361 bp, Zea Mays
agacgagttggtgagaagttaccacatcattcattgctattgcgttgttgtgctgttgaaatttttactgaagttgaagctttctgctttccgtgcacttgttgcgtaagcttcggacaaacatccaattagctgagtctagcttcgttacataacactgaaatggctagagtcaggtctacttctagagtatcacacaaaggagaagaagctggagctactgagatggcccctatctcagaaatgatgaaacgttctgggttagttgtacgagaggaagaagagtttgttccgacagaagatgttgttgttgccgaagctgaactagctgttgccgaagctgactgtgatgatgaagaag

SEQ ID NO: 75262 - DNA, 788 bp, Zea Mays
ccatgtgcccattatcacaatattaatccctgtttgaatcattcactatttgattcagttttccaaaatgtgcaaccttaaatgtaacatatgaataagaaatcacctcaactccttcttgtatctcttgaaggcaatcccaaaagctttctttgctaacatcagcaccatctacagaaaattaaaagcaattaaaatggacaatgaaactatattgcacattcaatagtaatgaaacaacttgtacaaaacaataatgaaacaacttctacaaatatatacctttataattgtttcttatccaatcttgtgagcacattaaaccctctaaaattttaggggtcaatctgatgcgatgctcactaagaattctcccactagtgctaaacgcagattcagatgcaattgtgctaactggaataacaaatatatcacgggcaatctttctcaatgtaggatagcgtgtccctgccaccttccaccaatctaatatctgaaagttctctgatgaaaaattaaccaaatcatcctctaagtatctatcaagctcatttttaactcttgtcattgttggtctacgaattgcaacacgtgcacttattgcagagagcaaactagtgtcgagggaaggcactgattgttctatggtattcacatcctcatccatttcatagtccttcatcaaatcacataaagactctttcacatcttgaactttttccacacactgatcactgttttgacctaacaaggtctcaaagaatccaaggagataatccaccttaaag

SEQ ID NO: 75263 - DNA, 1047 bp, Zea Mays
ctttgcttaagtgattaagccttggtgttgtacaaaaatgggagataaataggtctgaagtctggctgtcagaccatcctgaagctgaactgggactgacagtgagattggctcaaccttggattcaattcaagctcgaaggattgggtaaatgagttgatttgcagctagtttgttgagctacaactttgatgcggagaattggtcaagtcactacataaaatctaaagcaaatcgcgctgcaaaatgctctgtcagaacaactgaagcaacctctgatggtacagtagcgaaaatattccagggttcagtccccctcgccgttggtgatccgcgcgcccagattcacgccggtcgccgtgattcgtgcttggcacgaagtggatattcacgaggaggtaaaaagatcgcgcgggggcgtggatttggtcgcagcagaggcttatcaccgcgcctgtagccattgcgacgtggccggaccgctggtgttgccatggaaactccggtgacctcagttgtgccacgccgtggcttgttactgtgtggtagtgaccgtggcacacttaagagtacaatcgtggagacattgcgccggtgaacgccacgagttctttgcgccagtgctcttcctcctctccggtcgccgcacgtctcctccaaattagccgccaccgctcatgaatcctataaattgagtgtgccatcagctccgctaggtattcaagcatccagcgcacccactcgtctctcggattgttcaccagagagctccaatttgggatttcccccaaatcggccaagaacatcgtgtgagtgagctcgctgtggccaacgctccacaggtccgttcatgccctctgttcactcattttagtactctgatgtgctcttgatactccctcacccgaccgattaagctaggacccataggatcaccgggaacgcgtcgaattgtccgtagatcacacggccaccgtgggcagagagattaggggctataatcttgcaattgatcgagggaaaatggttattaggggtcaaattagg

SEQ ID NO: 75264 - DNA, 852 bp, Zea Mays
gtgaaattctgttgaaaaagtagcacaaccatgtgattgccatctttaagaacaaatgatttatagccatgatggcaatagataggaatgtattcagcatgacatgataatcatgtgagttgtagttggtgactatcaggtctttcattaacataatactccgtatgctagagcagaatccagatgggagttttaaattcttgagccatacacacatctcatgtttctcatctacatttatattgtatcttgttgctgggagatggtacttccgatttttttgaagaataggatatgtagtttttttatgcctaatgttggttctatcctgacatttgatcaggtgggcccaacacttaggagacaagagggttcaggtgcacaacaagatagtaggcagggaactatagcatcttgttatgtgtgtcccatttgtgtacagggtaggggtatttttaggtaactgagaggggtagtgggtccccaagtatcgttatacctccggttacctgtgacattcccagaatattacccttaacggggtcattacaatggacatagtatggtaattcgaacgcactacaatatctaccccgcaagggggcttacaagtaggcgtggaggactacgggccggaatcctaggtttctctgtaacctgtcaaggcctccgcttgtgtgtcgcatccttgatttggcaaaatcacatcgtagccttcacttggactaggcgttcgccatttgagggaaggccttcggggtacgtatgagggtgcagcaagcccccttctcatctactgtgagccctcggcttcgctcccctgtggaagagagtcaagaagaaactgttgtg

SEQ ID NO: 75265 - DNA, 506 bp, Zea Mays
ttgattaatagagggctagctacacctctactcattcattgtcaactttatacagtatctgttatgagagaaaagctaaataatctataggtatatcaaaaggcattattaattgcaacgacgacacataatatatacacattcttcttgccgccggtgtaagcagaagcgtccgatccagcgctcgtgcgtgtccagtcacacacagcttcttgtaccatgcatatccatcagtatctaatggctggattgaatttcctggtcccctctgtcaagtgtcaagcagtagccagcagttggcttctagattaattttaagcttggagcaaaagcagcacaaggtagatcgatcagcatcatcccaaaccccccaaacaaaataaaaaaaaagttagtagataacaagggacacatactatagctactacccctttgagaaagaagcttggccaaagcaaaaggaggcttgtggacagtagaaaatgctttgccccaaagacacctct

SEQ ID NO: 75266 - DNA, 530 bp, Zea Mays
aaggactaatcaggtgttggaagatatgttgagagcatgtgccctttagcatagaggaagttgggataaaagtctaccatatgctgagttctcttataataatagctatcaggccagtctgaagatgtcaccattcgaagctttatatgggaggaagtgcaggactcctctatattgggatcagactggagaaagacagttctttggacctgaactgattcaagaggcaaaagaacaagtccgtataattcgagagaatttgagggtagctcaaaccaggcaaaagagctatgctgataacggaagaaggccactggaatttgaggaaggagattatgtatacctcaaggtgtcaccacttcgtggaatgaggagattcaaagttaagggcaaattgtcccctcgctttattggaccattcatgagctttaggcgagttggggagatggcataccaactcgagctacctgataatctatcggatgtgcataatgtgttccacgtatctcaactgaagaagtgtctctgtg

SEQ ID NO: 75267 - DNA, 535 bp, Zea Mays
tccaaagtattgttctcttgagggtcgtcgcacacaagcgccacctgaattaagaccctgagaaggaatatcactacaacgccaaattgaagaatttgtccttttttttctgatccgcgtacatattgtgtccagtcataacaggaggctaaagacaagattatctggagatgacccgcgatgaccagtacaacgccagatctccttttgggcatctcgccaaagaagactacgatgtttgctctagtgtcctgacacactaaggagtcgacagtcgtgcaggccgccgtgagagaaggaaagatcgacgatgacgaatcgtgcttcactggagaacatgggccaaagagctcggctaagttggagacagaagcatgctctcctgcgcctccacatatgtaagttttgtccatgtttgcatctaaacatctaccatacaaagaacaacataggctactacccaattcgaacctctctatattatgattgtattatactctgtgtcatcgatctattgtagcagtcttttgtctag

SEQ ID NO: 75268 - DNA, 282 bp, Zea Mays
cagtatcataaccgacttggggtccaacttcacaagttcagagttcttcgatttctgcgagcaaaaaagcattcaggtcaagtatgcttcagtagcacacccgagagccaacgggcaggttgaacgagctaacgggatgatattggaagcactcagaaaaaaggtcttcgataaaaatgagaagttcgcaggaaagtggataagggaattgccttacgtcgtttggagcctaagaactcaacctagtcgagccctgcatgaaaacactcctttcttcatggt

SEQ ID NO: 75269 - DNA, 306 bp, Zea Mays
cttagtttgcatgaccttaatctcaccactctattgaacttgatgaggatagaataacttgggagagatatgtttggtaatattgcacttgatataaccttgttgcatctgagcaacacaagctacattatattcatagataagggtgtttgattcaatggaatgaatcccacatgatgattgaatgtgattaatcacccttcgaagccagacacattcacgtgaagcttcatacaaggcaataatctctgagtggttagtggatgttgttactagagtttgcttggatgacttgcaagaaatagc

SEQ ID NO: 75270 - DNA, 466 bp, Zea Mays
gaaaaaactagaatgcagcgatttaatgaggcaggcattgttctacattgctctcatctcagcaacataaaagggaagatttccatggaggctatcttttgagaccactcaccatgactgaacccgctgtgatacgctccagggaaagtaaccacaaactcccctgcgttctgaactaatctgtttggagatataagaaccaaccgctcatcaaccaccgaaggtaccaaaggaagtcattcggtaaaggaaggaaggagtagaactgcctgcagcagggaacccctgaatccacgagcacttcaggggacatcaccgtcgtcttatcacccagcaatgcaaaggtttctgcaccccagatcgcaatcccgaaatacaaaatcaaatgacagttacagcagcagagaacaggggtggtaggaaaattatgcaatgcggctgcctcacctaaggagttcacctcccc

SEQ ID NO: 75271 - DNA, 442 bp, Zea Mays
ggctatcctagcgtttctctctgctagctcagtctgcaaactaggacaagcagtacactcacctaacaagcaagacctagattgaagctcatcgcgctcatctagcagggtggcatacttggtctacaaagtggcgatgtttaacatgtgaagggcccacccatcacattcactctcatcaaacaacacaactgaagctctagcagactcaagctccataagcatgctctcatacttggatttaaattgtttcctctcacgagcaacaagcctaagaaacttgtcttgattcgccaaagcagcgttcaactcttctacctcaacggcaagatcatcgatagaatgtgatacctcagaagtagtttcatcgctgatgtcctagccatcaccacccaccgcatagtatccaagggccatggtgtaaagggcccctgtagtgttg

SEQ ID NO: 75272 - DNA, 626 bp, Zea Mays
cggagggccaaatattgcttaggcaatccttgatctagaccaagaagatatcaatgataaaaaaactcatatccctaacactatttctagatggttggacgcactcctcgatgctgactcctccctcgctcgccacgctacgctctaccactgcctctctgcactccacattgccaccgcgaggtccctcttcctctcttctttgcttcgctcctcattaaccacctcgctcacctatctcgatcttcctactggtgttgttattgatcttggatcatggggtgtcgtcggacgcattttttacttctttctcaccctttgtcgctcgcaaggatatctcccaacctacatgcttcaaaaatcccatcttttcatcgatgcctgcgtttgtttgtatctatctagacgtcgctgctgctcttttttagattttatttgctcatttatgatgattcttgaataagttgtttttgcacacttattttgtagatatgaaaaattatactatgattttttcggcgttgtattagcaatacctacattttggtgtgtcctttgccactgtacattctttaaaattagatgattattatgttaggaatgtaagataaaatatccaaaagtgg

SEQ ID NO: 75273 - DNA, 635 bp, Zea Mays
gcagatcaacggtcccgaccacacagtcaaaccggtatggtgtgatcaaatatggggcatccaatattgaatcggcggtcaatacgcttccccctaaacactggcaaccgggagcggcggtgcgcacacccgcacggtggcccatcgctggcgcaaaagatgtccggcgctctggtgcccccaaagagtgattcgaacggttctatgtgtagtggagaagaatgcaaacacaaggaaggaagccttaccgcgacctgaagcgtagacagggctgcccacgtcacgcgacgacaccacagcgaagctcttggtatgacgagcggtttcacagcttcagacaccttcttgtagccgccgatgccacgcacacgatccccaggttgcagcgatcccccacaactactatccggccatcgaggtatgatgcacacatggggtgacgacggtggctgaccttcttctctctacctctatgttctcgacggggcgctcggcactggctcggtttaatggatgcgaggggggattacgagccattggggggtacgaccctggttcttatagcctaagtaagggctgtcaccgaccaataaccacatggagcaatctcggtggaagctaccccgagaatgcgc

SEQ ID NO: 75274 - DNA, 904 bp, Zea Mays
taggaattgaaccatcatagaagaggaatgaaaataagacgggaacactgatgccaacgccgatagagctaagagtgacttcgaaggaggggcgacttgactcacggaagaagaagaatcatctcccatcaatcttgatcaggttctttaaggctatattctcagtgccatggtttatttcacggttttcaacactatcaaatcatttaaacaggttggaactactattaaggtttacagtgcgttgcttcatttcacgatttgataaactattcatagcgtttagttgtgatggtccatctcttcattaattgagaagaaacacttcaactttcattgtcagtctcaatacgctttggtagatttggaaatactgtatacctgatcaaacccatctcttctcttgggacgtctcgtttgactttgcaagtttgaaatcttttgtagaatctccatcgatggcctaaaaacaagtgttgattcagcggagaatcactgaaagtttgggggtggggtgaggggcacgatttgtgtactttggtcgggaggtgatcaagaccttaacggatccgaaagggcaagtcgagccaatgcctctgcgacacgcgtggcggcatgcggcttgtcggcttgtcgcgacagcggcttcccgtgcctggtcagggagtacttgctcgttagctggactccaactcttctgtcttgagctgaaccccacgaaaggacttctgtgtgaagaacaccgccccctgaagaactggatgccaactcacccgatcgataaagcagtaaccgaaccggaccagtggctgccaatgagcactttgggttgcatcccctttctccatgcgtgagcggtgagcatgccagacagtacgggacgagcacagcatttctaattaat

SEQ ID NO: 75275 - DNA, 670 bp, Zea Mays
catgtgctattgcacaaacgcgacaatccttgtgagcacaaaaagaagaaagaaagaaacgagaagaaaaaaagaaaaaaaaagaaaaaaagaagagaaaaaaatcagaaccaaagaaagaaagaaattaagggtttttggaaagtgctaattggagattgtgctgctgatatgcaatagccttgcaaaggaaacaatcagacctatccacaaaaggaatgccatcacctccacacgtcaaggcaagtgcacaatcacatccaactttcctttttctagagagagagagagatagagagaatccgttcatcaattaagactagttgttgcatactactcgagctcgggctgttcactttgtgttttcttgccttctccgtgtggtgcacaacaagtgaactcttcagtacccttgttagaagctttgagtggtcagctagcatctctccgagtactttgtgcgagattcttttgttgcttgcactaagtcccactaatctttgcttagatccattgataagtttttgccttgtttgaccagcaacattgttacacattttgaatacttattgagctttacatttgctaaattgtttgtgctaatccttgctctaaagtgcagccttcctacagctccacaaatatctacagtgtgcaggttgtgtcctct

SEQ ID NO: 75276 - DNA, 790 bp, Zea Mays
ctgaaatcaaaccaggcggcctagtccagaggggaaagcgcgcccgcgcgctggcatctttgcagaaagaccctcgggtttcaggctaactagaaacatgttctttaactatttctatgtgtcgctgacggtttgcaaataaccccttcggtttctaattcttcgcgacgcgaggtccacgacggcgttgaacgcaaccgaagtccggcgagctcctggaccggccgattggggctatgaccggcactcccgagcggctaacactcaattgaactctccccaaatgactctcctaagttaatttcacatttggtaaactatcctgttctgtccacgtgaaccgcggatgaggaagaaaatggtacgtgttcccagtgatccctggcggtccgggtcaattaaaggggtcggggagcatcaccatcatgtaaggatgctagaacagggacaagaagggaatgagcagacctggggaaggctggccgcggtgatgtgtggttcacggcatcagagaatcgatttgggggaaaacccgaattgcggggctacgatgaacgagtggagatgagagtgggtgctatagcttgacgattacatggcgcaaccgactaggccctcaatttatagaagggtaaagcggtggccagcaaatttggggaggacgcgcggcggccggaatgaaagggtgagtcaccggcgcgacttacagtggcacttactggttgaggagctacggcggtcatcgtcgagctggtgcggctagtggcgacgtgtttaacggatggaagcg

SEQ ID NO: 75277 - DNA, 665 bp, Zea Mays
aaatatgtaagctagaatgtgcaaactaggttttatctaagtcaggggcggatccaaggggtgggcaaggtgggccatggccccatctcaatttttcttaaccccttatacctaggtttaggtacacaccaaaataaacaaatttttgtatagttagcgtggacaaatctaatgaaaactagattttgatctatttttctctcgatgcttcactactcagtccactcttcacctgagccatttgattctcttccctagcgcaagcccactcgtggctcactcgcttcttcggtcatcgactgaccagtaagtcggtgacctaacccgcccgctgctgcgcactttgccttctcatcactcatcagctcgtcgactcatcgggatcctacacacaacgttgatattttgcctcctagtatgcaccagcacatgggcaagctgttgatgggaccgtggcatcacctatccctcgctaactcattagagtcccaccgcgccattgcaacacgacaatgggtgtcgtttgccgtcactatcatctatcgctaccttgcctcctgcactcgctcctcctacttgtcgtcgtctcaccaacgccatctcacgacaaattcgatgactcgccagaacgacgcgctgatgcggctgctccgccctagtgtctc

SEQ ID NO: 75278 - DNA, 542 bp, Zea Mays
gagttgtcagcaatctgaatagacaggccatccggtcagtcaaggaggaccagaaagctttgaagaagcagaaaactctatcagagtcaaaggattaagctcccaagaaacaaagactcatcatgatatcttctatggatacaaaggtacaagatgttccagagaagactataggttatttcttcgccttctgccgctgaggtttcggaaattctgaaggtaatgactgaacccatcccatttgcactgctaagtcctctaaggttagatctgactagcctcttgcagtcaaaggaaaccgcttcgactgtcgaggggaaagctaggggacagaagaaacggtggatgatgaatgtgatgtaggctattgaacagaccccgcccccagcttcagcggataaaacaattatgcttgtccatgcagaagaaaccgccgcagccgaagccgataatcttgcaaccacaatgtcggaaatcgacatacttatatcatatgtggttgcttagaaaaatgtagttgtagcgccttctgataagggaaa

SEQ ID NO: 75279 - DNA, 965 bp, Zea Mays
gggtggaagcttacatcaatgatgtggttatcaacacagaaaacttagaaaacttcatcgaggatttgcaactggtcttcaacaacctgatgttctaccagtggaagttgaacctagaaaagtgtgtctttggagtaccaaccgaaaacctactcggattcattgtcagccatcgaggaattgaagcaaatctggagaagattgaggccatcatgagaatggaagagtcgcggtcgcagaaaaaggtgcaaaggcttactggatgcatggcagctctgagcaggttcatatcaaggctagcgagcaaggaatgccattttataaattactcaagaaggtggacaagtttcagtggaccatagaggcacaggaagctctagagacattgaagaagttcttgaccactccgccagtactcaagacaccacgccgagctagcctggtcagtcgacagaagatttgctcctatatatctcctgcacgactcacgtggtgagcacctcgttaggagtcgagtgggtggaggaaggacacgcatacccgatgcagcatccagtttatttcatcagcgaagtccttgggccctcaaagataaggtatcctcaagtccaaaagctgttgtacgcggtacttctaaccgctcgcaagatccgacactactttaacgaccacaaagtcatagtagtcacatgatttccgataggtgatattcttcaaacaaagaagctattggaaggatagccatgtgggcatgcgagctaggagctcacgacatagagtttcggtcccgcacggcgataaagactcaggcactgattgactttatatcagaatggactgagcacgaggtcccgaaaagcccagaagttgctgaagtatggagaatgtactttgatggctcgctgaagctacaaggagcggatgcagggattctttttattgctcccagaggtgaacaacttaag

SEQ ID NO: 75280 - DNA, 287 bp, Zea Mays
cttcgaggcatggcatggagctaaggaaacttgatgtctcgttcttgaggacatttgggtgcgtagccatatcaagacgacgaagccacacccttccaagctggaggacaggagcgcaccgctggtgctcctagggtatgatgtagacaacaaggcataccagatgttcgacttgcgtggaggcaaggtggtgaacttgtgtggcgtcgttttcaaagataagccaacctagtactagcgaagtccagacacaagagaagtcggcggagcacacgacaccttcgtcg

SEQ ID NO: 75281 - DNA, 863 bp, Zea Mays
tcatgaacatagaaacgtatcatgggctgcctgatgggctccccaatggtttgctttgcggatagaccatcagaccgcaatcaggttgggcaaacttgatccaaggagacgaagactgagcgttcgagttatgctctggccaaagcactgatatctcgggtaaggaagttgcacatacccaaagagttatacattcagtgttaactcggctgaggaagtgatcgaactccggataagtaggactacaggccgcgataaaaaaggagataggtagaatagatagtgatcacaacttgtaaagggataactctctggtcgtgtatataaggtcaagggggacccctacaaaatcatctcatctcatctcatgacacactagccctcatcgacgacctctgagcatcatcgcaactcatttgtaatccatatactccaaagcaattccaatgcacaacctcaataggaagtagggtgttacgcattcaagcggcccgaacctatataaattcctgtgcaagtctgacgtgctcctgcatgtaccattgagtcatagtcaacgatgccgtcctacccaaaagcatcacgtgggtaaccatgtggtgtgtagtcgggtcacaaacatcgacattatacatcccaccagctcacaacatacctcattcatgagaggaagctagagaaggactatgatgccttgggacttcaacatgttcctcgcaacaactcgacgacagatgaactccttgtgagggcatcaacttgggcatccatgcctgaggacatcttcaaaagacagctgttgagacctacctcctagcccatcgaactaggcgaaaggggtgagactagcaccttgaagctag

SEQ ID NO: 75282 - DNA, 409 bp, Zea Mays
gttcgggcaacattctggcaagtatctggaaagcggtatccggtaaaagtgacttggaaggaaggatggttcagatagtttcggctttctcccaggtagactgccatagagcatttctccattccgccctcgagatactccttccagacgtattccagcttcttgcggattcccatgtgaagcgcacaacttcgcaaaagatgtgggaacccttccacctccgaggagtaggatgtcctaatgaccagagagtcttccatctggaataggaaaagaagggtctgttaaatcggggaggaggagagaagacttttcttggggaaagaggtattttctttttagggcaagttttagggtcagggctgcgacctacggccagtcctatgggctttgataccacctgaagcgt

SEQ ID NO: 75283 - DNA, 441 bp, Zea Mays
aaaaaggaagttagaagccatcagatgccctgagaatcagcgtgttcaattggctgctcatcaactttctaggatggccctaacttggtgggataccttcagcacagccgtcagagatgctacctgggcagaatttgaaactgcttttcgagaacatcatgtgccccaagggatcgttcagctcaaggaagatgcgtttcgggaactaactcaaggtggaagatctgtcagtgagtatgtgcacaaattcacagaattggctcgctacgcgcctgacgatgtcagcacagaagccaagaagatggcccattttttgaaaggactaagaccagaactcaagaccatcctcgccagccaagatttcctcagcttctcgcacctctcaaacaaagctatacaagtggagagggcaagggaagaagaaaaaggtcacctcaagag

SEQ ID NO: 75284 - DNA, 290 bp, Zea Mays
cgagttagaacgggccgcgtcggtcgttttggaaataacggccgagcgatgacatggcacgacaacgtttttagaaataaccgctgggtgatgactgaacgctttttggaaacggtatctggccgagaaaaaccccatatgtactgcatcgttgcgcgcttccgctttccgtgccctaattcttgcttttctgcatccaagctttccttgcgctcgtgcgatactgcctccgtcctgctcaccgacgagattgagatggcgcccaagaggaaagcatcaggttcatccgc

SEQ ID NO: 75285 - DNA, 500 bp, Zea Mays
gggttctaccgtgccctggaactcttctggtggggaagtctccaatgggggcggagtgcctcccattgctcgacgccggcgaccgggctctgcgcggcgcgacggtgcggatctgacgcccgctgagaacgacgacaagctggacctgagcgctcgactgagaaggggcaaaacgggaatacaacgtatacgaactgactcacgggcgtcattatgccaaaaggaagagaaagtgttgttcggagtaccaatctggcgagagtgctgatcgggataccgatctggcgaagaagcagcttcggggtattataatggcaaatttctccactaggaggggtgtctccgtgggtcgcgctcgccgtcacttcggtcgctggtaggatatgctccaccaagctcggtgtgttcttctatgcgttttctcaagattgctgcagggtagaccacctcgtcgaggtttgggcggggctgacaatggcgccgccgtgcttctgttttgc

SEQ ID NO: 75286 - DNA, 460 bp, Zea Mays
ccgagttctagcgcatgttgtcactcatccgagcctgctcttgccttggtcagtgcacaaaacctcttctcctcactataagctaccgatcttgtgtggggatcatacgatttggcctactggttccaaagatatggagctctcaagtcgggtttgtctctcagcccgagcccaaggcaaatcttcggttttgtcgtgtctagggttcgaatcccaatgccatcttcagatatgtggtagaggggttagtttagcacatttttgttaatgggagcttagggttttgagatagggattaaggtgaacacgctcggttttgagttagaggctgaaattcagaaatccgaatttcagatttctctaggaagcctccaattgaatggcttgtttgaggtttttaacaaactattttggccaaacttttataacctttattgtagcttagttagtgtgtttcaac

SEQ ID NO: 75287 - DNA, 752 bp, Zea Mays
gcgagagtaggtcacggcgatgcggtggaagtgcctggacacacggcgcaaggctggaaagcggcggtcaccggcgtacttatcggattccaccgcggtgagcttggtacggcggccggaattgtttactggccggggcttatccacgacgacgtgctccgagtatttatctaatcaccccgagtacgagtcgagatgcatggcagcggcacgaatcgcgatggcgatcgtcggcggtgaactgaactgagctcgcagcctaatccattcagagcactgtaccatggcaattgttcttcagtcgcttgaaccagccatcttcttccatcttgatctctggatttttgtcaagaacagagcaatctctcctaataaaatttgtttaccatacatcaagctacaaacttactataggattcttgggttaaaaccgaatgaattcaaagataaggctcaccaaaatttagcctcatctcattgtaacctagttctgacagagtaactttgagcttgctttactccaatttttacataacaaccatgcttacactcttaagcaaagttgttctcctttcatagagctacaaaattgatgtggtgacctagggcaaaatcccttttgtttgaaagttacaaggtcacaaagatgagcatattacactgaaattcagtcttagtcaaaagagttcaaatgtggctcttttgcaattaagtccaaaactcagggttcaagttgcaaatcttcataattg

SEQ ID NO: 75288 - DNA, 385 bp, Zea Mays
gagtgattccactgcttcctaaccatggccactactccgatccacgcgtggagtgccatagatccctcagctccaccagcccgatcatagagcacgagcacggtcctcccaaccctctctcaccctttttcctacacttcggcgttcgcggacgaatgagaacaagagagggaaagtggaggcgatgcggctcggatattttgtcttgcactaagtcaaggggaagactttgcgtatatacgtcacatgggaatgccaaaacggatggcacgatggttgggcaagttgtggcagggagatcgcggcggctggcggcgttctgttagcgggaaagatgggtagcaccagctgacaggtgtggttggcttcgcccgcccgagtcgtg

SEQ ID NO: 75289 - DNA, 1237 bp, Zea Mays
cgaagacgatggccatggagtcatcgtgaatcaacgtcgcaccccctacctggcacgccagctgtcagtgtttatgatccgactacacaccatggggtacaccacgtgatgcttttggccaggatgacattgttgaccatgactcgatggtacgcgcggatgcacgtcagaacacaagagagtttgcataggtttgggccactagaatgtgtaataccctacgtcctgttgatactgagtattgagtatttctgatgttcacatgttacatatgagttgtgggcaatgatggatgaattctcctatcgatctagtgacagtgtggtttctatgagagggctaacgagatatgagatggtatgatatgagatgatttcgtaggggtattcctaaaatttatataggcgactagagggatatccctttacaagtcatgaagtctatcttactctatccgagtctatctttaacatggtaggtgctcctgtttatccagaattcgcctttcttccgagttatctcccgagtatctagctcttcaggtacttgcaatctttgcacgcgaggcatctacgctccttctatgttagttgcgtataacttggctatttcggtcttcatcttccttggtcgaactcgctcagcttggtcgtggcccaaaggtatgcctcgctaggcaaactgtcagggggggcattaggtagcccatggagcatttccgtgcttatagggacccgtgggatatctatatcccacactcgtgtctcagatctctcagtgagtaccagagactcaccattcgaagtgaatccgtgctagccccctgccaaacacgaatctcattgtccctcggtttctgaaaccacgatagttggcgcaccaggttggggaccgttagcatgccaagtgacatcttccacttcgatggctagcactttcgcgttcaccgacggcgagagctttgctccatgtagccgcgcatcacgttcagctctctcgacttcctcgccaccgccatcgacaaaccctgcctcgtccactgcgacagcatctgtggcagctcgccgacatttagcgtgctaggggttgcaagggtagcgccaagatctacgtggtccaccatgatgatcatcggtcaagccccatggtatacgtggttgccatcattggccaccagccaagctctgcccttgccttgacacctacgaggatggcccaagccactgcttaaccgaag

SEQ ID NO: 75290 - DNA, 559 bp, Zea Mays
gttgaaggccactaggcaggcttgagccttatcactgttcaagatcgaaggccttcggataccgaagcatgattgtatcggacgttgaattatatatctcacatcctccctatcaaccaaatcaattttaacataaaaccattgcatcattcaggatcctcgccacttcttccgaaatattggcacaaggcgtctcgcatcagagcggtatatgaatgaataacaaccaaagttgttatgatattgttccttccccatcgtcttcgtctggtaagataattcatgtatattgcagaaatagtcgacgtctggttccagcccttggctcctcattgcccaaataaaaaccccaatttcaattaaagcttcaggggtaagctgatgaaggtatatctcgaatcttttaagcactttgaccagcatcttatgcaaactaccacttctttaattttaggaagaggaacagtgttctctccttcggccctcactatagttgtatcacgaaaatatttgccctttatcgcctcaatatgtcctttcttgatagtggattttccaa

SEQ ID NO: 75291 - DNA, 292 bp, Zea Mays
gagagactgttatttagttccgtctaatttttacgatcctcaccagtgatcgatcatttgatctgacgccaacgatcacatgctgagaggaacgattcacttaatcagctggcgcatcgttcagttcggacagcgcgggctccaaattttacataaaatcagaagttttctgattttcgcattcttacgcacgtgatccgatcagttcaaaattcgccagcggtgaagattcgataattcaaaagcttcatgaaccctttttaagtgcgtagattatcgaaatgaaaatggc

SEQ ID NO: 75292 - DNA, 609 bp, Zea Mays
catctagccacatgacaccatgtcatgtctcatgcattaagctcctccatcacatgtgtgagccttagcaacaaatcaaagtcatttcctcctccatggcatagctgctcacacaagtgtacctatggactaatcacctgtgtatctcatattaaacataattagtccacctaaattgtcactcaattaccaaaaccaaacaaggacctttcacgtagccattgcgctgcgcgcgccggcagccgtagtcatcctcgcgttgggagagagagagcgacgaggagtgggagagagaagcttctggaagtagaagcaaaagccagagcttatgggcccctttggcagagcttcacttcttgattctttggcttcacttcttgattctccaaaggagtgattctaatgggaagcaaggtggagagcaggtgagaatcaattctgaagtgatttagtagtgggaagcggtggagagcgggtttttttagctctcagctggtagtgtaaatggagaagtgattctcgtcaactccacaccagaatccagttgcattttaggtgttttgcagggctccgtgaaagctaggagtgaagctgtggctaggagctgtg

SEQ ID NO: 75293 - DNA, 763 bp, Zea Mays
cgttagtagggcatagtggtcaccccgagttaaataagtataccaattgatagcgaacaatctgagtgcctttgaaaccttttttattgatgatatatttctcgatttacagaatacatcgtcgttccaagagcttctgggatgtagctaggggtaaaacttcctgaggtgttctatgttccatgagttcccaatttctgtgccgtccatctgagtgagacgatatgatcccggccgagtgacttctgctactataaatggtccttctcatagaggtgacaatttatgttgtccctcccccgttagaattcggcggaggatgagatctcccactgcgaaggatcgatgccgtatggccttatcatgatagcgcctcagagtttgctgataccacgctgattgaatcaccgtattcagtcgctcttcttcgagtatatcaacatcctccagcctagtagcttcagcttctgctatgttttcaaagattaacctcggtgccccgaacttgagatcagcaggtagcactgcctccgaaccataaaccataaagaagagagtatttccatgtagagctcggctaggttgagttatcaggctccaaaccacatatggcatctctctgatccactttcctgtgaacttctcgtttttgtcgaagactttttttctgtgtgcttctaatatcatcctgttggccctttctacttgcccattggctcttgggtgcgccaccgaggcatatttgatctgaatgctcttttgc

SEQ ID NO: 75294 - DNA, 562 bp, Zea Mays
gaaagggtagccgccataagtcgacccgtgcgctcatcgccaccgcgtcctcggtgtcatgcctaggggcttcactgaaccacgaggatggtgtacatggcctcatcaagcgggactagcaaccggggacctggggattcctcgctgtcgcagaaatcctcacggagccgcttcacgccgtgggccggcatcgtcaccgtgcaatcctagtaaggcccctacctgttagtttaccacaagttctagcgtgtaacactctttgtgatagcttcgtttgggccatcgagggtcgggtatttatcgccggatcttctccgacgctgtagatccatcctcgccgtgggcagccctttagacaccgcccccatgcctggggagtcctctgtccttcccgcctcgttcgcagggtcgtgtagcaccttaaattggtaaaatatgagctcgggcgctggatcgggtcttgtgccggcgatggcttcgccgtgggtggggcgccgcctccgcgtccgactaggagaagggaaggagtgcgcatggccgttaatctcagtccgggcaggcg

SEQ ID NO: 75295 - DNA, 420 bp, Zea Mays
ccggagatgtatatgcctctgtgagggagtgtggttcttcatccactagataaataatataatcatcacccaatgacttttcagtcctttgtctcttactcctccttaactccaaatctggagtctggtcatggacgcttgagggtagagaatatgtctgagatggaccatctggggctactacttccttatcccgcatagggaagatgctctcaaagaatgtcacatcctgagattccattatgacatttatagcgacttcgctcgtctcggaatggaccactagaaatctataagctgcactgttatgtgcataacctaggaagacaaagtctacggtcttagggcctagctttctcttcttcggcaatgggacattcacctttgcaaggcagccccaagtccgatgatgcaaaagat

SEQ ID NO: 75296 - DNA, 742 bp, Zea Mays
cgacgaggagcacgtccagttcgtgagtagtgaaccccgttcgcctcggaagccgaagcgcccagaaatcacagtccattgaggcggttcgtctgcgcatccgttgccttcctctcggagcatcgatgccttcctcagatccaaacttcatcggttcgattcgtgttgttgcggcccggatcttcagatcttcaggtgcgaccatgttcttgtttctcctccaagattcttgattgttctgttatatttcaacttgtacgtttcagttctgtactttaccgaactcatgtgaatgaccggattcgaatagtacgtgcagcacaagcgatcatggatttgctctatcggttagggtttccttaacacagttcatcaacttttgacataagtgtacatgaatctgctcccgtgtttcattaagggtacttagcgtcgatttagatgaagcgtccggggggattcgtctgacacccgccataataccaaccatagatttgggggcacaatttgtttgcttagttcatgtctgtcggcataatttaatggttacttctgtgattacatagtgaaatttaaagctggtgcaatgtcattttcggtttgacatatgcaaccttttatgactccacttatttgtgtgccacatgttctgtttgaagcaggagtttataatgttttttggaacacgatcctgtttatttattgatgattatatgatccaatggaacccaattactgtcgg

SEQ ID NO: 75297 - DNA, 743 bp, Zea Mays
gacaccgtggggatcgcaccggctcgcgcccgtggatctcgccagctgttggtgcttgtcatatgaatcccttctccccctcagctatatatgtgtgcgtacatcctcgctcgtcgagccccccaaccaaaaacaccaacatgctcgtcgggcgaaactgagggagaaagcgtcgtcgccaagggcaatctcgtgagtgatcactgtcgcgccctcggagttaggctcggggtgcttagtgaagattggcgggcatttctctagagagttcgggtgccgagggagttcaacgctcggcgaattgctcaccgaagtagaaggaccgtcgtgggtcacgggtcgccatggtcgagggcccttgctacataatcaccaatgagattcttcgctcgttgtttcgcccttgtccaaattgcgagtggggccttcgataattgatgtgggagtcctgggcggtcggactgttgtccgcaggcgaggtctccaccgtgggctgggggtggcaccaccactcccctgtggttagaaggaagccgctcctgtgtcatcgatcaacaaagtgacaggtaggattaaaactaggataccggttcggttagggctcttctcagtcgtcgatcaagggatgggcaaacaagggttgattgggcgtcttaaacatttcgacggttgatctctgatccaacagctagcatagtattccaattcgctttaatgattgatctaatctgaaccaccggaac

SEQ ID NO: 75298 - DNA, 1229 bp, Zea Mays
cgacgaagaagaaaggtccacaagaagtgagagaagtcatccagaatgactaggtagtactgataaccggagatgcttggaacaagggatgtccagaggtcactatgtataaggtcgaaggggcgagtagctctggacatggaagaagagaagggtaagcgagtgtgacgcccaagttgacacgcatggcaaagcaaggtggcattgccgcgggggcaagggatggccgaggtggccgggagtctagagaggacgtcgtggctgaggcgacggtgccaagtggaggcaagggcgtagggtggtagcatgggcggaggaaggtggggtggggaagcgaatgggatataaggggctggagctgtcgcatcaagcaaccacaacatgagtggtaagatcccgaatggtgagcccccaaggatcgagttccatagagcaacgattgtcagtagtgaagcgacggactgagctaaggttctggatgatgttgggagccacaaggatgttgttgaggtacaaaggactatgaaggactgtgtcatcaacggaggtgacaggcagagtcgacccattaccgacaatgatggaggaaggagaggtggggttatggggatggggtaaagtgacagttttggtgtcaggagtggtgtggaacgaggcgccgttgtcggcaacccagtcggtgggaggaaggggcgacaaagatatggaaaaggatgagagagtcattgggggcacccccacagaggcacagagccaccgcaaagggtgctagggtcggcagtgaacatgatgataggacctcgatcgtcatggagacaatcgcggtgcttgggagcaaaaacggcctagtagggtggtggccctcctgagggtaaaactcgacgcagtcacaaagaacagggttcatgatctgatcaaatgcatgaaagtgcctcgtagaagcaggtcgttgtgaagggacacacgaacacgatagggaggcatgtgaaccgcgttggagcgaaggagggacattgagggcacaacaggagcgtgtacaagtgtgccggagggcgcagccggactctgtgtgtaggagagagcaccagcaagcgcatgggagggcacgagcacaagaaaggggagaggctcgtcagcggcaagaggaagagcagcgtttgtgctcacggggccaagacagcgcacggttgacgcaggagagggtggcggctctgtcaggccagacaccg

SEQ ID NO: 75299 - DNA, 286 bp, Zea Mays
gattgctccgttagcagggcatagtggtcaccccgagttaagtatgcgtgagcatgtcgcaccgccttaagtcgttgccgacttaagccgattgctccgttagcagggcatagtggtcaccccgagttaagtatgcgtgagcatgtcgcaccgccttaagtcgttgccgacttaagccgattgctctgttagcagggcatagtggtcaccccgagttaagtatgcgtgagcatgtcacaccgccttaagtcgttgccgacttaagtcgattgctccgttagcaggg

SEQ ID NO: 75300 - DNA, 971 bp, Zea Mays
aggttttgggccttactatcggtaccccatttctgggtactcaatagcagcccccgagccttgtgcgacttcttggagtcgagcggaggctttcttgcttgggagcgaagccctgagtgcgtgcaagagcatcagtatgatttagcccccgagccccgagtaatctatgtggattgcttggggtttactttgttcttggtgaagccttgggcctgtcattggcctacctcttctgattctaaccgtattatatacgcgcccattttgtgtcgtggcttttgattcggcccttcgccggagcggagcttagtctcggacccatacagagttgcctggaggtggtgcccgccagagcatgacttgaatgcgtgcaagcgcatcagtatgatgtagccctgatacccccgagtgatccgtgaggattgctcggaggtttactttttcctaggcgaagattgggacttgcctcttgttaacctttcctgatctggccctctaagttgatcgttgacacctgctggttctttgttgtgcacacatctcccttctcgggcccttttgaggagagggtcgtcttcctcgacatagtcggctcgagggaaagggtcgtaaagctacaaacaggttatccaattgagatccgatcgcccttttcagggtttggtctcggcgagcagtcccactgggaggggttcaacccgctgggtccatctcatttattccttccttattctatcttgtatcgatccaccggtcagtctggccgatcggaggggcatcgtggccaccccgtcagtcaggttgtcataggagaatatgaggtacaaccttggacgtggggctgagcaaatgacctgccggtcatctgacttgcgactcgctaggagcttgctcggcccacccctcactctacgtgggaagctggagtaaattttggtttttacctggtgcgagacaatcgtgtactgggc

SEQ ID NO: 75301 - DNA, 318 bp, Zea Mays
ggcaaccgaagaccggtgggggacactcgcatttaatgcacacacctaacccacgcaaaggcacatgagcatagtgactaacaagacatcggtcatgtccaggcagaacaacatgattacgctcctgccactgtgcacgaacgccgcagaccggctcttatgtgcaaatctctgcctcgcccgatgctagggctcgtcctcgggctcaaatctctgtctcgcccgatgatgggctcgccctcgggtgcaacctccgtcttgcccgatgctgagctcggccttgggtaatatcttcgccatgcccgagctcggcctcgg

SEQ ID NO: 75302 - DNA, 285 bp, Zea Mays
cacgcagtctctcgccaactccttctccacaatgacgctggccccacccacctcagtctctgactgggtggctgactccggtgcctcctaccacaccaccccggacgcaggtattctgtcttccacctctcccccacccctcccttccgtcctccatcgtggttggaaacggctctgcccttcccgtcacctctgtcggtgacgcggtccttcccggtcctttccgtttatccaacgttcttgttgctccccacattattcaaaatcttctttccgtccgtcaat

SEQ ID NO: 75303 - DNA, 544 bp, Zea Mays
aacttggagtacggtgaaatccgaccctaggattgtgatgagaacatctattttacgattccgacgagggaaggggacaaaaccaggttaccggttctacgctaccgaatgaaacacgtcatagagattagacatcggctacaattgattcatggtgaaacatggaagaccgaggggtttctcaccaaggggaaaggaaggacagccgatgaaccatcgatggtgaggacgttgatgctccagggatggcgacgtagatgacgctcctcctccctagttgttgcagggtggtaatcatcgtcgcctagggacgcctcttcacctagggaactgaaactcctccatgcgcagggatagagcgaaggggaactagcgtaggtgcgagcaaatggtgtgatcgaggagggggaatgtggatgatcgagctactgacaggggacgtgggagggaggggttacgagggcgtaggagttacggcgggttctctcgtaggagcaggagaggttacaaagggtttcaatctttcctattgtgtgcacactaa

SEQ ID NO: 75304 - DNA, 434 bp, Zea Mays
gttcgctgcaggcctatgtacgcgtctcgaaggctcaaactcttcctagacagcaaataccaagtctccgcagagtcagtggggctcgacttcgcggggtcaagggtgcaacatgcaagcgaaggttgtgccagattaccgtgaggcctaggctccgtctcgtcaccatccgagaatgtagcagataaccgagagtataacgatacttagggacccacctacacgcccgtttacttataaatacctccgcattgtacacggatgagacacacataacgagatgctacaattacctatctattgttttgttatgcatataaattaactctcctattctcgagtgactgggccacctgatctgaccacgtgtcagctggtaccaacaaggatcagaaggcaacatgaaaatatgccactgtctcctgtaagttgtg

SEQ ID NO: 75305 - DNA, 977 bp, Zea Mays
atgaatcttcatatcctcagtcttgatgttgaaactgtgagcaacttcctcgatcacctcagaatcatccacagttggcctggttcccactattgtaacgaagagagccctcctgagatttgcctcttcccgtgccatgtcagcattgaactcaagaatacaagatgaccttgtcccccagctcatctctccttgatcatccggcctcggatcaggggactggctaatcatcggagctatggcttcatcagacgaggtcagtgacgcctgaccaggggcggcgacaggcttctttgaaccttttccgtgcttcgaccgtcttctctttcttttgttgcggaggcttctatgagactacccctcagcagccatcctaggggaatcctccatcttcgcaacaacctctggtgtgttgatcttaacccacaccaaacgtcgcctatgggggacagcacactccgaggttgctgacgaggccccgcgctgctccgagaggcgctgccacacagacccccttgcttgttgtttttccaatctctgccacactgtcttcttcctctacacttctcggcggcctagacacctgacagcctgatgtccagtcttgaaacacttgaaacagcgcgtgggtcgacggcagacaacagcaaagtggccaggggagaagcagttgaaacaccgaccccggagatccacaggggactcttgacgaggcagatgatcacctcgacacctcctcttactctgaaccacttgccaactgtcgtcgtcacaccgaggggcagcccgccgactttgcacctccggttggatatcagtcaccaccttcacgcttggcgccaggggaggagccgcaggacgcgaggcgcaggctaacagagcctccttatacgacggaggcgcccgccaagaatcaccagacgatgaaaccgggctagaatcactccatcgttgagccttcaggcggcccacctggg

SEQ ID NO: 75306 - DNA, 741 bp, Zea Mays
gatggtgtccacaacatgttagagggcacgtaatcgtcgtctaaatgtttcttttcattgtttatcttatccaaggtcacttggcacaccaaagagttatggtctagcatgtcagctatgtcttccaatgcaatgcggagctcgataacctcaaaaaaggtcatacatcgtcttgggcgaagtttttccctagctagggaaaaaagcttcttggaatggtgttgcatcatgccaatagccgtgtcggctatggagtctactaaatccatctgatttggagttatgtggttagtatagaattgaatcgacaactcttgttaccacgtaattagaagccacttcagggttgacaagcagacttcaagtaatgcgtactacactgatttagctctaccaaacatcaaacaagaattcatataaacatcaaaatatcaattattttcgttaccgagtaaaggattgtacgcgcaatcaaccagtactattactaagctacgacaaacctatcgtaaacagatacaaaatagaagtacaagttaacaattaagacacacaaatgcggaagaaggtaaggtgtcaaacatcatatttgttcaatcggatgcgggctgacgaacaaggaatctggatttgtggcgcatatctgaagaccctatgagcaaacaacgacgactaactttgtggcgtagatctgaagaccctgaaggtcctagaaacgacgactgaatcatggaacatgtt

SEQ ID NO: 75307 - DNA, 512 bp, Zea Mays
ctcagtcggagccacatctgaagaaatcaccccttctatcgaagatatcctcagatccctcgagcatactgagaatgaagttgaggccctcgacgaagttataactggacacagagatttctgtgctctagtggcttcccgcggcacagctgcaacattcatgaaggtcgaatgcaatcacgtgagggccataaataggccaaactttagcctgtcaccatctgatctagttgacatttcaacagaagcccggagtataggtaacagattcatcacacaaatctaggcgaaggcggccacgagctggctggagacgaagctcgaaatctgcttagcaaggtatagaaaatctttctatcactaggcctttattttatatttcccttaccatgttccttattacccttgttgttgtccctttttaggatgatgatgccgaaggtcgatgagccgaagctggttttgaagcattgagggccttaggaattccttttgctaatacctatagaaat

SEQ ID NO: 75308 - DNA, 510 bp, Zea Mays
gatcctgacttaagtcgattgcttcgttagcagtataccaaagtacaattgtatgtgggtagaaagtagaactttattgaaaatgagttcacagacttacaagtggcagcccaccatctagagtttatggtgccgctaagtgtaaaactttctgagatactcaatgtcccaggagttcccaattggagtgccatccatttaagttagccggtataagcctagtgagacacttccgcgactatgaagggtccttcccagagtggtgatagcttgcggcgtcctttcgctgattgtatgtggcggagcactagatctcctactgcaaacgctcgggggtgtatcgccttgtcgtggtagcgcctaagggtctactggtatctggccgattgaataacgacatttagtcgttcctcctccagtacatcgattcttcgagccgggttactttggtgcatgtatggtagtttagtcggtgaggggcatttgttggtgtggctctatatttatttg

SEQ ID NO: 75309 - DNA, 365 bp, Zea Mays
atttactcttatgcttcatgctattagattgattttacattgccacatgtgtatccctttattggttgctacatcctacgacatgctagctacacatgtgcacgtggcaactcaaaagtctgataagcgtctagcaccatatcttacatgtttagtctcgttgtttactccggttggacgtctttggaggttctgatccatgttcgtgtgcatgctcaacagttctcagtgacgaatttttctagggttactgatatgatacatgcagtagattggatctgggatgttcctatagactgtttattgtttatctagccctagatttggtcaacgatgtgggtagtaacaatgctcctctagcccgc

SEQ ID NO: 75310 - DNA, 822 bp, Zea Mays
gctgtttcatcaaatccagcatcctgcaaaagaaactactcaaactagcatgtccttggtctagctgcaagctcatggtctcctccaagacagaagcgacgtgtctcgcggtttcagctccctgttctctgagcgcagtaaaatttacggcggcatctgaatgcgctagcgagttccatgacccatgaaacttcacttagtactggtcgttgggtaaggtcactggcgatggggaaaattcatttgtcatcaacaagtccagcagcactttcgcatggtcgacgagttatgagttatcttacgagccttgcgtgttatcaatcagcgcatatcaccacggagctccaaacctgcagatcatgcagaaagagaaatggaaatatttagactatcttctcagaataagttgcgataaaaagtttgctggattgcctaggcctagcaaagccagaaaggagcagctattccgataagtagggccgggctcagaatgaaatgagagtgaggatatacttacaacaacaagcgccaaatgtcaaagccaaagcataataattgagttgaacagaggaggatatacgctgaaaatctagtcttttatacttacaacacaaaaatgagtgagggcctatgctctcattccattacacgtagatccgcctctgccgataagaccaatatgctcgaagaagagtgccgattgatgttttttttgtcctctttgtggaaccaaaaaatgtttagcatgcaatggactaaaacagaccttctttggaatattggcctacactaacccaccaggtaaagcttggcaaaagtggc

SEQ ID NO: 75311 - DNA, 373 bp, Zea Mays
ctcaattatgccacgccgtgactcttcactacgcggtagtaaccatggcacacttaggcttaccctctctgaatcactgcaccggtgaacgccacgattgcgccaccagtgatcttcttcctctttgaccgccagcgcgccattccaaaattggaggccaccgctcttgaacactataaattaagtacaccgctagctccgttagataatcatgaagccagagcccccgctcctgcctccgattagccaccataactctctaatttctctttctccccaaatatgtttaccgccaccgtgaaagagccctcgtcgtggctagcttgttccatgtctgttcgtgctctctgctctcccatttcagtgtcctttg

SEQ ID NO: 75312 - DNA, 684 bp, Zea Mays
tcaaatgtagagttcattgttcttttgaaggtgattatgaaatatggccttgatccaacaatagggaagccgaaataatgcttatcgttcttgaaggtgaatatggactatggccttattcatgtgtattttatcgtgaacctatcatgtttaggccagctgtgctataatgtctgtcatcaaagatcttaatatttcggcattgatccaacccttctgattaaattcagagcaagtcaacatttatccaatcctttatccaatccaagtgcagtggaaacaagtttgcaagattttgcagggtgattgtggtcacagccaaaagctagggaacagacaaccagcaatgacattgtggcaatatgcaagaaaagtgcagtggaaaacaacatgtggaatcgcatccacatgaagaagaggcttcaggtcatggagatattcctgctaagtagtgaatcagtatgatgtgtcatccagtacataaaccatgtaattatagtagttacccagattcccagaacaagataggttatgttgatgttacatacaatgcgaggaccagtgcaatttgtcctgctgacatagtagtgcaagttaactaaattaccttaatcagtccttataacataatgttcccataaaggagtacacaggacagaaatctctcccctcgttcattgacac

SEQ ID NO: 75313 - DNA, 580 bp, Zea Mays
cacatggttgatatgtgcccttatgatttaggtttgtgacgagtgattatcaatggagtagcatattgggttggtcgtatggactaactggggtatgagtgtgtgtgtgcaacatgtctattggcttatgatgtgctgttgtggagtttggagaaaatggtcgatggcgaagacgaagttcatgtgggtacatgccaatggactgggagtggtgaaggacgagcgatgggtgttgattgagggactagaaaagccaagtgtgcagttgtggtgggaaatacataggatcatcagtaggcacaaggacatagcagagcggaccgtcttgtcgacgtagttaagggccggcgagacacgagtctaggacatgggggatccatatggagtatgctacatgtagaggtttggtggttgagcctcaaaatcacccagcgatggtttgcatgggtctagcctcaaaccctggtagtgcagttgtagagagaattagaagcgacatgtggaactcgtagagagtgagtcaaggcgaagcatcttcatgaaggaagtatgtctatcagatcattagattaagagttgg

SEQ ID NO: 75314 - DNA, 353 bp, Zea Mays
ctagctagctgaaaccagtgagagctctgccacaagaggcctttaattgctgatgacatgtccccttcttacactggctcgtggaccacaaggcaccttgcaacgacaagcatatgacagtatgtcacttaatgagaacactaaggaccaacgacattgctgcaatagcgatactcaggcagtcaggctacggtgagtcacaccgtactagctagctttggcatatgtcctctgtttcgtttgcttctctaactaacaaggtaccatggatcatgcatgattgaggttttgagactttgtatagcattttgtgggaactcccaaatgttccagtatctttatcacaaatattt

SEQ ID NO: 75315 - DNA, 676 bp, Zea Mays
gaatttggagttggcatggtggcggccggagagaagagttgcactggcacaagcgattagtggctttcaccatggcgggttcaacggcgatcaccagatatgcataacgcgagcgactacaacgtggtaaatgccgaggcacgtggcgcaaggccgcgaggtggctaactccagcgaacctatccaaagcggccgtgacatactcgggtatggcggccggagtaaaatagtggccggagttcaacctcggcgcgatatttccttacccctcggcgttatctaactgagccgagcacgaatcaccgcggcgagcgcgaatccaggcgcacggtcatcagcggtgagcttctctgcgctggcgttttgatccggtcactgtaccatcatgaggtcattcagttggtctgacagaggatctttagaaacatttttcttgaattttgcatgacaacttgctaatcggtttgtagcaaacttgtagccctatatacaaactacaaattctgctgcagagatcatgctcagttgcttactccttggagcatgaatcaagcttaaagttcttcaaaactcactaacaatccatgttcagtttctgaattgtctgacagctaaactttagggccaattatcttcatctttttgtacaacacaatgcttgatcccttaagcaaag

SEQ ID NO: 75316 - DNA, 555 bp, Zea Mays
actgcgtgctcctcctcgtacatttatttggccttgtttgtgaagtgcactcccatccacacaaacggctcggaggcccactccacacatgtgctggtcgtcacacatggcaccccgccccgccccttccgtccgaaaacgacccgtcgatgcatgatgcgtatcatgcactatttcgcatgcgattccctcgttcgttcggttacgctgttcccttctcaagcattggcagactggggaaggcagcgacgtttacatgaagtatagtagtctaaagtctgttggagaaagaaatcagatgaaaacctacacagggaagggacaggcacaggcacaggcacaggcaggcattgccgcgaggcgagatatatacggctacctactactagcccatccgtgtaatttaacgcacgccagcaagcaagcgagcataaagcttgcaacacacgacacatcagcaataatggtattccattccttagctaacttgactaggacccgattaaagaactggccggggttcatttctggtactataggtacactacacctttc

SEQ ID NO: 75317 - DNA, 552 bp, Zea Mays
tgctatctgaactatcgcccaatcatcatgggtaggggtttgcgggtgagtaatagtacataccattatctccctgtgttgcacatgttccgccacgaaaccttgcgggaggaatggcgtaggatcaacatgatggtacgccattgctgagttctgcgttgcttctttagctggggtttggagaggatgagttggggatgctggttgcttcgatggtttcttcaatgaaccaggagaggagttaatcgtcgaatggggtttggtgaagagtgagagggtagtcaaaggtgaagagtcaccccttaatttcatttcctggaaaaactctgcgaaacatgtgtaaattgggggagatgatgggccacacggcagaaagcttgctggtaacttgaaccaggaggaaggtgacgattgccatttagcatttacaaatttgttatggaaggatgctgaaaatctgtgactagtaaggaagctggatcctagcccacgatggctacaggaaactttgtagtgacccgatttgttacatatatggcaagtgactagatt

SEQ ID NO: 75318 - DNA, 426 bp, Zea Mays
ctttataccagatatccattttctgttggaaagagcctcaagaacagttcttttattcgcaatccttttaggaatgatggcgaataacctaggcgccagactacacacattctggcccaagagccatttatctgtccaaaacaaagtgtgtgctccatttcccccttttgagaccaaaacaatggagaagaaagatcctgccttttttggaacttgaatagggaggtttgcccaaggttttactggattagttttatgaagccacaaccatctcatacgaagggcccagcataattccttcaaactagaaatacccaaacctcccaaatggaggggtctgcacacccttccctagacaaccagacaatgtcctcccctaacctccgtgcgacctttccatagaaaaccctttctaattttatcaac

SEQ ID NO: 75319 - DNA, 885 bp, Zea Mays
gggtgaactggcagaagagtacgatcgggtatggcgaggggcgccgtcggcacccgtctcgcaccacgtgatgagggcagagcacacggacaggaacgtacggtggcaaacggatttgggggaagtcaaactgcaaataggaaacatgacagtggtaaacagatccgtgaatggtgagctctgaacaataaatggacttacattcgacgactcctggtgaaaggacgacggctgtgatggaggaacagcgaggatagagcttgtcgcggcgaggatagagctagtcgtggctgtgacgcgccaacgatgatgaagacgcaggcggaggagcgcaaccgcgttggagcaggcacgggtcggggatctgagagacgacgatagatgtggagatgagatgcgtgcgtggggagctgagaccagaggccaggcaactgtcacgtggggccgaccggacgagcgtggagcgagcattctgcacatccgtgatagagaagcgttggcgtggtgcactggtgtgtgtacgtgtcggcaggtgagaggaccgtcgtgcggaatgcggagagaggctgaaacacaagcatcttttaagactttagattaattccacgtcaagccgaaatgcaagtgatcgaatacaagttcagggccgtatcatgtaaaccaaccaacaacacatactcaaggtgttctatgtgcgtgtgttttaataattccaatgcaatcatttttggtatcactcagaactgcaaactgcaaagcttccttgaaaaaattctcatactagccacgccccattccctcgccgcacgtgcctcaaatctcaccgctcccagctccgatttcttcctagtgtgttggttgtcgttgcaccgagagacatcgcgc

SEQ ID NO: 75320 - DNA, 1246 bp, Zea Mays
gttcgcatgacaacctacagacatgccaggagtcccgagagagctggtcgagcacaaactcaaagtgtaccctcaggcaagaccgatccgacagaagctatgtcgtttcacgcccgtcaaaagagagtccatatgggtggaattagctcgcctggtatcaccaggtttcattagagaagtactacaccctgaatggctagtaaatcctgttcttgtactaaaaaagaataaagttgattggcgcatgtgcgtcgactataccgatctcaacaaacactgcccgaaagatcctttcggactcccaaggataggatagatcaggtagtcgattccaccgctagctgctctatgctctctttcctggattgctactccggatatcaccaaattagtctagcaaaggaagatgaagaaaacactgcattcatcacaccttttggggccttctgctatacctccatgccattcagcctcaaaaacgttggataacttaccaaagggctatccaaacatgcttagccgaccactggggcaagcgggtggaagcctatgtcgacgatgtagtaatcaaaactaaaaacctagagagcttcatcgaggatttacaacaggtcttcaacatcttgaggcgctaccgatggaaactgaatccagaaaaatgtgtgtttggagtaccggccggaaagctactcgagtttatcatcagccatcaaggaatagaggcaaacctaaaaaaattgaagccataatgaggatggagctaccacggtcacagaataaagtacagaggctcactgggtgcatggcggcactgagtcgtttcatctcaaggctcggtgaaacaggaatgccattctataaactgctcaagaaggtggataaattctagtggaccatagaagctcaggaagccctggaagcactaaagaagttcctgaccacaccgccggtagttaagccgccatgccgagctacagcaaaccaggcatctaaggacctgctgttatatttcttctgcatgactcacgtggtaagcactacgttggtagtcgagcgggccgaagaagggcatgtgtatccgatacaacaccctatctactttatcagcgaggtcctcggtccctcgaagataaggtatcctcaagttcagaagatattatacgtagtacttctaacttctcgtaaactccgacactattttgatgaccacaaagtcaaagtagacatgggattcctaataggaaat

SEQ ID NO: 75321 - DNA, 776 bp, Zea Mays
ctggcgcagtggcttggtgtccagcgccgtggcaattgctccggcgatcaacggggagcaagagtgagtcacggtgatgcggtagataggcagagacacgcggcggacaacggcgacggcttaacggcggtgagaatccttatccgagggtggtgagtaaggggagaggtaccgcggctagccggagtggcctccagctcaccgacggcgatgatctttcctaccccgatgttatctacttgccccgagcacgaatcccgacgccggtgtcacgaatcacggcggaggattggtcgtcggcggtgagagttccgcactggcagtctgatcttgttcagagtactgtgccatcggacccttcttcagttcatctgacagagcattttcaaagcaacttttcttcagattttgcatgagaacttcatcaaccctctgtaccaaagttatagccccatgttccagctacaattttgttatgggaatcatgcccaaactttcactgaatcatgtttaaatctgggttcaaagattgacccatcacactgtcagaccaagtttcagttattagtcagcctgacagcctgaatttgagtgggattatctcccatttcttctcaacaactttgtttgcattcttaaacaaaattgttcacctaggataggtctacaagtttgatgtggtaacctagggcaaaaaccttagaatttgaaagttacaaagccctaaagttgagcttataacactgattttcagacttagagtgaaatcacaattt

SEQ ID NO: 75322 - DNA, 1013 bp, Zea Mays
aagtgggtaacaccggtgtacgccgccgtggataagcttcaaccgttaaagaactccggccaccgtactatgtcaccacggttgtagccgataagaacgccggtgatagccgtcgtccggccttgcgccgcgtgtcccaacctcgccaccgcatcgccgtgactccctctagcttcccgtcgatcaccggagttactgccacgtcgtggaacacgtattcactgcaccgtgttcttcttcacttccgaccgccgcgcgtcagcacccaaaattcacggtcaccgccgttgtgcgctataaattgacccgcagcaagcttcgcaatatcattgcacaccctcacaccaagaattgctcccagccgaacaatagtgagcccgaatcgcgcattctccccaattcgattcaagaacaccgcgaactaacctcgccgaggccagccccctttccggtcagtccaaccctccctctccctcgtttaagcattctcacatgtctacgatgcttgctgacccgcccaattggactaagggtccactgaccgtcgggaacgcatggatctttagttcatctgcgtgctcatcgtggccagagaattttagtgcgcaattggtgaaattaagttaggggaatcaatggttggggcgtgaattcggtttctaccaaagtacggcatcagtccttaggtaaatcggccggtgcaggtgctcgccggagcctccctgcgcccaccgccgtcgtggactttcccctgtgaagaaatgaaaaccgaagggcctttctgtaatctgttagcggcacacaggaatagtacatgaactattttccagttacccagaactccatggacctttccgcaagatcgccagcgcgggcgcgcgcgcgggcgctttcttcctctgagctgggccactgggctgaaatcagcccagtactattcatcagttttcctttttcttttatttccagagccaaaacaattttagaaaatgatagaaaaatgataaaattgt

SEQ ID NO: 75323 - DNA, 510 bp, Zea Mays
caacttactacagaagcttcagccaaaaactgcatggtttgagtaccaaagagccccaatctaggtgccacatgcagtcctgtggttcttcagctactgaataaccctcaactgccactacatgtcagtccatatgagcattgattttcttttaattttttgatgcagtgccaggattaattacctcagtccctttattcatcttgaattaagctaccacttaccaaagacatctttgcccaaagccctacaactaagctacatgaactctccaaggtttgagtcaaacactgaaattggcactgactactattcatcatctgaaaatcccaagggcctaacatcccatttttaggcgccatttacttcaccttttatgtagtactaagcccatctcccttaaataaagttgcacaccaacatctactcttcaactttgttgtgacaggtatggctcaatactctactgatcttctccaaagggactccaaagttagatcaatcacacca

SEQ ID NO: 75324 - DNA, 730 bp, Zea Mays
tgttttcctcttcttcgaggttgtcactttcgcctcaggactagactttttctttttcaaaaaaatttcatcttcttttatcatcctagcagcatgtctgttcataacactgacaaccccttttcgctttggcccttcggcacccttgcttaatcgttcatagtcagggtattcaaagttcagcgcatccattactcgattcagccttcgcttcggtcgggtgtcgaaagccgcagtcatcagttgatcttcttttttagtatagttgcccaaaatctcattgcacataccctcaatcatttctagccactcttagaaaggctctttaaattgtttcttgaacttgaagtgatatggcaatcgaacaagttcattctttttcttttcccccttaagcttcagcatattccattcactcaacgtcggaaataccctgttggctaagtattcttgcaccagatctctagtgccgatctgctcagccacaactctgaattttgccacagcctgttggcatggtgatcccgacgtcatacaacacaagggcctagtcaatccgtagcacaaactcagcgggcttagtactaacgtcttcagcttcttccttttcttctcatcagctttaacatagaaccactcacttttccagccagttggccatttggtgcggtagcttagcaccagggccttcatatccttgcggtaagcgaagttgtaacagccaaaattc

SEQ ID NO: 75325 - DNA, 685 bp, Zea Mays
agccggctcttcagttctctgctcaggaggagcggtttcttttgtctaggcagctgaagaggcccctttgtcaaatttaggtatcacggtcggttcgatgtaatgaggccagtgagtcagaaccttcaacttttttcccttcgacacaggctcatctggagtgaccgaagtagcagctttcctctttttcccctgtccccgcagcgggtagcggtagtcggggtaaacgaagcctatggcgtcaaaaactctgttcagtctcttctttccccgaccttcgaaggctgtggatagtgcattatcttcttccttggaatatgctccaagcagttcatcacttgtagctttgatacacttcagccaatcatcatttggttcatcaaacttatccccaaacctgaatatgtacttcagccggactaaatcaccttcgctagagttagcgatgatctccttcggcacttcccacttttccacaagcggccatactctgaatgctatatgttcttgaattaaatctcttgtgctgatgaaggagcagacagtactgaaggcattctgacacgcttcggcggcgtcaacaatttcgaccttcggcttttgaaggctgaagcgggaccaaatggagcgcatgatgacttccttaatgtcttccctcgctgacaaatcattcttcacataaaac

SEQ ID NO: 75326 - DNA, 501 bp, Zea Mays
caaaacctcttctcctccctataagctaccgatcttgtggggggtcataggatttggcctactggtttcaaagatttggagctctgaagtctggtctgtctcccagcctgagcccgaggtaaatctttggttttgtcgtgtctagggctcgcgtcccaatgccatattctggtatgtgatataggggttagttagacacatttttgttaatgggatcattaggattagagctaaggatcaaggtgaacatgctcggttttggttcaagggctgaaaattcagaaatctgaatttcagatttccctattgaacctccacttgaatggcttgtttggagtttttaataaactattttggccaagctttcataatctttattgtagcttatttagtgtatttcaatttttataattggcctaagccatgatttcaagtttttcatggtctttcatcccttttcttcttttctacttaaatagcttaattagggttagaattagg

SEQ ID NO: 75327 - DNA, 374 bp, Zea Mays
gcaataggagcaaactaactatactgtaggctctctttttactaaaaactttaggccgccaacctaattttattgggaatacaatctgtgcataaggacatcttcgtacacatatacataataaaatcaatctgaaccattcgtctaacatcctttgactgtatatgcatgtattttgcaaatatgcagctggtcacgacgcaggagagtgtggaaggtgtctttttaaaacatatcagccgaaggatgttagacgaagggtccatattgatctgtacatatatgtacgaggatggtcttatgcatagaatgtgttcctaactttgtttctaactaccatgtcatcatatttgtttttaaaaactcatttgttt

SEQ ID NO: 75328 - DNA, 511 bp, Zea Mays
aaaaccctctgttcttttcaaaacaaaaaaccaaaacccttctgtggaaaaacgtaaaaccaggcgcgccccgcaggaattgcggtcaggagaacctcatccctctcgccttcaggttctactcgccctctccccacccgcagcgcctcctcccattcccccaacggacattgcctaggaggctaggacagaaccacccagagcgcacaaccttacccgaatcgccgttgcatggaggccgtgcgcgcgtcggcggcgtgggtcgccagtcgctcctcccatgtcacggtcgaccttcaaggtattgttgcggcttttgcccagctgtaaactttgtaatacaggattgctcacttcctgctgctgtgagatgtttacgggatgatggaattctagggtttccaggtgtccgctctgcagttgtttcaccatattcataccgattgcttgtgtactgtgttgcaataaaccctttcggtttacctatccatcttgacagcgtgtttcaaag

SEQ ID NO: 75329 - DNA, 809 bp, Zea Mays
gctctagccacgcccgtgtgagcttgtctcgtcagatacggtcgttttctgcgtatctgtggatacaaccaaaatggcttgttttgcactcactcgtgcaatctgtgtttcccgtgtgcagacaattaaacatacgctcagacggagttaacacacgtaatagtgcaggatgagatggtgcaaccaaccaatcagacgatatcagtaccatatgaaataaacctcatatacgacacttggcactttagaaagctacaactctattcattctaaattctaggttgttgtagcaaggacacctagtactaagaatactagacaaagataacaaagagagcagagagttctggcatatagagtatgcctataaggttatgagatcatggcatcagtggttttatataggtttgagctgtagtatgtgtaatatcctatttccttttgttgatcatgtataaggagactgtaggaccaccgacgtgagtgtcgtggagagctaggtcacctctaaatgtagttgtcttggttggattaaatttaccacatttggccaatgtttgatggagaatggaatataaatggaacctaaggaatataaatggaacctaagtgaaatcgaatggtgattgtatgaggtgaatcaacctaaattacatgtatgcactactcgtgggccttacctatcatcgggtcaactgcccttgtcttttcctaatccctactactaattaagcacctaacgtgggcgctaggcgcgtccatgcccccgcctctctttcactgccatattgcccccaccgtacgcgcgt

SEQ ID NO: 75330 - DNA, 1528 bp, Zea Mays
atagaacttggtcatgttcctcgttcctataacgtttcgttctaggaacgtggggacaatctcgttccctatgttaaaatctagttttagtatcgtaccacgttctcattcttcggtcctattgatccgggaacctggttactaagggtaaggcatggttcaattaagcatgacatgattaggtacaattagctaaatgtgtcacgtagtgctgcgtgtcgggctcaaaataatgtatgggcacatgatgatcctaattatgtcgtgtcgtgctgatctagcaagcacaacacggaaatagggtcgtgccagcctaagcccgacgacataaaaagtagctaaagacaaagcacatttataaatcacaacatatatcacattcacataaaaagtagctcagagcctcaaacattcacaattcacaacaaagatcatattcatgagtcacaaaatgtatcacaaattacttaaataaaggatagagctattcgtttaatgtctacctcatttaaaacctttttaggtaaaaagcaccttgtgaaaagaccctataaaggaaaaagagcgcaacctagctctaagatagatagttcaatgtcttagtttaggtacatcatatgaaattaggaataagaaatgcaagactgcgtagcctaggcctgaggggccatcaagattaagtccttcaaatgcatcttcaaggtctttcatatgtacagtagcatctcaaccatttctggtgccaggtggtcagtcaagagtcagagcactggctccatagggtggagttagagatggcgcatgttggttcctcacggtcgataaagaaattaagaaataaattgagacttaaaagataataacaaagcaaaatcgagactttgcttgtcatagtagagccagagcataggttatgttggcatgagagtagagatggaggaccacgagtctacagtggatgcgtcacagatggagtgaatactagagagggagacaacttctagatttatggtggagagctagagcctgaaggggattgcctcaatgattgttggaggagggtggcggttgaatgcgatggtggctattggagtcggatcatggaacttgcatgacttgcgagagccgagtgagaggagcacgagggtagggttggataggggatcagtcggggcacgacacatgccgatcaaccgaggcatggcacatgcctcccttgttatatactctaactagtacaaagcctgtgcgttgtgatgacacaccaatcatatttgatggtataatggtgcaacgactgtacgacacacaagggcccaatgttgagatgacgcacactagttcctcacgaccgacaaagaaattgagaaatatatcgatacttaaaagataataaatggatcaaaattgagacttaaaagacaatcaacaaaacaaaatcaagaggttaggattacctgtgtcgagtagggtatggcagttggtcagtagtagagccggagcaccagttctgtttgcgtggaggtag

SEQ ID NO: 75331 - DNA, 1041 bp, Zea Mays
gctctagagctattctcttgtcttgccttgggtctacaacttcattatgaagtacaacttcagtatgttcttggccttcagtgttgatagtagaactaatcgcgctagtcatgtccctatcccattgtggaggcatgatggtcgtgttcaatgagttcaccagaggtgggtgccaaatgttggtcacctgccgaagctccttcgaaggtgtcgtgacccaagtacacggaagcaatgcccttcgatggtgcactcatatgaaggtgatatagatgcaatattacaatcagcccaaccccatagaagtggtattgtacacctatttatagcgtcaactacattcatggtagctcgaaattacaatagtaatccgccctcattacaaagacacattaaaaatggggaagagcaattgtgtattttcggaggggcgaagtcgtgtatgccttctcttcctccttcgtagctttcttgtcgttacgtctaaaggagggttagtcctattcatgctttatcgcctctcccccttcttcgatttgtccttcggcgatgtgaagccaaagggagctgtctattcacacgatctgttcgaatgagtcttcctgaaagtggtctgagacaacaattatcatcaaatgtggacgttcagccaaagaccttctccctaacaaagaccatcctagatgctcatcttcgtcatcacgtcgaggcctttgggcacgtttagcggcgccctcgtgcttggtccttctccaatggcattgcctcaccaactagctttcctcagtgttgtccttcatagtcgccccgttgagcccctctgttgtgacaaaaccttcgccggaaactcaggagttcttgtttgagttagctagggaactatcagatgtgagccttcgctctccccaacggtcatcatgtctttttaatggtacaacatgtgtcctaggaacaatattatattgtagcacgatgtcatgttttaatatcttaaatctgataaattatagatatgaagtgtcaatatttacgatatcaaaa

SEQ ID NO: 75332 - DNA, 1952 bp, Zea Mays
ggctatgcaaagaccagcaaacttggacacggcctgttcccttgctttgctgcatgaagatgtatggttgagctcaaacaagagggagggaaggagaacagatcacacgggattttccaagattcctgtaaagaattccatggcggttggtgggactgtaccagttgtgattagtcgaggccaaattcagagcgaggaccgccgcaagtggagtgctgccagtgttaagggcgacgatagtaagctgtctgctctgaaggcttaccggagagcgaagggtttgtgtttcaaatgtggtgaaagatggaatccaaaccatacatgctctaatagtgttccgttacatgtggtggaagagatgtgggctctcacttctcaagggacagcagaggctagactggaaggagaggaaactcagcctgaacaggatgatgaggagatggtgttggcagtgtcggtggcggctgtaataggtggtgaaaacaacaagaccattcgactatgggcttcaatacatcacaaacagatgttggtgttggttgattccggaagttcagctagtttcatgagtactcatttaatggaagctgtgaagggggtgcaacaaatgtcaaaacctttaaaagttaaagtggctgatggaaattacttgtggagtgattgttgggtacctaactgtccatggctttgtgggggagttactttccataccgactttaagttcctgcctttggatggatatgatattattttaggtatggattggttggaaagccacagtcctatggctgtacattgggcagagaaatggttggaattcagttataaggggaagactgttcagttgcaaggggttcgaccaaaactgacatcatgtatccctctaactgacaaacaattgagaggtctgctcagtaaagaagcagtggagcacatgctggaactcagaccactgacagagcttgatagttgtgtcgttccagcaccgatttctaatctactagaacaatatcaagagttattttcaaccccgcagggtctgccgcccaaaaggatgtttgaccattctattccccttttgccgggagccacttcgttcagactcagaccctatcggtacaccccacaacagaaggatgagattgagagacaaatacgggacatgttaagtaatggaattatacaagaaagctctagcccctttgcttccccggttttgttagttaaaaagaaggatggagaatggaggctttgtgtcgattataggaaattgaatgcctacacagtaaagaacaaatttcctatgccggtgtttgatgaaatagctgatgaattaagtggggctactattttttccaaacttgaccatcgagctgggtaccaccagatcagaattcaggaaggggaagagtttaagactgcctttcagacccataatgggcattatgaatacaaggtgatgccctttgggctcacaggggctcctgctacctttcaggacttcatgaatcatattttgagtccacacttgaggaaatgtgtggtggttttcttagatgatatcctggtgtacagtgatactttggagcaccatgtcaatcatctggaacaggtgttcaaaatactgatgcaaaaccagttgaaactcaaacagtctaagtgtcgatttgctcaggataagttggaatttttgggacatgtgatcagtgccaagggcatagcgactgatccgactaaggtggaggtgatcaggaattggcctactccttcctgtgttaaagacgtgcgaagtttcttgggtattgctggatattacaggcgatttgtggctggttatggtctcatttgtaaacctttgacaaatctgttgaaaaaggatcacatatttgtgtggacctctgatacccaacaagcttttgataccttgaaggcagctttagtacaagctccgg

SEQ ID NO: 75333 - DNA, 527 bp, Zea Mays
gcacgggccataaatgcacccaatccgaggggctcgtaggtcatgagtgttatgcggctagaggggttcgtaggtcatgagtgggaggtagaccggcgcctccgctgtggctcgaggtcaggcatagttaatgcggccgtccatttatgatggtcggtcttgggccaagcatgggatccacttgagtgatttaccttcagcacgccaagcccccttgtccggttccgccatgcctgaccgtaggctctgtggcgcggggttcatccgacggtgggttcttctaagaaagacgttacctatctccttcaactgactagtgggccctagttgtcagaggccttttcctcagtgtgctcgctgaccgatgggcccagggaccagggatcgtatccctagcagtagcccctgagcctcccgtggagagtgtcccctttggaggttgttgaagggtctaatgtactttgtcttttctccttacaagtgatcgtggtatttactcccccttgttgaaagcgacctagtttcta

SEQ ID NO: 75334 - DNA, 375 bp, Zea Mays
tctccggctatggtggctattcaagggcgagggttggtgctctggcttcgtaacaatctaacggagcaggccacacactcaatttatagcatccgcaagcgatggctccgaattcgggaagggtaaggtggcgaccgaagaggatgtgagtcacaggagtcgcttatcgtggcatttactgggcaacggtttacgacgtccactgcctagtctttacggctcgcgacgacgtggtgaaatggcttaaggcatgtcatgaccgaggagaactgcggcacgacgacggtggtcgcgcggccacgtcgccggtgcaagtggctacagcgacagggcagtatagtgccccaagttcatccaccagcgagatcttttcac

SEQ ID NO: 75335 - DNA, 633 bp, Zea Mays
tttaaatttaaagaattcatcgcacgaacaataatcaatgtatgtttagaattatgcatgaaagcatatatgaaaacatacataggtccttcatccagttcttttattgctggaagcggaagcccgtgtgctgccaggctgcagcatcacattgatctactgcggacgcgttcccgccaaggttcgtcgtctcggtctcacagagtctgcagccatagtccactgcgccagccgtctttccaatgatttctcttcacatccgtattaacacagacatagagtaaccatttaatgctgggcataatgaatcagacaatgtgattttgaaatccagattaaatcaatgggaacataggagatggggacaaggaaaacaaaacaaaattccccttccatccaccacggcagcatcagaactggaatgacaggccacatcgcctatctgcttaggatcaatatcaaaaaggtcacatcgcctatctgcttaggatgcagctgtctcgtgatcccactttcttttgtccctcatcagtcgcatgagcagggaagttagtttattttacaataaataaacgataacaataatcattgtaaacgaacaaacaaacaaattgctcatctctgtattgtgcg

SEQ ID NO: 75336 - DNA, 1045 bp, Zea Mays
gccggagtatgtaactgcatggacaacgtgagccgtgaccgccaggaagatcgcactcatctgctccatacccgccagccacggccgccgagaccaacagggcggagctggcgccgggatttccggggaaaggtcgcgctcgtaatccgcttggctcgcctgggatgttgctagctgtgcccgccgcctaaaaattcgtcgggcgtgaatctgttgcgaagaacgagtcgctgttatggttgttaggattttagcgaatctatagcgattcggttgtgcggtctagcacgtttctgccgcctctgcctatatagtctttccgcgacctcccctctcatcacaactggttaaacatcgccattgccgaccagagagcgccacacaccacaaggtcgcggtgcttgtcgtcaacctctacgatctctccaaatgctggtatgaccccccgtggatagcttcatcgttctcctctcatcgtttagcacatatgcacgcgagggattatgcaccggatcgccgaatgcgcttcactccggcagggctccaccttggatcttgccgcctccgctcggtctgtctgagggaggaagatgcacagcggccgtcagatgtcaaaggtgtggtcaggatttggacgagatcacgccaccacatacccctttcgtccatcggatccccgccatcgatcctcgatctaatggttaggatggcgtaccggttcgggttctgatctggtgcgttggatcttgatcgggcggcccacattatgttccggttcacttaaagcacggttctaatctgggccctcgattctgattggacgactcaagttggctgataccccttcggcctgaccgatttgcaaaagagcccctggctttcttaacaataaacccgccgtccgtgggcgatgatcacggagtcttgggtgtatttgtagatcagtccctaggtttttcagaatttagcgcccaatccagagatcagaaagaattagaaaaataattatagaaatcgatttttaatacaaaacaatttcagaaac

SEQ ID NO: 75337 - DNA, 624 bp, Zea Mays
aggtattttggtgccactttgtcaattgggccaagtggtttaaatttgggatcaaggtgaacatgtttgatcattggccaagggttggttttggacttagaaaaattttgatttttcttttgtgctcaaccctttggtgaaccttttggggtttttctgaaatctttttggggttactttcttactattatttgtagggtattaagtgcactacatcttttataattggcccaatacatgatcaagtggttttcatagctttttggtcacacttacctctagtgctccacttgtccaaaggggtttgaattagggtttgggcaattctcccccttatatgtgcatgataagccaaggtatgacttctaagatgggttgcacttacttaggatcttgagctccaactttggtgtacttttcccaacttaagtcacatgtgatgatgggcttacttgtgtattcttgagtgaaaaactctaagtaacacctggggtgttacacatccctcatccgtcgatattagatctggtggctagggcggatcacgagtttacataacacctaggttttaatctagaccgatcggccaagatcgtgcggctgtaacgcgcccgtaccccttcg

SEQ ID NO: 75338 - DNA, 446 bp, Zea Mays
cctcagttttccttcgttaataccgccgaacagtgtagcccctggcttatatccgcaagctatagcacattttttaagctctgctttttcagcgtctgtcagtccttgcccaagtaaatcttgaaattcaaaatcttcttcctccaaaatgtcctcagcttgttctttccccttttcagtagctgtgcttgccgcagcccacaacagattcttcctcagtcatttttaggagtatgttatcgataacttcaagtgtctcttctaggttcggatcttctgtggccccaatttcagcctcggcagcttcggctgcgccagtatcagcttcgaaaatttccgctctggtggcttcggctgcggcgcctttagcttcggcagtttcggcagtttgatcaatggcaatttttgatgtcggtgttggagacggtgtcccatgaattacatct

SEQ ID NO: 75339 - DNA, 1004 bp, Zea Mays
agcaacctagccatacgacaaccggctctcagacgaacacctctactaaaaggaagagcaaacctaatactatcgatccatcagcatgatgagacatcactaagccatacccagaccgtggaagtggtatcgaagagtctctatcaaacatgacactggatacgtatccccgctgatctgtgtgaccggacaacccaaccacagggaccttagcatcggggtctctacagtgacccatacgtcggaagggacggggcagtacgctgtaccagacatatgcgcgcgtgatgaaaggtgacgctaaggggatgatggaagatggagttgtattgaatacgtccctaaacctcaccttgagcagacgtccctaaacctcacattgagccgactcggcaagacccaccaagcaccgccacgtctaaattggagtagctacaggaacccattagctaacgaacgaaacacaatgccataccagggttacggtgcgcgcacgacctagcagacgacgaagctcagaagcatgacccaatagacaaaactatagaggctacgagacacagaagtaggaggctgaactccacccggtagaatacaagtcttcattgtaacgtctacccttaagttataaaaaggcaagacaacctccatcatccacgacacatcgcacagcttcacacaagcacccagttgtaatacgctccaagcaatactactgtcggcgctgcattgaactatggcttcggactgaatcaatataacctactcgtctcagatctacctttaacccctccgtagctcaccgttcggagtgagtccgcgctagcatcactgctgaaaacaaatcttattgccccccattctagtaaccacgacacttgagtgccaagaagctaactattgtattttgctcaagtacaaaaacagaatataagccagtggcaaatgctatggctgaaatcgtttgtgttcaatcaacctcgaataattaggtgtgccacgac

SEQ ID NO: 75340 - DNA, 543 bp, Zea Mays
gaagagatgactcctaaaatgatgcaagaagtgcaccgcaatgctcaagcggtgagcataataaaaggaagcctttgtccgaaagagtaccgaaaagtccaaggaagagaggatgctcgtgacatttagaacattctcaaaatgtcacatgaaggataccccaaagctaagagacatataattgaagctttggagagtgagcttgcacgatatgattggactaagggtgagtcacttcaatcactctttgaccggctaatggtgttggtcaacaaaataagagtgcttggaagtgaagattggagtgactccaaggtcactagactatttatgagagcatacaaagaaaggataagagtctagcaagaatgataagggaccgtgatgactatgaggaaatgacacctcaccaactatttgcaaagattcaacaacatgagtctaaagaagccccaatcaagacaagagacactcatgccttgatctcaaatgaacaagattccaccaagaagaacaaagatcacaagacaaagaaagtggtcg

SEQ ID NO: 75341 - DNA, 315 bp, Zea Mays
tgtgagggttggaggagacagctctgctcctgctcctgaagtaaatgaggtggttatctatcgaagctttttgaaagcagggcttcggttcccattgagcaggttcttggttgaagtgctgaagacgtttcagatatttctttgtcaacttacccctgaagctataatcaggatgggtttgtttgtttaggctgtaagccagggattggaaccaagcgcgaagtgtttttgcaacatgcatgaacttctatatgagacaaaggccaccaggaaggagcagtatcacaacaacttcggttgttacggattcgttgc

SEQ ID NO: 75342 - DNA, 1087 bp, Zea Mays
ctgctttgcacgcacaggcataattgcaagcaggatcatgagcctctacacactagtagagtagtagagaagagctcaaaatctgtgatgatgtttaatttttataggtggtttcaattatcaaacaccagtgctattttaaataacagttttcttaataaagcgtcactaaaaatcatttgtatcctgaatttttaagtttttcaaacaatctcgtatgaaaaaaatcaccaacataagatttatagatatctaaaagttataaaattttgtagttaacaacttttttatttgaaatcatttcggctctcaaaaactacatctaaaattatcaaatttaaaatgtaaattttgccaatggcctcggatgggaaaagtgtcaaaacaaaagttgtagaactccaaaaagttatgaaactttgtagttgacaatttttttcgtttgagttcgtttacagcctcaaacaatcaatttaaacttagttggttataatatgtggtcaacaaaactgtaatatagaaacaaagtaagtgatatacaaagtggtagatgggttatacgcgagggcgaggtcgtatctacgtattttgcgtgaaaaatattgtgacttgcgactttaatagacggggtagtgaggcctcctaataaaaatattttttaaaccctttttgtatgttttttgaaaaatattttcgcctatagttttattacctcgaccaacatatccgcttgactggaatggataggcttctgcagcgctggaacttggcgtgattcctcgccaatttccctctccatctatctctagtctccatcccatccatccatctatctatctaggaccaaagtctgtggtgcaatgtggggagccagaagaatatcgcagacccctacatgcctacacacatgaggctttgcagggtgagtatcctgctttcagttgagcatttgtccatggctgatggcttcatccaaccttgtcataccaaataggtttacaaccttgtctcgctggactggtggtccgatgaggcggtttaggatataccacggtccaactgaaaccattcacgagataaacttgag

SEQ ID NO: 75343 - DNA, 595 bp, Zea Mays
ttttcgctcttgactactcagaattaaattttgctcgtataggatctgaaaatatttcctaccttcctattgtgtacccatctcttttccccccttgacttcccagaatcacattttactcgtataggatctgaatattttgtaccttcctagtgtggatggatgatgttattctctgctgacatgccctgtcttcatatggatagtattggtattgaaatgtggtctacataaatattgtgtcctggtgtatattccattttcaatttgatcaataatcaatcttgcatctatacctgtggcaaagttgtattcatgatcagaagcttagcgagtagccactttaaatatgcttattcgatattagaagtccctaaaaggctagaatgatgaatgctagaactagctacggaagcctatcataaggtgcagatatcctacaggtgcacaagcctatttagtactcccttcgttctaaattattatacgttttggcttttctatctatgtgtctagacctagtgtacatctaagtgcatagcaaaagttgtcaaagcgttcttttaatttggaatggaagggagtagcactttac

SEQ ID NO: 75344 - DNA, 603 bp, Zea Mays
gaagtgggggcaaagaaaggttggtaacattaaactacaaattgagatggccaaggaaataatacatagactggagattgcaagagattccagggacctttcaaacagggaagagtggctaagaaagaagcttaaactacatctgcttggtcttgcttctctggaacgcaccatttttttctcgaacacgcaggagaactgtatatcattatattaaaaaaaggaagaagggtccaaaaatagaccaaacacaatacaaaggaaaggcgttctatggtggccgcattttagaatacatgaaagcatccatgatagaacacctaataagggcaccacctacacaaacctgacgcaccatctctgtactagacaacaactttatttttgttgatatcacaaactccccctaccagatccctgcaagatacctggaataggagctgtaagaagagccagatgtttggctccagcgaacttccatagatccatatcttcttcagctcctctgatatctccctccaagttgggtttaattctgtcaaaaacacatccgttcctgtgattctagagagtccacaacccgagggtaattaaagaaacaga

SEQ ID NO: 75345 - DNA, 479 bp, Zea Mays
gttgacttatcttcactcagttccgacgtctgagggcactgcgcgggagactcggatcactgctgcggatagcgcttgaattcagcgaatcacatgggctcgagttgatccgatctcgcgttgatccattctgccggaagttcctcccctggcccacgaagggatggccttgtgaaacaataagcctggggcctttcgcaattccttcttgccttctagtggacccgggggatatctgtcccccacagtaccagttcaagaaattgcttgaaggtcttggtatggagtgtgagaagattgatgtttgctagaacaattgcatgcttttttgaaaggaaatgcttaaaatttggcaagttgaggtatgtggagcttgtaaatgaagatggggagaaggtcatgacaaaggttgcacataaacaactttgatgtatgcctctcactcctagagtgaaacgtttgtttctctcgaggaagac

SEQ ID NO: 75346 - DNA, 451 bp, Zea Mays
ggcgaatgatgaacataatgcaggccatcgaaaagaccccgccctcgacttcggcggaaaaagttattatgcctgccgatgccgaaggtactgccgaagccgaagctatgtaagctaggccttccgaagctactgaagccgaaaacctcggcacgatgtcagagattaacaagcttatatctgatatgactcctgagataggtgaaacatccactgataaagcttcagaggacacaaatttggacctatgacacctgggtggtcaggaactgtctgacgaagacatttccgagttgaaagaattcacccttgctggcggatacaaacctggttctgtactatttggtggtgtagacgaagaaattttgggatgtatccctgaccgggctggggcaaagattgttagagaaaactattggatttccgaagcttgggcgggaccttagtaatt

SEQ ID NO: 75347 - DNA, 704 bp, Zea Mays
aaactccaggttgtcgccgttcacttgttgttcatcctcggcttctttcccttttcgatctcttccttgagcatatgtctgatcgggttttttgatggatctcgggttgctaggatgtcgcgctctgtgggccatgagccaaggtaagtttcttcctttgagttcccctagacccccttcttaggctttgatatatttttcatttctttcttctttcggcgcagggcggtcgacgccgatgaagcggtcgcaccaccactcgtcgagcttcttagtccaggctccttgtctcctctccctttccctcaggcctcttcagggtgctgtgacgcttctcgcgtggcactggaggccaccgaggtcgaggctgagctacttcgcacctagctttctgaagtcgatggccatgtcattggtaaggaagttgccctccaacctattcttggcttcctcgtctcttcttcttaccttgtttgtcttttctggtagccttgggggctaagctagaaaaattatgtcatcgcatgggccagcttctggactacatcggggcctacgacacttccctagtcgagcatttagacaacacttcatgttgcatccaggatatcatcgactttggtgttcactagggaaccgcggtggcgctgctgatgggggagatttgctccgtctgccatcttcaggacatcatcggtcctcct

SEQ ID NO: 75348 - DNA, 361 bp, Zea Mays
gaggaagctggaagtgatgaatcttctgtggagcctacttgcgttctggaactctctattggaatggcccaagaggaagtggcactccgacgagctctgtacgtcatggtggttggcaccagaccaaaggttcttggcgctgaggttgtggaggaagtggcacgttgtttcggcatagatgctgattctttggcaattcatcaagccatgcccgaggactttctgctattcctccctaacgaagacaccgccacaagggttttcaatgaaggcaaagttttcagagggcctcgtttcaacttgcaattcaagcggtggtcgcggtttacgcatgcaacggcgggggctctcccatttctgg

SEQ ID NO: 75349 - DNA, 1236 bp, Zea Mays
tctcgttttgcctcctctcaggcgtcgtgagattctttctcattcttcttaataacttcgttagccatatcacgaccgcccttcatctaaacatcagagtaaaatctttcgcctagtaaagaagctttggccgaggggtccttggtgtcgctagctgaaaaatatattctggctgggttgcgaccttaacatattcacaactgtccctttctaaaattgccgcaatccctcgcgcaccggggaaagcatagaaatcccctcgatcgccgagtatttcctcaaaagattcgacttctttgctaatccactcgataaccccttcggaatcaccgcgaataaatttttgttccgaagaataggccccccacctttgcaaaactatctttcagtttctttgtgcactccatggatgtttcgtaacatctctctttggagtcccgaagctcttcaacattcttctgcaccctggatgtttccatttcacttatttcttgcttagcctttacaacttcgaaattttcattcatttctgcaagttttttcttcaaatctttgacttcagctttatgggcttcgtcttgagcactaagcttggctttgcaagtttttagcttctccactaaggaaaaatagtatcttatctttttcaaaagcttcgttccttaatgtgacaacctctgatcgaagatttccaagagctatctggcagctctcgtcatctgcttatttttgagcccttaaagctttacttagaattaatccctaaaaacaaaaaatatatatgtgagaacgtaaaaataacaagaaaacctacaaacatagtttatctcacagcaaaagtatacgtaccttaaagctattataagcaaggctatctgcaagatcatcctttgacattgcagatagaccgagctcaagcttcggaaatcccatgttcctcatcatctcccggcaaacagatatctccttattgtctggaaggcaatacagaaaatcatcttcatcagtgctgttgtataccaagtatccttgaggatacttcatatccctggtatattgtctagctttggcaatctgctcttctgacaattgtttccctcaagcatgtcgcacgataaaatccagctcttcagtaggtgcttcgggagcaggatatttaagtttctcaggggcattttctttttcttcgattagaggagcatctcccgaaggatgaacttcgacgggagatgaggg

SEQ ID NO: 75350 - DNA, 578 bp, Zea Mays
ccgtcttcttgcgagccaagatgataggagaagcaaatggctgctactggcttggatcatgccattttggagaagctctgcaactagtcgttcaatttcatctttttgagctgggttgtagcgataaggtctcaagcggaaaggagtggcccctggaaccaaaggaattgaatgacaatgcgatcgaagaggtggtaggcttgtaggtttatcaaaaatattagcaaactcttggattaggttgtgaatgtcgctcggcaaagtcctcttaggcaccaattctgatacagctggtaactcaagaatacaccatatttcatcaacaacatccatgtgtaagagctgaggaacagagattgtgtctagtatagataagtctgattgcagaccatgcaaaactattctcttgttggcagtctgaaaagtcatccattgttcatgccagtgaattttcatagggctgttgggagacaaccaatccatacctaagatgatatcataataagtcaatggcaggattttgagattgatagggaaactatacccctgcacatgcactttacactgttgcagttcat

SEQ ID NO: 75351 - DNA, 585 bp, Zea Mays
acataatataaaaacatgaagtgctctctttttctatgtgactacacaagacacataagaaatgataatttaagatacttgcacttaaaagcataattgttaccatcccttggctttcctccatgttgtaggtcttggcacatgataattctttatttcctacaacataaatatcttcctcgagatgatatgagttttagacataacaattcaaaataactttgtgtcaatcttgggtatatagatcattgaagattgataacttgagttaaaaaaattgaattgactttctcaagcaccccaaagcttcatatcatcttcttctcctgcaaagcttgtcaagcatattttggtacccatcgcttgatgggtccatcaaggttagtcagcaaagatctaggaacccaaaagtcctttgtgttagcgcttggtaaactcattacctttctagcacaagttgcaattttgggttgcctagttacatgtgaaataattgacaagctagaagtggggttgttaccaatgggacaatccttgcattgatgtcccttctttcggcatatgtagcaaaggcgatcttcaagt

SEQ ID NO: 75352 - DNA, 864 bp, Zea Mays
tcaagaacggatgtagtatatattatgttttagtgtcataggagaaattggcgtgatgttaacatagttatataattgaacttcattcggtcgcgtggagtcattggaaaaggaacgaaggtgcatctcgtgcacaccgtcgttgttgttgataaaccatggcacgatcgtcgtaccacccagaaacaggacatacgtcatgcggctcttcatctcctggtttgactatataagctttaccatatcatcatcactcggttcatctctgctttagcgcttagttaaacgtcctcattctagttcttacttgttcgagcactctaagagcatgtgtctaaaacgagtgtcgttctgagatttcgcgtacccgggtgaagtcgacaatcacattttttaggagtgtacaaaagcgacgtgattgctcactctgtcttctccttcctggtgttagtggtgcttaatgtttcatcctctccttcctagagaaacagtggtgatctgcgcagctacctcactacactccaccgagcgggatgctcacattcggaagacttcgagcactcggtttttttccgaggatcgtcgacaaacagcatgactgctcgcttcgtcttctccttccctatgctaatggtgatcgacgtttcgtcttctcctcgatgaaacggtggtggtcgacacgctgtactgcactaaacgggacggctacgccaatacacaaaatatctgccgctggtatgttgtcataaatatgttttttcctagattaaattactactgaatcatctacatacctaacattttagtcatgacagcgtcctccatattaaatgtggaacatgttcacgttcagaagaattcaag

SEQ ID NO: 75353 - DNA, 599 bp, Zea Mays
gttaaagctttagaggacaattgcaccattttgatggctcaacgcgacaaggctatggacaaagtcgttcgcgctggacggatcctgatgaggaggcctggcgtcgtggtgcctgacgatattgtcgctgatgtcaaggttgcgcccgatgcttcaagtcgtccttcttcttccgtcgctcctgtgaaagacattgctagaaaagacgtttcgatgcagtgatgtcctgcaaaacacttgatgtaatatgaattttatttgcatgtgatggttgtgttagaacttgaatattttgtggacaagtcaccagaacatgcccttggtgccaacgagtaaaacgttcttttttcctgaagggctaattgtttcgttgttagggtatagtagtcaccctgaacaatcgtgaaagcaagtgtgccatgctggttttaaggcattttccgacttaagccaatcgcctggctggtagggcatagtggtggcccaaagataagtatacgtgagcatgtcgcatcgacttaagtcatcaccgacttaagccgatggctccgttagtagggtatagtggtcaccctgagtcaggttagcgcgagcatctc

SEQ ID NO: 75354 - DNA, 549 bp, Zea Mays
ccaaatcgcgccccctactcatgcggacagcgtaccgaaggccccttcatcctcagccacctcgaatcgtgggaacgccacgtagcagtgtgagcacataatggccgcggggagcccagacagatcttcgacttccccacaagaaacataaaaccaaaagtcccactagttgccccacttgttcctaacgcaagggactatctccacgacttccaccgaagtctttccagtcctcggcataaaggtgcacgatccaaattgtgcaatctcatcccctattttccttttttgcgagtgcagacaatagttcttggcgaagacctccacagacggctgcccgccataagaagcaaccgcccaaacatacttcgccaatgcgaccacggcgttaggcgtcagctggtggacctgcacgtcgaaccttcgcaaaacctccgccacgaatcgatgcaccggaagccgaaggccggcaatgaagaatgcctcaaacacaaccaattcgccctccggcttaggaatctcctcaacgcttggaacccgcctgactcc

SEQ ID NO: 75355 - DNA, 362 bp, Zea Mays
ggaggaggtgttgatctacccgcacgaattcgtcgaagaagggttgtagctaatctggaaccagaaatgaatcctcctttgaatcccctgtctgctgatgatgtggctgctgctcaaatgcaactactacaataaatggccaacatgatgatagaaatgcaagcaaagatccatcaagaacgtcaagaaatgtgtcaagaacgtcaagaaatgcgtcaagaacggtaggaacaacaacaactaccacctccaccaccaccatctccgcctagggacaagcaccatgagtttatgagtcacaagcagcctacattctctaactcctcagacccactacaagctagtgtctggttaaagttcgt

SEQ ID NO: 75356 - DNA, 311 bp, Zea Mays
ggtgtttatgtctacaacaactttttgtggcaagaagctaaaacaaacatggcctaagtctccagctatgcgtccgtttgttttgccttttgcccgaattttgtccgtcataatcggtttttgacagacaaacgtttcgcctatcagtctgtttatgtgaaaatcgattatgtgaaactcactcaaataaataagaatgcagaatctaccgagtcatcgtgatgacagaaatctattactttctaaaccctaaatcgtgcaaacttcttcatcttccttcgcatgcaagcctcacgatatctagattctca

SEQ ID NO: 75357 - DNA, 499 bp, Zea Mays
ggattttatgaattgagatcttataaggatcgaacagatcgcctctaatggcccgaatttccccgcccgaaacgatgcccgcttctaatccttgccgttgaacccgggtcaacgatagacgagccatcttccccctcacgacgaataccagggcgccgccgcccagaatgggcacagtggcgccattgccggcctcagggagatcggcaacccggcacacaactttattctgaaaggctctactcgaagaggaaggacgggcaaaccggccatagagcagtactagaccctgaccatgaaacaaagcggctccgcggcgacgatgtactccggcgatgaattcctaattcaccactgatcctttgcacttccgatcgccacccatggatctacgatgacccagtgatgccccaacgttaacctccgtgaacccatcgggctcacagtggagttgcctgcgcgacggatctcatgcatctctcccttctctcttttccta

SEQ ID NO: 75358 - DNA, 1233 bp, Zea Mays
attttattttaacaacaaataataaataagaatatttgaaaggactttcaattgaacttcacatccaaaataatgttttcttcaaagagaacaatatgtgtgtggcatgattaaaagtgtttgcttaaattaaaaaaagaaaaatatataaatgggaaactgctcacatgggccacgttttcccacaactaggccaaccaagccaacgacccagctagcccattcccacgctagcccaactccactgcatcttgtgaccagtaatccatttagcgaccggtcaccaccatgcagggtccattgctcatcctcacatgtgctggacacactggcacctgagacgctggcgcgtgggaccatcttcacagaaccatcttcccaggtgtcaccactccgcgctaaatcccaaacagaatcctcacctccaaatcctccgcggggccgttagaacggtttgccagctggtgtccttggccgggatataaaaacggaccttccccaggcccatgggatcatctagccagagagcagggccatagggcatggtgtttcctcaatgtagagagtgtggcaccgggggaacagccgaatagccaccatcgtagatcgtcatgtgcgcccttgctcgatgtcccgtgtgcggctaggatggtgcgccggggagtggtgatcttggccagcgacaactcgagtgcggggagtcattggggcacgatgatttcttgtcgatgttgaagaactgccaccgagtcgttgttctccattgactacacgcgctggtgttcgattttagtaagaacctactctctctaactcgctatgacctgagcatcgagtagtgtgttccatactagatgataaagcactggaaccgcgcatctgcgttctccggcgtgggctcgctacgttactgggcggcgccaccgactgaagctgggggaggaagacgggtgtctaagattagatcctagttagcctttcattccatcgaagcagagtcgtagatcttttatccgatgatgcggagcaaatcaagcaatcataaaatcttgatcatagatctcggatctgagggccagaatcgcgtatcggttcaatagattgtggatatagtctgatccattggatgggaatcagtcgactgtagtataagggtaccccttcagccgagcaaacttgttaaagtgttcctatgttattacgcattcaacccaccatccccatagtaaaaac

SEQ ID NO: 75359 - DNA, 787 bp, Zea Mays
ttattgggaggatttggaataagacttgtagggctaaaagtactttggataagattcaacaaaaattgaagttgtgtaagcagtatcttaaaaggttgggattggaatctcaaaggtgtgaaaaaagagaagggatcatattggttatgagttgagaaaattggaagaaattgaagaatctgatctattgaacagtaatcagattgaatatagatgttctcttatgactgaaatttttgatgatgcttgatgaggaagaactattctggaagcagagggctcatgaaaactggctccttcagggcgatggaaataatgagtatttccaccgtattgtgaatggtcgaaaaaggaaaaacaacataatttttcttgaagaaggagataaaaaatctttggggatgaaaacattttgctgcatgcaacggagtactattcaggcttgtttggtcctgcccctggaaatatgttccaaattgatagggaggtttgggatggacttgagcagttgaatgagttagacaataatgtgctatgtgatcatttctctgaaaaagagattaaagaggcactctttcagatggagaaaaataaagctgcgggtcctgacagtattcctgctgagttttatcagatttgttgggacattgttaaaaaagatattgttagtctttttcaggactttcatgctgggcatttggatgttagtagacttaattatggcatcattactctgcttcctaagaataaagaagctaccaaaattcaacagtatagacccatatgc

SEQ ID NO: 75360 - DNA, 855 bp, Zea Mays
ctttatcatgtggtgatcttcatcaccaagtcccgtttgtggttgttacatttaggccatagcattcataacattccatgcaaaatcaagttatgcggagaaccgaatactaccacattgtgtaaaaagggattgtgcatacaatttatgccttgtacacaaacaacgaatccaatgcctctattttaacgttaatcatattggtaatcgcgtgagatacaacgataatagtacatccaactcagatttgttgtctttcataaacggaaagattcatgtgctgatagccttgatgatgattctagttgataggggtaggttatctaagtggccaggaggaaaaaagaaatggtattatgttttgttagtgatttcatctagtagggagaaatgagttgtgcgattataccgacaacatcctcatatgttacaatctatactacaaccaaagcaaaagaagatccaatctactaggcatatcgcctatatgcaaataccatccatatcaaaagttgtgcatgacttagctctgatacaactaaaagaaaacgtgtacactatacactagcatatctaccatgttcaagttagcatatgagtagaggaccctggattgttactactagacacgcagcacagcggaacaagaaggcatcgatgtatagaagtagttgaatgtcctcgtgtaccagtagccgcagcacattcactcgtgctcctcaaatcaatctctaatcaacaataccgcaacaattgcaacatctttattatatccatatatacgaagaggaaacatcgtgaggtcggtgtgctagtaccgtgtgcgtagcgagaaattgtcaagataccttaaac

SEQ ID NO: 75361 - DNA, 657 bp, Zea Mays
gcggagccaaacatggccataagtaggagaggagcgctgaaccattgagctatctcttgagcactttcattgcctcacatagtttgtaatccttctttttcttattctacctaggagatccttagatgttttggaccacaacattgaaatctatggatttttgaggaagtgtggctgtaaccacacttagtactcgtggcatttcattttgtgtcaactatgatggtattggcttttgagttgtttcttctcctttcaaactctttcgtttaattttttaagtggatccttgccttcaagagtttgagagaggttttgggggacattctctggattagaaactgtcttggcatcattgcaaaattattctataagtttatccatttcgtggacatgtttctaacaaatttggtcatttgacaaaactctaagttaagatcgggttttctggtatgctattgaagtttaaacctgtttgagttcaaaatttgtggacacctgagaaactcacttgtaaaagtgtggaaaattttagctcaatcggagtctgtttggatcgattttgcattcaaaaactaaattttaagctgctaaaaacaacgttagaaaagcgatacaattttggattgtttcaaacttttcagtgttcattttgcg

SEQ ID NO: 75362 - DNA, 451 bp, Zea Mays
tgccacttggatataacacaattccactcaaaataggatgagtaaattgggcaccaagagaagaagggagggcctaatttatatgactgaccgaaggtgatgctgaacccttgtagaatggtttatgcagcgatatttaatgagggcatctatttttgtttcatactacacttgataatatgttatcatattcacataaactacattgcttcacatacagaagttcttttttggttcatattgatttatggtgcctgttcgttatgctttagcaattgggtaatgaccttccaaagcatatgtgcttcatgttgtgctgcttggtggtggctaaaatcatataactaggttgtttaaatggcatgctatgtacttgttactcagtctatttttctagagtttatgatttactgaacacaaactcatttatacctgcatctccctttctttt

SEQ ID NO: 75363 - DNA, 514 bp, Zea Mays
gtgggagaagatctggacgaaatgttctagctttctgcttgaaaggtctgaaatcggacttaataggcagtcgatgctctacgatctctcggtttaatctaggcatctcagtgtaattccaagcaaagcaatctgaatattccttcaatagaccgatcatctcattcctaggatcagtctccagggtcttgtttacaaaagtcggccttggagttttaccatctcctatgtcaatctcctccaaaggatcagctgatgtaaacccttgtcctagtttatcaagatctctgaattcctctatcatgtccccgacagaggaatcagatgatctttgtgtgatggcgggctttccggtctcggggaccggatcatccgtaacactgtctttacgctgcggtagatgtttgatcttaaagtccgaactgttttgcgaaagaccggaccatccgcccttagaagccgaactatccgtgaccaaagactcatgaactttgtgtgtactcatcatttaaac

SEQ ID NO: 75364 - DNA, 387 bp, Zea Mays
accatggtgacatgcatcagtatcatattcccaaggtctacccaacaaaatagaacaagcttccataggtactacatcgcaatccgcataatcagaatacataccaatggagaaatgcacttgtaccatgtgtgttaccttaaccttgcctgaatcattgatccattgaatgtggtatggatgtggccgtggacgtgtggtcaggccaagcttcttgaccaaatctaaactcaccaaattattgcagcttccaccatcaataagaacacgtgcacgccgattctcgatggcgaagaaagtctggaacaaattatggcgttgctgcttctctgatgattcaggctgagcactaagaacacgctgcaccatgatgcttcgaaggttcac

SEQ ID NO: 75365 - DNA, 386 bp, Zea Mays
tggcgaactaaacattaaattggaggacatcgcaggcaaccacatgttagctttagttatctacacgtcgtcgggcacaccacatcaacaccactggaagaacgacgattactacctataattaaccaacacaacacgacatcacgagtacaagcatttatttaattggaaacagcttttcattagtccttccattgatcgcacacaagcatcccaaacacaagtttaaagaggacctatgcatcaatgtcgatggactcctatatcacaatcaactacagcaagcaagcacattaatcatggaacacatgttaacctatgtttaatcattacaagtctatgtccgctaagtgctaactaagcatttttagccaaaagggtgaact

SEQ ID NO: 75366 - DNA, 518 bp, Zea Mays
aaaactaacccgcgaaggggtatggacctatcctggccgatggattataaaccgacgcccccgatcttatctggcgatcaccgaaccggtatggaatcacgctccttggatcaaaaatctatgacccagatttttaatacaacatgtttcgctcggatccgatcgatcagagatctacgactagggtttaatgtactgaaacggtatgtcgttctaatctgaaccgtccatgatcgatccagcggctcagacacctcctacaatgcgacatgatctgaaccgttgatccattgattgaccgaccaccacacctcgtcttccctccggccaaaatacccaaccgcgctacggcgacgagaaccaccgtcggcgatgccattcacaggccccggtgcaccatactccgattaaatagtcctacacatcacgctaaatgagacagacgtggctgaggtttccgtacctagaattggagacccgacgaggccggacacggtgcaaggcggatccgcggcggc

SEQ ID NO: 75367 - DNA, 503 bp, Zea Mays
tgagcccgtcgtgagctccgtagggtaatcacacatctaagtcgccaagtcttgtcttcaattgtccactaacgcctgtgaattgctcagtttccccaatccgtgtttccgccaccgcgaaagagacctcaccgtggttagcttgctccaggttagttcaagctccctggacgtttgttctagtcttattaagaccccctaatgctgttcgacccctttgattgaactagatcaccctggattaccgtgaatgcccgtgttcatccttcgtccgcgctgtctccgtggacttgatgatttagagtcgtagtcgtgaaattgagtgaggggaaatgatcgacgggtcttgaatttggtttctgcaaaagtagggcgccagtctgcaagtaatttcgccgatataagatcgccggagtgcggcccagcgccgttcgtcgtcggggattgtaagctgtgaagagatagaaaggagagggccttttcacaaagcgtcagtgactcgg

SEQ ID NO: 75368 - DNA, 596 bp, Zea Mays
aagctctaacctccatttgatttttatacattgtattaactaggatcagtagcggctcggtggtaagggcacaaaggggagagcggcaggccaaggcgggtaaggcaacattgtggctcccaactcaccttcatgtgttctagcttgggttcatggtgttggcatacgaaaaacgaatgcaagtatcaattatcaaccatctgttttccagatatgtaaaagcattgcgcctttatttttttccaatgatgtagatctgttgtataagttgaaaatagaatggtgataggtgatcatttattttttgttgagcaatgcaacccaactgccgtgcttacaaggtgtgtcaaacattggtagttatgaattattttgttgtcgtccaattacattgtaagatgatgcattattagtggatgctaccatctcaagcactagaaaattgtaaatccttctgatcgagaaacataaaacaactgctcatctaccacaaatattgggttctttcatagtgtgtttttttaccatctgccatttctagactgagaggcaccaattaagagcaatcatttatcactatgaaaaatcacactggc

SEQ ID NO: 75369 - DNA, 279 bp, Zea Mays
gctcatcggcgccttcggtttcctgccgctcgacttcgccgtgccagctctcttctacaacgtcaccttcaagccgtccaagaagggattcgtgttctggctcaacaagactatcgccgtcgtcttctcggggctcgccgtcatcgcgtccgtcgcggcggtgcggcagattgccttggacgccaaaacttacaagcttttcgccaacgtgtgaggagagcccaaactcaagcaactacaaacgccctagatgtttttgtggtgagcgttttgtggtgg

SEQ ID NO: 75370 - DNA, 723 bp, Zea Mays
cgagaagtgattgacgaccttaacgtgaggaaggtagctagctgtgttcgaggacgaactgaaactaaaatactatctccatctttttatatttgatgccaaactgtacaaaaatgaactataaaacgttaaataaaaatatatgtagtaaagccgattgacgagccactcaaatatgcggccatgcgtcaggtgttctagaactgtgttaattgcattattgactgttaattttcttcccattggaaacccagctccaatgatatataccaccatccgcctgctacggggggacatacaggaggagaacgttgctccattaattagtggatcgatgctgtgagcaatgctagttgctgatggtcccgggcaaagagagatgcatgaatggatcggcgggcgcgtgaggagagggataataaactatgaggagtttcgatcagttggtggacttgattgtatcgtgaatcataatccactttgcgatggtggaatccgttgtcaccgccctcttcccgctttggttagcaatggaattaacaatggtgcaacttgcaaattgtgtctcccctccgatcctatttgatgattaattcactgttaaggcagcctgactcgtatatacatcgatttctcgcagtttaactaatgaataatacatgcaagatagctagttatttcattggtcaattcaccgcaagctgtgttaaatattaatttgat

SEQ ID NO: 75371 - DNA, 1430 bp, Zea Mays
tacaatagcggtatgcttcctatcctccctagacatctgaatctggtggaacctagagtaagcatataaaaaagacaacaggtcacacccggaggtggagtccacgatcggatctattcgtggtagcggataagggtccttaggacttgccttactcaggctggtgtagttgatgcacatccaaagcttcccattctccttcgggatgatgaatagattggccaaccatacacagtggtggacctcctcgatgaagccagcgtgcgggaactttcggacctcttcacggatgaagtcgtattgctcgatagactgcttctgaggcttctgactcattgacttggtgtcagggttgatctttagatggtgctcaatcacatccctggggatcccaggcatttgtgacagttcccaagcaaacatgtccacattttcccggaggaaggaaacgagcgcgatgtcctatttctcctcctagattcctcgtgatgctgatggtctaggagggatctatttcgacctagacgaccttcacagggacactgtttgctctagatggctacaccttgggtgcctttgcaagtgccttggtatgcgaggttgaggggtcctatccctcatcgtccagacgtgtggccatcgctgagagagcgtgcaacttctcaatggctgcgagcgcagtggtcttgtcgccccacatggtgaggacaccagttagggacgacatcttcaggaccaagaacccctaatgggaaatggccatgaatcgatacgggactggcctatcattgatggcattgaaggggacgttgacctctgccatgtcgaactagaagttcttggtgtggaagatttcctcggtctcaaatgtgaccaggagggtgatgctcccaaggggatacatcgtttgtgggcctagtccggagaatgggcgagagggtcataactttgactctaggatctagagctacttgaacgtagcataactggtgacgttgaggttgacccctccgttgatcatcacatgatagagcctcatgtttgctatgacattagcggtgatgagtgacagtatgccggcccctaccatattatcgaggcagttggatgccccgaagttaatggtggtgcttcgccagctttgatggcgtgctatcttcgaggccccaggggtcaccgagggtacgtcccagtgaagggacttaacatcctttcgggaggtcagctcccagctcctgtacatcatgtacaacttcttacggaggtcatcattgctggagtcagagcctccagtgagaaggtccttcaagacctgcttagggggattgatacccaagctccctttcgcccgtaccaacatcgccttcgtcggccttttccttgctaggcgggtgacatgacggtgagccatccttggaaatatgctcacg

SEQ ID NO: 75372 - DNA, 426 bp, Zea Mays
aacaggtaccctatgcttgatcctcgtcgtccatctgttgatcaacgaccccgcacactccatcttccctagaccagagccgcggtagggcgaactgcccacggcggcgcctgttgccggcgcgcagtcacccgagacattgatgccatattcccggcaataataggttctacgtgtagagtacgccatgctgattgctagggagggattcataccagtgaatagaagggcagaggaggctagccacaaaagtgtacggctcgacggcgatgtccaacgacggtgagcgattacccgagccccacgcactaatcatgcacgacgagcacccggttatgtgcggcgtgtgttggcgaaggtctctggctccccaatcgggtaccagtggtgccgtggcgagtagcgccagtggcggcggtggatctc

SEQ ID NO: 75373 - DNA, 676 bp, Zea Mays
tgcgtcctctggtcgccagatcaagctgcacggcacataaaaaggacataaaaaccaagcatgaattccacatggctcacaagaaacggctgcgaaatgccgtgccagtattatctgtaaaaccggcgcctacctggttcatgccatgctgaagcttccgaaaggaaatatcccttactgctggcactagcttcatgattgagagggatgtgatcatggaactggctgggtggacccaatacctacccaagctaaatgggactttttgttgcggcaactcaaaatggctgcacgcggtcgtcgtcttactccgtgggaaactttttactgatttcctgcatcgtgcgaacttactgatgcatgaatgcatatttttttttttaatttggttagattttggttccattctaagcttactgtgcatcataaatacaatatgttactgatcagacgacggtactgccgatacataaaagtagtcttctcaacattgatatggcggatttcggttagcacaactggtctaatgcatggccccatctgagaaattccgcggttgctagcttgtgtgtcaagataagatactgtttccggttcactaagttagaccatttagtggttgccaacatggtacccttcatttaaactggatgcaattttattttccttttttttt

SEQ ID NO: 75374 - DNA, 284 bp, Zea Mays
ctgtcaatctatctattctatctctctctgctgcatattgatgatagcgagaacacagctagccgccacatatatacatgcgctgacacaaaacaaaagttgatggctgatgagcaactgtgcccattggcgagtggagcagtgtgcatgctaatgccatatttctcacagcagtaaataatatgcatgggacaaattaatagacgcatcacgcattcatgcctggcctgcctgcggcgttgctcacacactagcttgattggctgcatgcttctttatttctg

SEQ ID NO: 75375 - DNA, 442 bp, Zea Mays
cgtggaaaggtgaaccacctagatgtcaaagcaatcaaggatgctcaggacgtggtagtaggtatgtttccagtcgaatcctaccccaaaagtactatttgatactagtgccacacattcttttgtttctgcatcttgggtagaatcacataacatccccatagaaccaatgatcccacctttaagagttaattcagttgggggaaaagttcagtctgattggatttgtccgaacctaaggattgaaataagggggatagacttccccgctagcctagtagtaatgggaactcaagggttggatgtcatcctaggaatgaattggctacacagaaatcaagccactgttagttgtgacaagaggatagtcaagttggtgtccccatccggaaaggaagtagtaatcaagctgtattttcctgaactagaggaaggagccttt

SEQ ID NO: 75376 - DNA, 334 bp, Zea Mays
aacaaatcaaacatacaaaccaatgcttatatgcgatcatgtactctcgggtgttgtagaggccacgacgcttccaacggcgacaacatctacctcaagctgctgtcattttttgaggtaaagagattctgcctccgtttcgttcccctcgctccaatccatttcacaaactgagatgtataggatgatgatcttctaactcctcaaattcatcattttagcatcttttttggatcgaggctaaacaaatccacaaatgtatgatctgatacatataatatattgcaaaccattacttgaaccacaacaaaattttattgaacttcaatgtaac

SEQ ID NO: 75377 - DNA, 721 bp, Zea Mays
gtattgtacctatgtaaaataagtaagaaaagttgagttgtataatggagtctgtataattattactgttccgcaatgaaataaagatggtgtatgatggcatgttatatttttctgaatgtttctttgcctcagatgccatctcggacccatgcacatgatggggcaggtacatcccgcggtggggaggacactcccaatccgccaccggtacctcctaccttggccgaggctatcgctgccttggtcaacaccactgctgacaatacacgctttctgcgcgaaatagcgggcaaccaatttcaacaacacggaggaagagttccccctcagggaccacgagatactacctatctgggaattctctgaaactcgaccaccgctcttcgtcaaggaggaggaacccttagaagccgatgaatgggtgggagtaatggaacagaagtttaagctaattctatgcacggagacgcaaaagcccctgtttccgctcagcagttaagagggcctgctagtacctagtgggcgaatttttccgcgatccagcctgttggacatcaagtcacttaagaagaattcaagctggcattccgggaacattatgttctggagggagtgctccagatgaaactagaagagttcctccgactgaagcaagggggagatactatgatgcagtatctcaatgaattcaatcacctctcccagtacgccattgagc

SEQ ID NO: 75378 - DNA, 652 bp, Zea Mays
ctcttagtcttgaccacaatgtcatcaacgtatacctctaccctgtccctaatcaggtcaccaaaggtcttactcatcgcccgtacaaatgtcggcaaggcatcgtaaggcattacaacataacagtaaaacccatccacaattacaaaagcggtatgcttcctatcttgcctagacatttggatctgatggaaaccagagtaagcatctaggaaggacaggaggtcgcacctaatggtagaatccatgatttgatctattcatggaagtggatatgggtccttgggacaggccttattgaggttggtgtagtcgatgcacatccgaagcttcccgttagccttgggaacaatgactggattggccagccatacagggtgatggacctcttcgatgaagccaacgcgcagcagcttctggacctcctcacggatgaaatccttccgctcaatggactgtctccgaggcttctaactcaccggtttggcgtcagggtggatcttcatatggtgctcgatcacctccctggggatcctaggcatctgagacgtttcccatgcgaatacgttggcatttacctggaggaaggcgacgagcgcgatttcctatttctcctccagattgcccacgatgcgagtggtctgggaggaat

SEQ ID NO: 75379 - DNA, 401 bp, Zea Mays
gacgtcggcagctatatctccgactcctgagtccatgctcgatcatcgacaatcgtgtcttcttctaccttgcacgtgagtgaggttgtggtgcatagcggacgcaaggaaagggttccaagccgacgcgggagacgacggatggagggagcacgagaatgaatagatgatacaaggtggaagcgagcaggctatgtttagcgaactaagaatagactctatattgtagcggatgctttagcgtctcctgctggaggcataaaggaggacatgctccactaaatatatcggacagtccggtttatagactattgttcaagttagtctaaataaaaactctgtcattctatagatactcggtcatttcatctttttagcgacagtcattcacaagaataatt

SEQ ID NO: 75380 - DNA, 714 bp, Zea Mays
cgcccacgaagaaaatccaaaagaagaccaagagccaaggatgccagactgagcggaagaagaaagcccttccagcaccacctccctccaggatagagaatttgtccaacatcgaggatatgtccctagctagccttgatgaccttctcaagaaatttggggacactttagaaaaggagttcggaagtacctcagaaagcgctcgcgtgtagtgcaacttgtagtagctgtatgcttgtaatgaattggtgtaatgaataaaataacttggttgaaaaaattggcatatgcataatagtaactctctccccttggtagatggcttcggataagaccacgcctatcgcctccgggattggagcagggtttcccctaagagctgaaggagaagccggtggagaagggagtgagacccacctccccgcacctccggagctacccttagatttagcccaagctctagccaaccaaacccgactcattgaggtcctcactagaagtgtggagaatcaacgcccgaatggtggaagaccacaagacaggatgggagatttcctgaggctcaagcctcccacattcgctggatctagcaatcccctcgatgctgatgattggctgcgcacgattaaaaggaagttagaagccatcggatgcccggagaatcaacgtgttcaattggctgctcatcaactttccggaatggccttagcttgg

SEQ ID NO: 75381 - DNA, 872 bp, Zea Mays
cggagtagttcagaactggacaaaaagaaaggatttgttttgcatacctgtgttcaagccatctggttgttgaggactggcaacttcctgttctactatcccaaattgatgtacaccaacattaagatcaggtattgcatcttgcgctaaacaaaaaaaccatgcaagtagttcaagattttggtacagtaaaagtatgcaatattagcataaatgaaagtggatacggacttaccatgtccttgtacagataatccaatattttcttgtggcatgatgttatcattatcattgtcactgccagagacgtgtcctagcagatttagatcaagacataatttctgagacatgatcgatttttgttgtatgacttgtggtcttattctgagaagtgagagtgttttctttatatagagtggagtggacagtgcaccaaacaaaaacgaaacgtcaaggtgcagactggcgccaaattaaaatcacgaatcctggagaccggtaaaatatttgtgcaggtgcatggcgggaagagacaagattacattttggcgccacttcgagtggaacaagcaagcatcccacctttagtgccgctttggtcaaagagccaaggattaatgagcttttaatagttgttctgtaattaacgcttaatgcagataaagcagggttacatgcgtcatttcttctcttctgtaacctgtctcaaaataaccagaacgcctaattcaaccggacggagggagtatattttttttcgctcacctgtctgcctcgtgcgagcggttggctgcctctcctcgtccgtgccgactgccagagtccgcgacgggagcgagcaggacacacgacacagggcccccttccctcag

SEQ ID NO: 75382 - DNA, 791 bp, Zea Mays
cttgacctaggtaattctagtgatgtgtggtaatgcacacgtatgaaatctagtgttaggtaaccatatgagagccgatgaaatgtttaaaaacgtttgaaacaagcaatttggcgatgttgtagaggcaccagacttgtccaatgtgcactggatatgtgccactagatagaggtcaaccttgttaagaacataaacaccaatgtgtcttgtgtgcgttgaacaggacatctagagatctatgtaaatgagtgttttaatcctaacactcattggatgtgtcttgtgtggcacagaacatggacataaatatagcaccaagagaggctgcaaaccaagtgcgagaggctaagtactcaacaaatgtgtttggtgtgtcaccgaacatagcactagatagggcacctagagaggtgcaaacctagtgcgagaggctaaatactcagcgaatgtgtttggtgtgtcaccggacatggcactatatagggtacccagagaggttgcaaaccaactgtgggaggctaagtactcagcgaaagtgtttggtgtggcaccggacatggcactagatagggtgcacagagaggttgcaaaccaaatgtgggaggctaagtacttagcgaaagtgtttggtgtggcaccggacatggcactacatagggtacccagagaggttgcaaaccaaatgtgtgaggttgagtactcaccagatatgtttggtgggacaccgaacatgttttgtgtggcattagacaggaaacttagataggtctgcaaactgtacatttgag

SEQ ID NO: 75383 - DNA, 619 bp, Zea Mays
cgagacgccagtaactattggaaaaattattgggagaagacagttgtagaacttcggtcttcaaaagagaaatgttacgaaaaatccatagaatgtgtgcaaaaaataaaatctagcttcgccaatgttggcgcattctctagcgaggacaacttcgtaaggggcgatcctgaaggcccaattgattggatcagcaacgaagttgaagcctttgaagaagttttgagtggtcgtggggatgtctgcgccttctcaggtgccaggggaattgtggctattttggagaaactaggttgtgaccacgtgaaagctttggcccaaaccgaagctaccttatctattgaagatacaaaagacccctcgatcgaagcaagcttagttggcgggaaattcttcactgacatctgggaaaatggcggccgagagatggcgcacgagataataaaaaagagtgaaaaggattctcatgatgtaaaagaagcgacgaaggcagccgaggaagctgcggaactcgaaaggcggataggtattgcttaattgcttttgactttgtgttttatttttgtgacttcaaacttatttatgttttgtatcgcagctgaactgtctcctcccccgg

SEQ ID NO: 75384 - DNA, 382 bp, Zea Mays
gtcggaggcgtccctgatcgaggcccatggcgtcgagcatggcagagtagaaggtattgagcccgctccttccatccatcaacacctttgtcagccacactgatccaacaatgggactgacgatgagcaggtatcacccgggtcaggggatatgctctgggtggtcagagcggtcgtaggtaatggcatggttggaccagtcaaggaaggtcagggatgcttgccgagcctggagtacctcatgtcgttccgacttccgatgccttcttaacatgtagtagtcagacccatcgaagatcaacaaacacccgatttcatcagggaaagagacccccactttctcctgctcgccatcctgctgggactcgaaccctttctcggg

SEQ ID NO: 75385 - DNA, 437 bp, Zea Mays
tgaattttgtgtagtgttcccggcatcaacatcatacgacgggaacttgtgaacgtgttatttttataatcctcttgcatacccccatattatttgtttcaattgctctcactcttcatttacataaacccgtcgtctgtgttttacttacattagaggcggaagcaataggtcggagagataacatgtcacactccccttgccagaccaccttctgatgctagtccatcttgaaattgggcaggtactttgcctcagcctcctcgatcaactgtcttttgtactccttgaattcttgatgatcttcacccgacaagttctccatagttggcttaacaatgttgtttggggagatataggagtaatcctttgaaccgaccatatgtggctgatctctgttatgtcacgcctcttgtccgcagtagagtcgccaaaaa

SEQ ID NO: 75386 - DNA, 945 bp, Zea Mays
tattggtctggcatgctgacttaaggtgtctgccactctgcctgagacaagccacggtagatgaaaaattgtcatggcatgtttgagtcctggcaaatgaatgccgttacttgttgatgaatgtggcaaaatgctttcgttgttgcctttgttggataactcttcaagtgtttcagtttgttgggtcacatgcattagtgtttttgtcatggcgtactgataccactgcctgactggcttgcacacttttcgtatttgtgtgaagactatttgtaactgccagcaacgccattgacatgtgcttttctgtagtctgcctcaggattgtttactttgtcctgtgcatacaacagagcaagtattgaagctatacaaaatggaaagagaaatacatatctaaataggcctttgtatgaaactggaaaggatgttaagaatgaagttctaaaagaatcactcatgtgcttggcgatagaccgatattgcagttgtagtgatcataacacatcataattaccagtttgttagcctgcatgcatgtgtttttcttttcatggcgtaccagtaccactgtccaactcatttgtgcgcctttcgtatttgtgggaaggatatttagtaactgccggtaatgtcattcatgtgtgcttttctgtagtatgccttaggattgcttacttcgtcctgtgcacacgacagagcaagtgtcgaagctaaaaacagaacacatgcttatgcatatacatatcttagtaggattttgtatgaaactgcaaaggctgttttaagaaggaaagttctagaaaaatcactcttctgcttggcaatagtgcagttcttttctagaggtcacattgttcttgttcttgggtgatttcaaatttagtgttgtctttgacttggcacaaacaccattggggctggcatttacatatgatagaactg

SEQ ID NO: 75387 - DNA, 430 bp, Zea Mays
gggaacgtgattgtattctattagtgttaagtaacttaaacctaggaggctagttgtttggtttgtgaccctcgggtttgtggcttgcaagggttatggtccggtgcactgcctgcctgacctctcgctctcactgacaagtgtgtctcgccgatccactggtctgttgtggtagcatcggattaaaccttagccggaccggggtcgtattaccactagctttaatagtaatcaagaagctaaagctagcagcggtgtcatcatcagctacctactatctctctggctgggtggttaagctattcgctaccgtacggacgaccgcggggggtcatcacatcacatcacacatgggaggtcctcttatccatcattcgtctagactagatctacttcactactagaggtgatggtgtttctttcgggcttg

SEQ ID NO: 75388 - DNA, 701 bp, Zea Mays
atataaggacaatttctcacttgatgccataggagtagtgagaggtttacatttggccatattaactcttttaagcaagtctatatcatatttctcttgagttagaataattccatcccgtaccttattcacctcaatgcccagaaaatagtgaagctcccctagatctttaagtgcaaattcttcttttagatcttgtaacagggttgtcgtggcttcttttagagctagctacaatgatgtcatccacataaactagaacaaacatagtgatgtcacctttgttataaaagaacaaagaagagtcaacctttgatgcctgaaatcctagcttcagcaatttagcacttagacatgaataccagactcgaggagcttgtttaaggccatagagagctctgtccaacttacaaacatatttgggtctggtagagtcttcaaagcctggtggttgttgcatatacacctcttcatctaaataaccatgcaagaaggcattttgaacaacaagttgcttcagactctagcttcgagaaacaacaatagacataataattcttatggttgctgcctttactatgggactaaaagtatcctcataatcaatgccatattgttgtttaaatcccttagcaatcagccttgctttatatctatccagactgccatcaactttcctcttaactttgtatacccatttg

SEQ ID NO: 75389 - DNA, 710 bp, Zea Mays
gactggaagaggagtgctggtgaagctgactgtatggctgtatgcggtatgcctgtatctgctgattcgcttctgtatcctgtatttctgcccgagtaaataatcactggcgatgaaagactcaatgctgatcttaattaaagttgatatcatcattcttgatgcatctatgacagtcaaggatcttttcttaatacttacttatctgtggaaattatgaatttttttccggtcaatggaaattatgaaatgaaacaaacattgtcgggtttggaaggtaaagtgtttagctgcctagctcgtctgtaacatgtaagattgaattctataagcgaagagagagaaattttcctataataaataactagatgtcttattcaatgatattttatgggattgctcaccttaaaaaatcattgactcaagagaatttgagttttcaaactagccatatgcatacataaaaaaatgttgtcatgtaatgtttcatgaattcggaagttggtcttcaacgtagtagggggaggggggtgaaatcagataacaacgtttacatgtgatccagaaaacaaaaggttctcagctgggatatatactcaattattacgtgatggaaccaagagggggaaaaagagcaaagtgcgtattcaactagaaagcaaaagcaattcagaggctttttgtggccttgcttgctttattaaccaaag

SEQ ID NO: 75390 - DNA, 501 bp, Zea Mays
caagattctaaaaccctaattcctttttaagcccttaaaccctaaccatgggattaaaggggaaagagtgggcaaatgatcaaaacataaaaaggaacctttactaaagatgaagtgtattagtaaagctacaaaatttagtaagagaaatattgcaaaatggcccaacaaaaacctcaaaatagttcaccaagaggaaagcacactagagccatcaaaaatttctctaagtccccaaaaccacccctagcccaagatcaaaggtgttcacctttgtgctggcgccaaaaacccttggtccaaataacaaaaagtggccaagatacctaaggcacaccctggaaaagtttgaactgatttgacaaggtttgacatcagttttatctcaggatgaacagtgccgacagacctgacttggtgcccacatatcttgtgatctagggcagatcttcccttggaactcacacgaactagctagccctaggtgccaggaagagatct

SEQ ID NO: 75391 - DNA, 843 bp, Zea Mays
agccaaaagtgagaaatcaagaaggaattagactttaggttattctagtgtttggataggttcttgatgaccatagtagcatattggaactcaatggagtagcatgattgctcagatttggagtttgagattccaagtgtcagttggagcaaaaggttgaaggaaaggtgcaaaatgagttgtaggttgggatgtgacaaatgcgatgacatggtgatttggagtttgagattccaagtgttagttggagcaaaaggttgaagcaaaggtgcaaaatgagttggaggttgggaggtgacaaatgagatgacttggtgtgtttggatagactcaagaaacatttgttcaagtcatagaagtgcccaagagaagagccaagtgaagccgatgaagttttatcaagactagacaatggtctcgctattgattgtgcaccggatcaggttcagtggtgcaccagaccaaagatggacatagcctgtttggggcatagagggctttgacacgcgagatcaagtccagtggtgcaccaaactaagtatgtagagaggctattttcaagacttaagcaaatggtacacgagagccgagtccggtgtgcatcagatcaatagtatacccactagttgggaggattggtccaacggtaggatgacgtggcgctgatgtggcatggtctggtgaggcaccggacggtccagtgagtgctataggctagcatctttttagaatggtcattgatctggcaggcatagttaaaggtccagtgtgcaccagacctacaacagttgttggtctgatgcgaccaaaaagtgttgaaattgggcaacaactattttgaca

SEQ ID NO: 75392 - DNA, 431 bp, Zea Mays
atgatctctggggtgcaaaggccttctcagagcattactctatcactgagcgagacactatcgaggcagccatgcaggatgttgcatggtgtgcgctttcgcagtaatgtttgttgtttagcggggtagctgacggcctcgacctgaagtactacccccatggttcgacaggcagtattggaggtttgattgtttcaccagttggtgagggcaatccaatattgaacatcatggtcaacctggtcgccgtgctcaacattgagctggaccacacccttgacgagttgggcaaggctcgggtggagattctggaactgcgtgcggagcacgtggagcgctgccatcaggaggatggttcccccgttcctatcaggactcaacaccgataccgctcactactctgtggtcatcatgcttatggcacccctgac

SEQ ID NO: 75393 - DNA, 491 bp, Zea Mays
tgtctctctgaattatacggtgtacatgcatgatctgttcatacttcatatgaatttagatttatactttcagtactggtcaattagcctgatggaatatcaaataactatctactgattctatgcaattgcatgtttcaagtttctaatgctgccttgtaatactggaacattggtattataagaaagtaaattcaaacttcaatattgttatgtggttttctattgaacctggtgaaaatgtgataattatgtccatatccttgcaagcagttcagtcatttaagtttaatctaggctacttagcagtgtgattttcctgtagcctcttgatttgcatagccgcacagcccgtgcttgaaagtaacatttttatcctcattgctgacattaggatatgtattgtattattggtgtgaaattcaaagaatcagatagatgcaagatatctgtttgtgggataggatcagaacccaatcctgtgtgtgcag

SEQ ID NO: 75394 - DNA, 505 bp, Zea Mays
tcattttttggggggatttttgtggcaatttattacatatatggttctgtctcgttaaaaacctcaccccctgcgaggaaaagagtgcgggcccgactgaaatagtgtttgtgaagattacaaaggcgcgaaggctttgggtctagacaaaaaaatttcgtaagttgtctacatttcatgagtgctctaggtcttcgtcggatggtgatttgagtctataggcgttgggggacgtttttgtcttgacgatgaatggcccttcccatttgggctcgagtttgccctgggactctgttctagtggttctgatgaggactaggtctccctcctcgaactctttggggatgacagtgttatcgcgccatgccttcgtttgcgcttggtatttgttcaattcttccagggcaagaacgtggtctccatcgataaggtccttggaggttgattcatcaacttcgggagtagctgtggagtttgctcatggagatccatgcttcagttcttg

SEQ ID NO: 75395 - DNA, 287 bp, Zea Mays
gggtactccacccaactggacgtgcgaatgtcgggctgccttcctgaccgagggggagggatttattgtgattctccatggtgaaccactcgaggtgccatcccttgatgttgtccttgatggggatgtcaaggtattccactttcctcccccggcgaagttccaaactggcaacgccgacgagctgatgctgccctccagccatgccggtccgacagtgataaaggtacctccagaatccaaagtgggggagaattccaagaaaagcctcgcacaggtgtacgaaa

SEQ ID NO: 75396 - DNA, 512 bp, Zea Mays
tctttttcaattgccttagaagctttagctttgagagcgattgattcattcttcactttctttgccaaacttatagcatcggcttgagatttcttgaatatatcttgagtaagaatttctcctaatacttcggttggagaagttgtagataaatcacttctcactagcatggtcacaatagtctcatacttctccggaagagatctaaggaacttatgagtgaaatccacatctagtacatcaaaaccaagtcccttgagctcattcactatctcatttaaccgattgaacatatcagacacactttcttcttctttcataatgaattgctcaaattttcctttgcacacatatagctttgcactcttcacaattgtagttccttcatgaattttcattagcttaatccaaatctcatgagcagttgtgagatttttgatatggttgaactcatttatgtcaagagcatcatagaatacattcatggcttgatcatttttaagaatgttttc

SEQ ID NO: 75397 - DNA, 661 bp, Zea Mays
gtccaacaatgtccttcaaattatgcgctaaattttacaggcgtcttcagagacgctaaatgtggcggatcacgggcatcccctacacgtcggctcgccttcctttccgcgacggggcggaactttccccctcacgttctcttcccgtcgcaaaggtcttgtccatggcgccggctagtttctagtgggatttctcggagcggtctcggagctgggatcgaggggaccactcgggtcgaaggtgcctcctcgcgataatcggccaagcgatgtgtgccctcctcgaagctcagtgccgagaaaatgaatcgcagtctggatctgtcatcctcgtcgtcttcgattcaatcgacgcttctagatccaagccagcgaaggtgattgcctcctcttccatgcgattgggttcctttctacatttccccaaccatgctacatatgtgaaccctaactgttggggaacgtatagaatcataccattttttccatgtaacggcttcaaatgtaggattatttcagttttatttggttttgaacctaccaaacttgtgtacccaaggttttagtggcatgcagtgcgaccagattcaatatggcatccattcttgaatttttgtggtacttccaactcgtttatgtgctctttctgagtaatatgagg

SEQ ID NO: 75398 - DNA, 673 bp, Zea Mays
gacaaactacccataccagaagatttgcatgtctgtgtttcttaagagtattgggtatcgagtttgggagatttgcctcgatgctactttcgatgcttagagtgctcggatcactcctattcagttggagttccatgattcgaacaacaaagcttggaacactttgttctcgtgtctctcgctggctaagttttagcgagttggacatttggctatggctcatgatatctagtcctccctcgagagattccatgagggcagtgatcatgtgaagaccagactctttgagacataccaaagagagtacgagaattttgtgcagttggctggagagaccattgatacgatgttttgttggtttcattcgattgtcaacaagatgcgtgccaataaggcatatcttccctatgatgatcatgagagagcgctaaaatttctacatgttctagatcggagggtttgggaggtgaaggtctcggtgatcatcgagtttcccaattacgagactctcaacgtggaagctcaagtccaccaagattgaccacaagacccaggctaagattaagaaccccggtgcacccaccatggacccagtctttggaggtggttcttcctctaaccctcacctgttatgtttgctctttcttatttgttgaccattatagaggagcgg

SEQ ID NO: 75399 - DNA, 687 bp, Zea Mays
gattataaatcatgtgagaaagatatctaattcatctttaatctttgttataacttggttagatatcatatgttaattaacatggatcatgagagaagatatgttctaaatgggaatctaattcatctaggttatgacctggttagagatcaccttgtagttggtttatatttataggaaattttattacaaagctatcacaacttgaatggagtaaaacagagctaaaaaggatgagatctgaattaaacaaatttctaggttatttggaattaattttatgcctaaaaataacttcatccttttctcagcgagcttgacggcgacacccactggggaacggcgacgccatggtaggagaaacaatgtctgctgcctggcgatccaatcatccctggaaacgcgcaaaacaaaattcacgcacttgcgaacttgatagaaggtgtcgtaccagatagcgtggcgcgaagggcactgcccatggctagctagatgcagcggcgtgaagattgctacccgacggcgagcgattgtcgcataatctcaacccctcgctctccacagccacatcgagcacgcctcatacatccggctgaacatccatgaccgcaccgaggactccgaacgatgactgaggcggagaatgtcaacggcggtaggtccctccttccccccggcctccctcac

SEQ ID NO: 75400 - DNA, 293 bp, Zea Mays
ctggacaagtctgcacatggcgtttcgggaaccacgagagggatcacaagaagacaatagcgagtacacgttggatccctaagaaaggaaggcaggccgtagtgttcgggacatgtcagacagcgtacttagctgtcctagctacaaaggtcaattatatgtgatgtaaaagcagatcatctatagtcgcaagaaacgaagacatatataattaattagtgtttgtcaggatctcgatcaccgtatattgccagtacgacgtcttgttattttagctttgttctaagttaaat

SEQ ID NO: 75401 - DNA, 911 bp, Zea Mays
gggtcttctacgtaaagatctgggctcattcgcaattactttgcacacgccaaggatggcgggttcattctggcaaagtccggggactcttttgtaagatagccgtagcgaaggggtatctctcgatattaaccgtccgattagaaatcaacgtcgaggatcacataatatttttaaacgaaccggtacgctatatgaaccgttggatcagggatccacggttcagatgtttaaaacaccagatcaacccggggtcgctcatcccacgatcaacggccgtgacgagtcctagccgaaccggtatctacttctaatctggaccgttggattcggatcacgcgcccacggtatcatcttctcccaccagtcaaactcgcagtcaggaacggtgcacagcggcggcgccatcaccggcaacacggtcggtcgaccctcgctgccccaactaacacatgatatcgcggaaaacaacgaggaaggtaaggaggatctgatggtggtcaacttatgggggatcgagcagtgttgaacttagtccacggcacggcggcaaggggaaaggagcttgccaccgacgaccacgccaagtccaccggtcggccactggcctgctcttatgaagtcctcccaaacccccgagccaccgcgcaagcgtagattgcaagaggcggcgccaaattctctctcctaccctcgattccacttctccatctctctgctccgatctcagtgctccagatggtggggaagagggtcacggtatggttttatagacgaggatggggacccgcatggccggcccgccctcgagatcggcgcgttttgtgggagaatctgctgccgccatcagagacgatcacgacaatttcggcgggggaacggagcttggttctgttatgggtgaggggaaa

SEQ ID NO: 75402 - DNA, 1551 bp, Zea Mays
cttatcttcaatctaacggattgcagcacaatacttgctcatgacctccatggaataatcccaatctttgttgatctaacttatcgctaatagagaatccccatataccatcacccgcttgtccctgcaagttctcgttcttgtcaaaaaccttcttactcgatgcctccaagatcaagccattatctccctccacttgaccattgaccctcgggtgagctactgaagcgtacttgaggaggatacacttctgctcacagaaatcaaagaactatgcccttgtaaagttgaaccctaggtctgtgataatgttattaggtatcccaaacctaaatataatttcttgaaggaactctattacctttgttgttgtcaggaatgcgatcagcttgtatttgatccacttcgtgaacttatcgatggccaccaacatgtgtgtgtaccctccttgagccttcttgaattgtccaatcatttacaatccccagcatgcaaagggtcaggagacggatagtttgtgactattgtgtggacaagtgttgttgtttggctaaaaattgacatgcctcacatctctaaaccaggtcgactccatctcgctgggttgttgaccagtagaacccctctataaaagcattcccaaccaacgttaatgaggttgcatgaacaccatatttctcacatgaatcttcctcaacagatgcctaccactggatgtatcaatgcatctcatgaaggttcccactgccccacgccaagtctttgtcgatcagagcgtggttggcagactgcctagcaaggcgctcgacaacagctcttttgtctggctcttcttcattcttgatatatttgatgatgggtgctttccagtttgttggatattcttctacaagcagtatctcatgctctatcaccttgcactcttctctcgagtcttgcggagtactaggatgatgtatctcctgtacaaaaacatctggaggaacctgagctctggtggaacaaagctttgatagtggatcgatcgctataatgcaatctctatccacatgatgaaacttcaggacttagaacttatcttcaatctaacggattgcagcacaatacttgctcatgacctccatggaataatcccaatctttgttgatctaacttatcgctaatagagaatccccatataccatcacccgcttgtccctgcaagttctcgttcttgtcaaaacccttcttactcgatgcctccaagatcatgccattatctccctccacttgaccattgaccctcgggtgagctactgaagcgtacttgagggaggatacacttctgctcacagaaatcaaagaactatgcccttgtaaagttgaaccctaggtctgtgataatgttattaggtatcccaaacctaaatataatttcttgaaggaactctattacctttgttgttgttagcaatgcgatcagcttgtattcgatccacttcgtgaacttgtcgatggccaccaacatgtgtgtgtaccctccttgagccttcttgaattgtccaatcattt

SEQ ID NO: 75403 - DNA, 446 bp, Zea Mays
atttaataacgcttctcattcaactttcacccgcccgattcttgatcaatggtcgtgataaatcacagtgaaacgatctggtggcacccaatcctaaccgccggccagccgatcaacggccccggacgcgtcttcaacctcccgacatcctgcacatagtggcgcaggacacccagcgacggcgtccttgccagtgaccccgcgcctgattcatttctatgcgatgacaggaggatggtgtatatcacggataaactctcacctgggatgtaggcacagggtcccccgcccacggtgggttgcgatttcacggcgacggtgcacctccggcgagaagttcgcccactgctggtcaccaagtccaccccgtgaagatgctatccgcagaggtgaacgctggcgaccccacacaccgccgcccttcccctccgcggttaagcgtttca

SEQ ID NO: 75404 - DNA, 836 bp, Zea Mays
ctagttatcaactgttgtcataatccagttgacctcaccaagaaggctaatccctatatatgaatcaaagaacacaagcaagaacaaagtagatgcaatttaaaattgcaaatagaaaggattaaacactcaagttgggttccacaaaccaacaaggcagtgaaacagtatataacagaataatctaagcaaaacccatctaatctaaaagataatagtgaatacatatacaagaaagacaggtaaggcggcgtccaaggtggtggccgagcaaccctatggtgtacaattcctttgggcccaaaaacatgtgttgatgatttctggtagattctggacgtcatcttgttacataatagcgatattttgatatggagccaattgggttgaaaatcttatctccttagctttccaacagtatctagaacgttcaaaatggagtgcgtttgtggcatggacgtcctttttctagggatttaatctaggccatgagtttcatatctaacggtcggcgtgtgtccatactccatcgatcgacataatagcaaaagagcccttgattttctagggattcaacccgccgtccacaccaatagaagaagtatcacggatacgtcctgtttttattaaattgaaccccgagcttttgcaaattcatgcccgtagtacatagttctaggaaatcataaaataaatataaaagaattaagttttatgtatgaaaataattttgtaaacttagataattcataactcatgtttttactccgattttagtggctatcgaacctacaatctcgtagtgacacgtaaaatattgttgtgtggtttgtttc

SEQ ID NO: 75405 - DNA, 683 bp, Zea Mays
gcctcgtccacattagtaaatgtcataccgaccttcggtaccaatcgttgatctatactatcatcctattcaattaatggagtcatcatgcagtgcgcatattcaaaataatcttacagcatgctgaatttctaggacttcataacttgcacggacagtataacaaatacatgggtattcgatgaacttacatggctttggagaatgtgtggtgtgtcctgctcatgatcaccaattgttctcatgggtatccggtgagttgctccaaccaaacttggatgaactgtgttactgtcttcaaggattcctagcgccggtaacgcagccgggggagttacagcatgccgaccatctgaccaacagggtaacgtcgatgttgtattctctccacactgcaccgatccgctagccgtcgccatggtgtatgccctaaccctcccaggtcaatgaacaaaagcggtggttgtgtgtagccctgttttttggagttatgctcctggattagccaaaaccgtcctggttgatattcatggtttgttccaaatatcccgcgtgatttgtatgtcgcgagatttccgtgtcccgacccaattacgattacctgcctattatgttatagccacataaacatcctcacccccacgcgcgaccccaccacgaatccacgatcccggtagacccgc

SEQ ID NO: 75406 - DNA, 335 bp, Zea Mays
atcattttaaaatttgaaccttcagatcatgatcggatgaccacatgtgcaataccggttcgtgtagaaggttggcctaatccgcgccactggtttatgatctgatggtgcagatcaaagcatacccctatggtcgcgctgatatgcaaaagaaccctcggacctctatgaaatcaacccgcagtctgtatgtagtgttagaatattaaacttaggtccttgattttagcagtttagtccctgatatttaaataaatgcaaaccgcagtccatgagcgctggatattgataacattaatatagaaagtgattattaagatgaaaattgatccccg

SEQ ID NO: 75407 - DNA, 672 bp, Zea Mays
gacggggggcattaattctttgaactactgagtgctctgtgtaaaaatctagggttatgcgcgctattcccagccacagtatggatggcgggttgatttcataatagtctgagggttatattgcaaaacagcgcaaccaaaggggtatgtttgatctacaccatcggatctaaaatctggggtctagattaaatcgcatcccaccgaaccgacacacgatcatatccgtccgatctacgaccgacgacgcagatttaaaatacttcaacccgcccgatcgagatcaaacggcccgcgtcaggtctggccgaaccagtatacatgaaccaatccggggcgctcattaggagatcaacggcccaccgtcatattctatctctaggccggtcgcggcggcgccgacccctccaccacggcggagacataactcggccacaccattctccaatcccaagccctaaaacctgatccagtcggtgacacacgagtagctgaccacaacaaacgtgggcgagggataattaccggcgatcgagtggagcagtgggccgacgatggcgtttggcgccgcagcagttcttaggctccgacgagcaatccagtgttgtgcggttacgcttcggtgatggggaggtcacaagcacccacagaacactcacacggttctcccag

SEQ ID NO: 75408 - DNA, 696 bp, Zea Mays
gctatggcgcaagtatttcaagactcagtgtacagccgcataggacggagggtttatttttaaactactcagggactcttttgcaatattacgcagccgaaagggtatcgttgaatggtggccgcaggatcctagatctacggcgtggaataaaacctatccattacacacctgcgttaaatctgatccgtccgattttcaatctatgacggtgatttgctagaatacctacgctctttcctagccacccgatccagatcccacggaccggattagccacgcgaagagttgtcctcagatcaatccgtagccgcaagatggtgatcgaacggcccctacccttcttcaaccacacgacgcaaggccgagctggcactcaccccggcaaaccagcaacctggaccgcccccgccagcgctttggtgctcgaccctagcgaatccaagtgctaaccatcgctctaaacatggagaagcgcgagcgagacctcaccgagtctgggagcgcagatccactcgcccgctgtgaaggagaggacgcggatgcgaggtcacggacgccggaatgaaggggagcttcacccacgggcggggcaaggagagcggcgacgatttcaacccgcccagcacaatcccagtgtccgacagtggcgcacgactcctcagtcgatcgtgggaggaacacccaccgccaatg

SEQ ID NO: 75409 - DNA, 434 bp, Zea Mays
ggatggtccacggctctgggtcgaatggttcgtgaccctgtggtaggagcgtctcctctctacgtcgtgtcgtacactctatgggtcggatagtctatgatggcgtagagccttactattctcacgaagaaccctagaacctacctctagagagggaccccgtcgaggaggagagttccaaggcatgccctaggagtcggtaggccacccaaggcatgcccagatagtgtagaatcgcctaaggattaaaagaatatgtcaatgaagagatcttgagtgaagtagatgaagttgatcttgccccttgggagggacctcgttgggctaagatcctagggtcatcttggggtcgataggccacccaagatggctctaaacgatatagagccggatagagatgaagattgataggtggaatctacaactaaagctac

SEQ ID NO: 75410 - DNA, 542 bp, Zea Mays
ccttccgatagttcccaagccttcttatctcctctgatagagaccgggtgaccttcaagaatctggggtcttcagccttcatgggttgaactgggttggatgaagcgggctcttggatccacagggctctacgttggttatgggtgaccaagtaggcctccatcaacttctggacatgctcatccttggcttgcttcagggcttcaacatcaatgacttcacgactttctaaggcagctacacgggcttgagctgtggtgagatcaacatggagcttgcggttgagcttctctgcatcttctgctcgggcaatcatctgacggtggtgccgagccaagaaatcatactgtgcatctagggtgagcaggtatgcagtgaggtacacgaatgtgggagtcatcctcaagcagctgctgctcctccaatgcacgcatcctggccatccaaaccggacggtttctctgaaagggcggaaagaatctgagcggtgtgtcgaccacttcttcttcatagatttgacacagggccctcaatgccttgcg

SEQ ID NO: 75411 - DNA, 585 bp, Zea Mays
caaaagctggaaattctaaccagacatcaagaatcatacagagagtatactatttttgattttaaactatttggaagcactagagctacagatataaaaacaaccagcacaacagtaacatttttcctacttacacgatctagttcttatgcaagaaaattctaaacaatatacaatcatacattttcgcagctaaagcatgacatcagaagactacaaactagacctgccattattggagctagaatttaagtatagatagaagtaagttttatttagcttttctataccacttttctaggttaatttgtgtagcacaccaactaaatgaaacttcacatttcgtttgatccaacaagtagagtctaaccaaatatcctagagctctatgagactacaaacttacacacccaagactagcacttatgcacatctttcattatgaatttcccagattccaacggaaacatgtagcaataactcatgaccttcagccaagtcaataaacagatgatgcgatgactactaagacatttcatcacttcacctcataagcaaaaatcaatttcaacaacagtggacaaa

SEQ ID NO: 75412 - DNA, 321 bp, Zea Mays
attatagcacaagtggtcattctaaccaccgactcttctcaatggaaagtggcctaaatgctcaaacaatatcgaccgtagaccactagcaaacaaacaataatggaatgttgtctctttgtatctatttatttccttttattgctctgccagtcaaccattaatatcatatgtgtttgtattaaattacgagtttatgcttaatattttcgcttttgttcgtttttgtacaccatttattatgccctcgtttctgcttcagactatttcggacccaattctatttcgtgaaaaaatgagaaaataaaaacgggagggatg

SEQ ID NO: 75413 - DNA, 531 bp, Zea Mays
ctaatctacatgttcctaaagatctgtacctagccgacctacaaaagcatctaaaccagatttggccataacacactcatcctatgccatctacctaatagtgacaggttcttatctacaagctatcttagccatacgtccttaactcggatgaaaactccaagaataaaggccaaagaagaccaaccacatcaagcatcaactcaagtcttcaaagatcaagttagatcgccaaatgaatcaagatccacaatcttggatggagtctttcccctactctactctttcttaccccaaacctatctatgctttaaagatatcttctatcctacataataaagtagatatacatatatacccatgctttcataatcacctgctaatttgtgttacaaacttgaacaaaataaaatcttttggtattaaaaccacttagaaactgaaacataaattacaaaccgttatttctatatcccttttcttacaaatctcggggacgagatttctgttaaggggggtagaatttgtaac

SEQ ID NO: 75414 - DNA, 271 bp, Zea Mays
gtaccaggcagttatcagttgtgataagaggacaatcaagttggtgtccccactaggagaggaagtggtgaccgagttagtcccgcctgagccaaagaaagaaagttgttatcagacggctgtcgatagcagtgaagcagacccaattgagagtatcaaggtggtgtttgagttcccagatgtgtttccaaaggacctaccaggtatgccgccagagcggaaagttgagtttgctatagagcttcttcctggaaccgcccctatctttaag

SEQ ID NO: 75415 - DNA, 1624 bp, Zea Mays
gccttccaaagtcgacgatgcgcgagatactgctcgggatacctctaatcccatgtctggaagttcagagcaaacatccatcatgtcgccagcagtcggctccgacagcatatcttcaggaacgacatcctcaagggcctgatcaaaatccgttatggacaattcttgaaggctgacaagagtagacagagctggaaaaggaatatcactatcacccctactacctctgtaacaccggctatttttacaaactagcggaacttcttcttcctcttcttcgtcctcatcaaaaatacggaaaatagccggtgcacggtcacacccattgagatcagcttctgcacggtcacacccattgagatcagcttctgcactattacacccattgggatcagcttctgcatggttacacccattggggtcagctttaacaaggtcacacccattggagtcagctggtgcacgatcacacccattgaggtcagcttcaacagatacaccaccattgggatcagcctcggtaaggacctccgctggtagttcttcacacacaggagcagaagggccagcatcctggtccaagcttgacagtcgccgaagctgcctctttttcttcttcttctcctcaacaggcgcagttgggcggctaacatggtgaggacgctttaggcgaataccctcaggctttcgggtgtccactgttttgttaagctcttgtacaaccgtaacagccattggttcagcatgggccgagttagaagattctccagccaacatattgagtacatcatctatttctgcatcatctggactcgccgacatctcaaaatgaacttgcctctcatcattgggaagatcacaaagaggagcaaccagagcctcaatgtcttcaggagagggtcgactctaagacccagaccactatcactagcaggagggttggacacgaaattgaaaaatgacctaggaggtggtagattccaagcagagtaggcaaaaggagcaccaacatttgatactttgccccacaggatcatatctagtcggctcaccagatcctcagtaggaagtttcctgttggtaacccgagtcgagtcagtaatgccattgtacaagtaagctgggtatgccatgtccttcaaaggttgaatattcttaaaaataaagacagcaaccacagcctcggcagtcagacctctctccttcagtagacagatttcagcaaacagaatcctagcttttgttacctccaaggcagtgggagactcaacccaactcggagtgcgtacatctagctgtctccccgaccgaggggggagggacttgccgtggttttccacaataaaccactcaaggcgctaccctttaatgttgtccttgagaggaatgtcaaggtattctgtctttctcccgcggcgcatctccagacttgcaccacccacgagctggtgctgcccccagccatcctaggccgacattgatacaaatacttccataatccgaaatgaggaagaattccgaggtaggcctcatacagatgtacaaagatagaaatttgcaagatggaattaggattcagatgggtcaggtttagattgtaaaaatcaaggagaccacggaagaa

SEQ ID NO: 75416 - DNA, 728 bp, Zea Mays
gtgatgcactaggagctctcagatctcacccagatggtgatctacaagatgtgagtggattttatttctttatcctcaaaagttgttggccagtgtatgaagtgcaaggatgtcgactaacgggtctattaacatgtcaaatatccaatacctacactggacacgacaccaaacacatctggtgcatgttatagttgaatgcacaatttacatgctctatcagaaccttatctagtgtggtgttcgaggctacacttcacgtgtctggcgagtgttagagctaatagacccattttacatgctcaatgagttccttgtctagtgcgccatctggtgatgcaccaatcatgtcctgtaatatccaacacacaacacaagaacaataagcaaatattggaaacatttgtctggtatggctcaatgggaactatttgatctacatgtcctatggatgattggaggtcgtggatgcttagagctcgtcaatacaattatatttgacttttattttgtctcatttagataccagatgagtttttatggagctgagagatttagtccattgaatggtgtagggtaaaggagagacttaacttgtttttttcttcctatcagtcaccaccccatattcccattcatgtccattgaaccatcattcccttcctagataacgcctcctcatttcgtttatgtttgtcgccctcttacctccttcctggtcactgtcc

SEQ ID NO: 75417 - DNA, 430 bp, Zea Mays
tgcctgatcaaagtctaatatcgaaagcccctgaaggctgacgagagccgacagagcttgggagggaatatcgctgcccccgtcctgcctctatagtgatgactatttttgtagatcagcggaatttcttcttcttcttcctcttcatcctcatcaaacatgccaccagcagcctgcgcatcatcacaacctccgacattaacctcgggaatggcgtctgccagaacaccatcagggatcggtacaaaggaccagcatcctgatccaggcatgacagtcgccgaagtcgcctctttttcttcttctcttcgataggtgcagccgggcggttcacgtggcgtgaacgctttaggcgggtaccttcaggtttccggatctccacctcttcgccaaattcttgtccagtcgtgatggtcatcggctcggtgcg

SEQ ID NO: 75418 - DNA, 954 bp, Zea Mays
cttaaaaagaattcgacctcgaattctgacgcttctatcggaacgacaaaagggaaaaaattaatgaatcaacaacacttacccacaacaaaaagttccggatatttctgccgcatcagctcctcaagttcctatgtagcctcgcgctcaaactgattagtccataagaccttgacatacttaattgatctcttcctcaaaacacgctccgaggattccaagatacgcaccggacgacactccaaggtaaaattctgctgcaccgcaattggttccatctcaatctgatggtccggatcccgcaagaacttcctcaccatagacatgaaaaactgggtgtacccctgccatggaattcggcaattgcaagcgataagccaagctgcccacccgggccaagatagtgaacgatccaatatatctcgggctaagctttccggagacaacgaactgaacaactccttaagtgggtgataccctgagaaggacttggtcacccacttcaaattccaaatcccgcctcctcacatcagcataactcttctgacggctctgaacggccaaaatattctgacgaatttcccgaaccttttcagaagtctgctgtacccaatcaggaccaaccagggatctctctcccaaggtctcccagcacagaggggagacacaccgcctgccatacaaagcctcaaatggtgccatcttgatgctagcctggtagctgttgttataagcaaactctgccaatgcaagatgatcttcccagctacccttccaagatagaacacaagcgcgcaacatatcttccaaggtttggatcattcgctccgactgaccatcagtctgaggacgaaaagtgacactaagagaaagcttggtgcccaatgcactgtgaagactctcccagaatttggatacaaatttggagtctcaatcagaaacaatggacttagg

SEQ ID NO: 75419 - DNA, 392 bp, Zea Mays
gctcgcaacatgtcttcgaggatttgatttactctttctgtttggccatctgtctgcggatgatatgcggagctccttattgcatgggtcccaagtgattcttgtagctgctcccaaaagcgtgccagaaacagtgctcctctgtcagatagaatggtctttggaataccatgcaaacacactatttgatcaacatagatttctgcatatttatctgtcttgtgggtggtgtgtaccggcaagaaatgagttgtcttggtcaacctatccacaataacccaaatagaatcatggtgccgggaggtattgggcaatcccccgatgaaatccatgcaaatgtcttcccatttccaagatggtatgggagggggttgcaaagggcctgctacctt

SEQ ID NO: 75420 - DNA, 417 bp, Zea Mays
ggggcaccgccacagtctcctccatggatgcagcagctccggacaccaatgccgaggtctacgagacgtcccccaaggtatccctatttgttcttgcttgtaccatggagtctttgcaatgtcttgatttggcctagctagtataatggaatctgaacattcatgcatgtaccagtggaaggcataggcttgtcttccgatccgaatgtagaagatgaatatttgtttgattgggattctatggttctcgctggtttgtgggaggaggaagggagacggaatgttcctagtgagatgcacatgtattctcaacttggacttattgaagaggacgaggcagaggaaaatagaagagatgaagccttacgaggtggtgcaactaatttggatgaatcagaccatattgattcaggagac

SEQ ID NO: 75421 - DNA, 460 bp, Zea Mays
ttgtagtagggaaggtgagaaataattcaagcttgagcatatatggcttacacttcacagtcaaccaaagtggtgctcgtggcacggtggctccaactcgggatatgtgagcaaacggccacgcctcaacctagagggggattatagctctagattatttgatagtgtcgatgcaccacaccctattggtcgcaatagggctagagcgcaaagcaagggcaaaggtacaacaacgagtagcagcgaggcccctggacggaagaaggccatggcgaaggggctctataaggccaacgagaagttaaattatgcgaacttatacaattaattcaccaaattaatggataagacaccgacaacgtgaatgaagacatgagaaggatccacatgttggtcgttaaacagttggccaaacaattaaaattagatgaacaaggaaccaatgaagaagatgaggtgg

SEQ ID NO: 75422 - DNA, 618 bp, Zea Mays
gtggcacagctgctgcttttgttaaggctaggtgcaatcacataagaactattaataggcctaatttcagtctctcactgtctgacctagttaatattccagctgaagccaacagcataggcaacagaatcattactcaaatcggggctaaggttggccgagagattgctgggaacgaagctcgagccttacttaataaattatagaaaatctctctaccttcttgtttttattttagatttttccttattatattcctcaataccttttccttgttgtgttttagggcgatgttggcaaacactgatgagccgaagcttactctggcgatctgaagaaagcttcagaaactttctatcttgcttttaccttttgtctcgctgttgtttgctttgttgtggacgaaaccgatgctcccaactttttgagccaaaggcgagaaacaccttaccttcttttcgttcacatcgaagcacctttgaaccaaaatcaaaagatggccccctcgttcataacgaagcatttttccttcttttcctgttaacgatccttgtttataatgaatcatcttcgttcacaacgaaatattttcacaatgaaaacaggaaccttctcttc

SEQ ID NO: 75423 - DNA, 327 bp, Zea Mays
ggtaaattgattgctaaagtgcggaagttttgatgacgggaaagcagccgaagcattttgggcatgtcccggaagctacagaaaatcatggcaacgacaaccaaagatcgaagtatttaaccgggtaaaatctggtctgaaatttgtgtggtagtagaaatagagcggtcacatcattagcacaaaacggccgtactagcgtccgaacaaatgctagtgtctggacacagttctttctcgttcaccttgctcgatgctcgctcgctggcgacctcaccaccggccgtccatccccgctgctgtttgccgatcctttcctaatcccag

SEQ ID NO: 75424 - DNA, 735 bp, Zea Mays
ccttgggaggttccgtgacagctggtaacggagcaaaacccgtctcttcggacattacgtagtacttcaaaaggatttttaaatacttaccttgaaaaattctttcgttcttatcttaccactttctgatagtcactttttgaaaccgggtaacagagtgcagtataggtaaggaagtagggggatcgacgaaatattgatcgcctaattattaggttatgcatgcatcatgtttaaactatactaataaatcttcccctcttagggagatatggcacacactaaaactacccagcgcaaatcaactggacctcatggtgtgcccgacatcagctggcctctaggcatgaaggaagcagtagtggaagcaacaaccccatcggggatttggaggccagagtggatcgactcatatcttaactacgccacgggtgtagggagcgtgcgcgcgatagtcgccgcattgctgaactaccagccgaagttaatcgcctgtagtatgaaatctcggaacacgatacagccattgactgggtcgtgaagtcatactcttttgcatgggattgtgaagccaaagctctagctcgagtagcagaacttagtgcatccctagaaaacttgcaagcatactgcaacaccttgcatgaagaggtgcacgtgttgtatgaccggttgcacccaaacgtgccacccgaggtggcagcaatgggagctggaccatctggaacaacaaat

SEQ ID NO: 75425 - DNA, 523 bp, Zea Mays
cggcagcggaacgcatcgcaaagcagtcagcccattacaccctcataggggcacactgtacagaagaggtgcgatgggagtcctcatgaagtgcattcactcggctgttgggaaacaactgttagatgaaatccatgtcgggcagtacagagtacatgcagcatctagaactctggttggaaaggttttcagatctggtttctattggccaacagcaaagagtgatgtcgccgagttagtccagagatgtgaagcttgccaattcttattaaagcaacaacatttacctgcacagcagctgcagaccattcctataacatggccattttcatgctaggggttggacatgatcggaccctttagaaaagctcagggaggctatactcacgtactggttgccatcgacaaattcacaaaatggatagagtataagcccattgactctttgaccttagccaaggcagtggaattaatacaagatataatattcaggtttgggataccaaataacatcataaccgac

SEQ ID NO: 75426 - DNA, 791 bp, Zea Mays
gccctcagctcatccctatgatgatccagctccgacatagtgaagcgatgactcctctctaggatagtgagggaattgctagcgtcatgatataatctatccatattgtcacgagaaactagaagtgttcgcctctcctcctgcaggcgaggaaagcactaagcatcggagcaaaggagcaaagtagaagcagtcaggaaaatctaccttgtgatccatcttctctgaatcaagttgggcattcaaggaagaaatcaaggtccaagcgctgtccaaaaacgtagaaatctggtttagatcagcttgactccgggtacacctttcctcagcatcggaacaccattgagtcagagctagcgaagcaataggaaaaatgcaaggtgtaaaacaagagaagcaataaacaaaaaaaggaagttgcagacccactaaccaatgttggaggccttcagatcatctatctgcctctgaagtaggagaggataccactgcatcaaagacgaatcttgatcagggataggagcaccacatgatttcaattgggcagatacagagttgaggacattctgcaagctcaaaagttagcaaaagaacatatttgtcaacgtaagtaatgaaaggcaaagatcgactcacctagaggttagaaagaaataaaggaaatcctagagctggaggcatcggtgcactgtccaatgatggaatgttgatagggacaatggtgagagtatcactcgggaggacctcagcttcggcagcaggcggcagattcctagcatctgggtcgccag

SEQ ID NO: 75427 - DNA, 547 bp, Zea Mays
tgaacaaacatcgcactcgtcaattgctgcatcaattctggtggagaattcgatagcatttgagacatcaggtctttatctctttcttagcctcctccttaaaataatctgccatatgttccttgtatcgatcatgttttttatacagaccttcctactatggttcgaatacttccttccatccttccttagatgaggttcctcgtacacaaccaggatgcttagggttaccgagaccagccgttacaaactgcttcattatgtattcctgcacaagttcttctgaacctcgaggcaaaacgaacctcgtaaatagcttattccacatttgattcttgacatcatctgacgcatatttccactgtcggattgtgatgtcaagattatctctaactaagaacccaagggcattctgaaacttaggcaatgcctcctctagagaaaagggctgacctttcgggctcacatctgagattatatatgtattgtcaggaaacttgttcagtcctctatcacctcgtttatgatcgctctgcttccttttcct

SEQ ID NO: 75428 - DNA, 690 bp, Zea Mays
cggacttgaggtcagaagcccaccagagcgcctatataatgaggggtggggctcggttagggtcaacctaattcacccactagaaaccagccgtcgcgcctctctcgccctcgccaagccaccatcgtgaaacctagcagttttgtacgtggtgcttcctccctgtacatgtggatacctcgtaggtgctacatttgaagcactaggatgaaacatgcgaggacgtgaaggacactgacgactacatggcactgctcgacgtgttcgtctacgtcgagacagcttccactgccttgcgcgtctagtggtaatctcgtgacctataataacattagatgttgattttatggggtcgaaaattttgttttgtgctagtgtagcctccctgtattcctatagtggtatcagagtcatagttgttaagtattaggttcgggacatgtgcatatggtgatatgcgaggttttaggatgatacgtgaacaggtattggtgtttttgccgaaatggtcatgcaacgaactactcctaccagttggtactctaccatcggagttaagtgatgcacgtaataccagttgtagcaagattagatcaatttaattggttagatcaaaacccagtttcatacgcctatcacatctgatgcgcagtagtattttggatctactacaaaaccggatttattgtt

SEQ ID NO: 75429 - DNA, 480 bp, Zea Mays
ttcaccggcactcgaaggcggcaccgggtcaacctcagcctcgggcggcgcgccgaccagatctccaaggtcctcgacatcctcgacacgcgccatctgcaacaatagcacaaccattcagcaaaaccacacataccccaacacaaccacacaaaacaacagataacctttacctactctatcgtccggtcagaccgctccttaaccgcctcccaaccgtgcggaccccacatcctgtcgaagagtgcccccgctgactgcttcaccacagggtcttcggccttgaaaacttcacgttcaaagttctcgtctgattggtcgaagacctcgtagtgtcggcacccctcacgggacaacgcgttcagggtcccctcgcaggtgacgagggaggcgaaggacatgaaaccctgcacaatagtcgggagcaccagcagctcctcctgcaaccattcgaggaagcgaaggcctgcctcttggtcg

SEQ ID NO: 75430 - DNA, 352 bp, Zea Mays
gtgatgactatgatgggatgactcctcatcaattgtttgctaagatcaaacaacatgaagcggaggagacaccaaccaaggcaagggacacacatgctttggttgtcaatgatcaaaactcaagcaagaagagtcaagtgagcaaggaccacaactgcaagaaggttgtggaaatctcaagcgaggatgaaagttcaagtgatgaagacacaacaatgttgatcaagactttcaagaagtttgttagaaagaatgacaagtaccaaaggaaagtaaggaagagggcatgatatgagcgggtggggtgggccgaggcctctcccgaaatattttttgctgtttttaaaacctg

SEQ ID NO: 75431 - DNA, 1328 bp, Zea Mays
gaaacttcttggggtcgccttggtagccgacacactagaggagccgagagttgtgcttgttactatggttgtccctactgactatgactctgagtatgatggtttatggcatgctacctagcttgacctgtaatcaggaagggggtgttgacatcggtgtactgctcagcatacatacaacaatcagttaaacgttaaattctgcctagatcacgaggatcggtctgtacggtttgtcatgatcgactaattgagccaattgtcatttgtttttagggtcgactattaatgtaataataaatgtgatcatgcacttaaagtgaccgacgacggaagtgaaatctgcctaaagcatgcttgagttggttacttactctagagcggtctaggctacgtgcatggccaataagggagtgtcgggctagaagagcaccattattacccatgtcgttaaccaaatctagggctagacagtcaataagccatctataggaatatatatctcagatccaatctactacatgtatcgcaccgataaacctaggaacatcagccactaagaactactgaccacacaaacaaacatggatcagggcctccaaagaagtccaaccagagtaaaaatttagactaagaatgtaaggcaaggtgtcaaatatgtgtaagactcccaagttgccacgtgcacatgtgcagctagcatgttgtggaatgtagcaaccgataaagagatacccatgtggccgtataaaatcaatcttatagcatgaagcatagagataaatgtatagattgaaagtacacatgataactagtagatcttgccaacaataacacttagtacaagatttgtaggggtaatggtgtgacgtcatgccgccctgacatgatcaaagaccgcatcagggtaggatgtcacttactttggaaaaccccatgtggaaggggtggcgatgcactgagaggatgggaagcacccgctactttagtgaatgaatgtcttcatttattcataagcatatctattacagtaccatgaagtcgaggatgtacataacctttgtgtcgagctccgtatctagtaccatgaagtccataaaggatgaggaagtcatggatcctcaccgaaatatcctttactacacctattggataacgtaccgattggtctaccagctgcagtcacatggctgtaggaactagtgttgtctggggtagttggtcaaagaccactttcagcgttacactaccactttatcataagtcacataatgcttggtcaaaatgttgggtcttgatcaagactggaatggtgggctccctggatc

SEQ ID NO: 75432 - DNA, 279 bp, Zea Mays
gaaagctttgtgagggtgaggaattgaggataatgctgtttaattacagggagatgggtatcattctgaaggttgagccgatgtaataggtgatgccctcgccgtgtgtatgtaataagcgatgccctcgccgtgtgtatgtaattgtaatttgtatggtgatgtggcctgttggccgtatttgtacgcttgtattggtccggctgcgtacgtgggcgactttgtgcggagtgtctttgtaatgagagacttcgattaacgttattccggctgcgccct

SEQ ID NO: 75433 - DNA, 843 bp, Zea Mays
gtaatatataacgcatgcatttgcatagaagatgtttgcagcacaagctccgcatcgatgataattatgaagctatctatcgtggtcaagtttagtggttcgtctcgagacattggagtcacccaatttaacccagccaaccatcctcatcatataagccagtagttttttctatacgagagtttgtttagagatgagcagtttaatactgatcaaatgcacttcaatgtgtatcattcaaatatgtatcgtacacactgtcgccagtattctagaaccatcttgagtagtggtttcttattgatccaaaaatataaccccttatcacgctaccgccatccccaccactgccgtctgacccaccggttaccctagccaaacccctccaacgtgcatcccctaccttatgtcagcatcacatatgtaggattcaatttctgtgttcttcctatggcgccgcatgagttagctaccctcttgcaaaatatataaattagattagattaatttttttcactttcgtcatgataaccagatcgagatccatctaattcgttgcaatatcttatcatcaaactaaaaatgatcatggccagtgatgaggtgtgaacttgcatgcatttgtcacaacatgtggcggagtaagagcaagacattacttttcaactccatcaccactcctaccacggtataagtgaggacaaaaataaggcatcgaagaacctatacaacgataaagttgacatgacgaccgccgaggaggagatcaacgagtagacactattcatttgagtcggacaatgaagtagcatcgtgtcatcaccatcacaaggcggtggcggt

SEQ ID NO: 75434 - DNA, 2448 bp, Zea Mays
cttgatgttgcctatggctttgcagaagaatttgggtgagggaagcggtgatgggaactagatcagctacttcagcaaaaggaggtactagtcccctgtctctactattttgaccactttgtttcttaacactagccttttatttctaatttacatgtactgacgtagttatgtatcctcaatctgctagcccattattttttgtcttgattcaccttgtagagtataattatacctccttttcatgtttcaaaaggcagagatgaaacaatttgccaagagtgatatttttgttctcaagcaacattatgaaaagaaattagatgacttggaacaagaaaataaagctcttcaggtttttactagcttaccttgcggacactatgctcttttttcccctgaattcttgtttgtagaaagaaatagagaatcttcaccatgcattaaccaatgtatgttcttctatggatgagaatgctcaaaaactgaaagaaaactatcttcagaagctgaatgcacttgaatcccaggtttgtacattcagctaaatgcttgttgcattgcatttctcatcatatgctaagaacacaccatttgcaggtccatgagctcaagaaacaaaaaagtgatgaggcagcaaagcgtttacaagaagatattcagcatataaaatctcagaaggtgttttttcctcaaaatgtttcttaatgcgatttaagtttttttcctgacatatattcctttcattccatgtaggatcagcttcaacaaaaggccaagcaagagtctgaaaaatttatgtcttggaaggctgcccctgaaaaggaagtaatacaggtacttgttcttaacatgttgatcatgtttatgaacttctttctcaaagatctcgttgtgatagtgctgtatatccattaattagctcaagaaggaagggagacgaaatgaatatgacatgcacaagctcttggctttaaatcagaggcaaaaaatggtaaattcttcatttttcctctttcagctttaagatagcatgattgtcgcctacaccattctgcttgaaattgtaggtcttacagaggaaaactgaagaagcagcagctgctacaaaaagattcatggagttgctggaagcaaagaactcatcacttgagacatatggtaggaagtgatgtccaatggcttcatatttttaccattaggtttcatgtgtgctcattattcctagctggttatacttttactagttttggtttcttgtttttacaggcagtggaaatgcttcggggatgcaggtatccttcgagaaatctttgttagggaatgaataaactatttcccatctgtgttctgtaacgtgtctgaaacattatttttatgtcactaggccttaatgcgagctgttgatgatgaactggaagtcactataagagcacatgaattacgctcgtattaccagcgacaaatgcaagagtaagtctttgttttgcattgataatttgtagatcctgaccttctagagttttcgttattttgtggtgcgctatatgcatgtatgagcattatttttgggcaatttttttatgatgagatagatagatttgtagttattcaattaaatatgaactcaagataatttgctattgtgctcccttgttgttagaccacttgagaattagatttgggccaatccatagggcagtgactataaatattgaataggtttgcttccttctgccatgctgtttgatttcccaacacataattctgtgaagagaaataatgggctagtagtaagattttgcactaaccataatataaattcaaattcctggcgaaaccgtggcatcattaactgtctccaaaaatactgacttgatatacctatatcaatcattcaccccttttctttctaaccttagcgacataatatgtgaactgtagttgaaatatgattaacctgagcagcataatatttatatattaatatatgtactgtaatttaaatatggtggattctttatacattttgtacaacattagctttggacaactgcccctgtttgaaatttcttttttcctccttaaaacaggagagcagcaatatccaaggaaatagcaaagctggaggaggaaccaaagcacaagatgaggtttggtgatttacatctcttttgcttttaggggttaagtgatctgtttcagtgtctctgaattgtcgcttattagctgttatttctgtagtgattgtcctcaagctatgtctcctagtgctagaagttttaggatatcagcattagagaacatgtcctcatcatcaagcgctatggtgtctatggcttctcaactatcagaagcagaggagcgggagcgggtattcaatggtaaaggtagatggtatcatgtcaggtccctcccagaggcagagaacataatgaaccacctttt

SEQ ID NO: 75435 - DNA, 947 bp, Zea Mays
cccgcttggtcgtgaggacatccggcatgcacatcgtaggtcttcaagcgtggctcaccgtcgtggaggtgcgcacgtcgaggtagcttctctctcctctcttcatcctcctccgttttccaaggacactcagacctccatctccttttttcttctgagcagggtagtagactgaactagtggagcttcgccgggaggttgatgcagtgaaccgaatcatctgggctcacggggtgacctggctacaatgcttgctcgacatgccgagccatgctagacatgtcgcgaactactttcaccgcggggccatcattgccttcgtcgtcgcccagttctacacgtgggttgacctccatgctccgatgacccccccgggcaccccgtttgtggccttcgagatcctgatttagagtacaatgaggccacgagtgggatcagtggcgttgtgtcctcggaagacctgatttgatgagcatcttagagcctccttcagcgtccgccttttggtaccctggcgcgggcttctgttttcatggctgcaccaggtgttagaatgagagggggagcaaatgagattccggccctaccctagttgtagttttcccctttttggatgttttcgtccgcgcccaacccctaagcccagaatcgtggggacaggagactcgaggtccattttatgtaaaggatgatgtaatctgggaaaaccccgccctaatggcatttatatgtgcattccctcatttattgcacataggggagtgacttactcgtgccctgcttaggggtgacatagcccaaggcctagtatgttggtgggttaggcctgcttcctcgtctgtcgggtcatctccgctggcactgagctgcagggttttgcatggcagcctttatttagtcgcgctgctctgcctatcttatctaccttgctttcggctcccttgttc

SEQ ID NO: 75436 - DNA, 370 bp, Zea Mays
aaagagacttacaaagatgaaaacctaaagatttagctttgaatagaagtgtatgaaaaaaagttatttatgtactcagttttgttgagttttaggctttatcatccttactgtgataatgtgaccagaaaggtgatcatattcagttcatcttttattcatctctcatcacgaaaccaaacaagagatggtgcagcttcaacccacttcaaccatgtaatcaaacaaaaaattgagttcaacccgtcacttaaaccaaacaagaaacgggtgactcaatcaaaaaaatgggttagtttcaatccaacccacttcgttccaaaaccaaacgcactataagatttgcacacgcaaaagcacccactccagc

SEQ ID NO: 75437 - DNA, 323 bp, Zea Mays
ctagacgaccagttgcatctttgaaagcgtgcccaagaaaagcctttgttacaaccatccattcattcgaatgtgccccatcctttctccacccgtcatacatcaccctccgatcaccgttcatttcaaaggctaaacgaaagacaaaaaacatcaacgatcgtccgtggcttaggtgaactccctattaggtaaaggccctaaacccacccaagagtgtagaccgatgcttgtgattttgtgacgtgtagcctacgattgccgcaaaatttcggcagcataaccctgctgctctccaagcgcacgcctgaacatggtgtgtt

SEQ ID NO: 75438 - DNA, 676 bp, Zea Mays
ccttggtattccatgcaaacgcactatttggtcaatatagatttctgcatacttctctgccctgtgggtggtatgtactgacaagaaatgagttgtcttagttaacctatccacaatgacccaaatagaatcgtggtgtcgggaggtgttgggtaaacccacaataaaatccatgcagaggtcctcccatttccaagatggtatgggaagaggctgtaaggtacctgctaccttgaaatgactagccttgattctttggcaagtgtcgcattcagatacatacttagcaatttccctcttcattctggtccaccaatacaaagatctgagatcatgatacatcttgttactgccggggtgcatggaaaatttggaaagatgagcttcatccaatattttcttcctaagttctggattcttaggaacaaccaatcagtcttcaaaccatagaactcccttgctgtcccgacgaaagcatttgtacttatccaccttttgtttgagcatctccttaataacttgaacacccttgtcaccaatttgtgccaggactatttgctcatgtagagtgggctctactgagatataattccaggtacctggggaaataacttccatgttcagcttgcgcaactcatcacatagagtggcgatcttagagtccatagttactcag

SEQ ID NO: 75439 - DNA, 775 bp, Zea Mays
taaccaagtattgtgttgttgtgctatcagtgctctttgtggagcttttggcatttcttcaatgaactgtgccgcgcagaatgttattggcttcttgttggctttattgctccattagttctgcagactttctcccttttgtggggtgcaaagaatgttagattacatgattatattttcatgatggcaagaacaaggtttaggaagattaggagtttcaatagaactacttgtttcgtggtgctttgaggtgaggtgtttgatcttcttatacattcatctggtgtggatgtttcaccatttaattaaaatgaattgttgaagttggtaagggttgtgcttagtgcatattacccctttataaaagagtgttgttttaagacattgatgttgatgtatagctgcatctaaattcgatggtgtgaaattgtagtgttgatgacatctatgacttgctttgagcttctttgcatgttatttcatgcttgatgtcaggttgtgtagctttcttagacacttagtccaaggtagaagttcttatgttaattaagaccaaatggacccatgttttgaatggttgtgctatatggggtaccttgggtgttttgcttggagtggtcgaaatcgaggatggattctttttaaggggggtagagtgtaatatcccaaaaaaatgttgaccaaaagttggttttggtgcgtggatgagggaaagggttgtgggccgttggatgcaaagtcagaagtcatctgaggcgttgtttctttctcccac

SEQ ID NO: 75440 - DNA, 562 bp, Zea Mays
gaatgactaagtatttatagaatgactgacactaataactataatgactgaccctaagaaaatacaaacgaatgagatgcaagtcggtatttaggaattatgaaatgacacaagtttctagttgttacaataatatagttgtcaaactattgaaaggaaagcttactttcgggtgactagatttgcatagtactagcttcgttgcatttggtgctcactttgctctctttagtactcttgttattgccttattgcttcttacaacctagtaatgtccacatcctatgcggaggtgtgagaacgagaacccgatgtttgcaacaatgatgatatagatgctcgacctcgatgcctcaagtgcctagagtcaatcatggaatcaaatatacccaacctacaagagtgcatcacaaactcggtacatttgcaagcatgaacaaaacatgaaaataaaaacaaattattctccccatacatgggattgttctcctgtacaaacataggttgcctcagattcaattggttggctcctccaatcacagtcttggtcatggcattcaat

SEQ ID NO: 75441 - DNA, 634 bp, Zea Mays
atttctcaagtccctaaaaacaatatttttttccgatatgcatcctgagtttgaaagcagctttcaaaaggaaatgtagatcatatcccgtacatatgcaggacaacaacataaggcaagtgaaagcttctcaacctacagcttaaactcttttcatgtctttactaaagcttttaagctttatttgtcgtcaaatgactttaggtaccacttaactattttcaaatctagatgttttcttgtgtagggctacaagtgtaaagtcctgttgcaataatgaagattcccctgaataactactccctacagtcacaaaagtatgtttagataagatttggtcaaacattaaaaactacaaacatcaatacctttgaagtctttttgtttggtgacatatatgataacttttttagatagcaaaacatggatgaaatatgtgcagatttgtgactaatggtttatgcaactgtggtaactaaaatgtggctctgttagcaacttagatcctagggggctgagcatctaggtctttgtcagagatgcttatgactgcttgccgtaatgtaatgactggttctggagtggccacttaggatatactgtgcaacaacaagactatggatctggtcttaac

SEQ ID NO: 75442 - DNA, 447 bp, Zea Mays
cggtcatgtaaatcccataggcttctgcagcttcatgcttcaattggaatactatcttagccaacataggatctaaacccccaatgacatggacgcactcgacccttccataacgagcaaaaactgcatgaagcacaccctcaggcatggggtaacagacctggcgtatagtgacgtcaaggacgcggtctggtgatctccgatcgcttgtgggcatttcatcgaataacttgcgagcactggtcttcgaaaccgaagggtccgtggatgccttctaccggaagtatggattaccggagcagtacttcccctcctggtcgtggcgtgctgcttgctgtggtaagccacgaccatgtcgtcctagggttggtgttgctgctcccacgcagccgcgaccaggtgttgcaccgtcgggcttgtgtggaacaggtccggaatttggctcgc

SEQ ID NO: 75443 - DNA, 1258 bp, Zea Mays
aatgttgcttcgagaattttttaggcctcgctagggataaaactttctaagatgctctatgttccatgagttccccacttccgtgccctccatttgagtgagccggtatgatcctagccgagtgacctctgatacaatgaatgacccttcccatagtggtgacaacttgtgccgtccttcccccgttagaattcggtgaaggaccaagtctcccactgcaaaggaccggtgtcgcacgactttatcatgatagcgcctcaaggtctgctggtacctagccgactgaattactgcgttcaattgttcttcctccagcacatcaatatcctctagcctagtagcttctgcttcagctatgttttcgaaagccaacctcggcgccccgaatattaggtcggcgggcagcactgcctctgacccataaaccatgaagaacggggtgtttccatgcagagcttgactgggttgagttctcaggctctaaaccacgtatggcagctctctgatctactctcctgcaagcttctcattcttgtcaaatactttcttcctgagtgcttccagtatcaccccgttggctctttctacttggtcattggctctcggatgcgctactgatgcatacttaatctggatgctctgctgctcgcagaagttgaagagttcagagctggtgaagttggatcccaggtcggttatgatgctttttggtatcccaaacctgaatattatatcttgtataaattccactgccttggctgaggtcaaagagacaatgggcttatactctatccattttgtgaatttgtcaatggcaaccagcacgtgagtatagcctccttgagcttttttgaagggtccgatcatgtccagtccccagcatgcaaatggccatgttataggaatggtctgcagctgctatgcaggtaaatgttgttgctttgataagaattggcaagcttcacatctctggactaactcggcggcatcactcttcgctattggccaatagaaaccagatctgaaaaccttcccaactagagttctggatgttgcatgtactccgcactgcccgacatggatttcatctaatagttgtttcccaatagcggagtgaatgcacttcatgaggactcccgtcgcacctcttctgtacagtgtgccccctatgagggtgtagtgggctgactgccttgcgatgcgttctgctgccgccttgtcatccggttcatgttcattttttatgtacctgatgata

SEQ ID NO: 75444 - DNA, 400 bp, Zea Mays
caactttccttgctcatccacaacaaaatcatagaaaaatgctgaatttgcctctttctttctctccatttgggcaacaaataattcagcatcagcatccttgattctctgcctaagtcctcgataatagttctgaagatcccgcttcatgcatccaatgttgttgattccatcacttacttgaagaagtctatatgcttgtgaggtacctatacttgctttatggcacgtgaacaaggtagtcttgactcgttgactaattgaacggtttgaacgaagaaatgaaattttatcaggagaaaccagcccatgattatgttgctcaaccattgaagcgatgaagtaccttttatctggagccaacttcacatatatatgcgcattacatccacatcttgtc

SEQ ID NO: 75445 - DNA, 697 bp, Zea Mays
gttagaatgtaaacatatcacggacgatgggcttactatacaaggttccccatcttcctatatgtacacgattgtggtgtctgagtaatatacaatttacattctctaatacccacaacccgcgacaaaccatcactggtgcagaaccatcctctgacggtctgacccgattagatatttcccaccctgacccaggctacacgtcgcagatatgaaggcgaatccatgcagaggaaactcacagtgcgacacataacatattgttagggcgacgaacgcggggcggatccgaagtggtgttgaagtctggcgagcgattacggtcagcccccaacttcccacgcttggcggctaaccttaacacgatctgcatccacgggcaaacactctagggacaatgacgacgtggaggtggagctcaactatggcggcgaccctctctctctctctctggttcgatgtttatcacacagtgcccacatgatgcgttagcatgggcaacagggtctgaggggatcaaagccacgacatccgcatacatatacccaagagaggacactagtatgggctcttgggacaacggttgagagaaatccccaggcggagagtggcaactatggctgatttttgttgatgcgagaggataacggagatcccgaccggcggggcccagtgtctgaccaagaacaggtcttgg

SEQ ID NO: 75446 - DNA, 436 bp, Zea Mays
cacattttgtgaaaggattgaagggggagatccagggtccagtgatggcatagttaccttctacagttgacatagcacaactacttgcccaagtgcagtaggaaatcctagagaagaataggtttaagatgaacaaacccttgttggcaggaagttggggtaggtaatagaggagaggataaaggagttgtggaagtaggaggatggagtagagataggcaactaaaggagtaccggagagtaaatgggttgtgctatacgtgtggggagaaatatgaacctggacatcaagttgtatgtcctaaagggaaagaagcccaaatccatgtgttgacaactgaagatatgactcgggtgttaactgaagaagatttgaaacaagtagaacaggaggagaaacaagaggaggagatccaacggttgtctacgcatgtta

SEQ ID NO: 75447 - DNA, 337 bp, Zea Mays
gtaaatatgaatttcaatttttctaatattatttaaatacctaaaatttaatatttgcaaaaaactataaaactttggaaactcgataatatataaatatttcttcctctcgtcgagcctgttctagatcttgtgtcctttttcgcgagatcaccgaactgcttctcctcgcaaacgacatgtcgcttgcatctgctatccctgtctaccctccgtctacccctccatcaatctcatctcgcgtcgtcttgtcatgcaacattcgtaagtgcaacctcctccctgccctcgctgtgtcacactaacacctcatgcccatgggtcaattctgcttttc

SEQ ID NO: 75448 - DNA, 493 bp, Zea Mays
gcgggcccttagaagcgacgtcaatggctaggctaggggaggcccacttctgtcctcatgggatggccccatctgtcagcctctccacaaactagaaaacctggtgtaactaggacagtctgtatttcattctgtaattatcctgttgtacaacatatttcaagaacatagtagataaccgggggtacatatgtactttaggatatctaccgccggttgccctataaatacccacatcctgtagttggacgtggcactcttgacaaagacatttgagcttctaaccatccattttgtcgtgccacctgacactcaagtgcttgggcccacagttgtgtcccaacattggcgcccatcatgctcgcttcgaaaaccaaccaatgatggctccaaataaagcaaacataagggccaaatcctctccttagaacaagctacaaaggcagcccttgctgccagcgcaaagaaagccaaagtcaccttcgccgacgag

SEQ ID NO: 75449 - DNA, 861 bp, Zea Mays
gattgaccgagatgttcccgatgatctaatggattctagctcaattggatgggtcagagagtatcaagagcacctaaggatactaaaacgaggagtcagaggacatgaacggacctgaaaaacgttggccacgacgagatcactttgcgcggcgctcgaaatcgatatggggaaatctcaaattggcgagctctggtgagcaattggaggcacgacttggtggattgggtgcttgactaccttacggacccgacgacatgctcaatttataggctccgagggcggtggcgcgtgaattggagatggcgcggtggcggtcggagagaaggagatgtactgtcgcgagagcttggtggctttcatcgtggcagactcaccggcgacgagccagtgatatagagcggcttacggtgacatggtgaagcctcatggcacgtggcatctgatcgacgggcggccaactccggtgacttatgtgagccggccgtaaagcaaaaggggtacggcggcacgacggtgagcaagtccgagctaatccgagcgccaagatttttacccatcttcgttatccatctgcgctgggcacgaatcaccgtggctggcgcgaatccgagcgcacggctcgtcggcggcgaggggatctgaacccaggatctttttcagttactgtactatgagcacttgttcagagcgcctgacagaccaaattacagcgccaagatctcgaatttttgtgcaagaacttgccaatccatccgtagcaaacttgtagccctatgatccagctacaaattgactatggcaactatcctcaatcgagcaacagatcttactcaaaatcaagccctaagttcatccaac

SEQ ID NO: 75450 - DNA, 620 bp, Zea Mays
agaatccggtacaatactctttatgctcttagtggtccattggtattcacgctagactggtcggaatcaaggttaggtgatggggggaaccgtgcgggtgtggcgagacaatggtgtcgtcgcgccaaagggcggactgccgctgtggccgtgtcagagggaatggaccatctgggggtcgttgatctattaacgtgtggatgcgatgagataagtataccgttttgatgcgagagatccgggccgtccaactcagatcgggcggactgagatagggtttgtggtttagaaatctggaccactaatctagggaataatgatcctgagtataagtgtatgttgttacgctcaattaaacctaagtcactaatctcaaatcctatggttgtcgttgcacatgggtttggggaggacccagatctattcctgaccgcacgcgtgtgatcctgcggtcgaaaaccaagaataccccttcgcccggtcggtttaaagaatgagcccctcggtttttagggaattaacacgcggtccatcgcgggagagttatgagtcttggaactatttacatagtaaaccatgtacttattagtttttatgcgcgcagtccagagggcagtgaa

SEQ ID NO: 75451 - DNA, 342 bp, Zea Mays
ttaattacattgttcccgcttcaccaattgttctcaataaagaagaggaacaacatgattcttaactggagatggcaccactgaattgccaaattaaggcgctaaatctactaaagccatattcaatacttttgtagggttgcaactcatgttctattggttcaatttttcaaagctcagttaaataggtggtgactttggagaaaggagaaaactcacttttcggcctctgcataaagaacatgaatacaatatgttaacgtttttgataactccccggagtaatgctcgctgaaataagatgagaaatagatccatggtcaaaattatagtaaccacgat

SEQ ID NO: 75452 - DNA, 804 bp, Zea Mays
tgaatactcttgttgtgataaatatatgacacacaaaaataggagatcaactatattctccatgtatacatttttgggcattacaaatcctacccccttaaaaagaatctcgtcctcgagatttgtatgaaaagaggttcaaaaagattggttgtaattcagcttttagtttataattggttcaaaaatccagagttttttttatatatatagtcaatagtgggtaaataggagggcgtaggtatctagctacttatcaggtaggatataaaagatagataggttagggcaagaatatcctagggtaagaaagtttacggtgagaaaggactccttgttgggtggtaatgcatctgaagatcgagtttgacttctctccttccttgacgtggttgatcttctttggcctttcttcttggagttgccatccgagttaaggacatatagttaggatagccggggtacacgaggtgggtaggtttgaacagagtttttactttgctttttgaacaaatggattaggcaacctatgatgtaggttaggttgttgtttacgggcgagttagtccaaggtattaatttagggtaagatatgtttatagaattatggcctaactttttttttgtcgccaacattatctaacttatttaagtaactcaatttggattagatcatgttagattaggtaggatctagattaaattggaataagataaaatcttttcaagataagatgaatctattaagataagagagaatcttttaagatgagatggatctattagacttgatatatttttgtg

SEQ ID NO: 75453 - DNA, 628 bp, Zea Mays
cagactcgcgcacaccattttgcctcttacctaaggaaacaaacaaaccgaaagcatcagcttgtcatgcagataggtggttttgttgcagcagcacaacacctcccatcaatgagattcttgttgtcgataccgtcgacgagttcatttcttcacattgtttggttatataaagaggcctctacagccctgtcgacaccattgaagcagttcagcatctgctcttctcttactttctagagagaaaaatagcatcacagtttccattactaccctggcttaccatctcagatctgctagcgtgccttgtagtcctctctgcaacgaggttgatgctcataagcagccccagagcgtgaagacaacagtttcttcatcatctgtggccattggaaccatgtgtgttggtttcagaaagctcggaggagtctacaactgcatctgcgagctggcgtgcttgcccagcaaccaagttacacaacagaggaaaacagtggagtaagagctggaacgctcacttgtcttgctcgttctctgccatactatgcaaaagagctttggagaactctagatgaacaccatggacatgcagatggctctcaagagaggagacggtgcacttgtcaac

SEQ ID NO: 75454 - DNA, 564 bp, Zea Mays
cagaagttgagggataaccagctctatttcaaattctgcaaatgcgagttctggttggatgaaataccttttttgggcatattatctccaatggaggaatcgcagcagaaccagccaaagtaaaagaaatagtgggatggaagatacctgagtcggttactgagatccgtagtttcttgggactcgagggatattaccagcgtttcatcgagggattctccaaaatagcaaagccgatgactttgctgttagagaagaggaaataatttaagtggattctagcctgctaggatagtttcgctcatctgaagttgaggttgatgtcacccccaatattagtcatgccagatctgcaaaaaggatttgatatatattgtgatgcgtctcgtcaaggattgggatgtgttcttgaaggatatgtcattgcctacgcatctcgccagttgaggaaacatgagttgtactaccccacccatgacctagagcttgtcaccgtcatgcctttaagatctagagacactattgggaaccaaatgtcagatctacacagaccacaaaagcccg

SEQ ID NO: 75455 - DNA, 380 bp, Zea Mays
gttctataataaatatatggaaacgtaacgggctaaggttagccagggttatgtcatcccaccacatgcacgtccaaacctagccctgcttctcttggacctgatcgcgacaccctcgatgttgcatgttcggtgttagcacatcaacgtacaatgttcctcccgtaattttggattatgtggaggcacggctatgaatactacattgatcagccacaaaggaggatgcgatcgtgatcgactacacatcctctccatcggcacgcatctacgttggatgatcgttactccaagtcttcttgtactgcattgcgcgtctagtgttaatgatctattatttcttacttgcaagttttctaagtaacgcaatagatgtgtct

SEQ ID NO: 75456 - DNA, 499 bp, Zea Mays
gaaaccatttattcctcccataaaaataataaggaaaagaataaatattgttatcataaacagtaaagtttagattcacattagtattaattttgacacttggaatctgaaatctaaaatagggatttgaatttggtttaaatactccaaattggaaatagaaatagcgaagaaaaagaaaagacagaagcaactgctcaggctgaatcctcactcgtggcctagtgccattcttccctagtcggcccattcacctacctattccacccgcgcggcctagcttttactcgtgctatatggcgccgacatgtgggcccggtcggccattctcccacgtgtgtgcgcgtatcctctaacgctgtcttgtggggacctcatgtcagtcacactcacccgttcgtgtcgcctacacatggggcccgctggtcatctgtaaacaccctaaaatcatattttgggtaatcttactaatctatcaaagttcgtcctaaggtttaac

SEQ ID NO: 75457 - DNA, 422 bp, Zea Mays
atggaagcagcaaccatcatgtcatgacgacaagggtgacagacaagatccttatcaaatttcaacttgggcaatccttggattaggccaagtgagtttagtctacacaaaagatcaaatctcaagtgacctagcctcctatgccacttacaaatcaaagaggaggatcctaccagaagacaccgagaagggccaaaagaatgtgaaaaaatagcactaaaaagtcaaccaaaaggggaaatctggcaaacaagatccacttgtgcatctaattcccgagacaagccctttttaagtgcacttcatagtcatcctcacgagttgtgaaggagaaagcagattgaaatcaaattcaaaaccaaagcaacatccttgaggacaaaactctagttcactcgaatggagccacgaggacaaaaatc

SEQ ID NO: 75458 - DNA, 353 bp, Zea Mays
gagaacttcatgaggaaagccacagcaggtgttgagtgaaacaggagaactaacaaggttgataactgacaagggcaagcagcatgtggcacatatgagttagtagcttagtatacctgccactgaagagggtttgggcacaccagtacttccccacacccaaatccaggtcatcattgtgcataccttgttaccctccgcaaactcctccatacacatttgcccaaacccaccggataacgatcaagcaataatggggaggtgcttggagttggagttccctacactagtgggtatacccatttctaatggttaaatagttttctacccataccaatggacctcactatcac

SEQ ID NO: 75459 - DNA, 639 bp, Zea Mays
gcaatctccttttactggcttattcatacttaattcggccacaatctcttctctagacgaggacaccaacttcacgattctcttatcacaattgctacacgcttggtacttatcaagccaattaattcctaggaagacatctatcccatatgtaccaattactattaagttagtagggaaatctatcccccttgtttccacacttacattagaacatattctatctgctttaatttttccatcaactgaactcatctccattggcggtgacattggttctactaagagattatgtggttggccatggttgcctcctgcctgctgtggtgcattttgccttggcagtgcgctaggagtctagtgttgttcttgtgccatcttcttccgacattgcatcgtacaatgaccctattcgccagagttgaaacacccttttcctccttgagatgacactaaatgtccactctagttagtcgttggggcagggagtcgagttgcttggttgacctgacattggtactgattatttcctggttggttgctatgatggtgagtctgctgctagttttgatgctgattctattgctagtatcccttggaactaccttgcttgtactgctgctgatggttgcttgagat

SEQ ID NO: 75460 - DNA, 494 bp, Zea Mays
ggatctgctccagcaaactctttatgtttcaatttacaggccttggcttcttaaggcaggcaggaataatttcaagtcctttaggattcacaggaaactgatttcatttctcactagtctgaagatattggatctaatcacacctacgtccaaataaccaatacagttttgacagtggtcgtggtactggtattagttttactatgtgacctgtggttggaatcagttcactgagtcaataaaccaatgagtcatttcagttagcgacctcatgtagtgaatcagcacggtaaaaggcaagcaatttgttcttctctttcgtctagtttgcacctctctcttttatcttccctcttgctacctgtaaaataataaaaccagagtgggatgcctcataaacggccagatttgcataaacaatttgataacccccagcactgctaaatagtgattttgccttcacaaagtcaggacgattatggttttcagtatag

SEQ ID NO: 75461 - DNA, 659 bp, Zea Mays
tcgtttgtggagaagacggctacggtcgatgctgcagctttaacatggtcacaaccagccttctccagaattactgcaacccctcaagcgctggcgaaggcacaaatgtccctcgatcactgaggatctcttcaaaagctttggcttctccgcttatccaatcaataacaccctcggggtcacctcaaatgagattctctttgtaagaatatgcacccaccttgacaaagctagttttccattttctcacgcaatccaaggatttctcaaagcatctctctttggaatcgtgaagctcctcaacatttttctccagcctagtgtttgaccattcacttatttcttgcttcacttttgcaagttcaaaattttcattagcttcggcaagctttttccgaaggtcttcaacttcggctttatgtgcttcggtttgagcgttatatttcgcttcgtctttcttcactttgtccaccaatgaaagtagaatcttatctttctccaaggcttcatttctcagcttgttaacttctgaccgaaggttgccgagggctatctgacagctttcatcttcagcattcttctgcgccctcaaagcgttgctaagaattaagccctacaaaaagataggatgagcacgagaatacaagacaagataatct

SEQ ID NO: 75462 - DNA, 487 bp, Zea Mays
gccagcagttgggtaacgacttcgtccacaatagtttcggccatgttaataatttctgttgattcctttgcctttgggtcggccagcgactcgaagggctctaggggaggagatagttcagctgcggtagaaaacgtaaatcagttcgaagtcataaaaataaacaacaaagttaaaaaccactaagtaatacctattcgtctctcaagctccgcagccttttcagctgcttttattgactctcgagtgtcgtgaatatctttttcgtttttctttattatttcatgggccattcctcggccgccattttcccatatgtcagtgaaattttttccacctattaagcttgcttcgaccgaggggtccttcgtatcatcaatgcagagggaagctttggccagagccaaggttttaacatgctcgcaacctgatttctccaaaatagctgcaatacccctcgcaccagagaaggcacagacgtcccccg

SEQ ID NO: 75463 - DNA, 857 bp, Zea Mays
acgcttcataatttatattccaccaccaccaccaccctgagagatagttatagggttcacattgtttgttgcctttttgtctctgttttgtgctaacaatgacaggaccaaagaatcaaatggacaaggacaaggggcttaagcttaacgacgatgagtgtgtctctcagctggaattgaaggagatgacgcgcgcgatgactgaagcttttaaaaaataccaggactctgcagcgacatcctatgagcagcttgatcgatgagttgatgaacttgttacacgcatggacgtactagaggctcgtcccccaccaccaactccagccccagctcactctcctatggacgacgacgatgatgacgacgatgacgacgatgtttatgcaccgctgcgacaacgcctcgcacgtaattgacaagatatgtgaggtaatggtagacatcgtcatcataatcctaaaccataccatgatccattttctaagattaagttcactattccaccgttgatgggttcttatgatgctgaagcttacttagactgggagatgacagtagaacaaaaatttaattcccatcttgttcttgagtagcatagggttagacaagccactagtgaatttagagattttgctatcatttggtggaataaacttgttaacacacatgctgcaccacaaacatggaatgcattaaaagaggagatgcgagctcgctttgttcccccttcttatagatgtgatcttcggaaaaaattgcaacgcttagatcagggagacatgtggtacaagaatactaccaagagcttcagaaaggtatgctacgatgtggggaagttgaggatccggaggatcaaa

SEQ ID NO: 75464 - DNA, 1426 bp, Zea Mays
gtttgccttttaaaatcgggtgtgacaactgcgatgcttggttgctgcacctcctgaacaaaaactccgggtggtacctgagcccgactagaccccagtttcgaaagtgcatctgttgctgcattgtgatccctttccacgtgatggaattccaaacctttgaatttgtcctccagctttcgcaccgcggcacattagttgtccattgagtctatggagcaatcccagtctttgttcacctggctgatgactactagtgagtcaccatataccattagtctcttgatgcctagtgatatggcgatgcttagcccatgaattaaggcctcatactctacgacattgttggaggctgggaacaggagctgaagcgcatatttgagttgatctccagggcaatgaaaagaatttttgcccctgtccccggtagccttaacgagccatcaaagtacatcctccagacttcagctgtcttagggttctctggaacttggtgcttggtctactctgatatgaaatctaccagggcctaagtcttgattgcgttgcaaggtcggaactctatgtcatgagctccgagctcacatgcccacttggctattcttccaacttcttctttgttgtggtgtatgtctcctattgggaatcccgtgactactatgactttgtggtcgtcgaagtagtgccagagtttacgagtagttagaagtactgagtatagtaacttttgaacttgaggataccttatctttgagggcccgaggacttcattgatgaagtagacaagatgctgtattgggtatgtgcgcccttcctcggcccgctcgactaccaatgcagtgcttactacgtgagtcgtgcaggagatatacagcagcaggtcttcagctgactagctggctgtggcctggcgcggtggcttgagtaccggcggtgtggtcaggaatttctggagtgcttccagggcttctgcggttcactagaatttgtccaccttcttgagtagcttatagaatggcattcccctttcaccgagccttgagatgaaacggcttagtgctgccatgtacccattgagcctctacacctttttctgtgaccacggtggtcccatccacattatggcttcaattttttctgggttagcctcgcttccttggtggctaacgatgaacccaagttgcttcccggttgataccgcgaacttacatttttttggatttaacttccagcggtagcgcgtcaagctgttgaagacctattgtaaatctttgatgaagttttctaggttttctgttttgattaccacatcgtcgacataagcttctacatacttaccccagtggtcggctaagcatgtttggtgtaacaccccattgctcccacacaacgagtgttaccaaagaccctccccacaaactcaaac

SEQ ID NO: 75465 - DNA, 375 bp, Zea Mays
ttatcaaggtatcatagagtcaacactgcactagagcacccacgcaagggtgtctctgcccctttgtctacgtaaagaccaagtgttctctatggttggttcttcattgtttcagcacaatgaaccactcacaaccatgtgcaatcttgagttgggtcacccacaagctcttcacccgtctaggtgatatcaatcaccaagggtaacaagcactaactcacacttgacatgaataattctaatgagggtagtggatgcacataaactactctcaatgcactaatgaggccgctaataacaaaattatcaactttcaagttcctcactaggaaaagacactttgtcactcttaagtggttccttcaataatctttt

SEQ ID NO: 75466 - DNA, 464 bp, Zea Mays
tctcgcacccgttctgcctgaaatacacacaacaccccaaagagcaatcaaattcaaacatgtgagcatgtgccgcccgccaccataagcaataatgctacaacttgcaataggtattcaatgctacaacacaaaaaaataaaatttggcactgattggaatcgagaggggcgacaagctaaaccctacccgctatcgagaacggacaacaccaggcaccgcacgcaggcatcagccatgacctccacgacgttccacatcccagctataattgactcgatgacctcctcctgccagggttgaatggaaaatggaaaagtttcagttttaatctttgtgctcatattgtacataagggaaaagattcagaaagtgttgtaccaagcattatcaagaggaattgtagtggaatatggggagcgtccagggtagataggctcaccctgtcgaacacctggcgggcg

SEQ ID NO: 75467 - DNA, 549 bp, Zea Mays
aacaacaagaaatgtatgaattcaccatataactcaaaagagtatgcaacaagctttatttcatttttcataaaatcagtacctcaatcccatcttggatttcttgaagacatctccaaaaggtagcaatttcattattaccatcacctataaaataacaatgttagtgggaaagcataacgaatatggtggttaaatggcagtatggtacatgtataatagattcacctttatacttattctgcagccaatcttgcatgcacattaaggcctccaagatatccgacgtaagatgattgtggtgctcactaagaacccttccactagtgctaaatgtagattcagatgccactatggtaactaggattgcaaatatgtcttttgcaaccttccacaaagtgggataacgtgtcccagctaccttccaccaatctaggattttgaagttttctatactgataggaaccaactcatcctccaaatacctatctaattcagacttaaacctcattgttgtatgccttctactagcaactcttacactaattg

SEQ ID NO: 75468 - DNA, 1283 bp, Zea Mays
cagaggggtcgaccggtacctccttcatctccttggaaaacttgaaggtgttagtgctagccttggggcattaagggtgtcctggggcatgtccttctataggtttgtcgactcctcggtcgtcgccaatgatgctgcaagctcgtagttagtgcgctcgcacttgtaggccaccttgatggaggcactcgtagtgatgactctgtttgggtcgggcatcttcagttttaggtaggtgtagctcaggatggccatgaacttgtcatatcatggcctttcaaggatggcgttgtaggacttgaggaagtctaccacctcgaaatacagtggctctatgtggaagttcgaggggtcgctaaaattgatggagcagagtgatatgctcgagggggtatgcttgctggtcagatatgatgccaagcaatggtgtctactgggttgcaactcggtgcgtgcaattcctagggaatcgaaggtctcaacgtacatgatgttgagcttgcttcctccattcatgtgcaccttggagaggcgcttcgtgcccataatgggctcaacgacaggagggtaggtcctatggtgtgggacatactttgggtggccgcagtggtagaaggtgattggtgtctccaaccaccagaagtatttgggacaacggggttcatggcgtgtacctcccggcacgccatcttgaggcaacacttgtcggcgtatgcctcggggctgccaaagatcatgaagcacctcattggctcgaggaaattcacagcggtggtgttctgctctaccacttgggcgatatcctctggctccaccttcctacttgggggattgttgatgaagtgctttaggagctcgtactcatggagcttgtgacggactaagtagttgtggctttggcatgatgcgtccatcaacttctgaaagtggtcaccctcggctttcacctgttgcttaggtgggcgatctatggtgttgaggtcacgtccatcgtgttgggcatggttgccctttcgacgcttctcatggtgctctcgatgctctttctttgtgctgcttggcttgcttgcatcgcgtggggttttcccatgcaaaaatggcccttacgacgtcctccccatcggtaaacttggtggtgatatcgacaaggtcttcagtggtcttcgattgatcacgactaagctcgtgtaggagcgcctcgttcgtggtgccgtagttgaaggcgctcacaacatcggcgccggtggcatcgggtagctcattccttttttaggaaaatcttc

SEQ ID NO: 75469 - DNA, 447 bp, Zea Mays
ggacggtccgggcatgtgcagatcggctgatttactgtcgatttgcggttgctcagggtatatgtccatcggcatcccataaaggggttgtgactggtcgtgacaacctatagccgatgtattacgcgtgttaccccctaattcaacctcgtgcgaaggaaaatttgcaataatagatttatcaaatgcacgtactagtctcctataatcgttttgcatacccctatgatattttgcatttgttctcgttgttcatctacataattcttaagagattgcagctcatttgtattacttacattggagatatctggtgtgggtcggagcgaggccggatccgtctcccattgtcggacgactttattgttctgtccaccttgaagttggccaggaacttcgctttcgcctcttgaatcagttgctccttatgctcctcgaactggagct

SEQ ID NO: 75470 - DNA, 323 bp, Zea Mays
tgagcacgaagcagagtacgcgatggcaacggtcgacggaggatgcaacgtagttgatgcgggagcagacgtttacgtactccctctagtcctccttgagcagcaggtgggcttagatgtggagcgtcatgtggattcgacaataggtcgggggaggaagaaggtctggcctcagggtggtagtagattcggttggagtggacgaaagtgaaggtttaggtgcggagatgagagagtactcataggcatattgagtgctaggggtggcttctattttgcacttcaggatagggggcctgctggagctatgaacagttcatcgg

SEQ ID NO: 75471 - DNA, 342 bp, Zea Mays
cggggaggaaagttctaggggtgctccggggtccgcgggccacctgaggcgtcctcacacggtgtagagccaattaaggatgaagaaggtcgataaagacaaatactaatgctagattactctactcatagggcaagaaagtaaaggaaatataatgtttggttgattggttcgtttgtcacgaggtgcaatcggtcgtaccccttcatatttacacggggaggttgggacccatacctaggcattcccaacagaatccacgtgattagttgcataaacacgcacggaaagtgaaaagtatcttgcctcatctgatctaatcgtggaccgtccatgtgggat

SEQ ID NO: 75472 - DNA, 489 bp, Zea Mays
ttagcttcttcggccacttccttctccatagctatgtcaatatctggatattcttgctcagccctttcctaagttatggcaggcttcgtctcagcaggcactgaaggcccagcttcgtttcagtatgagccacagcagctttggcaaacttttttacagaagtaggagtcaatgctcttgttgtctccatgatggcgtctcacacgctggccattcttctcctcttgggagttgtggcgggagctttttcaaccttcggcaattctgcttctaccggcgggcttagaatttctggcagcactattattttttctaactctggctttttggtcgccccatcttcggctttgactagctcaactatagacaccttgcacactatagtcaattcctcagcgctctgagcggcgggagcagcttgttccgcttcggcagcagaagatgtctcttcaccaaattttggcactatggtcgtttcaatatatcttg

SEQ ID NO: 75473 - DNA, 320 bp, Zea Mays
gatggcaattgcttttgcaatatttatgagttgtcctactagacgaaggccactagaaaagagcaatatcacaataactttggatgttacaccttcgattaccgatcagacgtcagatatcctgtgccaaccttttggaagaaatggccgggcttgtggatgaagaagtggttttatgtgaagaatgacatgagcgacagaaatgatgttaaggatgtaatgtagtggcccgctcgatcctgcttcggttaaagaggccagctatcgtgaacacagaaaaatctcaagcctgcctgacaacgtttaacgttgtgtgtggt

SEQ ID NO: 75474 - DNA, 398 bp, Zea Mays
ctgcaccttcaataaggtttggcacattgaccgtctcaatgcgtctcggtctatgtgtcaagaccttcttcactttctttgcctttgacgcactagaagatgctgaagcagcagttttcctttttctcccgtgtttccaaacaggaaaacgataatcagggtagacaaacctgataacatcgaataccgtattcaacctttttctccctcgagcgccgaaggcgactgtcatagcttcgtcttcagccctcgagtaggctccaagcagcttgtcactagttgcctctatagcatcttgccagtcatcgtttggttcatcaaattggcttttgtatcgaaagatatacttgagatagaccaagccattttgactggagccagcagtagcctccttcggc

SEQ ID NO: 75475 - DNA, 392 bp, Zea Mays
gagagatggaccggaccagaccagaccagatcatcagacgcacgcgcgaatagcaaagtacgacgtgcgtgattgtacagcagaggtcaccggggagggggaaggaaggaagaaagaatcgctgcctggaccagggggcagggccatgccgcttgccgtcccaggcaggcagaggcaggcagggctgaaagctgaataccagtcgattgatgtgcgggcagagcagaagcgttgaccttgcccctttggaggggcctaccgcctacgtcgttaggtgaggccgacggttagcagtggcacatcaacacacaccacaccacaaacgctactactgtacatggcatgcattgcagccgcacacaagctgacaaacgctaggggctggccgggag

SEQ ID NO: 75476 - DNA, 352 bp, Zea Mays
atcccctggtagtgtcaatcatctctcgaatatgaactcgagtgatgtagtaattgtaccaaggaggcttagtgatacactgcgtgcagatatagaggggcctaatggtgttgcccaactcttgcagtacatcttagagaaaggtagggaagtatcctagtttactcagataggagtgaatctcgaaaacgggctccactacaccatatccaatcccctgatcaccaacagggttgacatcttggttgacatcctcattgtagtcttcgttattgttgttctcgtggtggttctcttcaccaccatcatctttttaatctcttcatcgctatgatccttcgcatcatcatcg

SEQ ID NO: 75477 - DNA, 456 bp, Zea Mays
cttaactagtataataatggaggaattaatgaaagactagaacaaatgagataaatgttgatccttgtgatgttgtgtttgtgttggttaagtatatgtagtgttggtcgtgttctagtggtgttgaattcgtgtgctgatgatgagtagatcgctagcgcttctatatggtcgtttactttatcttgctagtcagtgtttagttggctaccatgtggctcttgtaatacccaatttgcaagagagaatataaaaggagaagaaaattttatttcctttatttatatgtgtgggttgaacctatttgtcatcacatgtgaacaccatctttaaaaacaattaataaaaatatataccactaaattatgcatcatgctgggatttgcgcagacccttttgcggcgctaatcttacaaacgagccccttgttattttaaattcaacctgccatcctat

SEQ ID NO: 75478 - DNA, 607 bp, Zea Mays
gtcatggaccacaatcgatataggtagatgttcgcaatctcatcccacagtacaccaatcaaaaatgaacatttgtttagttaatcgctgcagaacgctccccaaaactcgatcgacaagcgtgttcgacgatcgatggcttcaagcgtatgctcttctaactctttgctcggatatataattgggacgagaatgctctttatctcaactcaaccgataagtgaggggtgttcccgtttgcaacgaattgtggatgctcatgcgctaaaaatagaagataatggcaacagtttcgaaaagatgaaaggatggaataattgtcgtaatgtacgcccatcacttcatccattataggcccattacacctgcattaatctatcactttcctcctccattaatttctctaagtggtaaacaaacacaccaacattccagccacaaaacacggtaaaggtcacatcacagccaatgccctaaagacaatgaccctcaaaacccttggacaaccccgaagccctcaaatagtcctaacgacatggatggccttcacgtccctagaggccatcgactccctcataggccttgagagcctcaaggtaccctgatg

SEQ ID NO: 75479 - DNA, 291 bp, Zea Mays
aggaaatgcagttgggagagttacgacgacaaaggagatgtgatgcgcacaataaagtccaagagactaatgggataaaagatgcgttgtggatctcagctcgtcgattcgtacattaacgatcgcatacgcgacatgcgtaggtacgcgaaatctgcccattttgacagcccgatgcgtgcagaacagaggaggttgaaggcggcaaatgagaagagagcacatgatgcaagagaatgggaggcggctagagccaagaaacaaatgttggataatcttgctgatcgtctc

SEQ ID NO: 75480 - DNA, 805 bp, Zea Mays
taaggtattccgagagtggctcgggagtagtgcttagcagtgagcccttgagatcttagctttgttgtactcattccatcgaattatataactgggtttttgccaggtggagtttatgagatccatcccttaattttgaacgaggcataggcctttcaggtacatggtctagaaagtactaggtcagctattatggggcggtggaaggtgtaggcttacggtacgggaccaagctaagcggtcacctagctctggaccacccacgagaatgtggagttttcctttacattaggtgccagtcatctcatgcctttgttcagtattaagtggggacaaaaactgagcatcaattctagttatataacctagatttcattgtaacaacgaagtcgaggacctctagaggcagtagaaagagaaagcataccttggccatggacttgattgatggatccaatttcaccgtgattgggctaggagcgaaacctttctttattttctagacatgcgagatcttgcgtagagatccagaagaggtccatgtttatatgattggctcttactaggctagaccagagagggcaccagagatcgagtttatgcgagtgacctcaccagactatgaatcgtatatgatcagaccatatttgtggggctggacccctaccgagatgttcctgatgtgaacacctccaactgtggttgtcagcttccttctctttgtccctttttctagagttctagtgggttaggattcttgaggcttccataagaccagggaccatcctatgacatggttgaggac

SEQ ID NO: 75481 - DNA, 1010 bp, Zea Mays
caacttcgtataaaattacaattgtctccttaatttctatacatgtaaattacaaagttttataagggcatcaacatcctttccttcactatacgtcttgtcctaaccttgagggtctcactgtttgtttttactggttctttgtcatgcatctgaaccgtgaagctgaagcttgctttgttctagtgtacgtaccactttccaaatgaaggtagacttcatcaatcctttggtataccagaaacaaacttggaaaacaattagaaaatcaatgtttttaggaccttcgaccgtagaggacccccaaaagtagcctcttgcgatatttgtttatttttataatgagctcgaaccgcggaataaacacaggcctcatgatggaggtctgaaaaacaccttccctgagcttgttagtgaaaaaaatgaaaatatgcttttataagcatctatcatagagggtacacttgcacgatggattgcatgtagattctcgaattttgctcctttttgtataaaatgggcagagaccctgacaactaagaatgacattcattgcttttgccaacctgttgcttcccttttctcttcctttgaagctctctttagctcacttttccccataaagcttcgtgccctgctaccttcatagctccgcaaattgtcagagagggaaaagatgttaagctcgccattatgatgtattcggatgatgcagaaaaggctaaggccaaaaaagttgttgaagacattttgactagtctatccaaaaaatccgacgatactgaagagtttgagttcaaagaggatgacaatgaggaccgaccatcaaaactgagccacattatgcttcaacaaatcaaccatgatgaggggccatattgaggtcttgaataatactaattaaattagcgacactactattgttaggctcagcggagaagatactatccctctgctagagtagaatgaggtggtagtattctcaagctttctgctatacctccatgcct

SEQ ID NO: 75482 - DNA, 605 bp, Zea Mays
ctcctgatcagttgcagcttggccctgctccgtacaggaaggattcttagcctgagccctacagctataagcccgggagagagctgtgcttgaaaggagatgtataaaggtcagttgtttatatcaggtcagtttaatctacatcctgagactgagagctgtattcatcactagatcgaagacttactaacccaaatctgacaaatggagcgactccattcagggcctggagtgctgaatgttttctgaaaacgacagtccactgagccacactcaagcgtcgagacagtcatgtcatgtccaagcaaatcgttcagctacgagcctacgagtacgagacagttacaccacgcccaagcataaacgaccatgcgctagctgcttgttccgtgctggtagctctggtcctgttgactgggctctgatcctgcgaccttcaggctttcggctgtctgctgcgcgggtttcgggagtcctgaaatgcacgcacgctccaaatgtcacgctcgattcggcgagaagactctgtccactatacaaggagggtgccacgggcccacggcacgtgagagcactgcattgttcatgggaaatggcaccgatgg

SEQ ID NO: 75483 - DNA, 578 bp, Zea Mays
gatgaaaataataaaatttcttgcaggaaaatagtggccgagaagacttctgatgagtgggagactctgaaaattaccatcactacctccaacactggggggcaggtgcagccaggaaaccaggcgctagcgcctgttctgcgcatcgcggatggtccgacgcacagatgcggacggatcgggacaccaccagacagtccggatcattccagcggacggtccgacaacgcccaggaaccacgacaaccatgcaccttcaaaccacgacgaccggaaataggtacatggaaaactgacacattaaagtcagttggctggctggtcagatctggcccaaccttcgatcaattattgtctaaatatgtaaaaaagaaggcagtcccaagtgaccgccagtgaagcgatctcgctcacccactcagaagcgacagcagataagaccgattggaccacctcaccaattggaaaagacggaaggtcatactgtccagttgagacttaacgtgcctgcatggacacctccactcacatatctacctatgccatatccatatatatacataccaccaccatatgcc

SEQ ID NO: 75484 - DNA, 399 bp, Zea Mays
ggaaacaatatcgacccctcggacttgctcctatggatagaacttacagagatgctccagaggtgaggaagaggtactctttcagtcatagcaagatagtcaccccgggtcggcgaattcccgccaccttgaagggtccttcccagctgggggagagttgcggagcccttcttggtttggtacttgtcgtagggttaggtcccgaccctgggttcccatctgcatttgatgagagagtcctcgtcctcgtgttgtagccatttctgtcagggcccatcggaggtccggacccgtggggagtccaggagggtttccgggggaaggcaggcttcggccccgtacaccagggagcacggggtccctcagggggtccatctagttatccccactggagtagga

SEQ ID NO: 75485 - DNA, 716 bp, Zea Mays
gaaggatgtttcgtgtaatcttaccttctcacagttccttgcccattggtacatacaatctcctagttattgaatgtttttttctgaattatccaactctatagcttgttggactccaatatagatgttggaatataattggccaacataggaactagaatgggccccaaagaactatgatgaatcaagacccaaccacttccctaagtagtagggtgagagagcttccacgggccccctgcatccaaccaagctaaagcttcaagggcatccaagaagaggaagaaattagaatccactaggaaagcccatgaaaaagccctaagccctagtaattattgaagtcaaagattctcctgctcatcgatcaaggagtgtaagaggtctaaaacctctgagctaccaagaagacaactgggaaaaggaggaggacaaaaccactgaaccctcaaatcgtccaatgactcctcactcggccctagaggctaaagtccatgaggaaacatcccttgcacctaagaaaagaacaaagatatctacaaggtacaattctttcatagccattattatgaataaaggaatgtatacaaaagaaaataatgtaaatgttactgtgttagggcattgacaactctgcccaaagaacatgtggctccaccaccaccgatggctcaagcatctaaacaaatttccatcaaaacgactccttcagtcgg

SEQ ID NO: 75486 - DNA, 958 bp, Zea Mays
cggccgaagcggtatccatgaatcacatctatcggatcacagacgaacggcccagattagatccatctttaagtgaaccgttacgcgacatggaccacacgatctgaatccaagggtccggaacccggatctaatcccacccctccttagccaatccaacggcttggattgctccaaccgaagcggtacaatccaattaatccaggccgcccattacgcatcgacggtcaccggttgtcttcctcaatccgaacgcagcgtcacttctttctccctgccggtccgtggtggaggcgccctgttcaccgacgaccaagctcaccggagcgcggtgcctgcgtacaaatccacacacggacccgtgctacacatacggcggagtagggcgagcacaagggaagggaaaattaccagcgtagaatccgtcggagacgtgggccgcaacacagggcggaagctcgttggtagagaagttcggcgagaaattccttggagtacagtgtataatcccgtgggattagggcacgcgcaccttcccaagttctcgatggacgcgtttggagccttctccgtggctagacgcgggtgaactgcgacaaccacgatggtggccccgctttcctttctctctgtgcatggtgacggagctcggcgatttgttgatgcgaggcggtgctagctcctactggaaggggaaggaggaatacagcccgccaatatatatccctagaggatgaccggaacgccataatcgcggcggatttcacgggcggaacacgccgatgcctacgcgcgccaagaaaatcggaacggagattggcaggattttggaggggataaatccgatagttgggtcccacctgtcatcaacacaggctttgggagaggcgcggcgtctgtgtctgcggaacggggcccaagcgacagcgtcatcacggacgattcacgcgcggaatgg

SEQ ID NO: 75487 - DNA, 613 bp, Zea Mays
gatctacttcccagcaagcttctcgcttttatcgaacactttctttctgagtgcatctagtatcattctattggctctttccacctgcccattagctcttaggtgtgccactaatgcgtacttgatctgagtgctcctctgctcacagaaatcgaagaactccgagctggtgaagttagatcataggtcaatgatgatgctattaggtattccaaacctgaacattatctactgaatgaactccactgcctttgctgaggtcaaggaagctatcagcttgtactctatccacttcgtagatttgtcgatggcaaccagtatgtgagtataccctccttgagctttcttgaaaggcccaatcatgtccagcccccagcatgcaaacagttaggtcacaggaatggtcagcagctgctgcacaggtaagtgttgttgttttgacaagaattggcacgcctcgcacttctggactaactcggcggcatccctctttgcagttggccaatagaacccaaatctgaaagcctttcccaccatagtccttgatgcagcatgcacaccacacttcccagcatgaatatcatctaatagctgtctcccggtagccgaatgg

SEQ ID NO: 75488 - DNA, 831 bp, Zea Mays
tatacccccaaatttagggtgttacaaccacgcgtgcgagtcaccggtggccccgttgcatggactttacctctcggcctcttgtccagcgcttgtcctatggtgggttaccctccttcttctatggcgaagccctcggttgcccattgagtttatgagcccattcgtcagcggtgatgtagacgtcgacctctcggaagagttgcttggaggtcatcggggctttttgaaggatagcccggatgaatgcctcctcgtgggacccttgtaagaagtcatcgatcatcatcgcctcggcaatgtcggggatgcagttcctcatggagagactcgtcgttgttgtgcctgatcgacttgaggtcccacggctgagcgggcttgtcggagggtgattgctagttggtgacaaagcggtcacataagtcaacccagcagtcaacacagtgacaggggagatggcgtagccactggagcgtgtcctaccccaccacgatcgggaggtatgccatcatgacgtcttctgacgccctaacagcccacgctaccattgagtatacggctagccaaccctcgatggtctagcttggcctcatacttgtcgatgttggagaccttgaagttgggtggccactggactgccccatagtcgaggagtataggccgagatcctgaacaccaccgggcttcgtgacggtcttcacgggcatggttatggtgacggtcccatggtggcgacgggcaacctgatcttctagctggccccaagtagaccgatgtggttctgggtcgttcaaatatgcggtgatgtagtttgctctgtccgtggcttgt

SEQ ID NO: 75489 - DNA, 405 bp, Zea Mays
agaactcccttttataagtcacacgaggtacctgaaaactagcaatattctgcagaggaaattcctgggttctatcattttgttccaaatgagacatcttagtattaactggcactggctgggattgattttcttggctaagagtgtcaggatactgaaaagagccagaagcagcagcatcctcactactgattgccttgaagcagttaggtagttctccaacccatgctccaatgtgagaatcaaccattacatcaccagggcagccatacgagtctttcattttcttaacaagtgacatgcaataagcttgtacctgaagagtaaatcagacaaactatgcagcacacataaatattgaatagggtagttatgctacaatccagttatgcaggcatattaatt

SEQ ID NO: 75490 - DNA, 624 bp, Zea Mays
aaatagtgttgtgcatgttagtctaaatcttaatgattgactatgtatttggtaataataacaatataagtttgcagaattgtaaccacaaagaaacttgttgttgtgtgtctcgctggatgttgagactaatccttcacgttgaaggacaaatatgtagtattcatgtcactacattaatctaagtccaaagctcactgcataaaacccctatctataatgtgcgtaagatttcccaaataaatcaccacaatagcatacaatggccacagctggatgattgtggttggggatattatctgtatgcttttagaacctctcggcattagggggaggaatgcccatataatgtaatgcctcaatattctattaaacgcacaaaagccaaactgaacatgtcgttcggtgtgtactcctgtgtatatggagtttgccagaaatcgttcaggagtaaccatattggtttgaatgcttctacctgatgttgatgtggatatacccgggattaatatcatatccacatttgacttattggcatttgatctattctcggggacgcctgtgaatatgatccattggtcttagtcaaaagcatatgttctgattacagattcacgtggtctg

SEQ ID NO: 75491 - DNA, 948 bp, Zea Mays
atccgccggagctggtgcagtcatggacactgccacggcagcaatggtaacagcagacactagtggcactggcggctgagcgctgatgggtctgacgatctgtgacgagaaatccaaagtgactagcctgagcagagagatagaaggaccaaacgagggtagtgggggtcctgcctgaagtgctggaatgacagcagcctgaagagctggaggaggagcagactgcactgttgggagctaaacaccggtgtgctgaaggatattcatcgtgaatgtccgacgctctgccctatctaccaagagatgctgcagaagggtgtcttgacggtcctggatagtctgaaacatggagagcatatgttcggacatctgctactggatagctacctatcgagcttgctctactaccagatagcctgctgctgcgtaagtgactgaaggatagcgggcagagcagggtcaatatctggtgggacagcaggagcagcactagaactacctgcctcatgatcatgtgagcgaggtggcacaggaggcagtggcgggatccctaggccctcatcatcatcggaagaagaatcagcaatggcaccctgggtctcgaactgtctgaaaacctcatccttagccctgatatctgatactgggcacgagaactaggtcctcaggggttgaacgatagaagcctaactgaaggcgagaggcctcgagggtgccctggaactgaggaggcctgatcagctacacaaaaatgtggtagagataatgggcatatggcagctgacggcgagcacggagaccatccaacattgtgtcctcgatctcacaaataaggaaatcaaccacatcaaactctgaatgtgagatcaaagcaccaagtagccatagctgaatgtgagtggtggcctccctgtatcccatcatgggtagcaaggtatgtctcatcag

SEQ ID NO: 75492 - DNA, 465 bp, Zea Mays
gaagaacgggggtaggtgatggcccctggaccgttagatcgggcgtgttcggtcaggattagaagcaggcgcagtgggctcgggtaccgttgatctgataacgtacggtcctgattggatgcgtcgttcccgttcacagcttttcgatctggtccgtccatctctgagcgagcgcttgagattcatcgcgggcttcataaaattcgggcggttagtttaggatcgtgtggcccagatctgagcgggagttcataaagcgcgaatctaatcctagccgtagatgtgggatcgtgcggctttggtcgaaacataccccttcggccagaccaattcacataagagcccctggaaattttagttatcaacccgcagtcctcgggcgctgttctctgagtctggagatttttaccccggagcccctgagctttctgaaattcgtgcgcccagtccaaagatcatgaaaat

SEQ ID NO: 75493 - DNA, 484 bp, Zea Mays
aaatagatgctttgtacatagaatccaagagtcagatatcaaagaagctttaaaatgatgaaagggtcaaggcgatgggtccagatggtatcccaatagaggtgtggaaatgccttggggatattgttatagtttggctaaccaagttgttcaaccatatttttcgatcaaacaagatgcccgatgagtggaggagtacattagtaccaattttcaagaacaagggagatattcgaagttgtaccaactatctagggattaagctcatgattcacactacataccaactattaagctcatgagccacactattaagcacaagatgcccgatgagaggaatgacacatatcaccgtgaaccaatttggattcatgcccataaggccataaggtcaaccatggaagcaattttcttaataagacaagtcatggagtagtataaggagcataaggacttgcacatggtttttgtcaacatggaaaag

SEQ ID NO: 75494 - DNA, 383 bp, Zea Mays
aattactgttggtgccatgtgtagctgatcgtcggggacactaatgactcgattgcaggcgcctcgtgcctaatgtgggcgtgccacattgttttgcccccttgcgtgtctcctttctggaaatggggtgtgtgtcgccacatcgggttcactgcgtatccttagacagttttgtgcacggattgtcgagaatagcaggcccttcacgcacactgttctattggtgttattatactggaacaaactatcgggcaatccagtgcgattgctggcacttcttcatgatattcacagaactaggtggtggcttgcctgggcttcccagatccgggactatctgatcgatttaagggcagacgtactgattcacattatacatgatt

SEQ ID NO: 75495 - DNA, 528 bp, Zea Mays
aagcagcggcgacgagggagactggggctagcagggaagacgacaagcgagggagcgaggagggcgaccagagcgtggaggggaggcgacgggcgaggagtgcgacacaaagggagtgagggaaggaacggggagtgctgtaacagtaaccctagcgagatctgagtgcggcacgtgggagggagtggagggcacgtgttacagaagcgagccaggctcggttgagaagtccaccccgagcgtatgaattgagccaagttgggtgggtgcttttgcatctactaggcgaggcccaagtactaatgcatgcaaccaaacatgttgcttcttgcacttatgaaacctggctcgggctgtatacaaggaaccaatcgcgtccctagggaacatcaccctcgagttgttgcttggacttcacaagctagtaggcaagagaataaacagtggcatcgcttacccgagagcattagcatgctcgcactcctgcgcaacaacaacaacaacaacgtacattgcggtggtgatggc

SEQ ID NO: 75496 - DNA, 1190 bp, Zea Mays
ggaaagcctagttgttatgaagaaattggatataggtagacccaaagtcgggctgtcaggtcaaattaagtctgaatttttagactgacagtgcactgcaggaactttgggcacaaattcaaacattatttagtaggaatttggctagggctgctatggcaaaattgtagctggtttgtagctctccaactttgttgcaggactttaggaaggttgccatggaaatttgagagaaaattgtgcccaaaattggctgtcaggtgcactgatgggagctcgcgatggtacattaacctgaattggatcaggctgccagcgcagagctctcaccaccgacgatcgatcttcaccgcgattcgcgccaccgccgttgcgattcacgctgccgatgacccgataaggctgcgaggtaaaagctatgcgcctggagatgactccggtgactcaccgccgtacccctcgtgctttgcggcttgggcagataagctcgccggcaacagtcgtcttctggtcttgtgccacgtacctaaacacctctgttgcgtcgccgtgactctctatggcctcttatcgtcgccggtgaagtcgccacgacggtagacacgaatccactgcgccggaattctttttctcctccggtcgccagcgctgctcgaccgaattgatcaccaccactcaagtatcctataaattgaagcctcagcatgttccgctaggtaatcgtgcgtccagtgaaccaactcgtagctccgatcgttccccacagctccccaatttgggatttcccccaaattggttgaagaacgccgcgaaatcaagctcgccgtggccagcgctcctcgggtcagtatctatcaaattactccctgttctagcttgattgtagcctcctattgctctcagtgccaaccaattgaaattcggctgaagcctttcaccggaacacgcgcctgctctgtagaacgccgctatgccaccctcaccgtcgacccgctcttcggttcttattctgcccaaaccaatgtgtgtacataacccctggtgaacccgcgaacccttccccagcctcaatttggtcatccccgccgtcgtttggctggaacgcgttcatccctataaccatccgccctgtcaccgtggactgattgattcaatgcccccttgatgaaattgatggaggggaagtgtgc

SEQ ID NO: 75497 - DNA, 667 bp, Zea Mays
cttgggctaagaaggcttggcgcaccggaccaatctaatatgtagtagatgggtcactggaccacttacacagagaagttattttctagtggaagagcagctggagcatcaaaccaaactctgttgtgttctagacctcctgtacacccaacaatcggatgattttgctcaacaatcgaatgacatgatgccaacctaaaatagggcaagtgtgggggctgggtttagatttttccccatggggcggccactggaccccaaaaatcttggtctagtatgtaaccacaggccagaaacccctcaaacagacttcaattgtgaccatgtgccctcctcccacccctattgccccatgagttggtccttgtatccacattcctagaggaggatggggtcgcgacatcacaacatgagatggaaaatgacggcaaacgaggaggcagatgaagcacggtgggaggccatgccacagggacagagagacaagagtgaggcaagcgccaccatgaagtcgacgacgaacgagtatccgaaggcagacattgttgtaggggcatagatatgagagtgaggcatgcaccaccatggcgacgatgatggaacacttgaagtcgcttgctcaaccctgtccgtccgaggtggcttcctgattaacccctgtctccac

SEQ ID NO: 75498 - DNA, 459 bp, Zea Mays
cgcgaagatgttgtggctccgaaggccctgtccagtctactatgaagtctgtcaaaacctaggatttgatagctgttctgggctcgaaggtgatgttgtaactagagtgttcagctgcccatttagctattctggcagatgccttcggatttctgaataagtctcctagaccctgttctgaagtgactcatactttgtgtgccttaaaatagtgtcttggcttgtgcgaagccatgatgactgcgtacgctatcttttctaactcggccatgttgcatttggaggcggtgagcacttcgaagacaaaatatactaagcattggtgggtcttgccctctttgcacatttcttgtaccaaggctgcgttgactacactaggtgatgctgcaatgtagagtactaggggtaaaactgggtctgggctggttaatgtcgccaggtcagatagatattgtttca

SEQ ID NO: 75499 - DNA, 613 bp, Zea Mays
ttagaccaaggctttgggtaagtctgctaaatctagtcctatgttcgatcagctttgctctaaatatatgaataaaagggtcattccacacaatcggctagcaaaaaattaaattcttctacgggaaaagcgacatgtgcagaggcaaaggtcgattaaaccggcctaaaaggtggcgcgatgaatgtcgcatgctcatctgcttccagttatgtcatggtattttccacccgtctactcattgtggatgtgttgtcctgctcaattgtgggatagtatgatgatgaatatgtattacatgcctaatcagtttgcttattcatgccatgggtaccacaatttaaaaccttttaacatattgatcagatagccatggtcgaagaagatgcaatcctaaacaaccattatgaattagagatctattaaatggactatttggttgaaagagtcggtggctttcatcggccagagttcttatttcatgaacaagacaatttgtgaaatatattgtttctcaaaaaacaatggtagtacatgtgcttttggttcgtgacctccaccaaaaggcaggggcatgtgttgaacaccaaatttggcatctggatggtcgact

SEQ ID NO: 75500 - DNA, 593 bp, Zea Mays
ccacggcgcgagtggcttcacggcggcgacgaagtcgtcaatgagaaattgcggtgccctggaggaccctccgcacaccccagccgcaaggacagcttcgcccatcggtgggacgcgtcggtgttggctagggagtcatggacgacagtgaatcgtggaatcaacctccgacgaccacggttgtgcactcctttcctcccccgtgcgtacacttccctaatggtggctgtaacaaggtcggcagtgggttgtttgaggttttggggcacacggcgtttcggtttatatttcccccagcgccgcaaccgaatccccgcatgagctgtccgccatttccgtgttccgttgagctcggtcctgggtggggatgactctcctaacatgaggcctcacatgtcagtggttgaactggagtgcaccccccgagtggccgacttgcgggccgagatgccagtgactctccgactagtaagcgcggcatcatcttcacgggcgtagggagaccgatgaatgggccccgaacgacagcgatctacccctgatcggttacctgggccacacgcgcagtgaagagaagtggaagtgggccgcat

SEQ ID NO: 75501 - DNA, 645 bp, Zea Mays
aagctccaccccgtagtaatgcgggagcgctcgcatgaaacggctcaccagcaccctgaatccctactcatggaacgaggtgaagctcaccacgtagcccacgggcagaactggctcctgcttgtcgcccaacgcataccacttgggctgtggaccgtgggagcggggggcaaagcagcccgacttccaccaacgcctctaggtccttgtcggtgacagaggaaatgggccatgggtcgcggggagggagaacgtttggcttctcggccattgaaactacaggagaaagcgagaacgaggcgaggagctctttgcacgaagaaggcagacgacatgtaaggtaggaaagcgaaaacatcaaggtaaaaatctgaagcatccctctcgggcgaatttataggaacggacggagtcgccgagacgtgggtcgtgccattccaagccaaaacgaaccaggcaatagttgtttcaaaccccacgcgcacgcgcgccgcaaacggtcagctggcaggccgagatgtcccatcgcattaaatgaccgtgccccctccgggtgaaagcgcagcgagagttgtttcgcattacacctcaaaaggtacgccatcctcgctctgcctccccttccttttttcatcccctcacaga

SEQ ID NO: 75502 - DNA, 572 bp, Zea Mays
ctcggtagggtagtaagttgtccagccaccacgaatcagccacgatcgttcactggaatcctcgaatttggaattctccccaaaactgtttccgccaccgtagaactcaaccccgccgtggtcagcccaattcgggtcagctcctctcctctgcctccttgtttaagcatttgcatacgtctgtgagactcgccaacccatccaattgaactgtgtgaccaccaatcgccgggaacacgactgccaagtcgcgatgctcacggccaccgtggccagagctccgtagttgatcataagcgcaattgagtgaggggaaatactccttaggggtataatctggtgtaaacttaagattagcgccgatcatcgcctcaatcggccggtgcagtggctcgccggagcttctccgtgcgctgccgtcgtcggggacctagccgtgcgaagagatagaaaccgggggggggggctttttgtgaagtgtcagcgactcctcaaaatagtgaaagggctcgttcgctgttagacaaagacgcgagggtctctgcgcaaaacagccagggcgcggatgcgcg

SEQ ID NO: 75503 - DNA, 579 bp, Zea Mays
cgggagagggtcgtactctaagacccaaaccactatcaccatcaggaggatttgacacaaaactgacgaaagtcttggagggaggcagattccaagcagaatacgcaataggagcaccgatgtttgacaccttgcctctaagaatcatctcaagtcggcttaccagatccacagcaggaatccttctattggtaacccgggttgagtcagtgataccacgatacagataagccggatacgctctgtcctttagtggatgaatgttcttaaaaacaaaatcggcgactacagcttcagtagtcagacctttctccttcaacaaaccaacttcggcaagcagaaccctggccttggctatctccatgtttgtgggggattcagtccaacttggagcgcgaacatccggctgtctccctgaccgaggggggagagacttgccgtgattctctacaataaaccattccaggcgccatcctttgatgctgtccttgagtgggatgtcgaggtactctgtcttcctcccacagcgcatctccaaactcgcaccacccacaagctggtgctgcccccagccattcc

SEQ ID NO: 75504 - DNA, 287 bp, Zea Mays
attccatgcagaataagcccaaggggcaccatcattgacaatgacacctctcagcatcaactcaactcggctcaagacatccctctccatgattcttttgtctgttacatgagaagggtccctgacactggtatactgataggcgggatgcactcaatctttaagaggttgaatgtttctaaacacgaagtcgatcacaacagctctgatggtcaagcccctatctttcaaattagcgacctcagctagcaaaactttcgcttcagaaatctcagagtcagttggcc

SEQ ID NO: 75505 - DNA, 662 bp, Zea Mays
gcagaagtcgcttacgggtgcaaccggatcaacgaaggcgcgcaccctcatcatacaaattacggttacatacacacagcgagggcatcatatattacattggctcaaccttcgggatgatacctatctccctgtaattgaacaacattatcctcaattcctcaccctcaaaaagatttcgcagctccccttaacctatgctcgccccaatcggcgaggacaacaattctcgcttaccagtccggtccacgcgaagacggccatgctccatcccaatatgatgacgcctaccacttcgcgacaattcactcactccctatttcgccaccacccttcgccgcctatacccagcactcgcacccaggagaccatcggaaccctccacgagcggcgaaggctccgctgcagccacatctaatgctgcaaaataatccaagccttcatccgaagactcctctgtccacgaaatcaaactcctagaatcatcagactcaaaacacttagacacaaagccacacgaatcatcatcggcaggcactacggttgaggccgccacaaaaatagtattgtcagtagcggttgcatgcgcaggcccaaacgtcagaacctgcgcagcaaccgaggttcagtatcacatagacaaaattcacatttaaactccc

SEQ ID NO: 75506 - DNA, 495 bp, Zea Mays
ggggacaaagccatggcagggacctgggcttcaggagaatcccttccttctagttgaccttccagggctgcaatccttgcatgtacatcctctagctccaaatgtaccctggagaggtccaaggtagcactgtccaggtcagtgttaagacctgccaccacaccaataagggtgttgaggcgatcttctccagccccacctgggacaatgctggtatggatttctccatgaagacgtagaggaagatgcatgtacttcgtgtcatgcagctgttgtcggtaagtgtcgctgagagaccacaaagctcacctagcagcattgctgaccgaagcagtgtaggcggatagcggcgttagagactcatgagctgatagagtcctgaaccctctatcccctgcatccatcaccctgacatgaatgcgagtgatgtagtagcaagcccgagggggctcggacacttgctttgtctcatacaggggtcggacgcaggttccc

SEQ ID NO: 75507 - DNA, 950 bp, Zea Mays
gctcaacaaggcatattagagacatttctcctagtttgtctcacctttttgccttgaatgctcgcaattgtttggttcccacttgtttgaacccaacatttggtgcccactatgaccgctctaaaaaccaagcccacgatgcctcctaagaagaacacctaatcgtagcttggccccaagtctgcaatgacgaaggcagtatccatcgacaatgcaggaaaagtgaaagtggccttggccaatcaaactccatcagcccatgcaaaggtagcccccatcatccctaacaagccaacaagagtgaggtcccctttcccccaccacaaagagccatccatcgaccccattctgaagtggagtttccacaccaacagctcagagacccctcgccacactccattcacccctagaaccacccctactaagccaaaatctagcccagtttatctcaaggccaatcatagacccccacccagttgaatatcaattcacgtgttcattccctagaccgtcgacaactcaagaatgacacaagagtcatatgcccccgcatctcagcatcgaggatgaccttgtaagttacctagaggagggcctcgatgtgaacaatgaagatctgctactactcaggagcctgcgcatgagaaacaaacactagtagaagcagaaagagaccctagcggccaaatgacactgcactcaagtccaagcgaaggtgcaacgtgtaatccaagaggaaagagagagctccaaggccatccagtaagaaataacagacctacatcaccaagagtccaagaatataccctgtagtccctatcaagaggttgtcatcaatatgacttcaaagaaaatgcatggcaagcacaacaacctggcaccttccaaaacttcaacttcatggacaaaaggttcccactcttcgccaggctataattcacaacttggcc

SEQ ID NO: 75508 - DNA, 753 bp, Zea Mays
tttgtgctacattcttgactgccatgacaaatgactttgccataactactgaattaccaccatatgaagatatgatagcttagtaactcatcaagatttgctttgaatccatcaatctatcatacatttgaagttggggtggcctgtatactggtgaacatggtgtggcttgcaagtctgctaccaaaggagaagaatcatcatatgataaggcatcacggttatgtacttcgaagagaaaattcctatggtaatatgagttcttcaattgtttatcttgctcatcgtgtgacacaattcttttgatgattcgttaattttgtcgttgcaactgagtgacccgaagcatcttgtccttccacttttcaacatgttgatggatagcttccaaattttgggtctcttggtcgaggtcatctagtggtggagggttcgtgtccttccttttctctcttcgtgcttcaataagtgcttattcattctggttctgatctatgcgagtaagaatagaaccagtaactgtggattttttgaaggcatgacgaagaaatgcttgttgtcgtggattcaccggaggtgggtgctattgttagtcacctgctttgattcctgaaggagaccaaaatagggcaacataattaaagataagagaccttcattgcttcgatctattcaatgggtagatcgaaggaggaagattgtcataaatacagaccttccaagaataacatagaaatgctcaagagagatcat

SEQ ID NO: 75509 - DNA, 464 bp, Zea Mays
agttagtaaccttctggtgaccctaattgggctttcatttataattatttccattgcagccttagttgggttttgaacaacaacaccagcatccatttcttggacagtagcaccttctgcccttccatggtcagcagtacctccctcgatttcttttgacttcttttgcattggcactttggcattcctatcatacttagttgtgttctttcgaggctttctctttctccatgttagagaaatatagttattaggaaatatataaatggcaacaacttgaatgaaccatttgaacacttgtcatttctttgttccatttaatggacacttgtagctggtttcaccgtggcctaattctccacattttttgcactctctcccctcttatcatcttcttacttttttcaatttggttttcagcttgcatgtcaacttcattagctgcctctttgtcagcctctttt

SEQ ID NO: 75510 - DNA, 271 bp, Zea Mays
cttgggggttgtaacatgttgcttaatggcatggtcatatcatcctcctccccttgaaaaggagtcgtcctcgactctgaagtgtcttcacttgtatatggtaagaggtcagcaacattgaacatgttgctcacgccatagtttggtggaagatctatcttgtatgcattatcattgatcttgggccaatggaaatgatcactgagcattttataagtcttcttttgtccaaaatgacctgttagacctccttcatgtgactcctgcaata

SEQ ID NO: 75511 - DNA, 670 bp, Zea Mays
ctccaactcgtgctcggtcatccgatgagagcctgagctatgggacgatgaatccgtcctctaagctctcacctcagacgagtcaatcatttcgttgaagagtgtggacctaaaagtgtttcaaaaagtgtgcttagggcatgatcatgttagtagcactcatggaatttgataacttagagctaaccatccatgtgctttccgccaccactagcatgcacgactaaggcatcaaacagttcatgccgccaatcgaagtctgggtcatgacgtcaagccatatcctcctaatatctcgcctatacaacatttataaatttagatttgctgaaattgcaatagttgaagatttacattcacccaaaactcactagctgatccatggccatctggctacacaactacccagggttactagggtctggtcctttgtctccctgtatgaacacattgatgttgctaggcttttgaccggtcctagcttcatgtatggagaaaataatttcatatattagacaaataaaaaaatacactcaccaatctataagtgacctaattaatgtcttgtcagcctcttgttctttttgcaacaggcggcattactacgtggctcttcctacagtgacgtgtgcgtgccatagtagagtctctgaaatccctattttcagcc

SEQ ID NO: 75512 - DNA, 512 bp, Zea Mays
ccggcaaacagatatctctttattgtctggtaggcaatagagaaaatcatcttcatcattgccgctgtacaccaaggatccttgtggatactttagatccttggcgtattgccttgtttcggcaatctgctcctccgataattgtttccccgaagcatgtcgcacgataaactccagctcttcggcaggtgctttgggagcaggagacttgaatttctgagggacaccttcttttttcaaggatagaggagcagcctccgaaggacgtgcttcggcaggaactgagggtccaggcttacaagtagcctatgccgtgccagcttcgctagatttctttaaaacttcgccctctgtatcaggcgcggcagtggaaacaggagttggtgcctttacagattccatgacaacgtctagtatgttggccattctcctcttccatggagttgctgcaggaatcattgatgccttcggcagctctgtctcgcgcaacggactcagggtcttcggttgct

SEQ ID NO: 75513 - DNA, 334 bp, Zea Mays
gagcactcgtcacatggtggcgatggatggtttggctaccactcacgaggactccctaaagaaggcaatgagacatcaggctgcgcacaacctcgacgttcatgcaggtaactcacatcagaagtctttcctttcctttgataatacacacatcttttcatgtttacataatattggctacaatttaggaaggaatatgaatgaaattttggtttcgacaaatgttcttaaacatgcggagatagacgaccttaaagtttctcctaaaattaagaatcaagtaactttaacccaactagatgatgatgatgcaatgacacacaggatggtcaac

SEQ ID NO: 75514 - DNA, 530 bp, Zea Mays
agaagacatatttgatagcatggcctctagcttcggcaaaccaatattgtctgccatgtagaggcatactttagtttccatgttatccgagcagcaatacaagtaatcatattgccatcccccgaagattgtagcccgtgaagggtggtacccaagttgtttagcaaagctaatagcttcatctagctgcttggcacccattgttttcccaaccacctgatgaaccttgtactttcgaccaccaagttcttgatcaaagggccttcaccaaggggtgtgtcatctttagtggcattcttagcctcttcattccctgcaggcctttaccttgtcttctgcaattgcaggactcgaagaaccaattttctcttcgaccaccacaattgccaaaggtgtcacaactatacctgctagatcaaccttcggacctcttggtactgtcgcggccacaacaggcagtgcaatatcctccgctgcaaggattgtaccatcaatatccttttcctcaaactttcattcatcaatatctg

SEQ ID NO: 75515 - DNA, 302 bp, Zea Mays
caagaaatgagctgttttggtcagtctatgaacgatgacccaaatagaatcgtggtgtcgggatgtgttgggcaatcccacaataaaatccatgcaaatatcctcccatttccaagatggtatgggaaggggctgtaaggtacctgctaccttcaaatgactagccttgattctttggcaagtgttgcattcagctatatacttagcaatttccctattcatctgggtccaccaatacaaggatctgagatcacgatacatcttgttactgcaggggtgcatgaaaaatttggaaagatgag

SEQ ID NO: 75516 - DNA, 538 bp, Zea Mays
gcccaggtaagcttctttctctttttcttttgttttcttttttctttttctcccttttcaatttctggaattcaaatttacattcaaatcttgtgccaaaatttatcttcaagttatattgtgaccttaaggtacaaattttggaaatacacataaactttctttatattttatatatcttctctttttcaaactctcaaattaggtattaaatccttgctttttttgccactaatttatttctattagtggcattactcttttcattaaatgcacaaaccataaactccagcatgtcacatgatttaatggtatatctttttattatttatttatttgttctcctgtgatgttctcatgagatgataaatatggacaacacacatatatacaaaggaatatcatttctcctcttaggctatcttccacaaattgcaagttgggtattacattgcacgcacagaaagatcgtaaacaggccaaacttcagcctatcaccagcggatttaactgacatccccagcctgacccgaagcat

SEQ ID NO: 75517 - DNA, 620 bp, Zea Mays
atgccgtacaggctactatgatatagatgggggatttctatatccctatacttgatgtgaggacgcttaggacgagcatgcatgcattctttttctatcttcttagtaagatatcattattaataagaagctacataaacaaggagtcacccgtaataaaattttaaatctataacggggatctccactttaccctagaaaggctagattcttagaaatttatttttctagtcttttgcactagcaccatctatttttggttttctttctttttcgcttacacttacccttgcatagatgacttcccatgtgcccactgacggagggtttgcactttcccacacgaacagtctcacacgagagggttttcccctcatcttgtgggaggtactgcagggagcaggttacaccatgcctccccagcacgaggtgcagttgtttgaggagcaccgggtacctcgctgtagggtgaggatgaccttggagcctcatcccctacagccaggatggcgttcgctggactcatagtctttcggtttctgggccgacgacactatagaatccacgaccatgcacgtgctgacgactttctgtggatttcaccctctggagatgtcaac

SEQ ID NO: 75518 - DNA, 486 bp, Zea Mays
ctctccatcgcatgatttacgtatgttgcatttgggcaatggtggtaattttattggaaatgatcatgtgttatctgtacctgctaaccctccagtaacagaacgtccggtaatatttccttctgcacaggaaccatacccaaggctatcgcaattggttacaggctctcctgaacattctggcgattcttctactgatatggctgacacgtctctaaaaaccatgtcgggacccggtgttcaaacagaatccgtctccggaaccgcagaacccgctgggtcggtggccttggagtctctgccaacatacgtgcttcatcctaatattcctcctcaacagctggcaggccaaactccaccagaacgtgtaccccatgcaacagccaacgtggaccatgagaacatgcatgcaccagctacatctccacgtatagaggatgatctggttccatcatctacgccatctgatgctaacacaggccatgc

SEQ ID NO: 75519 - DNA, 805 bp, Zea Mays
ctgggataaaatttataagacacagtgaatagcactctctagacggcgggttcattcactaaaagtccgggggctctttaacaaaagtgacccgcgaaggggtacgcagctatcacgaccgtcggattagaagtatacgacacagatcaaacccacccgagatcgaaacggtacgcgctcagaaccgtaggatctgcgatctagggcacacatttctcggatcgaagagatttactaccgatgatctcgtccgcccaacatccatcccacggttcagaatatctcacaattctctctctgatcctggccgctcatcagcggatcaacggccaggacatcgccttctttcacctggcccagacacggtggccctgcccaccacggacggcgccgccgtggccagtggccaccaacctcacgcgcccgggttctaaactttggtcctaactgcgcaacatgatgctgggattacggtgattaaatgggcaggcgatttaccaacggtgatgatcggaaggaagctgcccatgtgcacacgcagttccgcggcggagatgctgcaacggtgagaaatccagggcgcttgggcggtcgaccgagcgtaatacttcacgccaacaatccccaggcgccaatgaacgaacccgacaccgcactggccaccaatcagcgatacagccatacagggctgagtcaacggtggcgtctctctctccctccgcgatggtggctacggcgaactggtgacggaacaagagttgcacgcagggtttgggatggagccgaggacggcggctctgccccg

SEQ ID NO: 75520 - DNA, 624 bp, Zea Mays
ccggcagcgcgtcaaaatggacgtcggcagctccgacaccgggatgggactcatccctagcggcaccagtgtcgtgctcgcctcgccggcccatgcagcgatgcgctggaccccagcgcgatgctccgcctagagatcttcaagtgccttcttcgtcgcctccaccgcctggcccccggtgctgcctgcgccgcctagaactgccggatccgctcttctagctttttctctttctccttcgcctcgagctcatgctcgaccagcaacttatcccacctttcaaacatttcctccatgaaggcgaggtccttctcccgccaggcgagatccgtcgcccgcttatctagggacgcatccttctccttgaggttctcctcggccagggcaatgttgctggccttgtcctccagctcccgctcccatttttggatcctctccacagccgcggtctactgggtccgctgctcttccaagatttcgttcatggcactcagcttggcctggagctctgtgatggcctcctccctctggttcaaggcctcctccctcttggccaacctcttctccttctagctcgcctccagctcccgggcgtacaccttcggaccgctcggaggtgaactg

SEQ ID NO: 75521 - DNA, 1268 bp, Zea Mays
cgatggagtccagtgatttggaaaaaggtttggttaatgctatacaagacctatatgatgttgttcatcatgaagcatttttggttgatatgaggtctgctgtttgtctgtgttccttctaccttatcctcacattttgtgcccttacactttcactttgctaaagccctttgtttagatatgttagtggccacattgaagactgggatcaaattaatttagcaagggctgaaggtcgcctcttcaataaactcaagtggccaaatgatctcaaattggtattttctaagtactgaatgcacattttgctattgtgtctttattttttggtagcctgcatttttctttagtcattagtctgatctgttcttttgtaatctgcctagaaatacttgatcaagagattgtattcacttctgacaattaaagaatctgctgcaattgtccctaaaaatttagaagcaaggcgaagacttcacttctttacgaactcactgttcatggaaatgcctgttgcacggcctgtttcggaaatggtctcctttaggtggggctcctttagtctatttgcttgttcatttagttgtggacttgccacttctcttttggttgcaatttgattattttgttctgtgcattttcccctggtttggttgttcaattatactattttcttacattctgtgtcttcatgttttgttatgcagtgtgtttactccatattactctgagattgtactctacaacatggctgaacttcagaagaaaaacgaagatggtatcactacactgttttatctccagaagatttacccaggcctgggctttacttctttctattttccatgagcgctgaaaggaatacttggattctctatagtgtaaccttctcttgtgatccttcagttatatctgttttcctgttgtgatgtgtatgtctaacaaacttggaagttaaaatttcttccaaaacggtcgtgttctcccccaattacttgtgcatgtctcctccataaatttatggcattgcaattgctagatggttatttctgcagtgctacactgacaaaacaacaacatacctgtgatttttcttcagttaccagtgctagatggttatttctacagttgcagtacatcttgatcatgtaacttaagatctagcgctacagcctacagttaagtgtactctcttgctgatcgatcagacaacagcatcacctagcatacctgtgatttttcttcaattaccagtgctgatttcaaaa

SEQ ID NO: 75522 - DNA, 530 bp, Zea Mays
ctggactgggccacaatatctgtgaagcacagggggctcgaggtaataatctgcagactcagtgaacactggtgttggacggcgggttctattcactataaacagaagggctctttaacaaaagtgccagcgcgaagggtatcgagggtgctcagccgtccgatcggttgcacacggtcaggattaggtcttttataactccgaaccggtatgcaatcgcacccgttggatcttcatccaatgatttagatttttttaagtcgcgcgctctgctctacaccgcacatctaccgatctacggcccagatccgatcgggcgaaggggtatgcgatgacataatctcaaccctgcttggtcgatctaacggctcacatatcttcctcctcgcccagacacaagggacacagagccgcgccccacggcggagatcctctcccccgccgacgccccgttcgtcgctcagtgagctaacccccgattggatacacgcaaaacaatgcggaagcgaaggtaaattaatgagccaagt

SEQ ID NO: 75523 - DNA, 755 bp, Zea Mays
gcggtctccattgatgatgtctttagacgttggttcgtcgacgtcggggaccgctgatgtgcttgttcggggcgacccatgctttatctcctgcggcgtcatggcctccgatccatataatagacgaaaaggtgtgaatccggttgcccggcattcggtcgtgtttagggtctagaccacttcaggtagttggtcggcccatttacccttcttgtcgtcgagaagtcttttcttgatggcggtgaaaatcttgccgttggcgcgctcgacgacgccgttggattgcgggtggtataccggggcgaaggcaggcttggtgccgatggaaaggcagaaatccctgaagtcccttgagccataggtagtggtccgacaatatccagccccgagcgttgaagtggccatgtatgggcgatcagcttggtgaactgcgaagggttgctcgagcggggagaaaacttctggcatgcttcgcaagacctcgtgactcgattcgctgtatagattatcgcgggccagtaaaatccttgacagattaccttggcggcgagggccctgggcactgagtgggacccgcaagttccgctgtggacttcacgaaggatttgaatgccttcggttttggtcacgtattttagcatgggctgactgatcccctttttgtatacctggcccccgactagtacgaagtcctggcttcggtgcttgaggcgtttggcctcattgacgtcacttgggtggtaatatccttgcag

SEQ ID NO: 75524 - DNA, 583 bp, Zea Mays
ttcggtaccaacttattttgtctgtcggcattggttcagacgaatggatacacaagtagctgcattgtttccagaaacaaaacaaagaacggcgtttagctgcagagggtggccggtcccggtcgcagtccaaaagggtgcagcaacgcgatggtggtttaaccacccaagcaagtgcacaaactgactcttacctccacagaagttaaggcttccgcagaagaggcaggaagatctattctgtacgatataaccgtatgttttcacgtcaaaagctagccgagagtgcacactcttctacgactttttacctgttgcacagcagcacaagtcttatttggctcatggatttcggttagcatggcagcatttcacttcagaaaaaaaggggggaagaaaattcaggagtaaaggaaagacttttcagtatcatcgtgtcattatcaaccgcgtccgcatcctccactagcactttggcaggagtggaagctattcatttcaatatttcattgcccatgccccacgaacccaatcactcacccatcattggaccccattaataaataaacaaacaaaccgcaag

SEQ ID NO: 75525 - DNA, 785 bp, Zea Mays
cgagcactggccaccgcggccagccatttctagagaccctcagccgcaaccgagcccttggatagcttccccgaggagccgtgaagcttctccaagcaaggatcgaagccttgcctcatcggaacagcaagatcaccgtcaccggacttcggacacccgccaccgcacgtaggccgagctatccggtgagccattctccaattcctcgcgcccatgctttccctagcacctagtgaagctcactgaccagtttaattgaactctaccgccctggataggcctaagccctcgcctacgcacgtggaccagtctactctgaccatcctcggagatgatccgcacatcggcgtgaccgtcacgacctcccctacgccctcgaccacctcaccgaagcaatctcgccgctggtaagcccctccgccctttcctccgccgcgggtactgtttaattgggagaaggtcctcgggttaggtttagcaaaaccccagggggttttctgaactgtcagtggcacatttgaatagtgacccgaggactagtctgtaaggaaacttaaaaacattcgccagggaccccgatgcaaagttagtttccatttaaccatttctgattattctttttaatgaacagagaacttaggaaattcataacttgaagaatatttatccaaaattagtcaaaccaaatttgttggattcaaaataatatgaaccatcaaacaaaaatactgaacaccatgttttctgtattaatatttagagttttgaattaaataggaaactgc

SEQ ID NO: 75526 - DNA, 607 bp, Zea Mays
gtttcctactaacccatctaaccacgagcaacagaggcaacactagcctcaggtgaagggggtcctccagagtgacaggtgtccaggctagaagctggctcaatctcttcggggtcctcctcctccttgctatcttcctctgcctccatctcttgttgcatatcctagtggtgcatttccaaatgagcattggtttcatctagttccacctgtacgttgtggagctggttctctaggacctcaatggtattgtccctaatttccacttgctgctcaagctaacaggtgtggttacccatctgctcaatttggagatctttctccaccaactcagaggataagtctaccacgaagacctccctgtcatcaagggttgtcttggaagtctaagttagtcccgtcaagtgtgtcatgccatcgctttgcagatcctacaggcgatacaatgcactcttgcactagacagtgatcctcccaacctggtcggaatgcatagcccacacatccatggtgtggtgtactcggtcataccacatcagatcatccctcttctcaatggggaagactccaagcggctacatcatcatctctagcaggtcatatccgt

SEQ ID NO: 75527 - DNA, 463 bp, Zea Mays
gtgcacaacaaaacagtaggtagggaattgtatcatctcgttatgtgtgtcccatctgtatacagtcgagggtatttataggtaatcaggcgagtaggtgggtccccaagttctgttatacccccggttacctactacattcttggaatattcccctcaatggggtcattacagtgtggtaaagtacagtaacttagacatactctggaatttatcccatgaaggggcttacaaatgggcctgaatggtgataaggcggagcctgagtcccactataatctggcgtggccttcacgtatgagttgcacccttgactccatgaagttgcgcccttgacttcatcgggacttggacttcgctatcgaggaaagagtttgagcctttgagatgtgtgtgtggagctatagtgagcacccttgactagtgtagcccttcgcttcgtcccctctgagggttgcaatcg

SEQ ID NO: 75528 - DNA, 623 bp, Zea Mays
caaaatcaagctcatcaagtcacaaattaataagaattcatcagtgttcagtcttcagtggtgctcacctagcctgatgtttgccggactgccgtctgccggtgcctgatgcagtgatgccctgatagccggagtgccggccgccgggatgcacgatgtgctatatttgtagatgagttcagaaagttgatcacatgtgcaagaaaatgctaagcggaatcatgcctcaagcgcgtgctattctaagatacaggatgtgctattacataaaactggacgtgctagttgtatgtcatggcatttgcgacgtcctagatgcacgatgtgctatttcgtaaacctggcgtgctagctgtacaactcagatgatagggaaatcgtgctcccaccgcgtgctattcatagatacagatgtgctcttttgtaaacccggacgtgctagccgtatactctagtgctaagatacaggatgtgctattacataacccgctggccaattattgggcattacctagctgccatggcttcagttaagcaaatgtttgaccaaatcatataatcactcttaactatactcacttttttgttctctcgactcattctttaatcttggctaatgagca

SEQ ID NO: 75529 - DNA, 418 bp, Zea Mays
aaattgaagaaatagtggtcgaaataacaaagacgttagaggttacaagcccttcggcagaagtgacagtgtcgaaggcacaaaaagatcttatagggaccccaaaaaggaaaaggatggtcaatgtattagatgtactggagacgataaagagttcaagctctactccaggaaagactgccgaagctccaaaaacgcaggctgagacaaaactaactgaagccgaagctgcaaagagccaggccgagactgtagctgggccttcaaagcctgccaaggagaaatccttggaaaccagagaagaagaaatggaaaaagaggctgcaaaacaaattctgcccgaaagaactgtctcttcaactcccgaagcatcttccgaagtacctgattatattgtacgacatgcttcgggaaaaag

SEQ ID NO: 75530 - DNA, 425 bp, Zea Mays
tcatctttttgctcttcggctcagctgcagtggctgaagcgacagtctttctctttttctcttgccctcatagcgggtaatggtaatcagggtatacgaagccaatagcatcaaataccttgttcaatattttcttgccctgacccccgaaagctacggacaaagcattatcttcggccttggagtaagctccaagtagctcgtcactggtagcttcgatacacttcagccagtcatcgtctggctcatcgaacttctccctaaatctaaaggtatacttcagacggaccagaccaccatcactagaattggcggtggtctccttcggcatatcccagctctccacaagtggccataccctgaaggatatatgctcttgaatcaaatcccttgtgccaatgaaggcacaaacagtgctaaaagcc

SEQ ID NO: 75531 - DNA, 292 bp, Zea Mays
gtaattgtttgactatggttgctatagcaagattgtagctggatcatagggctacaactttgatacagagagatggtcgagtcactacatgaatttgggaacaaatatccctgcaaattgctctatcaggctgactgaataagaatctgatggtacagtaaacaaagatcttctgttcagcccccctcgctgccggtgacctttgtgcccggattcgcgccggtcgtcgcgattcgtgcctcgggcgagtggattatgctcgacgataaaaagatctcgtcgcggatgaaca

SEQ ID NO: 75532 - DNA, 350 bp, Zea Mays
ttgctggcggagctcttcgttctttggcacaactatgcggtttttaaaccatatcacaccttgatcgtcttccttgaaacacttggctgttctagcccttatcttctctcgtatgtgtttcatacccagattatccttttgagcatcaattatcctttgcaaaatgattgactcaagctttagttgattcagagtcccctgttggatgatccccaggtttaacttctccatttcctgacacaaagtgttctcggaggtcttcgccataagacagtggcaggaagtcttacgactcaatgcatctgccaccacattggctttgcctgggtgataatggatctccagttcat

SEQ ID NO: 75533 - DNA, 574 bp, Zea Mays
tgggtcttctgaactattgcttaggtcatgcttggcagctttcttctctagtcggtctagacgcttcttggggcaatcacgaataagatgtccttcatttttgcagtagtagcaagcacctcttgctttgagttcttcacgagtcaactttacttgaccaacaggggatgaaggttgattgggtgtctgtatcttatatagctgagcctgacttgattcttctgtttgagtatccatgtgtttcggggcttttgcttgtggttgaggtgaactaatcatgtatccaaacatttttctattccttttgttgttcttcattccattcatcgaatatctcggtgactcatttttctcgttcatagctgttaaggtaggaatattgtcattggcaccatttacttcatttccattggggttcatcatctagtcagaggataaaagagttagtgagacagactgcataagaagcttgtatgacattaagatgaagggcgaacacaactttttgatttccaatataagattagttaaggaacaaagatggttttagatttctactagcttcatcatactt

SEQ ID NO: 75534 - DNA, 952 bp, Zea Mays
atgttgctcctcctttgaatcgcgttgcatttcggtgtggcgatgctccttgtgttcgaccaaagctgctaaggtgagctgaacctacgtgcttaatggtgcttgtgtcgtcgttaccagtaaatttggaaaactctagtaccttcaactttggtggcgaggacatcctgtcgatctccttagggtacgacttggtttaggtggtcatctttcactcggggaagatgcccaagtggttatacatgaagtctactagctattcttgtatgcgagtggtacttgctcttccaaaaaaatggggcctgactgctgagagcttggccattgccataccttgcttaccaatcaagtaactcctgctcgttggctttgctcttgtctatgatggcgtgtgttggctgctaacgagattgttcctcctcttgtagcggcctatagcgcaatctgcccatgaagccctctgaaatgtatgttggaggctagtcgtagacgaatggggctttagggtgtagtgcacatttttcacctctcgttcgtgtcgcagagcaggaagtctcaacactggcagaacaaacagcagcggcttcggtgcttcgggtgtgggagaacgacgacgaagttttagttgacgtaaggagcggagacgggtgactggagcagggacggagtcgcggtgcaggacatcagatagagctccagactcggttggcgttgctgcataggggaaatgcttcgtcgaaggggcgggcatgcttcagcgagggggtaccaggagcgacgactccacatgtcgggtatgataattaggggtgcccagactacacctctaaaacgagcttaaaaccctaagggctctatcaaaatacgtcccctaaggtcaaggaatcacaaacatcacctcacccgaggccccctcaggggtcttcctaaaactttgcctcgcccgaacccg

SEQ ID NO: 75535 - DNA, 535 bp, Zea Mays
ggaatggcagaccggacaactccggtgaggtttggtaatggcaccgccgtggggagctttgctccgccgccggtgtttgttccatgggtgggcgaatagatttcgtccgttgatcttggaggggacggcgtagatcatgacgcgcagactgttttgggctagtttaatctgtgccattggatctagatccaaaagcccttatagcgtaccggttcgtgataagtgggatgaaatcctagcgcttggtggctgatcggacggccaggggttacttgcgagttgatgtgcgccggatctaattcgtgccattagagtttgatcgaatgacccaggttccaccataccccttcggcttatcaatttgcataagaaaccctaacttttgttgaaattaacccgcaatcccctcgggttcgccactgagtctcagtttcttttacgccagagcccctgcgttttctagaatttggcgcgcagtccagaactcgatgaaaactgaataaataaatacagaaaatactttcaagtataaaat

SEQ ID NO: 75536 - DNA, 1302 bp, Zea Mays
cctaacggagaagacggatgaaggctacgaactacgtagctgaggtcccgctacccaagggtttaacgcccttgacaagtggtgtctcacaattcatcaacaaaagggcatcagcagcttagtgatcagatcagatgccagttagttattaggccattattctttgttgatctctctaaatcgcctttactttttttttggatattatccataataaaaattttaaatagtgcttattctttttttctggaatacgcaggagagctgcgcatctttgtattaatagaagaataagaaagggggagagaaccccattacagcacacacacaccaacactagagactaactaaggatcaccgactaacatggagaaaacacgacccacatcgctgttttaagccagcaactcatcgacttggaggaaagacagggccttggcttcagtcaaggaccagagcaccgcctcttccctagccaccctaagggctgtgaccaagctaggattacatccatcaaagacacatctattcctatgcttccatatggtccaagcacctaggattactaaagaattgaagccctttcttataagattagatgctcgagagctgctagacttccaccacgactcaaaggaatcctcgtgagctggacacagctcctgcaaccccactgaactaaggaaatcaaaccagaactgcttggcaaaaacacatttgaccagcaaatgatttatggtttcggcctcttggtcgcacaaggggcactgctctggtcggtctagtcctctttttctgagcctatcagaagtccagcacctattatgttccacaagccagataaagaacttgcacttcccaggagcccaagatttccacacacgctctgctggttcgaactgaactgaaccaatgaagagagctttataagcaaaactagttgtataatctcgtgaagcactgaattttcatatatgtcgatcccttattccaggctgaagcacaactgcatcaagcacttcacaaagttccaggaattcagcaatgactctgactgaaattgccccatttacatcggagatccaatggaaattagggagagcatatttgaccaaccgtttgttggcaagacacaagggcaccatatcaaacattgcaggagctatgtccttaatacatctcccatccaaccatctgtccttccaaaaagggtattggctccatcaccgagcttagtaataactgctgcagcaatcagattttgtaccaccttacacacatgagtggggaagtccgtccaag

SEQ ID NO: 75537 - DNA, 757 bp, Zea Mays
cacttatcaagatgcacgacacacataacgcattaatgcgcttggatacatgattgcatggagttgtgcttaaggaactgtgcgtgcaatgtttacgcttacgcattgccgagagacaacgactatgtcatatggtcaggttgatactgttcagtttactctagggatcaatgatctgtaactcgaatttctcataatgatggccaacagcacacaggtatgatcgatcctaccaatgtaactatgtaatagtttatttagtactttattactataaatatggatcactattgtttttacagcttgacaaactgctctcgtcgcatgtctttgttgtcagagggtttgacagactcaaacaaaactccaccaaattaagtaccttgtagatggtcttagactcagtagaaatgatattgttcagtttactctagggatcaatgatctgtaactcggatttctcataatgatgacccgccgcacacaggtatcactattgtttttattagcagccatatggatcaattctttttacagcttgacaaactactctcatcgatgtctctgttgtcagagggtttttgcttatctcttcactgctaggattttgatatcatcgtagccaatggaagcatttcatgctagcacttggtatgcacgattattacttaccattcatgatttttatgtatgatcatgacttttatatcatttcattcatgggaacaaaggttgttcaatcagaattgttttgaac

SEQ ID NO: 75538 - DNA, 291 bp, Zea Mays
ggggtctggacttaccgggatgtgttgtcttttcttgccacgtggtgccctttggcctgcccatgcggtggggccgggcgccgtcccccgtgtggctaggagacgtcgcatgggtgcgacatcttcatgttgtagaagagggtacccctaatttagggtaccgacagtggcccccagtcccgccttaggggaggatgcgagcctacaggtgggaccagagtctgattggcggttggaccgctgctcctgcgcgtctattgctgcaattagtgtcggcccgcctatggccat

SEQ ID NO: 75539 - DNA, 640 bp, Zea Mays
cgtggcatccgatcgacgggcggccaactccggtgacttatctgagccggccgcaaagcaaaaggggtacgacagccagccggaacagtgcccataactcaacaatggtgaagatctttctactccgaggcgttatctgggcctaagtgagcacgaatcacctcaccggcgtgaatccacgcgcgggggtcgccggcggccggtttactgaaccaacagatctttatggtcactataccatcaggaacttcttcagtcggtctgacagatcatgtttggggcgaatttcctccatattttgtatggtgactagatcaatgctctgcatcaaagttatggatcgacaaaccatcttcaattttgctataatatccctagtcgaattcctcctggaagctactcaaaattgacactaacttatgtcaatgtcactgatgttcaaaattcagtttgagagctaactgatagcccaactttaagctcatttttctccaatttctattcaacaccagtgctcattcacttaatcaaacttgttctcctatgatagctctacaacttttgctatattgactttaagcaaaaacttcaagaatctcgagatgtagggcttcaaagtcagccttattcaactgttttc

SEQ ID NO: 75540 - DNA, 387 bp, Zea Mays
tgcacattacacaaatattcgaggggtgcaaaacgcagtgtcatataagaaatcatgatgcatatgacaaattcatgcacttatctcatcacatgacatatcacatatcatgataactcataacatagaagatcataaaaggagttcttaactaactattacaatagtgataaaagatgatcatcataacacaaagatgttcatggcccttagccatcatcacatacatcacatggagttgttcttggcccttggccatcattacacaaatattacagaccaaatagagttcatgacagaaaagataaaaagcccttagggctaacatcctaacgacctgccacgcaacaacaccaacccgcaatagagataagactgacatccaac

SEQ ID NO: 75541 - DNA, 729 bp, Zea Mays
taaaaaaaactttatttatagtttaacttttaacttctaattaggttaagaataagaagtttcatgttatttagaaagtggttatgaaagcatgggtatatatatgtatagtcacctttttgtgtagtgtaaaagatgggttagggcaagaatagcatggggtgagaaagtttacagtgagaaagaactccttgtcgggtggtaatgcctctgaagatcgagtttgacttctctccttccttgacgaggttgatattgtccttttccagtcttgctctttggtgtctccatccgggtttgggacaagaggctaagatatatctgtgtatgtaggtcaagttgttgggtatggccaagttgatttaggtcaccaatttaagcttaagtggatttggagtatggctttatcctttgtaccagcattaagtaacttactctagattagatcataatagattagatagaatctagattaggttggtacgaatagattaaactagttaagatctaattattttggattaggtcccgattgtttcattaggatgagttaagtaaggtgattagggtaagacaaatctttcaagataagatgcatctattaagataagagagaatcttttaagttaagatgaatctattaaactagatatgtttttaatggggaatgtgttgtctattttataaatattttcccttatgtctaggtgtatatgcagatacaattgt

SEQ ID NO: 75542 - DNA, 636 bp, Zea Mays
gcgctaatcagcttgatttttcaaacacctcctgccaacgttccttctattggtcaacaagaagctagcgagaggtcttgggatttattttatatattgcatctgctattattgcagcacgcaagcacatgctaacaagaaggccctgctactttttttttgtagtttgcagattcggtgacacgctgccataagctagcaaaaaggtctgacagcttctctgattatatctgcagatctcacacataaactaacggggatctgaatattggctacatacttccgaatcttcaactatttctgttgcctctttttagctttcttgccaagttgacaattcagagacttaatgccatgccgctgaggggtcgatcacgccgccaaggtgacttcccgcagaatatgaatactattcatgctcgaccatccttccctcactcgtatgatcggaacacccaagacgtagcaaggcagagaattagatctggcgatgggcttgatcatcatccaagccagactatcagcccctctgcacaccagcgtcatgatccttccacgaataccagacgcgtcattaccagtgtacattcacgggtaatccatatatcatatcctcttttctttttttcctctttt

SEQ ID NO: 75543 - DNA, 380 bp, Zea Mays
cggcggcgattagtctagggttcgacggccgcggaagagaagaatcagacggcggcgatttagctagggttcggccgtcgctagagttacgggagagatgagctgaaaaaatgagtgctcggttcctggattcgtgggcccgatagacgtaagctgcccagattgcggggacacgatctttttgtgggcccggatgtcacgaaacatgcgcacaccaaaagtgtgtaaaacgtaacaagattgagcataacgcgaagttttaattgacgtaactaggtggtacagtgagccaaaaaagcctgcgcgcctggtcggtacggtgcggtcagcgcacctggtcggtttctggtcggggcttccattagttagagagagcccag

SEQ ID NO: 75544 - DNA, 297 bp, Zea Mays
atatgttctagtttgttgccaatttgtcgagttaaataacaaatactgaccactcacaagttctcaactagatgcagttgatttatataaggacagtttatatactaccttcaagacatgtgaaacgatctagcatgatgctactgtacacagaagaatctatatctacttgtgaactttgccttttggaaattaagtagcttcactgtggagatgaagttggcaatgaaaaatatagagcacctcaactaactgaagttgatttagcttaaattagaacaacttgttgacttatgc

SEQ ID NO: 75545 - DNA, 705 bp, Zea Mays
gctgagtattggattgctatgagttcgaagattacaagtgattgtgggatgtggaagatgaagttgtctatcaatttaatggagtgttctctctttcttataggggtacctctgcgaccttatatagctgtctggagagatattcctttatagatcattgagtccactcgagtctacttcctgttgctacaagtattcctattctttcggtgcttggttgccttctctgggttatcatctgagtgatccggcgctcgaccatgctcgggacgtgtcttcagagttcaggtgaccccttcgcgggacacgcgaggtgatccctccgtgggacacgcgcacggcgcaccaccagtatacccgtgcagtatccttcgagattttcagctacctcgcgcgccataacttccattagtttttgtcctacccaagcgaggccaactgtgcgccctattgggcgacttatcatgggcctcttaggcaacccaaggaatgtatgggtgccttagtggcacatgggatatctatctcccacaggcccccaaggctcaagcaaaattttgaggacaataggctcgagactccaagaatgaactctattatttgattgtctttgagtgcatcttcttttcccatgttgtaggtgcacccaatggatgtagccctcgagctttgagttgagcaacaatcaactcgatggaccccgag

SEQ ID NO: 75546 - DNA, 607 bp, Zea Mays
tagagcgtcagagcaaacattcatcatatcatcaacagtcggttccaacaacatatcttcatgaatgacatcctcaagggcctgatcaaaatctgttatggataaatcttgaaggctaacaagagcagacagagctggagaaggaatatcactatcccccctactacctctgtaacgccgactattcttgcgaattagcggaacttcttcttcctcttcttcgtcctcgtcacaaatgcggataatagatggtgcaggatcacacccattggggtcagcttcaacaggatcacacccattgggatcagctggcgcacggatacactcgttggggtcagttggtgcaagattacacccattgggttcagtttcaacaggatcacacccattggggtcagctggtgcacggtcacacccattggggtcagcttcagcaggcacaccactagtggggtcaacttcagtaaaaacctctgttggtacttcttcgcaaataggagcagaaggtccagcatcctggtccaagcatgatagccgtcgaagccgtttctttttcttcttctcctcagcaggcgcagttgggcggctgacttggcgaagacgcttt

SEQ ID NO: 75547 - DNA, 1990 bp, Zea Mays
tttaccatctgcagtctgccaacttgtgataggaagtgggatgttgatgccatccttctttctattctttgaatcatgggaagaaatgcttccactttgggttttgtcagccccatggggagtcctaggcaggtgaaaggcatggctccgacttgtcattgaaatgtcttggctagaatatgcattttctcttccgatacattgatgggatacatattggacttgtgatagtttattttgagctctgtagagtctgcaaaggaatttaggatggctttcaggaaaaagagctgcttggaacatgtttccattaccatgctggtatcatctgcgcattggataattggaaagtcttaacccccaccattcacaattggcagctttagaagacccaaatccttggctttatttattatagactgtagaaggtctacagtgaggacaaaaagtagtggggacaacagatcaccttgtttaaccccacgtttacaatggaactgcttgcctgccacagcattcattaagccagacgacgttcctgaacccatgaccattttaatccagctcacccatttgctcccaaagcctttgtgttggaggacttgaataatcacctaatgctctagcttgtcaaaggctttttcgaagtctaatttaagaatgaccatctctcttttggtttgtttacacagatgaaggtactcaaaataccacgacagacggtcctgtatagacctttctttgatgaatctgtactggttttgtggatgaggttggtgattactttttgaagcttgttcgccagcaactttgtcagcaactttacactggagttcaggaatgagatgggcctgtaatcatttacatttgacgggatgtctttcttaggtatcaacgtgatgtatgaaccgtttatgctcttcacgcatatcaattctgtgtgaaagctattgaacaaatcataaaattcttgggagattatgggccagcattttttcatgacttctatgttaaaaccatcagggcctagggatttattggagggaaggctattaataatgccatcaatttcttcaggtgaaaaggcctcttctagcagatcaagatttttaagtggatgcagtagtgtatttaggtcgaacaccattgaggtttctagagatgtccccaacctttgtttatatgcttcaaacaatatatcagatttttcctcatgagtttggcttcactccttgtattgtcatttaaagttgcaattgaattttgacgatgtctgattgtagcattggagtggaagaattttgtcgctgcatctccataggttgcccatttgatttgtcctctctgcttccagtaaatcttctattgatttaacactgtttgtatcctatgtagaataatgtctcggaagttccactcctgtatggtgaggtccctgttttcttcagtaaagtccaagaattatgcgatcaatttaccattgtcaatcagtttttgtagacttggaagagttttgtgacaacttttgatagccttcctggccctcttgaacttggttatttatctttttgctaggtctgagtgatgggtgtgttgttgccaggagttctgaaacactgtgtgaaatgctcaagctgcagctagaagttgacaaatatgaaaatatgaggtctcgggacacgtgtcttgattacgattacccaagggacatggtccgatgtatccctctctaaagtgtgtgctgttgtactaggaaaatgtgttgaccatgctagggagacaaagcaccaatccaattttttaaggagcgactgctgatgcatatttgaccaggtgaattcttgccctttaaggggggtttcttgtactccagcttgactaattgcattgttgaagcttagcacattttgaatattaccaccaggtttatttcagttgttgggtgcacggatgagattgaaatcccctaagagcatccaaagcatatctg

SEQ ID NO: 75548 - DNA, 1106 bp, Zea Mays
cttaacttaggcctttaatccctaaagttttggtgtctcttgcctaattaaagtcacatgtgataatagtttgagtcaacttctgagaagaaaccctaagtgacactggggtgtcacacctcttctcttcacgaaacacaaaaaagtgatcaatcgcaggatgagcatagtgcgatgggtcctgctctcaagtctctagagctcgccatgccgtcaatcgttggcgcatctggggtgagctcagtttcggttgatcaagtcctcaccgagaggtcgagcgatggccgaggcgatgtggaccccgagctagaacgcaatggcctccatttcacgaatgcgttcggagattagcgccattcaaggagtctagacggacatctccccttactacgaaaccccgagatgacagcatacgaggtcaatggccatagacagactaaagtgctcaacgttaagagcccgaagatgctcctccacacgcgaaagctcctccatcaccatcgtgggctgagaatagaaaatcccatgagacaactgctggggctaggagggccaaaagtctaggatgaaggagcacgagcctcaccttctgtcgagaacccagacaaaggtccttcaacatcgcgccccgatggccgcacttcggtaagatccggttcggccctcgaagagccctccctcgcttcgaccgcaggatgcttaggccccgccatcctaccgagctcagaccccgccaccatggctccctcagcagtggtacctcgagcagcagcatgagcctcacgcctcctcgaaaggctaggccaccaccggtatacagacatccgagcttgggcataatagaacactcccccatccaggagcgggcctaggattttaagtatgggtattcaaaattttggtagaatataatttttttgacaatctaaaatcacactattgtactacatgatcagttgcacggtagagaaatgaagaggcctagtgaaaaccaaagtttagataaaataactgtaacatagtatgattttatgccttttataatattttagcttatatacataacatatacatttatatataattgttttgccaaaaataatggg

SEQ ID NO: 75549 - DNA, 529 bp, Zea Mays
gaaaaatttgatttcagcagtagcaatacaatgcaaactctcgagttttacgaatgaggatcgtggaagatgcagctatttcacctgctttataatttagttcatgacatattttttcgataaaggaagcaatgctattaataacaaagatcagtacatcaagaagatataaagtcttggccaacttccagcttctgctgaacacacaaagcacatcaagaaaaagaaaagaaaaacatcaaacacactctagtggccttcaatccgaagtctaaaccaccacctatgcacctaagagaaaaaaaccttagccacttgcataaaaagttatgatccctgtgcaacccattcctacaaatgtgcccgttgtagtataacctaacttgagagccagtgggccgccatatggatagcctacatagaaaaaatcacgttatttttcttaaaaacaagtcatttctacccaaccaaagtgcccaacaaatagttgcaacacctagcagaaccaagggtttcagttcgacatcaa

SEQ ID NO: 75550 - DNA, 1093 bp, Zea Mays
aaaatgttattaatagaacgaatagtgcactcagctttaccattctgaggcatggtgtagggacaagacatctgaagtggtgcaccctaagataggcctagatatggagctcgctcgactctagataacgagccagctcgactcggctcgctaacataacgagttggaggagctactgagatcgactcgtttggcaactcgagttagatcaattaactcatgagccaactcatgatcaaagtatccacactccctcatgctcctccgggtcttgtttcctccatggcagcggtcggtgggtggggcatggagctttggtatactggactgatcaccgggggaccggctagccggttaccagcggtaggggactgaaactggtctgggggagccaaggaggggatagtcgtggctgtggatggtggtcagaaaccaaagtgtggaacgatagtcgattgggttgacgcttgacgggctggcagctagggttggcgatgtggtggtggccacggagtccacgtctccgcgagattgcttggaggcgtggacaactgaagatggaggatgggagtcagcatctctacgagatgacaagatcacgtccgtgagatcatgtctccacaacctcgactaattagaagcgtggagatggaggatgggagtcggccagccgccgtcgggtgcaggagatggtagatggggctcaggaggtgttctgctatttgctaaggttttcaccatgctgtcagctgtggcccattgcgtggaggatgacagtcggttgatgggttatgggtatttcttttgactcacgagttgggccactcagcgcccgggctgggcctcgctaggccgcagctgtgcagctcagctcgagtttggctcattaagaaccgaactaaaatgttggctcaactcgtgactcatttcaaacgagtcgagttgagtcaagccactaatgagtcaagccgagtgaattattgagccacaagtttttcatctaggcctaccctaagaccagaagaaagtatgggaggaagcattgttaaactcatgtccattgtcacattaaacagacttgatattgtaacca

SEQ ID NO: 75551 - DNA, 319 bp, Zea Mays
gacaaaaaatgatttgactcatgcaaactaagacgacaagttgttttgtttggcagattatgctagcagaggacacagatgcctaagtgaaactgtgatttgttaattacatagagtgcaattcatttcatttaattcaggagtactgcaatagttctacttatagaagaacattgccagttttctatttttttaaatatctatgaaggtgctttggactgatgtagtggattgagtaccagtatctaacatacagctttatccccccttaataatcctccaacgaatgacatcttttagtagagttagtggtccatac

SEQ ID NO: 75552 - DNA, 427 bp, Zea Mays
ctgcaaaacctgggtacttttggtcaaagtccttccacgtttccccatcacccggatggctcatcagattggcaactggcttcctcactttcttgtgccatcgtgtttcctcagaagtttgttttgaagcaaaaattcttttcaaccttggcaagagtggaaaatgcctcaaaaccttatgtggaacccgcttcgaaccaatttcatctttccatctagactccttgcatactgggcactcattcattttatcattaacatttcgaaacaacacacaattgttcttgcacacatggatgttttcgtatccaaggcccaattctttaagatatttcatggcctcatcatatgattttggcaactcactgttagggtatccatctgacatcagcttcatcattgctgaaaatgatgtattgctgattcg

SEQ ID NO: 75553 - DNA, 848 bp, Zea Mays
gagctaatgggcaggtggaaagagccaatgggatgatacttgatgcactcaggaaaaaggtgttcgacaagagtgaaaagcttgcaggaaaatggatcagagagcaaccatatgtagtctagagcctgcgaacctagccaagtcgggccttacatggaaacaccctattcttcatggtatatgggtcggaggtagtattaccaccggatttgatctttcgagcacccaggctaacatttaaaagcatagctgaagctaaagcaaccagactagaagatgttgatatattagaggaagaacgtgtgaatgttgtcattcaatcggctagataccagcaaaccctgaggtgctaccacgacaaagcagtacagcatcgatcattcgtagtaggagacctagtcctccactgagtgttgacgggagaaggacgacacaaattgtcacctcgatggaaagggccattcatcattgcagaggttacccggccaggatcctactgacttacccaaatggacggaaccgaagtggggaattcgtggaatattgaacacctgaggaaattctatgcgtagcaatacctcaaaattctggtgggcaagctgtactttgtaagcaaaaggtctcgttatcaataaagcttctgtgttttaccgcatacaaactctcaagtaggtctgagtcggaaacgatttaaaaccggcacagcgtacctgcacgggtacatgactaagggtgattactataccctactaacggaggaattagcttaagtcggagacatcttaagtcggtgcaacatgctcacgcttacataacttagggttaatactataccctactaacggagc

SEQ ID NO: 75554 - DNA, 448 bp, Zea Mays
ccctcctcgtcgctgcttcatcgcgtcccccgtcgtctggtggtgtgcaatctcgagctgctgaatctatcggggacttgggtcgctcctcaggtgggtctgagtacccgtcggcaggttggaggccttttccgcttctcgttcttagtggattgctctctgttttgcttctacatttttttcctcgagttcgtcgattgcatttcatttcgtttggtcgggtgggtgtgatttggtagtggtggttctgagttgcgagaaatcattcggtcttctacaactcagacgaacgtgtcggtcgtttcccctgtccttccttctcctctgcgtttatccattcctcagcattggggatgagaagcgatttccgtcatttgtcaattcatgcttcgctcactgtggctccgcttcctgagtcgaataccaggaatctggagcattgggagtt

SEQ ID NO: 75555 - DNA, 698 bp, Zea Mays
tccgcgtcgaccttctccgccgccgcgtgatactgtcccggcctgcagcgcgccatcacctcaatttgaagtaaggaacccccaccagtccacctacattacctgcgcgtagggcatcttactgcgttggaatttctcctcggggaggccggtgcgtgaaatctagccatggagctccactgaggcgcgcgccgtcgtgtctggtagccgcggggagaagaagatactgtgttgaccgttgatcggccaacggaagcatgagatctaaaggcatgtcttccttcacgcgtgcggtcggtgtgccgtccgatcggaatcgtgggggtcggagttgatatctacgtaattaaatctgggtcgcgcgcggatcggcgatccgagggcccgtgtggcataccggtttgtttaaagaccaaatgaatctgtgccatccaaatctaatccaacggccagatctggccgacaccccttcggctgataaacttgcataagagaccctagaaatttcagtaataaacccaccgtccaactcggggtttactgagtctgtgtaaatcttgcgggttagcccctaatcttttcagtaattggcgcgcagtgcagagagtagtgaaaaccagataattaatattagaaattaatttttaatacaaaaataataatagaaacttgtgaaattcatattcaaattattttag

SEQ ID NO: 75556 - DNA, 489 bp, Zea Mays
agaacacaaactgcttatttctgctcctagaacaacgaataggttgtatattgcaaaatttggtatgtcttcacctgtcagtttacttgcaaaatctgaagaaaagtcttggcaatggcatgcaagatatggacatctaaatttcagggctctgaatgatttaggcagtaaaaacatggttgaaggcatcccaagtatcaagaaggtagagtaggtgtgtgatggttgtgttctgggcaaacaacatagaaaaccattcccacaggtgtcgagttttagagcccaaacaggattagaactggtccatgctgacttatgtggaaaaattactccaagaaccatagggggtgcattctattttctggtggtggtagatgaccatagcagatacatgtgggtagagattattagcacaaaagatcaagcattggaatattgtaaaaaggtaaaatagtgagctaaagtggagtctcgcaaaaagctaaaggc

SEQ ID NO: 75557 - DNA, 635 bp, Zea Mays
ctgcacatagggttgggaaaggcaccacatatgtcgggggttagatgggatgttagggaaccgctcgagtggactccacatctagccaaagaacttctctagttatcaatactgtgctcatcacattaactgcgctcatctcattaattatgactggcgctgagctgtggtatgcaagatgacggagggaagacaagaggattggttacgaaggctaggagttggtgtgggtagaggtggacatgcagagcaatgatgatgcttagattcccgtcgtcggcacgcttcaccaaaaatcttaaagaggcatggtggagatttatgtgaatggataatgatacacggaaaggcatttaccgagggataactatttcacaacaatcccttccgagagaagcaatatgtaaccttccctctccttggtctatgaaaggaggagggttcgcttgacaaaaaacggaccaaacccaagaaccaacaattgatacatagatcttttagcagagcaacccttagagacttgggatctttgcttctcttgccctcttgtaacccctactacaagcaatcaggtgtcggtagcacatgctaccaaagactggaagtagggacgttcatcctgaactagtataaat

SEQ ID NO: 75558 - DNA, 305 bp, Zea Mays
tttttttttttctaaaccatggttttgcatgtctatactctataggttctgaaactgcagttttttaatgccacagtttattaatactacacagaatccaggacccaaatcttattttagtattttgtggttttggacttgtctagccaatagaagtgagcttgagcctatttgggcattcttgagcttattcatcaacattgggcctgagcatagtttattttgaactattctgctgatacaccatgaccctatggagtagcattagaccccaaatggccaaatttctctagtttggattccag

SEQ ID NO: 75559 - DNA, 959 bp, Zea Mays
ccggcaacgcgcacgcccacctagcaggaatcggaagacttttcttcttgcggctcgtcccggcgtttggctagctgctccgtctcaaatatcaaacaaatcatcggctaagccgatagacttccaaatttacttgccccgtcgctaaaaatagaagacatgaaccaggagactcagacatacataatttggcacatacagaaatcccttgatgtgcaggttcagcaacatataaaatttggcgcagcagtatgcaaccaattgtatattgtacgatacacaatgtattgaatttatttgagtaaaagaaaaatgctactacatggttgtatcatttgctccggtgtcaaattgtaattttcgagcagctgaagcatcttgatcaagaccaagcaaaagacttgtatattctccttgcacaatgattggaaagttgatcgcattattggtagaaatgtttggtaatgccacattgccaccactattgtccccaatgttccttgtttcttctccaacagcatctgaaatagcagctattaaaagacatgatgctaataaaaaattcaatcattgcaacaataaatcaatacctttttcttgatgacttttctttttcttccttgtattcttttcaacaacattttttgctcgtttacttttcggtccttttactacatgaggaactctaaatgatatcacactattctctgtacatatatcatggtcattcaaaccaacgaaagaatcttcattttttcgcatcttgtttagtgaatcatcagccatcgattccaaattttccaatgccctctccaaatcgtcatctagaagtggttctgatgttgcacacttcaatgcaagggatgttgctattcgagagatacgagcagcacgtgccttcaaattttcatttggccttccttttttctgaacataatgccctctttttgcatattttg

SEQ ID NO: 75560 - DNA, 597 bp, Zea Mays
cgagcgggtggattggatgctggaatacctaacggagccgagggtgtgctcaatttatagggctcttgagcggtggccgatgaatttgaaggagacgcgcggcggccggagagggggaagagcactggcgcaagcgattggtggcagttactatggtgggctcaccggcgatgaccgggtgtgctagagcgagtcactacgacgaagtactgtgtctaggcacgtgtcatccgagcggcagacggctaactccagtgaacttatctaaattcggccgtgaaccaagcggacacggcagccgcgcagaacagtgccccaaagctcaatagcggtgaagatctttctaccccgaggcgttatccgggcacaagtgagcacaaatcacctcgttggcgtgaatccatgcgcggggatcgccggcggcaagttcactaaaccggcagatcttttcggttattatactatcaagaacttcttcagtcagcccgacagagcgaatggcagggagatttgctccaaatttcatgcagtgactcgatcatctcactatatcaaagttgtagtctaacaaaccaactttaactttgttacaatgtt

SEQ ID NO: 75561 - DNA, 638 bp, Zea Mays
ctgtaacagtactgtactttcgggctcacatttcatctttattacacctttagagtcgatttggtgacaagagggtcattgaggattggagaggattaagaaggaataaactaatttcttcctcaatccactctaatcctccgtgattcctggtcactaaaccagtacttaggatttgttcggttgcgcaggatttgttcggttgcatgtgaattaaagtatattgagagggaataaatctctttctattaattttgattatggaggaatttaatctagacacaatcgaacaataccttaataaccataatcatcaagggggaacagtataatcacacacgttccacacagggtagtaggtaatcatcgtcaagctagggggttagttctgtgtgcactcgccactgccgattggtgtttcttttctttctctctctgtctctctctcggtcaatgggatctgagatttcagaaggcgatctttttggttcttgcacggggttaacagggacatgcatggtctggaccacccagttgcatgtgtgcggcagagacacactgtggcactcaccaggcttgcgacatgcacgttgatggcgtcctgtcccgcaggtggtccaaggcgcgctcgccggcga

SEQ ID NO: 75562 - DNA, 680 bp, Zea Mays
tttatatgggtaaatatgagtgaagtgggcgcttggtttgatttgaggcgaagaaaatggaatttgggcactcggctcgaaattgatcgctcgaaacggggaattgtgtgaaattgaagcctagtatatcggattggcgtgaaatttggcgaatatgttactggaggtattgtgaaggtgcctgaaaaatttgggttcaattggagcattttgactggtttgggcatttcaccgagcacgtggcatgtagtattctaggttttggaggaaatggtcaaataagcctgttaaaccctccctaaggagctatttacctgcaggggtatataatgtggcactagggactcattcaagcacagagattcacagaatttggaaggaatttgaacttgagcaaacaaggtgtggtgagaggcttgactgagctgtgaaacagagagaaaagagggaaaggatctcgagctgctcaccagaggggaagggaggccgagcaggagcaccaccactggagcacggccgccggcgaggaggaggtcaccggagaggagagctgatcgcaagagacagagaagagcagcggtgagagacagagaaaggttccctgcctcgggctcgggcggggaaaggatttttaaaaaccgattatgggcgcaccggacagtctacagtgcctgtccggt

SEQ ID NO: 75563 - DNA, 313 bp, Zea Mays
tttgcttttttattggtacaagagatttaatccaggagcatatagctttcagagtgtggccgcttgtagagaactgggaaatgccaaaggagactatcaccaagtctagcgaaggcgagctggttcgattgaaatacaccttcagatacggagataaatttgatgaaccgaatgatgactggctgaaatgtattgaagctacaagtgatgaacttcttgggccatattccaaagcggaagataataccttatccacatccttcgagggccagggaaaaaagagattaaacagagtttttgatgctattggttt

SEQ ID NO: 75564 - DNA, 294 bp, Zea Mays
agtttatgaaacttatacatacataataaaaatgtcaagacacattcaaggtttttagtataaaaagatattataggacccagctactaggaccatcgcttataggcgttgccatggagacctacctaggctccagccaaggcaagtgcattaatccttcgaccaacttgatttcgaggcactctaatgaaactaaatccatgccaccatatctcgttaaggcaaccaagggttcgagggtcccatagcactttgaagtttagagcactcctagacctacagacaccaacctac

SEQ ID NO: 75565 - DNA, 435 bp, Zea Mays
gttgggacagaaaagcaaccacacgcaatgctgataccaatggagtactttctcatgggatatggactgtataggccaagacagataaactatagccctcgtagccctctgaatccgttttgtatatcaccagagctcctctctcctgagagcatgggggttaagctaaagccaatcaagacacgagccaaccttaaagcataggaacaggtgatgagaatgcgtaggaactgatgcgcatcccttgatttttttgtgctgaagtgacatagctattgtttccgtgatgtacataagacaagaggttagtcgggtcagggttgggtgggtggtcgattccattgatttgtagcctttaaaacagttgtacattgtcacagatttatttgttgaagggagaagaaataataaggggagatgagatgttgccaaaag

SEQ ID NO: 75566 - DNA, 960 bp, Zea Mays
agccaacatctttgcttatagggtcaataaatattctgggtctgacatcaatggataccattttcgcacaacaaactatgaccaaagtcggtccaatcggaaaacaacgtgttctggagtctttacgcccggccttgacgatgtcgattattttggacgaatcaaagaaatatatgaactcaatttttatggttccaaacctcttactccagtgatattcaaatgtcattggttcgaccctcaagtgactcaagaatggtttgatcataactcttatcatcactatcaaccatttcatagtcaacaccatctgaaggcgcaagttcgccattaatgtcattgccttcaaggattactaagtcattctcattttgcacctcatcatcctcctcatcaacaaccatttcaatatctacgtccattctgatagcttcggttaagtctatctcaaatcgcccttctagcccatcttcttggaagaactctccatcatatgtgtccgggtctaagttataatcttcatcgttaggaacaggtaatctcccgtgcggcgatgccttatacataacatcccaacccttaagatgttctttcgtttggcacgcatatgggagataatacacttgtgtggcctgttgggccacgatatagacatcgtctcctggtaaggtggaatcttgtcgaatttcgactatcccaagattagaatgtgtctgtctcatcacttgagggtcaaaccaatgacatttgaatatcactagagtaagaggtttggaaccataaaaattgagttcatatatttcttcgattcgtccaaaataatcgacatcgtcaaggctgggcttaaagactccagaacacgttgtattccgattgggccgactttggtcgtagtttgttgtgcgaaaacggtatccattgacgtcatacctagaatatttattgaccctataagcaaag

SEQ ID NO: 75567 - DNA, 370 bp, Zea Mays
atgtgagtagtgttataggtggtgtctaccgagctgtgagatgctaatgagatgaaaatggagggggtcccccttggccttatatacacgaccatagggtgcttccagcgtacatgttgatcatacttttcctgcttatctcctaattaatagcaaacaaccttcattgtcccgagtaaaaccagacgccttcgatccgagctatctctagcgtttgaggatgtcgggcgcgggaaagacaaacggcctcaacacgatcacgcccaatccgcgactagtccgggcctaggcccatcgcactcctgggttggcccgcttccatcgtttccctttgcccggcccacgtcgggatgtcatagaggggcaactg

SEQ ID NO: 75568 - DNA, 452 bp, Zea Mays
ggctgggctagctaagctagattctggcttgagaatttcagacggatcggagcacagcaaactgctcgatcgacaacgttcgcctttagtacatgttcttttcttccgccggtcatccaacagcctctactctactggccaatgattgtgttgagatcattgctagtcgaagaaagaaagaaaggaaaaaattggagctgttcattgcagtgctgtctgtcagtcagtcgtagtactctaccgctagtagtgagatctggactctgcggagaagtaacaatccgcacgcagtacagaaattcagttaccaaagcacgccactccatgttcatcgacagcacgccacttgacgaccgcctttgcccttaaactttcaaatgacttagccgttgaacctgagactaatactctaaatctaaagataaccgtaccatcggataccaccccaccac

SEQ ID NO: 75569 - DNA, 501 bp, Zea Mays
attgggatcagactggggagagacagttctttgggcctgaactgattcaagaagcagaagaacaagtccgtataattcgagagaatttgagggtagctcaaaccagacaaaagagctatgctgataatagaaggagaccactggaatttgaagaaggagattatgtgtatctcaaggtgtcaccgcttcgtggattgagaagatttaaagttaagggcaaattgtcccctcgctatatttgatcattctaagttttaggcaagttggagagatggcctatcaactcgagctaactgataatctatttgaggtgcataatgtattccatgcgtctcaacttaagaagtgtctccgtgttcctgaggaacagttaccaatggaagagctcagtgtttagggtgatttgacttacacggagtatcctgtcaagattccagacacactgactcgtgtcacgaggagcaaagttataaagatgtgcaaaatgcaatggagtcacca

SEQ ID NO: 75570 - DNA, 805 bp, Zea Mays
cccgcctcgtcagacactctcactctctcgcctcgcccgttgtctctcgcggtctcgccctcggtctctccgtctcctggcgatttgggggcgattcgactccgccgccgcctcaccgtccgactccgccgctccacctcacggtccgactccggtacggtgctccaccgctcctcctcaccgtccccctggcttcccatcacggcctcacctggtagctgcttggctcttgcctggtggtttggccgtcacggctttggttatggtaagctttcaatgttcgtcttcttctgcctctagccgacatctccgacgaggttgagacttcctaatctagtgcttgttcttgtgatctgtgcttgtgatctgtgctcgaaccccaaaccctaatctactctactgccttcttgctctgtgattgtacccgtgagggaccgatctggtgctccggctttggtaagtgcttaatctggtgttagttcttgtgatctgttcttgtgatctatgtttgtgatctgtgttcgaaccctaaaccctaatctactctactaccttgtgttctgtgattttagccgcccgtgagggaccgatctggtgctccggctctggtatgttcttaatccggtgcttgttcttgtgatctgtgtatcgtaaccggtgcttgttcttgtgatctgtgtaccaaccctaaaccctaatctactataataccttctctgattatagccgccgtgaggaaccgatctggtgctccgggtttggtaagtgcttaatccagtgcttctatttctgatctgtgttgctt

SEQ ID NO: 75571 - DNA, 399 bp, Zea Mays
tgagggtcgagattagagctctggttggcggatctggcggcgggtgctaaaccgtaggatgagtaaaggatggtctggattggatccaactgtgaggttcgttcttaggtgtttgcgccatcgatctgggatcgaacggatccccatcgatctggcttgtttaaaatctgggatgatggatctagatccaagggccagcatcacacatgggtctaggactgctcggatccattgatttgaaatcggacgaccctaatggccccgtaccccttcacccgagccatgtttcacataagcccctgcgtttgttttaaatgaacccgccgtccatgctaggggcactctgtgtctctggaaacttgcgcgtgagcccctgcgctttccagaattcatgcgccc

SEQ ID NO: 75572 - DNA, 488 bp, Zea Mays
gaggctctcatcattggcctcgaaatagcccttagtatgggtataagcacactccatgcctacggagattctcaattaatagttaatcaattattaggagtatatactattaaaaacaagtcttataccatattttagaaaagcaaaaacgcttatatccatgtttgctgatttaaaagttcagcatgttgtacgaaataaaaatgaaaaggcagatgcactagccagtttagctactagcatgtcactaaatccacatgacacaatggatgtacatgtgggggaacgtagagtccttcctatattggaagacgaagaggaagaagacatatcatccacctttgcaacaaatatagaaacttgtgagattgagatgggggattggcgaacaccattcgtcgaatatttactccatggatacttgcccctcaattcaagtgagaggtctaggattaggaaaagatcaattaactacacctgcataaatg

SEQ ID NO: 75573 - DNA, 612 bp, Zea Mays
tggcaatgtaaagatttgtccaaccttgccgacacggacgtcattagtgctttcatctcaggaacgatgagtgagactctagtgcacaagctagggcacaaaagccctcgcaccatgaaggaggtcctagaaattgtgacaaataatgcgttgggagaagacagtcatagcgatctttgatcgtcataaagaaaaaccaagcgcgtcgggagaagacatcgtcgttcatcgggaaaagaagaaaaagaaagataaacgatgacacaatgatatgttggttgtcgtcgctgactcaaaagggaagaagctcctcactgaagaggctaccattcattttgaaaaaatgcccaaggctccttacacaagtcactattattttgataggcatgcgtacaaggattgtaggttgcttaggaaatttctgactaaatgagtaccatcgaaaaagggcctcagaccccatagggatgatggctaggaaaggaaggaccttgtttttcctgatgaaatgggtgcctattgatctttaagcaggtccgactactatgcatctaagagacattgaaacttgaatgaagcgaagtgttccaagcatgatcagttgtcccagct

SEQ ID NO: 75574 - DNA, 456 bp, Zea Mays
gggacaacaccgcctctgtgcccgaagtagacgaagttgttgtttacaggagtttcatgaaggcagggcttcaatttccgttgagtaaatttctggttgaagtgttaaagacctttgagatttttcttcatcaaattacccccgaagatatcatcagggtggggatgtttatttgggtcgtgaggagccagggacaagagccgagtgcaaaatgcttctacaacatgcacgagttgtcctatgagacgaagactactggcaaggagcagtatcataataattttggttgttacggcttcgtgccccgttccgatgtaagctatacagttccaacgtttcggaaaagatggtcaggaacctggatggaagaatggttttatgtgaagaataacttagttgaaagggaagatataaaagggattatccaacgccctatttggtctcgcttcggcatca

SEQ ID NO: 75575 - DNA, 762 bp, Zea Mays
gcggtctgggtggcaacctgggcgtgctacctcgtgggtcatgctccggtgggcaatcgtacacgtatggtggcggactgcaggcaatttctcgtcgtagggctggcgggcatttgagttgtggtcggctgtgttgtcaaactgcaccgtgggcaagcgtgtccagtgttctagcaccggtaagaagtccatgtaccgctcgttcgtccctttctttgcctttgacacatgaagaatcgggatggggtcgtggtacaccgggaattcctcgccgcggtgggcttccgccgctctgggtgcgcgccgccgtgtcgggtgtcgcagggaggaagacaccgatagtgccgtagattaggaagctagcggctaggattgtctggcgtactcgtataacaggaaatcaatcctgtccgttgatcaaacgacctaggcgtgggatgtgattccgggctggtgaactctcgtccgttagtttttgatcggatgaccaccagtgcgtgcttgttttgtagttgaggatgtaatctggatcgttaaattataatcgggtgacccgtgtggagcgataccccttcggctgatgaatttgcataagagaccctggaaattctagtaataaacccacagtccgttctgatgataacctgagtcttagttacttttgcgccagggcccctgcacttcttgagaattgacgtgcaatccaggaaatagagaaaacaaggaaataattatagaaattggattttagtgcaaaaataa

SEQ ID NO: 75576 - DNA, 385 bp, Zea Mays
gtagaattcgagccgatagcatttgtttgaatgtaagtgtggaaataagggggatagtgtttcccgctaatctcatagtaatgggtactcagagagtagatgtcatcctagggatgaactggctagataagtatcaggcagttatcagttgtgataagaggacaatcaagttgatgtccccactaggagaggaagtggtgaccgagttagtcccgcctgagacaaagaaaggaagttgttatcagatggctgttgatagcagtgaagcagatccacttgagattatcaaggttgtgtccgagttcccagatgtgttcccaaaggacttaccagacatgccaccagagcggaaagttgagtttgctatagagcttcttcctggcac

SEQ ID NO: 75577 - DNA, 342 bp, Zea Mays
caaatgtcggcaaggcatttttcagactgtaaggcattacaacataacagtaaagcccatccacagttacaaaagcggtatgcttcctatcttgcctagacatctggatctgatggaaaccagagtaagcatctaggaagaagaggaggtcgcacccagaggtagaatccacgatttgatctattcgtggaagtggatatgggtccttgggacaggccttattgaggttggtgtagtcgatgcacatctgaagcttcccgttagccttgggaacgatgactggattggccagccatactgggtgatggacctcttcgatgaagccagcgcgcagcagcttcc

SEQ ID NO: 75578 - DNA, 450 bp, Zea Mays
gagaagatctctttttggatgggtccgcaatgcggagcaggacgcctttctgatctgcaatgcaggagagggatccgaagcataagatcccccagcattgaaggtgaccaggatgtcgaagatgatagccatgaaatcgtcgtagatcaacgtcgcacccctatctgatgcgtcaactgttggtgtttatgacccgactgcgcaccacgggattaccccacgtgatgcttttgggtaggatgacatcgttaactacgactcgatgatatgtgcaggagcacgtcggacttgcacaaggatttatacaggttcagactgctagaatgctaacactgaacttcatgtcgaggctgtgtattggaattgctttgaagtgtatggatacaaatgagctatggtggtgctaaggtgtagttgatgagagctagtgtatgatgggatagatgtttt

SEQ ID NO: 75579 - DNA, 308 bp, Zea Mays
cataatcatgcatttctactactagacgcgcaacacagtggaaggacacattgatgtagtggaagtcatcgaatgtccttgcgtaccaacaacaacacatttgcccatcctcctcaagtttgttattgatcaacaccacagtaacaacagtgtcaccgtggtatatccatacgtgtgaagatgaaatatcgtaatgtcggtgcgctaaaaacatgcatattgagagaagcggtgtcgacgtatcgagcgtctgcaaccattggaagagacagcgatagctaatatgattctctcaagcatgccagacc

SEQ ID NO: 75580 - DNA, 620 bp, Zea Mays
gcatagaggtcgccctaagatgagtaattgcaaacgtgcttgtgttggattaggtaaacgcgaatgtgccgtgccgttttaagttattaccaacttaaaccgaccgctctgttagtagggtatagtggtcaccccgagttaagtaagcgtgagcatgttacaccgccttaagtcattgtcgacttaagtcgattgctccgttagtagggtatagtggtcaccccgagtcaagtaagcgtgagcatgttacaccaccttaagtcattgccgacttaagccgattgctccgttagtagggtatagtggtcaccccgagtcaagtaagcgtgagcatgttacaccgccttaagtcactgccgacttaagtcgattgctccgttagtagggtatagtggtcaccccgagtcaagtaagcgtgagcatgttacaccgccttaagtcactgccgacttaagtcgattgctccgttaatagggtatagtggtcaccccgagtcaagtaagcgtgcaggttgacagtgaacaattcgagtgcctttgaagtctttttattgatgatatatttcccagtttatagagtacattgtcgtcccaatagcttttgagatatagctagggata

SEQ ID NO: 75581 - DNA, 409 bp, Zea Mays
tgatttttgtaacaacaacacagatccaccggggggaatcatcacgaccgttggtagctagggcaacggtttaaatcataacgtgacttacctattcgccgtgttcgatctgagccgtcgatcctgtatcgtgtggatctggataaaatcaaggttacataaaaatctcgatcgttgatctgttgataggcggtcatgatcgcgtaccatttcgcaatatggatgatctaatctggcgcatccgtctttgatcgggtggccgagagatcatgataccctttcgctctggtacattagcataagaaaccctaggctttcttgaaatagaacccacagcccattaccagtgttgtctgagtcttgtgaaagttatgatttagcagccgaaattctcaatattagtaagcgc

SEQ ID NO: 75582 - DNA, 296 bp, Zea Mays
tagccatcatcatctatacaagataactctacatggtcgagaatataaggcggggaggtacccctaccatttcatctcatcctagccttcaacacccacaattcttagcttgtaatcctcacctcaataccagagtcatgcacatgaagtagggtattacgcaactctacgtagcctgaacctgtataagtttgtgtgtcatcttgtcgtgttataacacagaccatcaagttgcgatcaacgacgttgtcctacttgaaagcatcacgtgggtaacctcgtggtgtgcggtcgga

SEQ ID NO: 75583 - DNA, 493 bp, Zea Mays
cgattgaggaaggccccttctagctcccgtgcgcatactgctgctggtcccgctgctgccggtacctcgcgtccctctcctggtcgcggatctcccacaccacgtggtcgtggtcgaggttgtggtcgtgggatgggagctcgactggcccatggtattgcagccttcttttctacgtgcaggaacatatctttcgatgttcatgagctggcaaggcgtcagcgggagactgacgacaacctctgtcatcaagcctcttccatgggtatgccatttgctccccgctcgcctgatgtgcctcttcatcctcctccgccagaaatcaatgaatggcaccagcaggcctatggggtgcccttcatgacagcagaagatgaagaagaagaagaggaagaatattttgatgatcgtgagcagtatgccccgcctccccaccaaggggattcgagtcaatcttcttcatatcctcctccccaggatccatcgggcagct

SEQ ID NO: 75584 - DNA, 621 bp, Zea Mays
cactgtccttgttcagatgaaaatgaaaatggactgcacagtcatcttcaatcgggtgaattcccagattttggactagacagtaatctgaacagggtgaaaatgttcagattttggactccaaagtaatctgaatagggtgaaaaaaaaacagaattcagtcgggtgaaaattgactgcatagtaatctgggaattcttcagtcgggtgaaaatgaaaatgttcacaggcactgtccctgtttgtttcagtcgggtgaattctgggaaccttcacagacatcttcagttctgtgcatttttctccagcctatgaacattttctgggaaccttcacagacacgcttcactttttgtggatgctagtgtgttggtcgtgttgatgtgggtggagctctctccagcctgcgcatcttagatatgagctctgagatccttgcaactgtcgagatgccatccttcatctcagtgagcgtgaagaatcctcaagcatggtgcgtcaagcgcttgttgtcaccgctctgctactttgttgtcaccgctctgctactttgtcacatgaagtcataactgaaatttgtaatgggtaaaatgacccacatccagttcacatgaattctgt

SEQ ID NO: 75585 - DNA, 424 bp, Zea Mays
gagaagctttttacgagaaggataaccctaatgccgaaactgaaaatgttattgccgaagctggaagtgatgacaaagaagatgatggcatactgagtcgaagcaagcctagccatatcgagtttggcagatccaccgtgaaacctgaggacttagttttaatgaagaaacttggttatttcagaaagaatgatgataacttgataaggttcgcgggtgaagagataattctagagccaaaggatgatgaggtggtggtttttaagagcttcttctgtgttgggcttcaattcctattgtacgagatgattggcgaagtattaaaaagatttgagatatatcttcatcagctgacaccaaacgctatagttaggctcagtgtctacatatgggctctccgaaacaaaggaaatagtgccaatgc

SEQ ID NO: 75586 - DNA, 446 bp, Zea Mays
ctaggaagcacaccgaaaactatatttccaaagcaagccaactccaaatggtctaccatgggatggtcaataccttgaggccgatttagctttctcaaaacattttacaaaggtttttcaaatttgtttcaactgccactcgattctatcaacatatgcaaagttagatcgctcaagtggaactaggtaatcaatgtgtaaacaagtttgtctctctcactgcggccatctatcctaaaaccgatcaagcacttctctaatcaatctttgcaagtgaaataaaatgaaatgcaaatatacttttgccttgcatattctatttcatctccatgtcgatgatgccacacaagcatccaacctctgtcgtcatcaaacaatgaacaatgatcatccataggtgtagccaaccacactatatttgatcaattcccatatcatatagttcc

SEQ ID NO: 75587 - DNA, 522 bp, Zea Mays
cgtccgactcatgctcaagtcatttatagtttttgatgctaaacttgtttccctagttcatgaaaaccccaagtacacatagatgagctccgaggatgtgatgggcaagttttttagccatcaatgatggttaaggacgcaaagtacatcaacgacatcgccaacaggatcctcccctccaacgaaccacaagtcattgctttaaaagcgacaaaaacaaggaggtgctccccagcaaggtggcacaagtttaggcagccaacctcaatgaagaggagatggtgcttgttatcaagcactccaagaacacactaaaggaacgcaaggactactccaacaagggaaaatcaaaggagaagcgtgcttgcttcaagtgtggcaagtttggttattttgtagctaacttgtatgataatgagaatgaccaggacaaggagaagaaagggaagaaagttgagaagaagaagttttacaagaagaagggtgaaagctctcttgtgagttttggtggtttggatgaca

SEQ ID NO: 75588 - DNA, 496 bp, Zea Mays
gaacagtaagtgcaattatttttcctagcctacttaagtaacagagaacctaggaaaaataaaaagacctctagtccagaacagaattaaagtgaaatgttttatttagcattattccaactagaaaacgattattagaattatgaggacaatttcaaaacttgtcataaaaatccagtggacttgtgaccactaaaaccccactacaaaaatgataaccaccccagcccattattttaagtagggtaaacaaataaaatttgatattgggttatattttaattaaatcataaacaacccaaaaatgatgcaataataggcaaataaaattttgctagatcaataatgagataggccaccaaaggaatatgcaaacccatttgaaagatgccaaataacacatattgccaatattttatgaaaaaggccatttaatccaaataattcctaccacccgttcccttaagcaaaaagatgccaaacttcagaatgattg

SEQ ID NO: 75589 - DNA, 1056 bp, Zea Mays
aagtaagtgcagtgtgctggttttggaatctttttctgatttatgctaattgatcggttagtaaggcatagagatagccctaagatgagtaaacgcgagcacgttacactaagtcaagtaagcgtgagcatgttgcaccgtcttaagtcattgccgacttaagccgattgctccgttagtagggtatagtggtcaccctaagtcaagtaagcgtgagcatgttgcaccatcttaagtcactgtcgacttaagccgattgctccgttagtagggtatagtggtcaccctaagtcgagtaagcgtgagcatgttgcaccgtcttaagtcactgccgacttaagccgattgctccgttagtagggtatagtggtcaccctaagtcgagaaagcgcgagcatgttgcaccgtcttaagtcagtgccgacttaagtcgattgctctgttagtagggtatagtggtcaccctaagtcgagtaagcgtgagcatgttgcaccgtcttaagtcattgccgacttaagtcgattgctccgttagtagggtatagtggtcaccctaagtcgagtaagcgtgagcatgttgcaccatcttaagtcattgccgacttaagtccattgctccgttagtagggtatagtggtcactctaagtcgagtaaacgtgagcatgttgcaccgtcttaagtcattgccgacttaagccgattgctccgttagtagggcatagtggtcaccctaagtcgagtaagcgttctgattgataataaatagttcgagtgtccttgagaacgaaatcttttattgatgaggtatttaccaattacaaaatacaatgctcccccgatagtttttgaaaccttgctaagggtaaaatttcatgacatgctctatattccatgaattccatatttccgtgccatccatttgagtaagcctatatgatcctggtcgagtgacctctgctactacaaatgacccttcccatagtggtgacaatttgtgtcgtccttcccccgttagaattcggcgaaggaccaagtctcccactacaaaggatcga

SEQ ID NO: 75590 - DNA, 493 bp, Zea Mays
caatcaatttagaaccaacaatttgacttgcaaattttattcaagtcactagtgcactaaaattactacaaccaattaacaacgtattctccacgataatcacccaacaatttgcgttttaaattagacatcacatgagcactacaacttttcatccgcgaccataaccatgcgcaatttggctacaacatcccaaacgggtgcaagaacactagtttctagttttaaccccataattgttccattaatcattttaactacttaatcggcatcgaccgacttaaccttcatctggacggtccgagcaccacaattcacgaaaatctacctagacatctagcatcacatagagagcctactacttcacattgcaattcatgcagaaccgcaaggtgacaataataacacacatgtaatcgacctttttctacgaccttcagttaggtcaccaaccgacgacatgatgactacgaaggcatgtcaccatttcatc

SEQ ID NO: 75591 - DNA, 326 bp, Zea Mays
atttaatctatctttaagcagtaaccagaaaaggccttgtgtttaggctggcattttgttttccacaaccaggagaagatggggtgggtccactggttgccggtcatatgagtataggccttctgagaggaaaacatgctagaggaaccattgcagagccatttgtctctctgatcatgttgcagaagattttccaataggtcttgtaaagcatgaaactgctcaaaagcttcaacagacagaggagtgtggaacatctcatgcgaggctgccattcttgcttgatgaatagtgatgtctttgatggaagagaaagaccaaagttc

SEQ ID NO: 75592 - DNA, 355 bp, Zea Mays
tttatactcctatagttcctctacatgtttggcttagtgatccatagctaattggtctggaacgattaacaactcgaactggcttggcctgctgacggatggcacaagaagtcacatacttatgcacaaccgatttcatacccggccaataaaagaacttcttcattttcctatatgggagagtgatcttcttcaatgggtgctataataacctaccgagacagagcaaaacaaacctcggtgcacgaatctagaatgcaaatggttgtctgtgaacctgtttgttcgaatattctgtgaaccttggtgtgtttgagaactatgtgtactgtttatactgtgtgacaacaacaaa

SEQ ID NO: 75593 - DNA, 340 bp, Zea Mays
attttccaagggcttttcttccaagtgattgatcactgtctttccttttgcatctgttgacttgtctatgctaacttggattctttcaccttgaggacttgtcaacataattgttccgttggcacactgtatcactccatcacaacttttcaaccagttgcatccaagaatcacgtcaataccgttggatcctaggaccactgggttgactgaaaaatctattccttgaatcttgatattaacatgagggcatgagtgtgtggccttcatgtcacctcccggtgaactaatgtgtaacatcttcttaagggggtacttaggtatgttgtgcttttccaca

SEQ ID NO: 75594 - DNA, 289 bp, Zea Mays
tgaaaatgttgatgaaagtgaagaagactatagcattctgttcccaacaaagcctagtcatcttgaatttgaaaaatctactgtgacggaagatgacatgcctatgatgatgaaattgggttattttggagaggctgagagcaaacttattcgatttgctggagaagaggtaatcctagagccgaagaaggatgaagttgtcgttttcaagagcttcttcagagcagggctgtgattcccccttaatgaaatgataggggtagttttaaaggatcttgagatatatctt

SEQ ID NO: 75595 - DNA, 446 bp, Zea Mays
tgcatgaaattgcagtctgaagtctgaactagcagaaatggtacctagcacctccggaccttattgttgcaaaaacgaataacctattggcgcaacaattatccagttcaactatttgttgccctcaagtctcaaccatcagaactggaattcgttccacttccctcctgcttagatcccagatggggataacaagtaaagctcttacatacctggcagtccgagaagaaattaactggccaccaggtagctttgctaataggcattccaagccattcgtgtccattgctccatgatagttcccgttggtgatgttagctctaaaaaaggagtattaaagctcggatgcttacttacctttcagcgtccactaggtcttaaaacgtgtgaaaggaactcactaggtcacctaactacgaatgcaactaaagctacgcatgcaaccg

SEQ ID NO: 75596 - DNA, 557 bp, Zea Mays
agacatccttgtctgcaacagtcgttgaatcatttgattggctaccttcctttcctggtgggcaccggactattcggtggtgcactggaccatccgatgacccctcccgaccattggcgcgctcgcgtggctagcgagtcaaccattgcgccacttggagagtcatggccgcctagcacaccgaacatgttcggtgtacaccagactgtcacatgatttttagtcagccagcccagtaaaactcgagagcggccagttgaccaggccaacaccggacatgtccggtccagtgcacgtcggactgtccgatgcacaccagattgtccggtgaagcccattctagtccaagtttggctcttttgagccaaactcattcacttctttttggctctctttgaaatgatccctagcacttatacaaacacatagttagcaacaaaaataattgactaactgagagaaccatacatttttcatctcttttgaaaaagatttgcaatatgtgcaaactaagtccaaatgtcacctttcttgcacaaaagagtcactagccaaac

SEQ ID NO: 75597 - DNA, 335 bp, Zea Mays
cagccacctctagggctgaaggccccttagccacatccatatgagctggatgactcagattagcgcttttgcatggaagattggccttctaaggtcgatgatgcacgagatgccacccgggttacctcttgcccagcagaatcatgcagcaaaagaccaccatccgggacctctgaacagatggtcggaatgttagcttctagaggctctgataaaatatcttcgggaatggcctcctctagtgcctgatcaaagtctgatattgaaagcccttgaaggctgacgagtgccgacaaggcttgggagggaatatcgctgcccccatcgctgcctct

SEQ ID NO: 75598 - DNA, 386 bp, Zea Mays
caacgtcctatatggtctcacttcagcattaggagaccatcccttgcccttgggaatgacatacaagcgtgccaagctgcttttaacacagtatgcacctacatagacaccagggacttagtccaagaacatattgcttacagagtatagccactcggaagtggatgagagatgtcgaaggacactgccgctaggtccaacgaaggtggtttagtctatctaaaatatacattcaagtactggagcagttcgatgaggcaaatgacgactggctgaatgccatcgaagcaactagtgatgaactgcttggtgcttactcacgggctgaggatgatgctatgacaaaagccttcagaggtcaaggcgagaagagactgaatagagtt

SEQ ID NO: 75599 - DNA, 318 bp, Zea Mays
cgaggaagccccttcgccaaattcaggtatcacagccggttcgatgtaacgcgactggtgagtcagaaccttcatcttcttcctcttcggctcagccgtgatggccgaagcagcagcttttccagcagcagcaatcttcctttttaccccttgccctctcagcgggtagcaatagtcagggtacacgaagctaatagcatcaaataccatgttcaaccttttcttattccgacccccgaaggttgcggacaaggcattgtcttcctttttggagtacgctccaagcagttcatcacttgtagcttcgatacacttcag

SEQ ID NO: 75600 - DNA, 563 bp, Zea Mays
gctgatctcaagtttggggcaccaaggttgatcttcgaaagtatagcagaagctgaggccaccaggctggaggacattgatgtacttgaagaagaacggctaagcgcggtaatccaatcggtacggtaccagcagactctaaggcgttatcacgacaaggctgtgcgacaacgattcttctcagtaggggatctcgtcctccgccaaattctaacgggggagggatgacacaagttatcacccttatgggaaggacccttcatggtagcagaagtcactcggcccggatcgtatcgcctcactcagatggatggcacagaagttgggaactcctggaacatagaacacctcagaaagttttatccctagctgtatttcaaaactgctgggacgacgatgtactctgtaaagtggaaatatgtcatcaataaaaagaggtttcaaagatactcaattcgtttacgattgacttgcattcttacttaactcggggtgaccactatgccctactaacggagcaatcgacttaagtcggcaacgacttaagacggtgcaacatgctc

SEQ ID NO: 75601 - DNA, 407 bp, Zea Mays
ctcatgctacctcatgggttgaagatgtgcatgtgctcctccatctgctcgagcggcgtcggtcatcagactcaaacaatagtctatgctgcctttgagatggttaaggacggagctaggttggggatgactactatgggtcgaaaaaggccttggtctcacctttgaaaggccactgatgcgcatgggggtgctcccacagcccgtggccgcctttgacattgtgaagttgatgaaggcgtagcccttactggcctttttgttggaccttactggccccccgtagctgacgttggggactgagcacaccatagggcttgaccggcagcagatgatgaccactccatacgccagggagccagggcgtagtccagtgcagtggactgcgtggtccttggtgtggccct

SEQ ID NO: 75602 - DNA, 642 bp, Zea Mays
tgaattttatcacacttttattagtcattaacgagtgagacctacatagcaggagaaaaatcatgtcataattgtggctacaaactaaacacatacctaactcagtaaaacatgtctaaccttagtcatgacaaactgtggaaaataaggcagcgaaccgaataggccctaacttccatagatactttttcaagctatcagaaaccagtcttgcccaaagttctttctggtggtggcaatctcaattacttgggtcattcgaaatgcaaaaactgatctaatcactactactttagagcactagttttgtacgtcgtgcgtcatatgcaaaacacatgcaaaacacgtaagtctattcatttcccccgattattgcctactaatggatcgttacatcacaaattagccatgagaaactatccaagcttaacatgacagaaagtcactcgcagcgcagcgcttccatatagtaccacctcgttagctaaaagagaacgaacgatcaaatgagctataagaaaagggtcaggctcgttttcaactcatatctttcttgacattttggagaaaataaagtgtaatatttgtttttatcagtttaatatttaatatgtgaaccatatgtgtactttaatattaaaa

SEQ ID NO: 75603 - DNA, 558 bp, Zea Mays
caaaaacgtgctacgaatggtgctcctctgtctgacacgatagtccttggtattccatgcaaacgcactatctggtcaatatagatttctgcatacttctccgccctgtgggtgttatgtaccggcaagaaatgagttgtcttggttaacctatccacaatgacccaaatagaatcgtggtgtcgggatgtgttgggtaaacccacaatcaaatccatgttgaggtcctcccatttccaagatggtatgggaaggggctgtaaggtacctgctaccttcaaatgactggtcttgactctttggcaagtgtcgcattcagatatatacttagcaatttccctcttcatcctggtccaccaatacaaagatctgagatcatgatacatcttgttattgccggggtgcatggaaaatttggaaagatgagcttcatccaatagtttcttcctgagttcgggattcttaggaacaaccaatcggtcttcaaaccatagaactcccttgccgtcctgacgaaagcatttgtacttatccaccttttgttcgagcatatccttg

SEQ ID NO: 75604 - DNA, 463 bp, Zea Mays
aagaccgcgctccaaggtcgacgaggcacgagatgctgctcgggataactctaacccggcatcaggcacatcagcgcaaacttccaacattccaccatctgccggctctaacaacagatcttctgggaccatgtcttcgagagtctgatcaaagtttgccagagacaattcttgcagaccaacgagagcagacaaagctagagaaggaacaccactactctccccgctggctatgtagcgccggctgttctttcgaatcaagggaatttcctcctcctcttcctcatcttcatcaataatgcggatggtacacccattgggatcagctttggccggattacacccattgggatcaacatcatcaaggtcacactcattgggttcagcatcagtcgggtcacacccattgggatcagcttcagcaaaaaccggcactggcacttccttagcagcaggagcagaa

SEQ ID NO: 75605 - DNA, 448 bp, Zea Mays
aaaaatttaggaattggaatggaccaaattggagttcatatgcattttctacaaattaaacaagttctatacattaaaaatatatttctattttattttaatctgaatttcgagttgactggactgggcctcaataaccagaaaactcaggggctgctcgcataaaatttcccaggcacagcgctccactctctggacggcgggttgatatcctttaaccctagggtctctttagcaaaaggtgcaggccgaaggggtatcggagagctctggccgccagatcaacaacggacgactatgattagaacttatctattatgaaacgttatgcgatggcgtccctcggatcagagactgacgatctagattttaagtagccgaggccctgccggatctgcccgatcgtgatccaagggccaccacagatccgcgcgacgttacatccccg

SEQ ID NO: 75606 - DNA, 345 bp, Zea Mays
ataacgtgcatacaactcatttagaaatggtatgtacctattttgcacatgccatagacacaacatgtggactgtgtttgggaagacccgacgtaatgccactggcattgcagggtcttaatctgtaaatatacattgtgaggcattattagatggttattttatgtaaacaatgtatggtacataacaaaacatcactcaaatgcattgtcaatatgcataagttattgaatttatactccatgtacttcgagttcatagttattatctatacataaatcatacctgtcaacattactcttggtccttcagtccccatgcatgtcttgaatgcattaaacaccc

SEQ ID NO: 75607 - DNA, 453 bp, Zea Mays
taggattaaaaccttgagcagtggcaacatagagcactagttgaagagcagcaagccacaatagcaaccatccactagatgcagagcatcaagctagcaatagcaaccatccattacatgattacagagaagggggagaagtgggggaacaggaggaaccttgagatgacaagctcatctagtcaattgtgcatgtctgctggagcttggagatgcagatagtctaccacatgttcacagccgccgctggtgtagccaccggtgactaggtctgaaggggcgtgccaagagaggagaggagatgtatagtcatagtgtcgtatactgtttagcaactaggttagaacaggagaggagatggtactctaaagtatactatagatgggacaataaaagggcaataactaaacccttgccaggatgactaggtaacattacttgggtgattaatcg

SEQ ID NO: 75608 - DNA, 802 bp, Zea Mays
gaatgccattcgccatggtacagtaactgaacgaatatggttgccagcgcggcttgctcgtcgacggcgacctccctgcgcgaagattcacgccgccgccgtgattcgtgttcaccggcggttggataactacggcagagaaaagatctcacgacggggaagggataggatcacgaattggagtttatcgccgtgggtatagtcgctgcgacatggccagactaccggagtcgccgtggaagcgccggtgacctcggctgcgccacacctaagcttgttactacgcgattgtaagcgtggcacccttaggagtattctccttgcgtcgttacaccggtgactgccacggttacagccaccgtgttcttccctatctccggccgccaacacatcgcggtcaaattgagagctaccgacctcggggtctataaattgagcgcgtcctcagctccgtcaagtattcacgcagctactgcacccacctgcatcccaaaccccccacccgagaactctaattttgaattctccccaattcactttcgaactccactcggtttagcctcaccgcggccagcttattccaggtcagtcctagcgctttgatcgtttgttctagcgttcttaggtcctcctcaagctcttcgacccctcggattgaattagaccaccaggaattgccgggaacgtgttcatctgtccgcaaggtccacggtcactgcggccagagcaaacctagtagccatttgtgaaattgaatgaggggaaacctcgggttaggtcggaatctggagtcagtcgtcgg

SEQ ID NO: 75609 - DNA, 587 bp, Zea Mays
gttgtacgatcccgtggcgaatcgggttcacatatccagagacgttgtcttcgatgagggggtgttctgggactgggaggagtctcggactgggactagcgacatcgagccattcacagtggagtacattgtcaccaagtccttgtcgggaggagcagggtcaagcaacgacatcggatcactctatgcgccaagaacgtcgtcactagcatcggtgtcatctgcacagaagccggtggaatatgtggcaccaccaaccactgatgacgcccttgatgcagatgtcgacagcgaggtagttcctagataccggaagattgagaatctcatcagagatcctcaagttgctggactggcagcgcgtgacgtcgacattgcagagctcaacgccatcagtgcagaagagccgagcacgttcgcccaagctgaaagggaagcgtgctggcaggaggcgatgaacgaggagatgaagtcgatcaatgccaataagacgtggtccctagaagatctcccatcgggccaccgagcaatcggcctaaagtgggtgtgcaggttgaagcggaacgaagccggcgatgtggtgaaac

SEQ ID NO: 75610 - DNA, 378 bp, Zea Mays
cttcgacatcctcggcacgcgccatctgcagcaacatcacactcattcagcaaacccacacgtacccacattcaaccacacgaaacaaaaaacaagccttacctgctctctcgctcgatcagaccgctccctaaccgcctcccggccatgaggaccccacatccgatcgaagagtgcccccgcggaatcctttaccacagggtcttcgaccttaaaaatttcgcgctcaaagttttcattagactggtcgaagacctcataatgtgtgcacccctcgcgggacagcgcattcatggccccttcgcaagtgacgagggaggcaaaggacatgaaaccctccacgatggtcgggagtaccagcagttcctcttgcaacca

SEQ ID NO: 75611 - DNA, 609 bp, Zea Mays
gctggtactccgaagacacacttttctgggttaagcttccaccgtagcgcctcagctgttgaagaccagttgcaaatctttgatgaagttttctaaattttctgttttgattaccacatcatcgacgtaggcttccacccgcttgccccagtgatcgactaagcatgtttggatggctctctagtaagttgctctcgcgttcttaaggccgaacgacatggaggtatagcagaaagctccaaatggggtgatgaaagcaatcttctcctcatcttcttttgccaggctgatctgatagtatctagaatatcaatctacgaaggacagcatagaacaaccagcagatgagtcgactatctgatctattctagggagcccaaagggatccttcggacaatgtttgttgagatcggtatagtcgacgcacatgcgtcaatccactattttatttagtacaagaacaggattcgctagccactcgggatgcagcacctccctaatgaaccctgcagacactaagcgggctaactcggcgcgaatagcttctcttttattaggtgtgaacgacgcagcttctgtcgaatcggccttgcttgaggatagaccttc

SEQ ID NO: 75612 - DNA, 575 bp, Zea Mays
tgcagacaggaggcttgcttccagccgaaaacttgtgccacgtgccctgaggccacatggcggcaccggacccctacatggacgaagggcttgcaccaaggacgcagcctggccgtaggttctcggcatgcaccccacggggtccagaaggtacgtaaggaggtctaattacacgtgtgcaccgaggacccgtcctaggtgacccggatggagcgtgcgggggtccgggccttacccatggggtctggacccgtagacgtaatcacttagcatacccttatcaggtggaaccggtcctacggtggtcggcctgctcagttcttttagcacactgttagagctacccacgtgatcatttatcttgacacggtagcagtgggtacccccgatcatggggtacagacacgggccgacacaatcactctgatcagcccatgtgtcataccttcctcctccccttcgaccccacaacctttgccctttatattagtgtttatccatatattataccacaaattattcaaaaaaggaaagaagctaattattaggaggggaaagaaaaataagcaatccac

SEQ ID NO: 75613 - DNA, 649 bp, Zea Mays
cgggtaggatcattgacgctagtgtacaagtaagctaggtagactctgtccattaaagtttgaatgttcttgaagacaaagtcaacaaccacgacttcggcagtcagacctctgtccttcagcgagcaaatttcggcaagcagcaccttggcttcggccacctctgaataagtgggggactccacctagctgggcgtgcgaacgtctggttgcctccctgatcgagggggagggatttgttgtgattctccatggtgaaccactcgaggcaacatcccttgatgctgtccttgagagggatatcaaggtattccactttcctccccccgcgaagctccaaactagcaccaccaacaagctgatgctgccctccagccataccgggtcaacagtggtaaaggtacctccagagtccaaagtgggggaggattccaagaaaggccttgcacaggtgtacaaaaatggcaacttgaagaatggagttaaggtttaaatgtgtaagatttaaatcgtagaagtcgaggagaccgcagaaaaagggagaaacgggaagagcaagtccgcggatgaggaacgacacataaacaacggcctcgtgggtgtcctctgtcggaacagtgagcccgcgccagatccgccaagaacacag

SEQ ID NO: 75614 - DNA, 388 bp, Zea Mays
ctgggcgcaagatttatactgctttgggctgaacgtccctacttccagtcttcggtggcgtgcgctattggtacctaattactcatagtaggggttataagtaggtgtgagagagaaggatcaaacagggggctgatcacatatgtctttggttagaagggatcgttgccttagcataaaatgaaatagttcttccttggtaaaagcctccccgcgtgttattatttgtcctcatataaatttctggtcatgcctcttcaagactactggtgaagcgtgccgacgatgggagtcccggcatcattattaccccttttgtgcacctctacctgcactgaccctaggtcttcatagcatgacctctggcttcccttcgacgtcttgcatg

SEQ ID NO: 75615 - DNA, 330 bp, Zea Mays
agatgaggtctggtgactcacctattcaacatagtgtgcacttcagtcccaaattcgtgaagcatgccgacgatcgctatgaattgagtgttccccttgctccgtctctctgttatgaacccagtgcaccactcctcactcctgatcatccaccatagctcacgaattccagattcccccaaatcggccggaataccgccgtgagacacctcgtcgtggctagagaattctaggtcggttcatacttctctggtctgtgttctagtatccttagggtctcttgttgcttgtaaacctgactgattgaatgctaccgcgctgggtcgacgg

SEQ ID NO: 75616 - DNA, 400 bp, Zea Mays
ttcaagaacatatagcattcagagtatggccgcttgtagaaagctgggaaatgccgaaggagaccatcactaactctagcgaaggtgatttagtccggctgaagtacacattcaggtttggggataagtttgatgaaccaaatgatgattggctgaagtgtatcgcagctacaagtgatgaactgcttggagcgtactccaaaaaggaagacaatgccttgtccgcagccttcgggggtcagaataagaaaaggttaaacagggtatttgatgctattggcttcgtataccctgactattgttacccgctgcgagggcaaggggtaaaaaggaagattgctgctgctggaaaggttgctgcttcggccatcacggctgagccgaagaggaagaagatgaa

SEQ ID NO: 75617 - DNA, 437 bp, Zea Mays
gctgtcgatataagactaactacaacattcgcgcttcttcttcttatccggtgctagctcaaacatcacgaaacaacacactaagcatagattttatatcttccttagctaaaacataacaccgaagactaacaatacttaagttaatcaatctaggatacctaggacttagaataacaaatagtagttttacaattagctttaaaattactattctaaaatattatgaaaagcatatcaactaaataaagcgccacactaattgttctaacaagtagagcattaacaagcgatatagagtttcacaagatcacaatttaaaacctaaaaactcaaaacaccaaggtgcaatgctcactacgcagttctcaaaattcacttgaaccggacctacaataatatttgcttcaaactaattaggacaatgataaatattt

SEQ ID NO: 75618 - DNA, 629 bp, Zea Mays
ggaccatctgatttttgcatcccatgggtcttgcatcctcatgtacaggtaacaaaacggacgaaataacatccaagtaaattacagattttcttgaagaataaatggatcccccgcgcaaaaccagatcagagaaaccaatacgaaattggatccacaaatccatatcagagcaaccaatacaaaatgtgtgttctaaaccctaaaccggatccacaaatccagatcagagcaaccaatacataataatgtgtgttctacaccctaaatcatatctgagcaaccacaaaaccatatctgagcaaccagatccagggggagagggcaagaaaaagtgtcaaacctccgtacctttgacagcggagggagagcttagcacagtcaagtgacagcaatgacaccaatggagatctcgagggagagggagagctgggcacagacgagtcacggcgacgacaccgatggagatctcgagggagagggagatctcgagggagagagggagggcgagtggagatggcgtaaacggccgaggcaacgccaaaccctagcacgcgggatccagctcaaggaagagagggagggcgagtggagatggcgtacccggccgaggcggcggcaaaccctag

SEQ ID NO: 75619 - DNA, 667 bp, Zea Mays
gaagatgttgatgaagaagaggattatagcattttgatcccatcaaaacccagccacctagattttgagaaatctaatgtgtctgaagccgatgtgcccatgatgatgaagctgggctactttggagaagctaaaaggaaacttgttcgttttgccggagaagaaaccaccccagcgccgaaggatgatgaagtagtggttttcaaaagctttttcagagcaggattacggtttactctaaacgagatgataggagaagttttgaaattttttgaaatttatcttcattagctgacccctaacgctatcgttaggctcaacatcttcatctgggccctccgaagccaagggatggacccagatgccgaagcattctaccgagtgcacgagttacactaccaaacaaaggccagggaagacggtttacatgaaaattttggttgctacaattttgcatatcgcaaggatacaaaggctccagttctcagctatcgcatcaagtggccaaccggctggaaaggtgaatggttctatatcaaggctgatgagaagaaaagggggaaactgatgacgatggttatgtgcccgctatctctaaacttcggaatgacccagcccctatgcaacatgcagctagggtcaccatgccaactagccgcagtgaaat

SEQ ID NO: 75620 - DNA, 394 bp, Zea Mays
gtcgattgtgttgtgcgccaatcggtcgtatccattcatatatatataggggaatgtctggactctttcctagttgtatcccaacagattctcatgcaattagttggataaatacgcatagaataaggactgtcactcgagttaatctgatcgcggattgtccgggctatacctgtggaccgtcccggccatatggccagacagtccccagttgtcacaaatggtgctcaacaatttgtaggttctctgcttcaattggtggccttgttcagatcatgcttttgtttgttgtatttatgattgtaaacttttgtgttggtgggatcataaacttgattcgtgagagattgcaccatagcggacaacaacggtcactagagtatgtttttatcat

SEQ ID NO: 75621 - DNA, 1334 bp, Zea Mays
gtgctacccatcgacctcatgtttggggcaccaagattagtcttcgataacatcgctgaagtagaaactaccaggctagaggatattgatgtgctggaggaagagagattgaacacagtaattcagtcggctagatacaagcagaccttgaggcgatatcatgataaagtcgctcgacactgatcttttgtagtgggagacttggtccttcaccgaattctaatgggggaaggacggcacaagttgtcaccactatgggaaggaccattcatcgtatcagaagtcactcggccaggatcgtaccggcttactcaaatggatggcacagaagtggggaattcatggaacatagagcatcttagaaggttttatccctagcaaggcctcaaaaaaattcccgaggcaacattgtactctgtaattaggggacttcatcatcaataaagttttcattttcaaaggcattcagactcttgactctcagctgacctcgatttgattgggttcaaaatcagcacacttactcggcttagggtgaccactataccctactaacggagcaatcaacctaagtcggcgcaacatgctcacacttactcggcttagggtgaccactataccctactaacagagcaatcgacctaagttggcaatgacttaagtcggtgcaacatgctcacacttactcggcttagggtgaccactataccctactaacgaagcaatcgacctatgtcaataatgacttaagtcggtgcaacatgctcacacttactcggcttagggtgaccactataccctactaatggagcaatcggcctaagtcggcaatgacttaagtcggtgcaacatgctcacacttactcggcttagggtgacaactataccctactaatggagcaatcggcctaagtagacaatgacttaagtcggtgtaacatgctcacacttactctgcttagggtgaccactataccctactaacggagcaatcgacctaagtctgcaatgacctaagtcggtgcaacatgctcacgctaactcggtttagggtgatcactataccctactagcgaagcgatcggcttaagtcagcaatgactcaagtcggtgcggtgtgttcacgtccacttatcttagggcgaccgctatgccctaccagtcaggcaattaggctatgtcagaaaaagctttaaaaccaccacaataattagcactccaagaaggaaaggaacactttttacttgtttgtgacaggggcattttctggtgccctgttcgctaaatattcaagtctaacataaccataacatacacatagaattcatattaca

SEQ ID NO: 75622 - DNA, 420 bp, Zea Mays
ttcgggtgggtttcgggtccccgtcgggttttccattacatagcaatatagcatgttcagcaaaaatataattggaagtaaacaattacatagaaaatacagaccactgcactaatacaagtagtccactgcactaataaacaattaaacacagaccaacagtgagtcagtgagaatacaagtgcacacaaatacataagggcataaggattgaggcagcccagacgcccagtagtccactgcactaataaacaattaaacacagaccaacagtgagcccgcagcaaatagcacagcatcaaatacatcacacggcagcaaatacagaccaacagtgagtcagtgattatccatagaaccatatagctacatcacacggcacaaactccatagtgcaagtaactacatagcacagcagca

SEQ ID NO: 75623 - DNA, 499 bp, Zea Mays
ccacgatcgtcgcactctccttaaaccggacgcgcaaccggtggccgttcgcccctactggtacccggcggcccacaaggatgagctggagcggcagtgtgcggccatgattgaccaggggattgtgcgtcgcagcgactccccgttctcgttgcctgtcctcttggtcaagaagcccgatgggtcatggcgcttctgtgtcgactaccgagccttgaacgccctcaccgtcaaggacgcgtttccgattcctgtggtggaggaactcctcgacgagctccatggcgccaagttcttcaccaagctggatctcaggtcgggatatcaccaggtgagcatgcggccgaaagatgtacacaagaccacgttccgcacccacgacggcttgtaccgagttcctggtgatggcgttcaggctctgcaacgcccccgccacgttccaagctctgatgaacgacgtgctccggccgttcctacgccgattcgtgctggtattttt

SEQ ID NO: 75624 - DNA, 558 bp, Zea Mays
tcaggattagatatatgtatatatatttctaaatcccaaaattaggattttgggtgttgcaaattctaccgccttaaaaacaatcttgccctcaagattactaagaaagggatatatttagtttggtttgctttttttattggttccaatacaattctttgttcaggttcttcaatgggtatcttttatgtctagtcacgtgatatgtatggaaagagatggataggatggggtgaaaaggattagggtaagaaaagactccatccccggtgtgaatcttgattcatttgaagatctagtttgacccttttcttgtcttgatgaggttgatctcctcttctttatcgggtcttgatgtctccatccggggtagagacatataactaagataattgtgagtaggaggaactacattaagtaggtcaagatttggtgtgatgggtggtcattatgaacatgttggttaagtcgtttgttcatggatgagttggtctgagacaccaattcagtttaaatggtttataggagttgggtctaatctatttcactagtatgaac

SEQ ID NO: 75625 - DNA, 525 bp, Zea Mays
agcccgccctgacgttatactttccccggtgcgaaccagagccagagcggacccttgctcctttgcttgggatccgacgccaacgcggttgtgggaattgaccgatcggtgggtctggggcgggtcagacttttacaattggacgaggtggagtggagggaggaatcgaatcgtcgtgtttgggcacgaatgtaatgtaagcaatgacgaggtgcgaaaaatgaccacgccgccacggggagcgagagggagccgtcgcgtcaagccatactccgtgtgattggttatcgtctccacgggcgcccacaacagtttgccgccgctgtccaacgccagtgacacaacgacacccaaaaatcaccgccggtccacttgtgaattctgacaccactcactctccatgcctcacaacgatgggcagcagcacaaagcatcgctcgtggtacccaccaaggaaggacgttaaaaaataaatagaaaccagatgccgttctatgaggtagcccccattgccactctttacac

SEQ ID NO: 75626 - DNA, 1273 bp, Zea Mays
aggggcaattagtcacagtggtcggggtatgctatgcctaacatgaacttcccaggttttgatgggtcaaatcccaagttatggaaacatagatgtgaaatctactttgattactattttgtacctgttcaacgttgggttaggatggttgtcatgcattttgaggggtctgctcagtattgggtccaagctatggaatctcgggttagggaaatgaactgggagtcattatgtgctgctttaaacactaggtttggtagggatcaacacaataccctgattagacaattttatcatatacgccaaaccaattcagttgttgattatgtagagcagtttgatcagttgatgcatcagttgttagcacatgaaaaccagctgacctcggctatgattaccactagatttatagatgggctaagggatgatgtcaaaagtgctataattatccaacgtccacccgatctggatactgcttgtgctctcgccattttgcaggaggaggtgttgatgcacatggggcgtcgagacatgagaagaactgatttcagtaactttactcagtcgtcagtcaagtcagcaccaatgtcattgccattaccacctgccatcagccacaaagtcgctggcaacactgaagatcgtcgagggaatgtacatggtaccagtaaaagtgatgagggcaaactgacggccctcagggcatatcgcagagcaaaagggttgtgcttcagatgcggagagagatggggtcatacccacagatgttccacaagtgtcccgctccatctggtcgaggagatgtgggaactagcaatcgaaggtgaggaagtggtggaagaaaccgaaggtaacaccgtagaaccagcaggtgagaatgttttggccatatctttggatgcagtaagcggtggtgaaggtaacaaaacaatctatttatgggcatcgatccattgtcagcaagtgctcgtgcttgttgattcaggcagctctgcgagcttccttggaagtcacctgttaggagttatgccaggaatccaacttttgacaagaccagtgaaagtagcggatggaagaacactgtggagtcgatatgaggtcccagattgcagttggttatgtgaaggcttaactttttctagcaattttaaaatactacctctagggggttacgatatgatcctaggtatggattggctagaatgtcatagccctatggatgttcattgggcacaaaaatggttggagtttgagtatgaccaaagaaaggttc

SEQ ID NO: 75627 - DNA, 667 bp, Zea Mays
cccttcaaaccagtcgagtcaacaccaactacgcccctccaccatggcaagttcatgtctacccagtggtagttaaggaaattcctgtggatctccctcacattcgagtggagcatggagtcatcctagaggacagttcagaggaacttctgcctatgcccacctcgttggcagagtcactagccttcgcagctggatcatcagcttcagcaccgcctgcaccaacagtccaagcccctgcttccggaggcgatgacccggacgaatctggagatgatgatgaagatgacgacgacgaagaagatgacaatgagaacgtcaacaaagaagccaacggtgtgcaacaggactacttcatggggttagggcctgttaccgaacattacacatcaatgttcgagacagggcacttccctaacctgttgcaagacgttctgcatgcgttgggaacctacgtccgacccttgtatgagacaaggcgagtgtgcgagcctcctcggtcttgctactacaacactcgcattcatgtcaaggtgatggatgcaggggatagagggttcatgactctatcagctcatgagtccctgacaccgctatccatctacgctgcttcgatcagtgatgctgctaggcagactctatggtctctcaaccacacctaccggca

SEQ ID NO: 75628 - DNA, 392 bp, Zea Mays
aaaataccagccggtggaccctatgggcgcactgctaaaaataccttgccaagactgtgtgcaggtcaagtcccagttgggagctccccttgagggtcacgacatcagctgccaattacgaatcctggtatccagccccgacgcgtcgaagccacatcccaggggggccaagtaccaaggaagaagttggtaacggtgcacgcagcaaaggaaaagtggtgtgcagataagttgtaatattgcccagtaagtagcacctgaagagtatcttgcgtagtcaatggtatattacaacccgctccccagcggaaccctcgtttttctccacttaggcctagctactcatcgccagtaggatcccgctgaaagcgctcggccaccgcgtccacaac

SEQ ID NO: 75629 - DNA, 564 bp, Zea Mays
tccacaaatatgcacaaatattacagatatatcaactctctcagcaggatgaccctcattcccaaagggggtaaccagatgaatattcttggagagaacaaggtcttgctctcattcatgaagcccaacatttctgagagcatcaacatttttgatatgatctggcaggagattatccatgctgcctgctttccacttaagggatgtctacatgcacctttcataatgaagatgattgaagttgtgacgcagttccgctatgacaaaggtactagacatctatcttatacccccttctggattgatctaaacaatccagcagggcgtttgaggaaagccccttccagctcccgtgcacatacttctgctggtcctgctgccggtgcctcgtgtccctcccctggccgcggatctcccacgccacgtggtcgtggtcgtggtcgaggttgtggccgaggatgggtgcccgcctggcccatgggattgcgacattcttttctatgtgccggaatatttctgcagatgtgcatgagctggcaaggcgtcagagggagactgacgaca

SEQ ID NO: 75630 - DNA, 1198 bp, Zea Mays
ggctgcctcacatagaccccttcctctatatacccattcaaaaaggcacttttgacatccatttgaaaaagcttaaaaccctttgaagcagaaaaggctaaaaggatcataatggcctctaaacgggcaacaggggcaaaggtctcatcataatatataccttctttctggcaaaacccttgggctaccaacctcgccttgtttctcagtaccaacccatcctcactctctttgttttcaaaacccattttgtacctatgggatgaaaatttgaagaatgtggcatcaaaacccaaacctaatttttctcaaaattttcaagctcctcatgcatagcattgacccagttaggattagataaagtgtgtccaacatcctagggttcaaaagaagcaacaaaagctgagtgagcgaaatgagacatctgcctggagcgagtgactctctcatcaatctcaccaatcatctgttcaggagggtgatcatgctaaaggtgccatggagtcatcctcgaagaggtggcctccccctcaacaacaacctcaactcctcaagtctcagcaggagctggctcgagcagaccccaagtagtggaagtagtgggatcgggtcaatcagccaaagcagtggaagctggctcgactagggtagctcatggagtcatctcttgggatcaccccaatcggtgtcgccatgctcctccacaaagatggtatgtcccatctaatctgaacctgtaggctcaaagataggggatggacaaggtgcagtctcatcaaatgttacctcacaattctcaataatgtggttagtctctaggttaagaacacgataagcacgataatgtaatgcataatccaggaaaacaccatcaaaagaccgagactcaaatttgtccaaatttctttgtttaagaacaaagcatctgcagccaaaacaccctgaaatgactaaccttgggtggccgtccaaactgcaactcatatgaagtcttgttcaagaaatctcaaagaaaattgtggttcgacacatggtaggtagtgttgatcgcttcggtccaaaacgcctagaagtcctatgctcatcaagcatcgtctgggccatctcaacaagagtccgattcttgcattcaacaatgccattctgttgaggcacatatggagaggaaaacttattttcaagtcccaaataagcacaa

SEQ ID NO: 75631 - DNA, 1034 bp, Zea Mays
gattcgggactgcccaaacaagcataccttgcttatacgtgacaatggtgagtactcttcagctagtgattttgaggaaactagtcatgttatgattgccactaatcatgcagaaaatgaggaagtacacttgatcccatcaacactgatagatatgagagtcttgttgcacaacatgttctcagcacacagcttgtctaggccaaaaaaatcagcgacacactctattccataccaagggcgctgtgaaagaacgtcgattcgtatcatcatcgatagtggcagctgcaataatatggcaagtacagctttggtagagaaattatccttacccactcgcacacacccacattcgtatcacatccaatagcttaatgacggtggtaaaataaaggtaacacgctcgtacgtatccccttttcgctgggctcttattctgattatgctgattgtgatgttatccttatggaagcatgctctttgttattgggtcgaccttggcaatatgatactgatagtttacatcatggtcgttcgaattattattctttcatgtttaagggtcagaaaatagttatacatccaatgacccctgaccaaattctaaaagatgatcttagtagggctactaaaattgcacaacaagtcaaatcttcatcggtcgcacctattacatctgaaataaagttgaatgctcatgttttacttgctacacgtgctgattttgatgacttacatgaggctcatatgccctgttatgcacttgtatgctcgtgtatgtttgttccgcttgatgatgcaccatttttggatacaccctttgttgtggttaaccttttgcaggagtatgatgatgtctttcccacggacttaccaccggtcttccaccgctccgtggcatcgagcatcagatcgatctcatccccgatgcttctcttcccaaccgcgccccgtaccgtacaaatccagatgagacgaaggagatccagcgccaggtgcagatgctgcttgataaaggatacattcgtgagtct

SEQ ID NO: 75632 - DNA, 639 bp, Zea Mays
tttaattggaatgaaatgagaggaggttgtgatcaacattatgttgatcagccgccgtccctgccctagttattctcctctcctgtcgtctttccctaggccgtgagaaccacaaccacctttcatcgccaaccgctcagggagcggccacccgccacacacagctacaacctaaggagaagagggcataccaatctggtatcaaagatgccgggcaacaatgacaacactgccagcgaagtcgcatctgctgtgacaacaaaccccccactagtgcagtcctagagcagaagattgacaccatgacgaaggccattgtcaatctcgccaccagggtgtccaatctagagatgcacgtgacataaatcgatgggcacacactcccatagtgtccgccaccagcaaccatccagggtttccttacggtctcccaagttatggcagcattccagagacacaggcgccatcgacctccaccatgctagagccagctacagctccaccaccatccaacccattaccaatccaccaaatccccatgccccactcgctgtcacctcttccatcctttccaccatacataccacagcagccattacaccacatcccaacccatcccaccctgtagtattttgacgc

SEQ ID NO: 75633 - DNA, 273 bp, Zea Mays
tctcatgccatcgctgcaccatagggtgtaatacctcataggttgctgctgcaggctagggcgtgctatacttgccgccaccaccagcatgcctactgctaccacctcttggacatcatcggcgatgtcgttgccagatgacgcgtgagtgcttactgatacgtccaaccatcccagtttaccttcaccatttggttggcttatcatcgtgctgctgtcgccggcaagaagttgctgattatgcgtacttgtgcctctgttgatgctttggac

SEQ ID NO: 75634 - DNA, 367 bp, Zea Mays
gtggacggaagagtcttcggatgagggcttggattactttgcggccttggatgtggctgaggcggaggcttctccgcgtgttacggatgctgaagttttgcctggtccgagtgttgggcgtaggcagcgaagggcggtggcgaagcgtagagtgagtgaattggatggtggttggcttcgtgtgggcaaggctggtaggcaggaattgttgtcctcgccggttggggcgagtataggtgagggggagttgcgaagtctttttgagggtgaggagccgaggataatgctatttaactatagggagatggggatcattccgaaggttgaaccaatgtaaggtgtgatgccctcgctgtacgcgtgtaac

SEQ ID NO: 75635 - DNA, 598 bp, Zea Mays
ggccaagtaccaggtactagaacaactattctagggtggcgaagcatccaggcttagggtataggaccaggctaagcagctacatggctccggaccacccccaagaacgtggtcctttcccctggcctatccattacaagggaagtcctaaaaccgagtgacaaggtggaaacataatccaagattcatgaaagcaactgaaattagatcccgcacagggttttaggtgagtggtgctcgagccttacttcctattgtaaagacaagtcttttccctcagctagacccctgggatattggtaacctcggagacttgaggctatggtcagactaggggtcgatccttgttgtggccaaggatcggtgcttagcagcgcacccttgagatccttaccttgttgtattcaatccttcgaatagtaatgtttattcttgtcgatcctagtttaggaccatcccttgagcttgaacaaggttcagaccgctaagcacccagtccaagatatttggttagttgtcttagggcacaggactaggctaagtggctatacggcttcaaaccacccccaagaacgtggtccttttcccctagaccaag

SEQ ID NO: 75636 - DNA, 1075 bp, Zea Mays
aacatttattagctgatctactatgacctagatcgagtcatagacctcctatgttctggataagcccactatgaagtccatgtcaatctctgaccacttccactttgggccattcaggggttgtagcaatcctgcgagcctttggtgttcagccttgatccttttggcatacatcatacacaactacatattctgctatctctctctcttcatcctatatcaccaaaatctcttcttgatatcttggtatatcttctcaccgtcagggtggatggtgtaggtggtctcatgtgcctccttgagtataagctcttggatctccctaatgtcggggacatagatcctttctccataccacaaggttcttgaatcatctttgtggaatcgtgggggccttctcattatgaatcaactcttttatctcgagtatcttttcatccttaagttgacccttccagatactttgttctaaggtgggttccactgttaaagtaatcccttagtatggctcactaaccctattctaatatggtcaaactcctttcccaactcaggtggcattttgtgccgcactagcatgttgatctgactcttttgatttagtgagtctgccactatgtttgccttaacgagatgataatgcacgtctaggtcataatccttgattagttctagccacctctgttgcctcatgttgagctcaatctgggtgaaagtatactttaggctcttgtgattcgtgtagatatcatacttgatctcgaagtaatagtgactccatatctttagagcatggacgactatagacaactctaggtcgtttgtggggtactgttgctcatgcttatgcaacttcctcaatgaataggaaattactttcacctcttgcatcaacacaaaacccaatcctagatgtgatgcatcgcagtatgcggagaacaacttttgaatgtctagtaggactagaattgaggcagttgtaagttgcttcttcaactccttgaatgacttttggcaattgtccgactaggcaaacttagcatccttttctaagagtttagtcatgggtttgacc

SEQ ID NO: 75637 - DNA, 553 bp, Zea Mays
aattcctggatagatgtttaccgcctacaaaacattatctcggtatgagcttgtcttcaaacattgttttcattattttcaacactaaaaacttatggacaatctaaaagtacatttaggttccctactagattcttctaatgaaaagttatagtttggttttgttgattaagtatcaatccgtgtagactattatgtgtatatattgacatacatagggactcagtccatgataaattaatgtgctcaacttgagccatggttgtaacgtgtcttagatttgttacagtactcaaactagtactgttgaagaagcttattccatatgatacatgagatgatatcatgtggataggcagagaatatcaaggggttagtagagaataacaagagacatggcttgggtacgataaactgagttccaagagtcaaggaaaagttagaggccttagagtgatggactatgtggtggtgaaacttgagttaggacttgacattgatggatcaataagaccacataatgacatgaagtggatcatatagttcaagggag

SEQ ID NO: 75638 - DNA, 754 bp, Zea Mays
cggccgactataaattgggctctggcgttgcttcgttgttgcatcacacgcccaagcgatcacccaattggctcaatttcactgaagaacccacgagttctttcctccctgttcttagctccgccgcaagaatcctcaccgtggccagctcggtttaggtgagctcaagttcctctgttgcttgttctagcgttctcatgtgctattgatactcaccgatccctccaattgaattagactactactgttcaccgtgaacgcgtggttctttggatcgtccgcgcggtcaccgtggccaggaacattagggtcgccgttcatgcaattgacttaggggaaacgttgactggggcatgaattcggttccggccaatgaagggcgtcagtcctttccccaatcggccggcctactagctcgtcggagctcctcatcgcgctgccgtcgtcggggaccttcccctgtgaagaattagaaagcttgagggtgtttctgtaaaccgtcagcgacacgtaagaacagtaaaggaacttgtttcctgttacccagaactccggggacctctgtgcaaaactgccatcgcgcgcgggcgcgggcgcgcgtttcctgtgtggttgggctggttcgagccagaatcatcccactactgttttcacattttccttttttctttttctgtccagctttagaaataggtataaaaaagtagcaaaatggtaaaattgtgaaactaattttcctagccttcttatttta

SEQ ID NO: 75639 - DNA, 765 bp, Zea Mays
tacagtgctaggaggataaggatcaggacctcaccggcgataagaatgccacggcggtcgggatgggtcggcggcggccacggtaaaggttctcggcgacgtggcagtgaatcactgaggtggcgttacccggttaatcggtggccaccgtactttcgccgtggctcgccagcgtagcctggaatccgcaatcctcatccaattccgaacgacggcctataaattgcgcccggattctgcttcttcaccacatcccgcacctcagtgcttgagcaatcggctcaatttcaccggagcactcacgcagcccccaaattccctcctcctctgttcttagctccgccgtgaagaactccaccgtggtcagcgttttgcgggttagtaatttcccaattgctccctgttttaactcgtttgtagcctcctattgctctcagtaccaaccaatttaagttcggccgaagcctttcaccggaacacacaattgctttgtagaacgtcgctgtgacaccctctctgtcgccctatgtttctgttcgtgcccactccaaattttagtatgtgcgtcatctctggtaaacctgtgaagctttcccaagcttcaatttggtcagtcacgtcgtcggttggtcggaacgtgttcatcccttcgatcatccgccctgtcaccgtggactagttgattcaatgccccattgatgaaattgtatgaggggaaatactcgggaggggtccaattcagtgtctgctgcacgagagtcccag

SEQ ID NO: 75640 - DNA, 573 bp, Zea Mays
gtagtttggagcctgaggtcgttcaagcactagtctgtaccaaggattggaatatcgcatctaggaaaggtaaaatttgatacttcatagttcataattttgatatatgtcaattattgttgtggtactaattattgaataattttagttttagatcgcagggttgtgataggatcaattctcgatgagttagacgatacaaaatctaccttgaccaatgaggtttgttgaaacaatgacattgtttaacaagttgtaaacctttcgtacttgacaaatgaggtttgttgacattttgtaggaggagaacctgctgatgatgaggacaatgggaaggacagtgacatcgacgactacatggagatggatatttgaaactctatggatctgtgatggctattactagctctctgattttttgatggctatagttttgtagactctagccacttgttttgttgatggcctttcttttgtaaaatattggagtgttggtggttttggtaccatgctattgatgccttcatggccttgttgttcatactagtaaggtttgagtcccttggaacaatt

SEQ ID NO: 75641 - DNA, 897 bp, Zea Mays
ttatacatgcttgccaaagtcaagaatgatgttgcaaatcgagtcacacctggcctaataaggtccccacctagcttttctctcattaggctgtgaagtcgcccatgcttgtacaggaacctcgaaatcttcttggccatgttgatgcaagtgttgaactccttgatcttgccaatattctccaacaacaaatccaagcaatgcacagcacaaggagtccaaaacagatgggaaattctgtccataaggatcctccccgctgctttgaaattggctccattgtcagtgatcacatggaccacatgttctttccccaccttcattatttgcttctccaacagatctgccaacatattggcatttgctatctcacttgatgcatcgacaaaacctatgaagtaggtccccactggactgttggcaaggaagttgatcaaatgacgttgttgtatgtcagtccacccatctgacataattgagaaaccatattccttctaagcctcttcgtgtttagctctcaatgttgatgttctcttcactgccctttcaagccaaggtacccttgcctcatagtatgatggtccacgatatccaggaccgtactgaccaatggactccatcataatctgccagcttcttgaattgacgacattcaatggaatcttgttctcatatagaaaatcagctacatggtcgtcaacaatttgctttacttctgttcctttctttgagcaatgctcaagagtggcctgagaagttttgtttttatgtctctctgctacaacttcctctggagtcttgcaaagcatggcactcactgatttgcttgccttctttgtatttggttttataggagctgatacaacaaatgaagacatggaagcttgggaaatttgc

SEQ ID NO: 75642 - DNA, 665 bp, Zea Mays
aattctgggtggttcacccattatttccctctggaatccggtcaacgtcggactccaggcgccggattgttgtgcgctggtggggtgcgccgccgcaggcctctgtgccgtggaacctgagcagcggattaggggtggcgcgctgatgtcgttggatctacgtaggatggacaggattagatcatggggtgatggcatattgggcgtatatcctagtgtatatggttgtgattagatctcaagtcaccccttcgtcattttaaatcggaaccattgatcggtaattgtacggtttgggatgggtagtggcctggtgtgatcctcggccgtccgatgtgattgtgcgcgttggattgggcctcggtatttaaaatctctaccgcagatctcacaatcaatggctgataatgcataccgactcactcggaataatggtctaatctatgccggtgatttagatctgagcggcccacattagatcataccccttcgccgagccagacatacaaaaaaaccctggaaaatcaaataataaacccgccatccagtgcgaatgtagcctgagtcatccagtgcgaatgtagcctgagtcttgggaattttgcaaactagatccgatactcttcggtaatcttgcacgcggtcgagggaacagagaaaataag

SEQ ID NO: 75643 - DNA, 489 bp, Zea Mays
cttgtgctgactgtaacctgctgaagatggctagccagtgacagaggaggaggggtagccaatagaaaaggagaaggggcaaccgacaacagaggagaaggggcataggagggacaacttgaggcagataagcatcggaggccaacgaggtcgtgcagagaacgttaggctctagactctggaaggatggctgacggccaaggaggaggtggcgacgtcgtgagcacagagacagcgggaggcgacgacaaaacaagtgggtgagcgcaaaaaggatcggacgacacctatatgcagcagtagaaaccctaatgggccattggatgccatcccattagcaccttgtagcctagctgtgagatcccactcctagtcgcccatagtgcctggtcgcccgattagtcgtgattatgtgacgattaatcggatggctagacgactagacctcctagtcacgtcactacccctaatcgggcataatagaacgac

SEQ ID NO: 75644 - DNA, 669 bp, Zea Mays
gtggaattaaacccaaggacaatgatctcgattctagcggcatcacacacacaacgtgccatagatccataagagtgaaaatccacccacacaccaacccgtgcttgataatgtcaatgagttgaaccaagaatatgacatcaactttaacataagtttagatcccgactctttttctgatccttctactaccacaacgaagataccaaacccaagtgaagggttcaaagaaggtgagtgtctagccatcacgacaaattaacatctagaaggatatcacaaccctgaacaggctgctagcagccagccataggaaactcgccctaccgagaagctatctgcatcgagtggcagcttcacagctaggagaaatagggaatcctagtgcgtcaaaccgagacccactcaaagcaacaacaaaagcaagaaaccatccaactttagaatagactgaaggtgttgcgcaatcaaaaaaaatatggatgacccggtcctggggtccctgagcgggtagatatgggggcatctcggacccatgagccatatatcactaactcacgaggacgatcaattttcaaggaagaatcatccacgtgacaccaactcagaacattatcgagtccaaacttgtgaccaatcaactcacacccttactttgtcaaaatatac

SEQ ID NO: 75645 - DNA, 465 bp, Zea Mays
caacaccctcccatttttgtaaaagagtgatatttgcctcattaacgaggtgcaggtttttgcatctatggtggtagaaatcatgaattgcactggatagatcatctttaatcagctcaaaacagcacttatagaaaatccctatgaaaccatctagacccgacgcctttttagagtgcatttccataaccacatttttaatctcatcctcgttgatcataacatccagatctgataactcaaaaagactatagccaaggttgccccacctaacaacactttgtctagtacccctcctaccaataacttcagtgaagtgatgatgggccacatgcaatttatcttcctaactaatgagcagtctgccgtcttgaacaagcgatctgataaaaaaatttcttcttctgttatttgccatcaagtgatttttttgtgtttgcatctcccaggcgcatccagacaagt

SEQ ID NO: 75646 - DNA, 1287 bp, Zea Mays
ataggggaatggttgaagatggagaggtctaagatgtaataagatataatagaaagtataggtaaagggagatgaatatggggaatagctcgtgatataacccgagctggacttctactccctctgtcataaaataaatctacatatctcgcatttgaaaacagttaaataatctaaacttcgatcaaatatatgttaaaactattaatattcatggtgctagctatatagtcactattgaattaacggcatcatatcttttatagtaacggacgtacagatatcgatactgatatctataaatataattaaagttgaggttgattattttgtcgaaatatgaaataaagactttttctttttgaagggaggctagccagcaatagcaagcaagtagagggtggccggatggatataggccggcgggagagaggagagggggaataggtgtgtatctcggttggttggtgctgctgattattggatctggatcgtacgtcgcgcgagcgagtgcgggcgccggtcgtcgatcgatcgtaggctcataggttatggggccgtggttcgtcgaggagctagcgatggagagagcacatggggtgttttgctctcggcgttggacgacctagcgagctgctcctgatagcacgtactcggatatggtggtcaccgcgctcaccaccaggcaccagctgcctgcttctcctcctcgtcgttacctgcagacaaataggtagccagcagatcgagaggtctcggatcagccgctctccggtatatgcgctccatcgctaatctgtttagcctcccaacaagcaaggattatacattgcttcgcgcgccttgcttcgtgccatcatatgaatacagtaccaaaatccgactcgagtactttgcgctttaccgagtgataaaacaattctttattatataaagtttattcactaattttaaaacatataatttttacaacttatagcaaacaagcaaccctaacttttagcagcctaagttattttcgatggccacgtggaaaccgttagaaacgagatgcttagtttcattggtcatgtctcagccaccaaaaataatattatttttgatggccacgtggaaaccgttaaaaacgagatgcttagttttattggtcatgtctcagccaccgaaaataatattatttttgatggccacgtgctagccgtaaaaaaacgctgtcaaaaataacacttccccgcatcatgcacatcaagcacatgagatttgtcgatccataattgtttattattt

SEQ ID NO: 75647 - DNA, 492 bp, Zea Mays
cttggatcttaaataaaaaacttgcgaagactatcgatgtttcatgagtgttctaggtcttcgccggatgatgttgctagcctgtaagcactagggtacgcctttgtcttgactatgtatggtccctcccactttggatcgagcttgccctaggactctgtccggatagtccttacgagtacgaggtccccttcgctgaattttcttggtatgattgtgttgtcgcgcatgctttggtctggatctggtacttattgagggtctgcagagcaagaacaaggtctccgtcgatgagattcttggaggttggttcgtcgacttcggggacgactagcttgtttgttcgagtggactcgtgctttaattcttgcggcgtcattgcttcggatccatacatcaagcggaagggtgtgaacccgattgctcggcactctgtcgtattcaaggcccatacaacttcaggtaattggtcggaccatttgccctttttgt

SEQ ID NO: 75648 - DNA, 812 bp, Zea Mays
ggcaattttgatttgattttgtttctatggtggtgattagcacaagttcgctaagtggccggagagcttcaagtcgatggatttgcaccccactaagtcatggtaagttcatattcttcttcgatggtcattcactgaattttcaccattttgtctacctgtgcagcatgcttacgctttggtatgcttgttattattgttgatgacagtttcttccagctaaatatgttaagcacgcatatgagttcattgttaggctcaactctaatgtcatataggccaggaaatacatcctctgttcatgaaggcagtaccaatataatatgggcatcctatattgatgaattgtactgtaaccaatcggtttccttgttttgatgatgattcatatgacatactaatgaatccaactgctacctgcaagttctgatggcacagctagcaggatttgcaaacaccatgtacgtttgtatgagttttaggttccaccccagcatacatcttgatgcacgcaattcgataatcaacaaagggctaggccaacttcttataagtcacatcaatgttttatcctttatttttctttcaggctttttaccctcttcgttcaaaaagaatgtaagtatgagctacgtatcagttaaaatgattcacatttatttaacgtttgtatcgatctattgtacaacttagttgtgtgtttcaggtagatcaatagaggcaatccagtttgtttccattcaaatgccccacacacatgtacttttagttttttttgcaaatgtcccatccacctgcaataatagtttttt

SEQ ID NO: 75649 - DNA, 329 bp, Zea Mays
cactttcgtgtgcatactatttaatttagttttgttaatttgtgagtccaaggacatgtaccattgacccattgttatagtttctgaagtctctgattattgctgtcgtaactgtctgcatgacttcaacatgacgctttgtctggtctggtttcatcagatcacacggatcgttatcttagtttgtaccactgctattgcttatcctctggtaatttgtttgtttatttatggattccattctataactgcaagatactccttcggatcatctgatctatatggctgtatgtgaggagaatattgtacctcaagggagtgttgtcgtg

SEQ ID NO: 75650 - DNA, 423 bp, Zea Mays
ttttgcaaaacgtgcggccgaaggggtatcggaagattcggaccgtccgatcaaaattggacgccccagattagatctaggtttccccaaaccagtattgaatcccagccgtcagatcaagatgggcggctacgatctaacacacccaatcgttatccccccttctaatctcggacgttggctatccaatcgacggcgctgaagccatctgcgacctcaggcgaaaaatacacggcggcgtgttcacccgcggcgaacaccatcgccggtgacagtcgattctgccatccatgcccccattcacaaatcgaacccgagatacagcattactagcccatggcggagcaataggagaagtcctcaccggctgtctcggcgcggagaacgtccggccacggcgaagctccgattcatggcggcgcc

SEQ ID NO: 75651 - DNA, 876 bp, Zea Mays
ttgaaatggtggaggaattccaaagctcaggggaaatggaaatggtctgcaattctattgttggtgtttggatgagcatgtaacggcagttggaatcatagtgtagcgtccaattccaattcttgtttgggtgtgcagttgattgaaatgtacaaaacacagtgagaaaaaaatcttccgattgacagtgagcagcacaaaaatgattgtacatgacatgttatttgggaattaccatgacaacagcagctaatatttttaaaatagttcttgccaacaacaatattctaaaaataaatatctacatcaactaatatcttatagcatggaggagaaagcaagtgaacattcagatcactcagatcacaaataaatactacaatatctgtgacaatacaacatgacgataactagttaatatttcaacatgacgatacctatgacaatacaacatgacggcctaggagaagtcgcctcccgcgcgccgctctggatttttcccgcagcctggacctttctcccgcgcgtcgaaggggtacgcaaagcacttattagggagccgtacgactcaattcttgcgaaaacagagtgagcgagctcggaattgtgggcgcgtgcgcgtaggcggaagcgaataccgtgcagtattcactcatgattcagtggagccaattctccaaacgctggtattggctctgacaaattctgtttcctgattccagctcctaattctaacatccaaacgtagtgttagttaaaagacgccaggaattcgagcgctctccgcgcttcccgcgtacggcgcatacggcgggggccgggcgtgcagactgcatacacgtccacacgcggtcccggacccgaggtattttatct

SEQ ID NO: 75652 - DNA, 690 bp, Zea Mays
gttctacttctggatttctgattggcaaatgtgccctggtttcgagaactagggagcagtaaaatttgtgttgggagggaaagctagcgcggacttacttcgaatggtgagccaccgagactcaaacggtggatttgagaaggtgggttatacttgttcaggcttgcgccctaattcagtgtagtgccgatcattgtattgttgaggtggtctttcccttttatagttcaagggtcggactttacaacgatgacttgtattctactggagggagctcggtcggtggcccttgggtggcgtggttcgtagggtcgtgcgtagccgtactctcatcatagcatactatcttgtccgctcgttgtatgggtccctatagctggtctcccgctgacacccttgtggtagtgtgcgggggtcccgcaggtcaatcgtgcgtcgtgcggtcttgcatgtcgtcatgggcctgtgtcagtcattggtgtgcgtaggcgtacaccatgtatggtgtatctgttgcgcactacccggtattcgggtcactgtaaaagctcttgtgctgttgtcctttatgaacaggatcgtccggcccctcgaggtagtggggacgcgtctgggctgtatttagggagttgcggtcatgtcgatagtggtcactcggcgtgccctctgtgaaagggaaatagacttaca

SEQ ID NO: 75653 - DNA, 294 bp, Zea Mays
cttttgcttcgggaggcagtgtcttgtcttccctcattgacgtcgagctccgtggtatccctgctcacctttggggactggagacagcggaggttttgcttggtccatactgcctgatttagggcctgcacccggattctatcggcggggaggacttgtcagtcatcaggttgagagcatggtgccgctctcccgtggggttgccggaggtgttggacctgcatgctgtggagccggcggtcctcgatgaagatagggtttggattccacgttcgttggtgttccctgtgatag

SEQ ID NO: 75654 - DNA, 825 bp, Zea Mays
gattgggacgcttcaggtggtatcagagctgttaggttggccgcaggacgtaacccttagcctgatcaaaagtttttgagtccaaactattttcttaaaaaaaacttgctctcatcccttcatttcaaaaatgctttccccctttccttctctcagaagtcagatggaggttcgctgtcaaaccagcttttgccagaatgaagatggtttccccaagttgctgagagcatgcactgttcgcctcggaatcagaagccagccagagtatgatggtcgtgaattcgtcgagcatgacacagagaagtgtgtcgtgactgtatacattggatccagtccgaaccatgtggaatggagtgtcactactgctgggcacagattcaaagacacctgccaagttgtcgctcgtaaggcattgagggccttgtgtcagatttatgaagaagaagtggccaacaccccgctcagattatttctgccctttcagagagaccgtccagtttggatggctaggatgcgtgcattggaaggtcagcagctgcttgaggatgaccccacagtcgtgtacctcactgcatacctgctcaccctagatgcacaatatgatttcttggctcggcaccaccgtcagatgaatgctcgagcagaagatgcagagaagcgcaactgtcagctccatgtggatctcaccacagctcaagcccgtgtagctgccttggaaagtcgtgaagtcatagctgttcaagccctgaagcaagccaaggatgagcaagtccagaagttgatggaggcctacttggtaacacataaccaacgtagagccctgcg

SEQ ID NO: 75655 - DNA, 759 bp, Zea Mays
ccgaggaggcaaagatcggacaaccgagtcgtgcattgatgcctcaggcagggaggttgagcgcttgacccggggaggcaaagactggacgaccgagtcatgcgctgctatctcgaacaaggaggtttagcgtactcgaagtgctagatactcgatgataactcagatgaagggcacctgaattctggataagctagaaggtgtgtcgcattaaaaggaggattcaggtagagtcatagtcatcacgacttgggacaacccacttgtcatctatataaggatgagggagtgcccctatcatctcatctctcagttcatcacatctcagcttagctcaaatcattctcattagatctcagctcgtcaccacatcatagctcattagccctttcacagcaaccacagcaccactagatcgactagaaaactcactctccaccgtccatagctcacctataactcatgaacaccagtgatactcaaatacgcaacctcgataggaagtagggtgttacacattctagctagcggcttgaacctgtataaacccttgtgtgatccgacgtgtatccgcacgtaccatcgagtcgcaatcaatgacggcgtcctgttcaaaagcatcacgtggagaaccctgtggtgcgcagtcgggtcataaacacaaatagtcggtgagccaggtagggggtgcgacgtcgatgcatgacaactccaagactatcgtcttccgcaccctgaccatcttcaatgtctgggagg

SEQ ID NO: 75656 - DNA, 536 bp, Zea Mays
ttatattggaaccacgcttaaagaaattaaccatgggttgtacagttgtatctcaagtttctaaatgattgtttgtatctcaagttcatgacgttgctaagaaaccagtatgtccctgatgcgagaaaactgtctgtttgattggaggaaatccaaatttgatgcagatgtacgtaacagataagcatgcgatcattgtcttgaatatatgctatcttttctatattcgcagtggttacacgatgataatcaatctgatatcacatggcaataatttatatccgacagagtgtacttgtaagcttccttttaattactcagctcgtgtgtagcaatttatatctggggtgggatgggccaccagctctagcttgccatagacatatatatacaaaattctctctggtctaagggcatgtacaacctaattaaaggaggcgtctttagagggttaagtaaaaaaaaatcaaaaatgattatttgcgaagagtcagtctctacacgactatcaatacataatgtttattatctagagc

SEQ ID NO: 75657 - DNA, 703 bp, Zea Mays
tgcagtgcttaaccctagactgagcttaagggagtaaacaatgcctaataagagaaaacttcaaaacttagttgtcataatcataaaatatcaccacgaatggacttaagttgcatcccaaccctagaagtgccaaaaaccctaaataggcccctggaaaaccctggactgaaaccctagggggttatctgtaaaagtgtgcacattttggacctaagtgcaaaaaccatgaaattagggtaccttaactcatatgattcacatgtatgtggatttgcaaattaaaccttgagatttggacttatttgcaaaaagccccacttaaaatctattgagttaagtctgaattttagtggaatagggtcaactttgaagacctatatcttccaaattatgaagatttttccctaggtcaacacatcaagtttgtagagctataaaaggaggacaactttgctatagggattatgccttggtgccatgaaatgttttgagataattaggcccaaagatgggctgtcagactgccttaagtctgaattcaaactgacagtgtgattgggcaatctttggactggaattcaaccattatctagtgagagtttggctatggatgctatagcaagattgtagctagatcatcaggcaacaacttcgttactggtggattagcaagtcatcacatgaaaaatcgagatctgag

SEQ ID NO: 75658 - DNA, 1207 bp, Zea Mays
ggagaggtctacgagaatgcctagaagatcaaacagatacttcgcttctacccttaactttccaggctaatttgtattcaaaccttcatcaataaaaaggtctaaccttcaagtgtggctcaaccctttcttcaccagaccgaacctcccttgagggctagaaaaggggaaccccctctacgccatttttctcaaagttttttctttaaaaaatgagtttcgtgctcttatcctagtcgtaaaatggaatcttaaaagaacaagagacatcctggtaggaaagggtggccgagccgcaggaacaactattccttcggggtacggtttccccactcgctatcctcctcataaaagagagaattgagcaacagagatagtcgttttgtgtgaattgtgatagtgccttgagagagcactaaatagaagagtatgtgttgcattattgtgatctttgagcttggagtggtgactctcattgattgtaaagctagcaagaggctttgatgtgtgaagtaccttgcagagactttggtctctcaatcgagaaaagagaggactcaagtttgatcgttggaatcatttgagaggattgaaaggacccaatacattgggatgcctcaacagagacataggtttcatttggaaaccaagctccagtaaacaaatcgtcgtgtcttttgtgtttgattgctttcaatttgtttcccttcttcctccctaagttctcttgcattgatcttctcccaaatccttaagtgttgcttcaaagttcattccatacatttataaaagcaacactttgcaagatagaacttatcttctcactcgattaacttgtttattcttctaacctctaaattgggatcaagttttgtttaagtgttaaatttcagattttgcctattcaccccctctagatgactatcaactatctacaattatagattagcaactaggtcacctgagatagccctagcatgtgcacaatcatgttaatctaggcaagatctatcgtgtcatcagggcatgcctagctgggcttcgtgtttggcctacgatccaacatggtttgtcgggtcacttttatattggactggccgaaaagaccaacaaaaaagcatgtcgtactaacctaaaaccttcatacaaaaaagactacaagttcactaacaatatagatcacaaattattaatagttgcacatcac

SEQ ID NO: 75659 - DNA, 603 bp, Zea Mays
ccagttcccatcttcgctacagaaaacccctgcgccagagaggtcgaggtgaggagtgccgccgtcatgcgccatctctggtgaacatgcgattgagtctcgggaaactcacgcgggtggccaacagaggattgtagaagcgcgctcgtggttcgcccatgccgggggcggtctggtgtactcggaattgctcgtcagagcgggggcgccgccgtcgtccgccttctaccgtggacagggatcttcgtggcataatcagtggtatgacctacccccatcgcgtttaccattctctggagatcatgtagatgcacaccatttagctgtaggagctctagagccgcaaccctgatgtttgccagagtacaccaccacggctggacacgccgccgtgcgtggtcagcgtcggagggagatgatcttctgaccgtcgattccccaccgaacgaccccgattagataggaaataacccttcgggatcgtgacacgcgaaccattgcgattgaatccaagggtcgaccgctgatcacgcctcataaaaccctagccgttggatctggatccgagactccacatcgcataccgcttcgtggaaacctaga

SEQ ID NO: 75660 - DNA, 476 bp, Zea Mays
cggcagcggcgatttatacgccattggagagaatggagactgacggaggaatggggtgagatgggctgcggttgctggggcggcggggcaaccacagtattcatatttgaccacccgccgaagaagcaagaaattctgccctcccctcgcctcagctttatgaagacaacgaaaaggtgattgcagaccactactcgagcctggctcaccgagatcgatgaccttcaattggagcacgccaggctatgccccaagagattttttggatctcaaggcaccgttcatgcaggatgatatcaaagacatgacaaactccattctgtctgataaaacgctaggtctagatggattcacgggtgccttcttcagacttgctgtgctgggacatcattaaggaggctgtcacagctgtgatcaacaacctgttcatgataaactcccaaaggtttcgagctgctaaactcggcaaatattat

SEQ ID NO: 75661 - DNA, 435 bp, Zea Mays
atagggaccaaacaaatgcttagataaagtcaatgcacgcggtgacgcaggacgagacgatgcggccaacttatatgttcttggctgtctgtgtccatgtcgtcgccttttattacgacgacgacggcggcacaagatggacgtagcagatatcgcactgctgtgttttcagatgttgatgagtgtgccgccgtcaatgttccacggccatgccctgtccaatgcaccaacataccttgcccaaaatgctagtctacgagtgcgttcccaacggcaccctgatcgcgcttgagtcttctgctctttaagcttaccttcattcatgggcttcacctccaacaatccttcatcgtgctgtcaaatcttctaatacaactcttcgtctcctcgatgagaaagaactatgctgcgatggtatcagactttgcggcctcc

SEQ ID NO: 75662 - DNA, 306 bp, Zea Mays
aaagcccggccacgcgtcagcaccggacccttgctcatgccagggtttcccctgtcccaggaccttgttgcggcccggaccttactcggagggatctggaccccatccaagggacccggcacgcttactcgggagtcccgggccacaatcgggggtccgggttgtgcgtacaggggtccggcgctcccttgcggaggtccggctcgactgacacatcctggatgtatcatctttccttgccatatggtgccccttgatctgcccatgtggtggggacgagcgttgttcacagtgtggctaaggaac

SEQ ID NO: 75663 - DNA, 530 bp, Zea Mays
cggaacagtgtctcaagcacatacgcggtgcccgatttttcaccgaggagcgttatcggtgttcgaccgggcgtgaatcgcgacactggcgtgaatctgggtgtgaggtcaccggcggtgagggaggctaaaccgtgatcttattcaatcactgtacaatcagaacaccattctgtctgtctgacagggccatttgcagggcattaatctccgttttctgtgtggcaacttgttaatctctttgtaacaaagttctagccctataatccagctacaatcttgctatagtaaccatgctcaaacactcactggattatcttcaaaagagctcccaaagttcatcccatgtcactgtcaataacatttcagattctaagttgactgacagctagactttaggtctatttatttccaaattttgtatgacaccaaggtttgatcacttaagcaaagttatgctcctatagtagctttataatcttgatgtgttgaccctaggcaaattccttatgaattgagagatataaggc

SEQ ID NO: 75664 - DNA, 750 bp, Zea Mays
aatatggcccttagccgtatcctcttctttgccacttgcaagccttgtattaactcgatccttcattgtacttttggtctattatctgccttacccttgtaatatatagatcttgccttgatgcttacttgatatctcctcttttttgtctcaatctgagagcggtgtttttcttatctcacccttggctatatcatcttctttaccgcgtgcaagccttgacataactcaattcttcgttgtacttataccactagctcttctatgcctttatcttctctcttacacacttgtccattatcgacattgacccttgtgacattcatgtctttgcccaaatgcttactttgaacctaccctttaaaagcctcatcttttccaaccctgtttggaagtggtgaattacatatctctcccttgattgctttcccttttgtcacctggcaagttttgtctcaaccccatcccttggcatgctactatctattattacctttaacccttgtcatttcttgatatttaccttgaggcttatcttgtatctgcattttgaagccttcttccccatttcagtttgagagtgtggttttacctatctcgctcttggttgtttcccctcccttgccgctttgcaaatcttgccttagctctgtcttttgtggtgctgatgctcctatctcatgtggcttgttcttcccctcgtctttcaacaaccttagagagtagttattccctcttcaagaaagatcc

SEQ ID NO: 75665 - DNA, 596 bp, Zea Mays
gttaaattactaaaaagtctagggtctggtttgtaagaacttggactactttgtaatgatcctcgtatatgggcggactgtggaaaaataataaaaaccacagggtctctttcgcataattgcgtcaatgaaggggtacactctattcgaggtcgttagatcaatttcggatggcctagattaaatcaaggcaagacccgaaccggtatgcgctgaacaccattgatgccgagatcagcggccaagataagatctcatcccctggtgaaccggtatgctatgactgccctccgatcttgattcggtgtccaggatctaatgcccaaataggtaaacaagacttctaatcctggccatctaccaaggatcccacggtgtggcaatcatccatcgaccgaccgccccaagcggcagcatagacgccctggcaccatggccggagcacgacctatcctcgctcccgagtccaaatcttgagcctagctggtggtatagggagagaatggtaagtctaacgatgtggtggattcctcacctcaggtccgggcgaagatgatccggtcaacgcgacacagcggctccatgatgcatggtgg

SEQ ID NO: 75666 - DNA, 512 bp, Zea Mays
taatgatttcgtttttcctgccttcatcgtcttgttgcatctttaaagctttgctcagtagtaaactctgtaaaagcaggtccaaacttagaatgtttaagctaatacagacatatcaagggtatcataaaagagggtacttactttaaagttggaataaaataggttccctatgatatgctagcgcctgtagcagctgatacccctttcaagcttcgggaatccgatgctctttgatagggtgcctataatatttgcaccggcacgatcgcgaatgcatcctataacttcttcgtccaccgcaccaaagagcatggaccctggctggtagccacagttgatagcaaagtccttcaattcagctgcatcctcttcggaaagctgctggccacacaggtgccgtaggtcgtagtctgcttcttccgaagagatttctttagctttcttccctttgtctaacacttctgcggccacctccttctgcacagccacgtctgatataattttgtcaa

SEQ ID NO: 75667 - DNA, 362 bp, Zea Mays
ctaattaattaattgtttgtccgatggttagttaaaatagaacttagtttataagttgcgcttttataaatgcaggttaacatgattaatatcaacacaaatgttttgattccatactcgcctagtttaatcgcgatgggggtttagcagttctcgtatgttgcattgtttataattcgtgaattgttatttattcaataaaccatgtgtcgtaaacccgtttcgactcgctttagtcgcattaacttcatagcctcgtcgccatcatgttggtaacattatttcatcgcgatacgcgtcttagctaattaatcgattatttattcatccgacagttactaaaagtagcaatctaatcaaac

SEQ ID NO: 75668 - DNA, 470 bp, Zea Mays
ggcgtctggaaatgcccagatagcatagggaggatgaggtcgcggcctgggttttagcgaggacgagcctagccactccgtttctgagggtaacgcggatcctggagacccggtgaagtagttcgcgcccgcacggaagatccattgagttagctccggttgagaaggggaagaggaatagtgcggcgcgggtcacgttgcgagcccgacgggaacgttgaccacgcaaggaaaacgggagagctggcgagatccgaactcttcggaggatcccgatgacacggaccacagaggaatccgctgcgtctgatgctgtggagaagaatatcctgacgaaaggggcccacaagtcagcgactcaatgcattttccagccagagagtgtgcggatgggggtgttgggccgtgcggcaatgggccagcgcaggggagattcggcccagacgacgatttttcattttctctttttt

SEQ ID NO: 75669 - DNA, 448 bp, Zea Mays
gttaattagtgttttgaggaccttcgaagggcgaacgccgccaacagtaggcccttgtagtattagtttgtttccttgtaacgaactcagaatacgaaatgaacgaaggccttgtgacgaaggtccaaaaaacaccttccctaagctaatcagggaaatacttaaaatgcagggcccattctacagtggtgggttttttagttttccttggcctagattttgttataaatagaatgaaaactataagtgcatttatcacaccattcacctgttttgctgctacaatagcttatgcttttaaaccaaaggttattattgtcaattgcggtcattttggcttcggtggttttttggttttggctaggatggccgaagggagcaagagtgacgagtttgcgcttgctgggttttggaaggctatggagaagagcaatatggcaaatattac

SEQ ID NO: 75670 - DNA, 490 bp, Zea Mays
ggagagggcaagtgaccacttgtcatctgattggattcacaactggtcgggtctcacggaggttttcattgtgaacttctaggccacttacgtgcaactgggaaacccatgggatctcaacaactactgacataagtcaggtgagactctccatgagtacatcctaccaagagtggatcccaggcatttttgtagtgtcctatgacaacaataaattttaattatctcctctaaaatgtataatggttagtgcttaaatgagttgatgatactataacttaatgaaaatgacaccaatgattattttgtctagatctgctcctgcatccaacgtttctttcagtggtgcaatgaacttcccaactcggtgacgttgacgtcactgttgctttctagaaccacctgtgagtaggtccacaaacccaggcgcaattgtatgaggaccactaaggagccccttggcatcgccatgagtcacgcctcgagcgag

SEQ ID NO: 75671 - DNA, 634 bp, Zea Mays
ttgtactgttgctgccaaatggccaaaagcattgttcatagcatctgattcctgtgccattacttttcatctcaggttctttgtgcttgttagattttttggagtaggcaatcttcctattagtgtgcttcaaagtccattctgttttatttcctttagagcccataccgaaaataatggatgctgaagatatgtgtgctctgttatgtgtttcatttcctttagataccatacaatcatgacagtttgagatgattgacttcagagaccagaatctcctatttttaataacgattatcagatgcaacagagaaattcaaggactcgcaataatgcccatttctcattttatcatttgattgtccctctttttcccttgagagtttgctaataaatctctctgaaagtaaccccgtccattgttgtccttatgaattaaattcaccctggtagttgcaaataattactttcttgttctttgcagcttgtcatgttcacattccacatcgtgatttcagatgattttatttcttagttcgaaaatgggccatttgctgaacattgattgtatgctgatgccttacgtcagacactgtcatttggcttctgtcatcagtatgtgtataagatggtt

SEQ ID NO: 75672 - DNA, 322 bp, Zea Mays
cctcttgtgcaaggtttccatttctctttcgttttgtagttgtagaacagagctagaacttgtagagtcagtctagagcagcagcaaccatgaggaagaagtgatggcgacagtgagccatggccatcgaccttcgaggcctggccgaacgcgcgcgcgaagaactcctaaactagtagcattcctcgataccacacatcgaatcaggcgaaatgggccgaatcgaggagcacgtgacctccaggagcagtgaggggaaccacttaccggagtggtggaggaggggagcaccgggagctcgaggcctcctgcacgagcagtg

SEQ ID NO: 75673 - DNA, 321 bp, Zea Mays
tgtttcttggctttgatgtttcaggaaagggaattaaagtggatgaatccaaggtgaaagcaatcaaggatttgccagctccaacgaatgaaagaaccaatatggaagcctccaagcgtgctgcatatataaaaaagatacatgagaagatcaatgaagcaattaagctcaaagtagtgcgcaaggctgcaaacatgaacaagcataggaagaaagtgttatttgaaccgggggacttggtttggattcacttgcgcaaggagcattttcctgatcagcgcaaatctaaattgatgccacgaggggatggtccatttcgtg

SEQ ID NO: 75674 - DNA, 857 bp, Zea Mays
agatcccttgatcgacgccagaattcatgaagaaattgttccatgtatggcgtcacctcttcaaggttggtcaatacgtatagcatgatatgccgccactcttcatgtgtcagggtcttggtggtcgagccacttgcgcttccgagttggcctcgaaatatgctaaggttcgattcattgtcgccatcattgtaatgagggggtggattatgcacgctcggcagtttgtcaccataataaattattgtgaagtttgagacctcctctagaatgtatgcctctgcaatggaagcctcgattttgcatttatttctacatttctttcgaatagtctttagacatctctcgattggatagcaccaacgtccctgcacgggcccccccattcgtgcctcataggggagatgaagaatcaaatgatgcattggattgaagaagccgggtggaaatatcttctcaagcttacacagtaacacggaggccaatctttccaagtctgcaacaacggtccgagataactcttttgcacaaagctgacggaagaaatagctcaactctgaaagcgctagccagacatgctcagggacatagcctcgaaccatcgcaggaagaatccgttcaatccatatgtggaagtcatgactcttcatccctaagactcgcatagtagataagttcacccccctactcaggttagatgcatacccatcagggaacatcaacatcttgatccactgaagtacttccttcctctgggccctgcttaggacaaaatcggccttaggccttctccacggtctttccgccacttggcggcttcatctctagttttggtctatcacataacgctgccaaat

SEQ ID NO: 75675 - DNA, 904 bp, Zea Mays
gccaatgggttttaggaagccatgacaacaaggactatgcctttgttaacatgttttcctccctagagtccattggtaaggtgccatggggcgcactataagtcgcaatggcctattgcgctggcttacgccctgcccctagcggacgaagcaatcctcgctaccagcctccaaccaagacccatgcagtgctttggatccaattacactagtgaagcccaacaaacaagccagtaaaggttgtgccttcaccaacctcaccatggcggaggcgacctaccggttgggggccttacaaaggcaaggctagggcccacaatgggctcgaagtggccatctccatcaaccaagcatgtaccgcggccttgcccaaagcctccaatgttcatggtggtcctctcttgagacctagcacttgcaccggtggtgtttcaagggcagggcaatgctaatacctacacggtcaaccgcgtcggcctactactaggctccacatcaccaaggctcagctcgttgaccacaacacaagcccatggcactcggggtaggctatgtcagctagtagcctcgagctcatggtgtttggggtctgccgaccgtctcccccaagcactgcctttggctatccccaaggcagaaagggttgcttcttacccttcgagtctaaagggtaatagcggctctagtagggcaggaggagcgccgacaaatgttgtgcccacgacagccaagcgtccctcgcctctagctgagccccatcctcgaccatcaccagggcagcacaggctggtgcttaccttttgaattcaaaatgtggagtagtgtcaaagcctatacagttcaatgcgtcggcctcccataaggcctagcatcgccaaggctcagctcattggccacgacacaa

SEQ ID NO: 75676 - DNA, 1227 bp, Zea Mays
gttcccgacttctgtgccatccatctgtgtgagtcgatatgatccaggccgagtgacttcagctactatgaatggtccttcccatagaggtgacaatttgtgccgctcctcccccgttagaattcggcggaggatgagatctcccactgcaaaggatcgacgtcgtatggccttatcgtgatagcgcctcagagtttgttgataccgtgttgattgaatcaccgtgtttagtcgttcttcttcgagtacatcgacatcctccagcctagtagcctcagcttctgctatgttttcaaagatcaaccttggtgctccaaacttgagatcggcaggtagcactgcctccgaaccatagaccataaagaaaggagtgtttccatgcagggctcgactaggttgagttctcaggctccaaacgacgtatggcaattccttgatccactttcctgcgaacttttcatttttgtcgaaaactttctttctaagcgcctccaaaatcatcccattggctctttctacctgcccgttggctctcgggtgtgccacggaggcatacttgatctgaatgcccttttgctcgcagaagtcgaagaactctgagcttgtgaagttggatcccaggtcagttatgatgttgttcggtattccaaacctgaatattatgtcttgtatgaattccactgccttagctgaagttaaggaagcaatgggtttgaattctatccacttagtgaacttgtcaatagcaaccagtacatgagtgtatcctccttgagcttttttgaaaggtccgatcatatccaatccccagcatgcaaattgccatgttataggtatggtttgtagttgctgtgccggtagatgctgttgtttcgacaagtattggcaggcttcgcacctctgaactaacttggctgcgtcactttttgctgttggccagtaaaaacccgacctgaagaccttcccaaccatggtcctggatgctgcatgcactccacattgcccagcatggacctcatctagaagttgctttccagtatctaaaagaatacacttcatgaggactcctgacgcgccccttctgtatattgtgtccccaatgagcgtataatgagctgactgccttgcgatacgctcggctgtatttttgtcatctggctcctcttcattccttatatatctgatgatcggctctctccagtcatcaggatttgattctggttggct

SEQ ID NO: 75677 - DNA, 999 bp, Zea Mays
ccaatccaagtcaacttgtgggaaatccttcaaatgttgagagtccaacccaagtcaatgaaacagtagagctggattctgatgacgatgactttatgccaactgttaagaagcgtaatgtttctggaagccatacaagagttctcagaaaggttgtgacaaagaggataaaagcgtacatgcccattgtcctggggcaggatgcattgcaatggcttcgacatctaccacggcactgcattgacaactgggatgacttcagctgtcgatttgttatgaatttccaatctctctccgacaaaccggcgtagccgtgggacctcaagtccatcaagcacagaacaatgagaccctctgcttgttcctcaggtgtttccaaacaatgaggaaccgcatccctgacgttgtagaggcagccgtaatctaagacttctactgagggtccaatgactcagccttcatctaggctatcctcgaaaaggcaccaccacctcggaacaaccgttccgagaagcgaacatctagatcaccgccgatgaacgagcccaagacctcatcgagagagcaaagcatgcacctctagcaccgaggaaggacatgaactagcaattggacatgctctgggacaagaggcatcgggaaaaagtgcacgttgctggaccgctgactccccggtcgcgcggcggccacgatgcagtgtacggatgctggaaaagatccttgactcctagtgtccgtgccacaaggagatgcgccacaccctgtgaaattgtcgggacttcaagaactttgtagggcacggtcgactgttccaaccgctactgcctacccaccgcgaggagagcccgccgagcagggtcaacaacagcaacacgacagaggtggtggtggggctttcatgcgcattgatagggaggtaaatgtcatctttggaggccatggggcacaagagaataagaaacaacagaagctcatcgatcggcaggtcttggtggcgac

SEQ ID NO: 75678 - DNA, 531 bp, Zea Mays
ggaaattatccagcgccccatctggtctcgctttggccttcgaaggccgaaggtcattattgaaagcgacattgaagcatgccagtgtttgtgccttcattggcacaagggatatagttcaaaagcacatagccttcagggtgtggccacttgtggagagctaggatatgccgaaggaaactgttgccgaatctagtgaaggtgtcctggttcgattgaagtataccttcagatttagagagaagtttgatgagccaaatgatgactggttgaaatgtattgaagctaccagtgacgagctgcttgggacgtattccaaggtcaaagatgatgccctgtccgcagccttcgggggtcagggcaagaaaagattgaatagggtatttgatgcgattggcttcgtataccctgattatcactacccgctatgagggcgaggaaaaaagagaaaggctgccgcctcggccaccacagctgtgacgaagggtaaaaaggtgaaggttctgacccaccggccatgatatattgaac

SEQ ID NO: 75679 - DNA, 353 bp, Zea Mays
tgggatcgatggggtcctaaagaaaatccgcaggggcctcaatcttggaacagggcaagaaacctcagttggaaattgaagcctacactcggaaaagctgagcagcaagagggtctgttgtccccttcccccggcgaaggaactcaaacaggtaaccctatcgtttctcctttacctctgaagaaagatgtcgatcttgttcgtcctgctttctgtcagaaatgtggagttgaatggcatcatgctagaaattgctttaacgcattgtggtgcgatatctaccacaaggagactcatgttacatctcgttgtgtgctacctaagcaaaacaaacccaccatgcccatagttgg

SEQ ID NO: 75680 - DNA, 401 bp, Zea Mays
atgatagtaaggaaggaagaattcctagcactaaagcaagggcccctgtctgtcagtgagtacatagacaaatttctacagctattttgttatgcacctaaggatgtcaacactgatgccaagaggcagtatatgctcttgagaggtttggttgacccccttcactaccagctgatgaaccatacttccctacctttcagcatctgctcaatagagccatcatgactgggaggaagcgctaggagatggaaggccagaagcgcaagatcggtggaccgcaggctgggagcagcagcagtctccgtttctcaggcaacccatcccagcaattcaagcaaagtcaccctcaagggcaccaacaccagcatcaacgctagcatcaacattagttccagaggcag

SEQ ID NO: 75681 - DNA, 816 bp, Zea Mays
ggtcggtcgtccaaaccaaataatgcaataataatcgtcatcacttgctctatatatgcatggtccgtcctctcgctctcgatctaatagctcatactcctactacccacgtactcaactcaacccagctatagtggcgtctagctagctagcaatataataggatggacgacgactagttctcgtactgtacgtgtactatatatacggccggtggatgggtactggagccgcgcgcgtgagtggaagtgtgccggtggctgtgggctgtggctgtgggttgcgccgtggaccccactagctaaggaagcacactactgcaggtagctagctgctagcgacccatccacacggtgaacttattacagctctgctggtggcggctagctagatagtgctaagtgctcatcacctccgcgtcgcgccggcctggatataccgaagaaacactgaccacatcagccacacatgcatggaccaaaaacaaaaaaaaacatggcaccatcgatcacccatacatgacagtgacacagacgctttattttactggttccgtacgtggtgcggcgcggtctcgtcagtgacgcgctcgatcggacccatccatatcggtctctgtggcgataggatcgatcgtgcgtgtcccttcgtcgtctccacgcacgtacgtacgtactaggtaactcaaactttcagagcgtgcaagacacggccagttcgtcgtgtcgcgcgcgtacgatcgagtagctagtggagactggagctagctagcttgcacactgagagagtccccggccgacacgtcccaggttggcc

SEQ ID NO: 75682 - DNA, 1258 bp, Zea Mays
gaaaaggcagcgccctatcggacgctatacttgtcgcctccctcttatgtttgaagcaattcttaagcaatatcatcaataacactgcacttgcaaattgtggataaatccagacatccagttcaatagcacgcacatgattccattcaaaacaacaacaaaccaaagaggaacgaaatcaaacaatttgaaataaattacagaatattatgccatcgtatatgtgcaaatggctaatttgatcaacaaaaataatactcgattttaaaaaaacaaaaaatacgaaattggtagcatataagtgagtcatggaataaaatgcatttctgggttgccaaaagactttagccacacaaataagtagagcacagtttgcagccgtgcgatgtagcaaaaggtttaacaacgggcagttgatatatacaaaagagtaggtttttcttctgccattacacagtacaagttgctaaggatgaacatccggggaggaaaggtaacaagcacgattttaagtgagatgcattcacgttggccgccagcatatcaaaagcgtgataggcgtagcatcctgatcaaagttaacctgaaatacagttggacaatattaccaaaagaatacacagagtaaaaaactatacaaaatactgataaaactatattaataaagatgagacatgcaaactatgaaatttgaattgattagttaccaaggcaaataaattgttcatttgttcaaccataatgttcatcattgtgatacacatttgttagaacagtaccatagatcataaactcaaaggtcaatcatcacaggacaaaaaatattcatgtttaaaatatgccatgtaagccaacttaaaatacaattgagcatcatgtcttgaagtccatatatccagtctactcatacgttttctctttagagagacgttagtttccaaccacccaacaatcttcacaatccaaaacaatcaaaaattcacatccatgtgctcatgagtcacatatatgatttttaagaattagacataaaccaaaatgtgaagcactaccatcacatgttttcagtattaacaagtgtgctgtggtgtaattcaaatacttatctaccagcaaataaggtatactaacaatgtacattcccctgtgaaatatggaattgctttttattactgtgattaggaagaagccaacactgaaccaaaaaattaatagaacatgtacaattttgaagggctattttgaaacaacatttttt

SEQ ID NO: 75683 - DNA, 744 bp, Zea Mays
aagaccgccaggtaaaagccaccctctggggataactccggtgactcaccgtgactgcctttctactttgcggctgtagccgataagctcaccgtcgaccgccgcctctcggccgtgtgtcgcgtcgctcaactcttccaccgcgtcgccgtgacccgctactgctgtcaaatcggcgccggtgagcttgccacggcgttagccacgaattcaccgcgccgccttcttcctcatctccggccgccagcacggctcggctaaattgatcaccaccgctcgcgggctctataaattgaccgtgcccccagctccgccatgtatccaagcacctactgcacccacctgcatctcaaatccctcacccgcaagaacgaatttcggattctccccaatccggttctaaaacaccgtgaactcaaccccgccgtggtcagcccaactccggttagctcctcccctctgctctcttgtttaagcattcttatgcgtctacgatgcttgccgagccactgaattgaactgagagtcctctggtcgccgggaacacgaccgtatagccgccatgattacggccaccgtggccagagctacgtagttggttttagttgcaattaggttgggggaaatggtcagggtagcaccgatttcatgtctgccgctcggagaacccagccgttgccccgttcgaccggtataggtgctcgccggagcacggccgcgcgtgaacggcgtcggggacctagc

SEQ ID NO: 75684 - DNA, 438 bp, Zea Mays
gtccgggaattatcaacgacacgaatatattctgcctttgaaagcacacaccggagagagattgattgggataacaaacatgggccaacatgtgtatgggcaacacttattccatagggattgaacccatctgtggctagcgcaacacatacattacgagcctcttcggctttctcatggtgaatgacatcaaagtgtttccatgcttcaccatcggatgcgtgcaccatcttgtcaggattgtatcgttttctatttttgtgccacgtcatctgttttgcgaattcctcggtcatgtataaacgcttgatcctcggtataaacggaaggtttcgtaggattgtcaaggggatgtctagctgcctcttctgtccatcaccagagtctacctccatgaacctagctgatttacacttcggaaagaactttgcctttgtg

SEQ ID NO: 75685 - DNA, 841 bp, Zea Mays
tgagcttcttattacatgggtccccagtgactcctataattgctcccaaaatcgtgccacgaatggtgctcctctgtcagatactatagtccttggtattccatgcaagcgaactatctggtcaatgtagatttctgcatacttctccgtcctgtgggtggtgtgtaccggtaagaaatgagttgccttggtcaatctgtccacaatgacccaaatggaatcatggtgccgggaggtattgggcaatcccacgataaaatccatgcaaatgtcctcccatttccaagatggtatgggaaggggttgcaacgggcctgctactttcaaatgactagccttgactctctggcaggtgtcacattcggagatatacttagcaatttccctcttcattctggtccaccagtataaagatctgagatcatgatacatcttgttactgccggggtgcatggagaattttgaaaggtgagcttcatccaatatcttctttctgagctgagggttcttgggaacaaccaaccggtctccaaaccatatgattcctttgttgtcctgatggaaacatttgtatttatccaccttttgttcgaccatttccttaatgatttgaacacccttgtctccaatctgtgccctgactatttgctcttgtaatgtgggctccactgaaatataatttaaagcaccggaggaaatgacttctaggttcagcttgcacaactcatcacatagggtggtgactcttgcatccatgttcatacaactgcactgggctttcctgcttaaggcatctgccacaacattggctttgccaggatggtaatgcacctccaaatca

SEQ ID NO: 75686 - DNA, 363 bp, Zea Mays
gtgacactccctggatccgtagtttggctgctaaattagttggtttccccttttgcggttatctgatgtgtttggccctgcagacgcattcgtttcgttggatccgttgaaatcgtaacatattcaccgtaccacccatctgccatgttgtccatacataattgacattggcatgttttttcatatatgtggttgcgtggatccatgaaaatacttaaatattggttcatccgttccaatcatagtcccatgcaagggatgatatgtttgttgttcatatttatttattgatctgcacacatacagttcacatgaaccacacattactcagatctatcacacaagtcatatgcaatggatttg

SEQ ID NO: 75687 - DNA, 389 bp, Zea Mays
agaattatctctggcgaactttgatcagactcttgaagatatggttccagaggatctgttatcagagccagcggatggtgatgcgatggatgtttgtgctggtgtgttcgacgccgggttggggtcatcccgggcagcgtcccgcgcctcatcgaccttggagcgcggtcttgagggtcaggaaactgacttggatcgtcttgctcccatggaagtaactgagggaccttcagccttagaggcggctaccacagagaacttgggcctcaaggatggtgttgacacttacccagcccccgagggtgttgccggggatgattcggctcgggtgggaagcgtaagccgcggcccagcccccgagggtgttgccggagacgatccggctcaag

SEQ ID NO: 75688 - DNA, 442 bp, Zea Mays
gtaagtcagtccctctctctggcctccagcacatcttctcaaaattgagcgccaccgcagttgagctctatgaattgatgccccagtaagctccgctaggttgtcatgaagccagagcaccagcccttgcctccgattagccaccatagcaccccaattcctttcttcccccccattgggtttccacgccaccgtgaacgcttcgccatggccaaccctctgtaggtcagttcatgcttctttgcttgatgttctagcctagcttgagtcccctgctactcgtagacccgtttaattgaactagattgccttggatcaccaagaacacgtcagattgttctcggtttttgccgtcgtcgtggacagagagattcctacccagattggtgcaattagtttagggaatagggttgctgtgggtggaattaggtgtcgaacaaag

SEQ ID NO: 75689 - DNA, 367 bp, Zea Mays
tgctcatccttggcttgcttcagggcttcaacagcaatgacttcatgacttccaaggcagttgcacgggcttgagctgtggtgagatccacatggagcttacggttgtgcttctctgtatcttctactcgggcaatcatctgacggtggtgccgagccaagaaatcatactgtgcatccagggtgagcaggtatgcagtgaggtacacgactgtggggtcatcctcaagcagttgttgcccttccaatgcacacatcctggccatctaaacgggacgatctctctgaaagggaggaaagaatctgagcggggtgtcggccacttcttcatagatttgacacagggccctcaatgccttgcgagcgat

SEQ ID NO: 75690 - DNA, 564 bp, Zea Mays
gacaatctccgatcgacggttcgcctactctggtccaagcagttctatccgatcaaatctgggccatcaaatggccaatcagcggctcaaactttccctccttcaccctcggcagcttgcgcacggcagcgaggcagggctccgccccccgaagctcactggatgacaccgcccagcctaccggtgaccgaactcaacctcgaacgcacctaaacattgcacggctaaaagcgaagcaggggaaagcatccttaccgaacattgatgcccgagcggcgctagccacggttttaggcggaactatggtggagaggttgctccgatgagaaattctaggcgatccggagcagaatccgcccaggcgacaccacggttgtgaccatcgaggttttgtgtagcacctaggtcaccaaacatggctaatccgacgccgttggtggatttcactgccggcgacccccatcttcccttccgatggcaactggtatcgtagagagatgcggatgggaggaggggcacctaggtttcagctttatagcccctgcagaagatcggcttcaggtt

SEQ ID NO: 75691 - DNA, 452 bp, Zea Mays
aaggttcgaagatgatcatcctctagcagccacgacaaattctggagttgtaactagagctgtcgatgatgaaggaaggtgactaattattatggagtcattaatgatatactcgagtacaagttttttggagataaacaactcaaagtggtgttcttcgattgtgattggttttctccaaatacaacgcgagaaaatcaatatggcatggtggaagtcaaacacaacgatagattaaaaggccacgacactataatccttgcccaccaatgcgagcaggtgtattatatgacatatccatctaagaaaaagggtttggttgattggagggtagtgtacaaagttaatcctcgtgctcctggtgatgttggttatgttgaaagtcaaatcgagcaggaagtgggggttgctgagattttccaagacgaagaacttaccagcacgtttaatgt

SEQ ID NO: 75692 - DNA, 984 bp, Zea Mays
gttttaagcttcgacaatcgtgcaaccgttgtctaaatggctgaagagaagaagattgctgaccctgcattggccgggttttatgaagctatggagaagacaaatacagagaagattaccaatgagatgctagctgggttatctgaagattccgatgatagtgaaagttttgatttagaaagtggaaacgaaggtgccgaagatcggccctggtggtcgagtcataccatctttggtaaatcaaccatcaaacatagtcagattgatgcaatgaaaggaagatagttctgcgatatttctatcgtaagggctggaggagatagcaatgcccctgtacccgaagctgacgaaatggttgtgtacaggagcttcacgaaagcagggcttcgattccccctgaacaaattttagttgaagttttgaagactttttaaatttaccttcatcagattacccccgaagctatcatcagaatggacattttcatttgggccatgaggagccagggattagagccgagtgcaaaatgcttctacaacatgcatgagctatcctatgagacgaaggctactagcaaagatcaatatcataataattttggttgttacagcttcgtgcctcgctctgatgtgagctatccagtcctgacatttcggaagaggtggccaggagcctggatgcaagagtggttttatgtgaagaacaacttagttgaaagagaagatataaaggggatcattcaatgccctatctagtctcgcttcggcattaggaggcttgctactgtccttggagatgatattcaagcataccagacgacttttaacaccgtatgtacttatattggcactagggacttagtccaagagcatattgcttacagagtgtggcctcttggaagcggctgggagatgctgaaggaagctgctgtcgggtctagtccagacagtttagtttatctgaaatacaccttcagatacagag

SEQ ID NO: 75693 - DNA, 473 bp, Zea Mays
tacctgaactctgtttctgtcccattgcatgatgtgcattggtacccagtagatgtctgggatgaagacttgttgcacttgatacaggatgggaaccaccatctaccattttgtacgaggcgtgatatagtgacagtgcatctgaaaccttgttcctgtattttggaaaagaagtttgttgtcaataactatattgcactttatatactgatgaaatgtaataatagagaaatccgtggttattacggggaacatatccggatctagctgaagtagttcttcaatggttttgtcttcgatgttgagtgtttgagaagcctgtaattcttccgcagttgcttgggggcgtatcatttggagcttagtgtttagcaacctttaaatgatatggtaagaatgatgagatataatcaaacaattgtgtaattaggaaggaaagtaagcatttatgacaaaacaatgggtagtatatc

SEQ ID NO: 75694 - DNA, 859 bp, Zea Mays
cttaggggtgccctgccccagcttgcgaacgagctactgccgacgcccgaagtagagagatataggcaaatcctcactcgggcagcgaaacacattcttccactggctcactaagagggagttctgcgccaccacctcaacaattgtcgcgacgcgcagagcgactcctcatgtgcctgataatgagacgctaggaggactatgactaggaccacctgtaatcatgatgacgggccggaggtcgaggtgaatccaccactgatccggcgacccactcgtcggcacgtcaattggcacgcgaacggctacaagacccacgacaaccatcgccgccgtgggaccatgatgcccggccaagagtttagggtgtgttcgggttgtcagccttcaccccccagtttatgtgatacagtggccacccaatttcaaggtctccaacgtcgacaagtattaggctaagtttgaccccgacagctggctgactatcttctcaacaatagctcaagccacaggggccacagaggatgtcatgatgacgtacctacctatcgtgttggggtaggcacactctagtggctccgccatctccttgccacaacatcgaccactgggccgatttctgtgataagttcctctccaactttcaattactctccgacaagcctgcatagccatgggacctcaagtctgtcaggcgcaagaatgatgagtctttccgctcgttcctcaagtgtttccaaactagaaggaacccccaacatcgctggtgcattggtgattgaggacttctactgggagtctcacgacgatatcttcatgcgtgttatcctgcaagaggctccaattatggctgaacaac

SEQ ID NO: 75695 - DNA, 414 bp, Zea Mays
atttgtcctcgttgtgtgcagcgttaccaacttctccctagtaggctcgaagtgtcgaggctggataccagtatacccaagaaagaattggtgacctggcttacaggaggtagtctcgactgggacctggacctgtacacagccttggctagaaagttttagtagtgcacccataagacccgccagctagtatcttctatcctttgattcatgcaacaggacctgcaggatttagcctaggaagccaagccgtgtgtccgggccccctgggtcacagctccagatactagtacacccattgcggagtggtggagcgtgcgggcttagggtacggaaccaggctaagcggctacacggctccagaccaccccaggagttgtgcgtccattctctagaaccagaccccaggttccc

SEQ ID NO: 75696 - DNA, 361 bp, Zea Mays
tgacctccgactcaaggacgtctgccctttatagacgggtcaccataatcctttgattcgatctactaaattctaggaaccggcccctgtaatatctctacgtgcaaccgtccggagatctcacacgttgtccattactcctagttgatgtgacagtgtaggtgtgatatttgataaccaaataaacaaaaggcaaaaattaaagtgtcgtttaggatggcagggcagagaagcaatggtgcagggaattgagaagaagaggatgagtcagttgctgttcgcctgtgacctccgactcaaggacgtctgccctttatagacgggtcaccataatcccttgattcgatctgctaaagtctag

SEQ ID NO: 75697 - DNA, 385 bp, Zea Mays
ctccttaagtcgttgccgacttaagccgattgcttcgttagcagggcatagtggtcaccccgagttaagtaagcgtgagcatgtcgcaccgccttaagtcgttgccgacttaagccgattgctccgtttagcagggcatagtggtcaccccgagttaagtaagtgtgagcatgtcgcaccgccttaagtcgttgccgacttaagccgattgctccgttagcagggcgtagtggtcaccccgagttaagtaagaatgcaagtcaatcgtgaacaaattgagtatctttgaaaccccttttttattgatgacatatttccactttacagagtacatcgtcgtcccgatagctttttgagatacagctagggataaaacttcctgagg

SEQ ID NO: 75698 - DNA, 1030 bp, Zea Mays
aagacagaagtttggctacatcatttgcacagttttctcgtctccttgctgccctcctacaattgttgtataaaaattgaccatccaaacatttactatagtaatatctttggcactcaatatatacatagtaaacacaaaagattccttacatgttttcagatcttgagcagttaccggtacgttctctggcccatcatgcatgtctgatataaaatcaactatgcaatgatggggcactcggctatcatgcattgcatcaacaaaatttatgaattccgcatcccgacttttgttgcaacgtagatgttgttttctctgcttcgtcagttatgaactcatggttatgctccaaattcaccagttcaatctttgcagctaccacttttttcatcatcatatatttttttaatttgattccagccttacattgcatacggccagaattcctattcctcatcctaggtgtatcatttggttttggtgcacttttaccttcatgtgaacaatttatccacttactgaatgtcttctccctgtatttcttcaatggaaatccaacttcatatgcataccttttataaaatttatatgcatcatcaatatccttgaaagtcattcctactattggcactatatttagatcaatgtttttttgctgcaattcattgacaatgttgtttgtaccacggattatgatcataacaatctaatcaatcaagaatcaaatacaacaattggacttacatgtgaatgcagtatatgaggcgtatccatctccctggagctaatattggacatcggaggtcgaatccgttgttctccttcctccccattgcttatctcgtcgattacaggccccagtagaataggaggtggtgtaaccattaagttaccatcaactactccctcagtgtctagacgaatctgaccgccatctcctaccatcgtcggcgattgtccagagccggccatctccaccgccaactagttctgcagtctgggggtatttttcaaatgaaaggaaatc

SEQ ID NO: 75699 - DNA, 1382 bp, Zea Mays
attaatatgaaattaatgcaactggaatggaccaaaaagaattaaaatggattacttatgaattaaacaaaattctggaattatttttatataagaaattcaatttcagtgtatttccacttaattaggaaactgtctggactgtggccatcaattccgggtagctcagggttcaaattataactttcagggccattctgttattattctaatactgccatggaatgcgggtttatatcgataattgtcaggggctctttagcaaaagaatcggacgaaggggtatcctggaaccctggccgactgattgaaactcgacggccgagattaaatctatccctctctacgaactggttcatcacaccgagcgcccgatccaagatcgacggccgaggattgctcacgacatcaactccctcccgactgcatgatcacttatcaatggtttggatttaaaacgacgaaggggtaacctgagatctaatcgtggcccccgaatcttgatcaagggctagcgcaaaacccaccccaaatcctcataaccaaccgaacccaggcggcggcgcacaccggcgaacggcggggtcatggccagagatctcgttccggcaccccgggtccctatttctccaccccgcgaggcgattcatggcgagaactcccacagctagacttctaccgtgggttttaacgcaagggactccgcccccaatggtggacgacgcccagttcacggcgccaatcagcgtggtggacgcagctatgtctatacagtgcacgagggcgagaagcaccatttgattcctagatgaacgacgaatcgagtagaggcccataataggaatcccaggtggaggtgaagtcgggccatgtgtggccgagggctttgcttcgatgccggcgaggaattggcactcgatgggtactaccccacacccaacaccgatataatcttgatctgcgcgctgcggcggacgccgttggctggattcgaggtcacaatcacggcgagaccaaggaagccagcccaagccttggctttctcttctctttttctttttctttttttctcttttctattttattttcttttataatttctattttcaaattctaattttcaaacttaagtttgtctcacatatttgaatacaaatgcaataatacaataatgccagcatgatatgcatgtccctttatttatttgtttatcatttgactaactcaattccattagttgaatacgaaaaaagggaaaaattaagtaataacataaatcctttttatattctccccatacacatgtatttttagaaccccaaatatttgggtattacagcatacctgtttggaattttcttaccgtcatacatgcgtcccag

SEQ ID NO: 75700 - DNA, 563 bp, Zea Mays
cctgctatgcaacattttcatcatttgtttagcaaactcatgcagaggggtgttcgcatctacatgtgatttcttcactaatctcttcatgctctcactatgttgtgtagacaccattaccccacagaagtcgtttttaaaaaatgctggtatccattctttccttatttcatataacttgcgtagagtcatatcttcatgcagattgtattcttctagcatcatttcccaggcacattcaaactcatgaggagttaaaggatgatgtataatagattggaattttgttttaaaatccttatcagcaaaccttgcatataattcatttaagaatgacataaatcggttctgaacatgccataaacacagtctgtgaattgtttttggaaatacagttcgcagagcaattggcattgtgcgatcttgatctgcaattgctcacaaaccattatttgactatcacaataaattattcgacgtgttagcataacaaattcacataccacatacctgttagcataactctaggtccctcgcatcccatacatgttttgaatgaattg

SEQ ID NO: 75701 - DNA, 466 bp, Zea Mays
gtaggagcggatggagggcgggttgcgtccgtagaccacccggaatggtgtctcgtggagtgaggactggtaagcggtgttgtagatgtactcagcccacggcagccaacacagccattgtcggggtcgatacccagtgaagcaccgtaggtacatgataatgacatgatttgctgcctctgtctggccgtccgtctgggggtggaatgccggcgacatgtgtagttttgtgcccatgaggtgcaggagctcacgccagaacaccgaggtgaatactgggtcccggtcggatacgatggattgtgggatcccgtggaggcgcactgtgtcggtgaagaatgcctgcgccatggactcggcggtgtatggatgcgccaggggaacaaagtggcagtatttgctgaagcggtccacgacggaaagaatgaccgtcttgccgtgcacgcggggtagtgcctccacgaag

SEQ ID NO: 75702 - DNA, 358 bp, Zea Mays
atgaacttcaggtacacggtagaaacactccaaatgttgctgctaccaatggccaaaaatggtgtagaagctctaggatccatgggaaacgatacccctctcgctgttatgtcaaacagagagaagctgccttttgattatttcaagcaaatgtttgctcaggttacaaacccaccaatcgacccaattagagaaaaaattgtcacatccatggagtgtatgattggtccagaaggtgacttatctgaaacaacagaacatcagtgtcatcgactgaaacttcaaggtcctttactgcatatagatgaaatggaggctattaaaaatatgaactttcgtggttggcgcagcaaggttc

SEQ ID NO: 75703 - DNA, 327 bp, Zea Mays
cagcaacagaagccagttcgtttgatttcaaaagtttcttcgacccaagaacacatggcgctaagcaacggtcgagttaggtagactccaacggctagctgggtctcgaggtttcgggtggggtaaaggctacacctttttatattcgaaaagaaaaaggcggcactccctgtctcaggtcattaattacgctcctcttttatctcagtggcagcatcatcacttgtgtcgtagtggtgacagtgtatgggacccacgagtcagtccgacaaagccgagcctgtttcgattgattcccaggaccagaagaggttgcagctttctttt

SEQ ID NO: 75704 - DNA, 1216 bp, Zea Mays
ccaacgagtgaaataccaacaagaatacaagataaccagcgtacaacttagaaggaagataagatagttttcaacaacactagtggtcataataataagaccacaatataggaaaagcttataacaaggggagctggagtacaggggagggagcgacactaagcaggggaaagtacatgatatgtcagcagtcaagtgtgttgaacagttattagacaaacaaaagcaatagcaatatctaagatttactggatcagaaggacaacttgcctggaaggctccatgtctaacactgtaatgcatttcctcctctatacaatgaagaagaaaagctataacatttgattcttcctgctcatgtgatggtcctgaaaagcccatattgatacaaaatgtgatagcataatactttccatttgaataaggacagcttttcttgccttttaagaagataatacagtagacttgtgcagtatgtaaataatgaaaaatgagaaaactacgaaagaacattatttaaaattcaggaataagggctaaccagcacagcaatcctcagtgagaaccgcaaagacatccaaagtaggtggcacttttgaaaaagctgtctccaagcaacttagaacagtaacctgttgtgcactcatgtaaggaacagggcacccaagaccactggttcttcaatacaggaattatcaaaaaaactaaccagcacggcataatgttcagtcttattcgagtgtttgttcagtaatctactgcacaatactttaatgactgttggcaacaattcctttggcatccgagcgtacctgttcatctaacatattattaactatacaaaatcgattagagaaaataaaaaaacaggtgtgtcaagatcatacggtgtagcagatatcaaaagaatgagaactctgaataatgccgcaagcaaagtagcttgagtttcacgctgtatcaagtacagtgctcctgcaaatcagaggggggcaaaatgtaaaatgcaaaactgaacagatctcttacaaagtggagggatctagttaattaatcacagagaaatggctgaacaaaaatattcaagttccaccaaaataaagggacaaaatgctggattttaatgccagagatgaggctatggataactttagttaaataagttaatagtggtagtgatagtagcatgaaagatctgttctagagtgtttttttg

SEQ ID NO: 75705 - DNA, 575 bp, Zea Mays
caatacatcaatcttgtagagctatgataggagtacaactttgattaagtgactaagcattggtgctgtacaaaaatttgggataaatggacttgaagtctggctgtcagtcagccctgaaactgaatctggactgacagtgaactgggatagaatttggaagcaatttcgagtaggatccagtgagcatttgattctggtttctataacaaaactcaagctggtttgtaggagattaactttgttacagatggattagggagttgccacataaaaagttgagaacaaagcattgcaagttgctatgtcatacggtctgatgaatgattttgatggtacagtgactgaacaagatcaggttcagtgtatctcaccgccggtgaattggagccgcgaccctcgtcggcgctgtgattcgtgctcggtggcgcacagataactttgtagggtgaaagatctcgcgcaagggatgaagtcggggtactgttgccacgcttttgccatacccacttgcgctgcgacgtggccgaccgttcatcgccgtggagatcaccgttcaccgcgattgtgccacg

SEQ ID NO: 75706 - DNA, 332 bp, Zea Mays
gttcgctttgcgcagtggaccctgctcttttaaataactcgtaaagtcaactgcgcactattcctatgtgtcactgacgtttgcagatagccccttcccttttctatttcttcacacgtcgagacccccaaccatggacggcggagcagcggcttcggcgagcccataccgtccagaaaacgcaacgactatgcttctccattgctcaacacctaattctacccttaacgaccatttcccctccatcaattgcagagttctaactctaaatcgcgatgtccacggtgatggcgcaaactgaggataacccgaggcgttcccggcgatctaac

SEQ ID NO: 75707 - DNA, 730 bp, Zea Mays
aacgaagcaatcgacttaagtcagaaacgccttaagtcggtgtgacatgctcactcttacataacttagggtgattactatgccccaccaatggagcgaccggcttaagtcgtaaacgccttaagtcggtgcgacatgctcgcgcttgcataattcagggtgattactatacccaaccaacgaaacgatcgatttagcagcacaaactcagggcggatactatgtcgtactagcataacacactcaacgaggacgtaaagtaactcaacattcgagaagagttcagcaaaccacaaaaaatgaccatctcgatgaaaagttgtcctctgtttgaacgaaccaatattcggtttcactctctggttactgtgcaagagcatcctcgcgaggaaccttgtccacaggttcgctagaagcagacggattacccgaagtacccgatgcagcgagtacgttagctacaatgtcatcaagcaccacgacgtcgggcctcttcatcaaaattcggtcagcctagaccaccttatccatcgctttgtcacaccacgccttcatgatagcatggttgtcctccaaggccttgatatcatgacgggcggcttccgtgttgcgacgagcggcctccagctcctacgacaccagcttcttcgaggagcagagctccttgataagggaatcttttgaagacaaggacctgctgagtttcgacacctcgtcctgggagactctc

SEQ ID NO: 75708 - DNA, 490 bp, Zea Mays
ggcgactggcgttggcacgttggctgggcacgtttgctgttggctgttgctggcttcctgccttagtgccttggttatcttagttcatgtcactgtcgtggatcttcgttgagcggccgttgctgggaacgttggcgaccggcgttcgtcctagttgctggcttctgtggatcttcgttgagctgttggctgttgctggccatatgaactgttgggtgttggctgttagcacaaagctgttggagtttaatttctgttggagtttaatttctgttgcgttgcgttgctctccttcttgggtcactagtcggtcgttgttgctttgaaagcaagtttgctgttggctgttgctggccatatgaaccgtggatctgtttcgtccaagtcaggtgtgttgtacgaacttgagtggtcgtcgtcgtatcatatagatgtcttgtactcttgtagtcttgtgtatgatttataatagcgggtacccaaattttac

SEQ ID NO: 75709 - DNA, 503 bp, Zea Mays
gacgaagaagatggatacctattcgctgggcaaggtacttacgtaatgtttgtaaaagtatatatataggatataggatttgaaagtttctaaagttgtttatcttacccatttttcctcgaaaacaaatttagatggtgaatctattgaggatattgagattgatgaaacccaagatgcatttactgttaccccagacgtacctaacacgtacgataaggtgtatagtaacatacctgaagaaacacattcactagacattgttgctgactgcgtctactacaaagcaaagaagtttcagtatgaaccacctggattttgttgtcgtaatggacagattgatttagccccattagagacaccaccctagcttaggaggctgtgggagtgctcagatgctgaagcgaggtacttccatgataacattcgatttttaacggccatttctctttcacttctctgtactgttgccttgacagtatgactacaaacatggattgtgg

SEQ ID NO: 75710 - DNA, 780 bp, Zea Mays
gcgctggcagacttgcacagaggcccttagggttttaactaactgcgaatgagccctttcactatttaacacagtcactgacactttgctgaagagccctccaacttctaagtcttcacagggagaagtccacgacggcggtgggcgcagggacgctccggcgaggttctagaccggccgattggggctatggctgggttctccgagcggcggacatgaaatcggggtcaccatgatcatttcccctaacttaattgcgtttataatcaactacggagctctggccacggtggccgtgagcatcgcggcaagacagctgtgttcccggcgaccagaggactcttagttcaattcagtggctcggcaagcatcgtagacgcataagaaggcttaaacaagagagcagaggggaggagctaaccgcagtatggctggcgacggtgaagcttgtttcacggtggcggaaagagatttgggggaaaacgcgaattcgagctcactggtggatgattgtggccgattagcggtggctagttagctgacgacctcacggagctagtcacgggctcaatttatagggaggacgggcggtggtgatcaattcggccgagccgtgttggcggccggagctgaggaagaaggcggcgcggtgaattcgtggctatcgccgtggcaagctccccgtcgacgatgggacgggtatagggagtcatggcaacgcggtggaaagttaaagccacgcggcgcaaggctaggaggcggcggtcaccggcgttctta

SEQ ID NO: 75711 - DNA, 880 bp, Zea Mays
tgaagatttttgggctcattttggtgtcaggaatggcactacttactgctgggtaaccagctgtaatcagaatgtaatctgtgggtaatgggcctattatggccatattcctagtgggttgtattagcctagtgttgtactataaatactagacaaatactagagaagaggtcaaaaaaagaattacagaaattatccacccgtttctacctgttaatgcgcatctggaagcttgcttctgttctggcaacagctcacgatggtggttcacactccatcgtcccacgttacagtgatatcggagccaaggtcctcagcggtggaggttcatcaacgtcaagtgcggcttccggtgcatgcaaggcggagtcgtcttaccggcgtttgaactgcttcaccatgacgtctgttgcaaagccatccgtccagacccacttcatcctggacgccatggtggatcatgatcgaggaacgtaggagagttggggtgaatgatggagactctggaggcattttgtgctcgactcaaggaagtggaacgcaccccacaatagttgatggtgtggtcggagttcgcggctttggtggtggagtgcgcggcgaccgagcgggtgtagatgagccagaagatggaggaaacagagaagatgatagtgcaactactgctggaacatatgggcaaggaactcagtgagacatcagatgtaaacacggcaagagaacaacatcaacatgcaccggttcgtccacctgtcagaccaaggcaagaaagaatggaacaacaacgagggccgatgaggggccattgttttcagatcgcctgatcgtctgatcgatgccactgggcgatcagacgattagtcgcgattaggcgacgatc

SEQ ID NO: 75712 - DNA, 451 bp, Zea Mays
aaacagtccacaagataaaccatgtaatctgtttttttttcttttgggcagcgacatacccggattcaaacagcgatatcttttaaaatataattccaaatcgagcgcataagtactcattggaaagataagacaagaccctacatgattctcatactggttatcactaattacccacgaaaaattctcagaaactgctaatactactgctgttcgcccacctgaaaaatatgttttttggacagcaacatacccggattcaaacaacgatatctcctaaattataactcaaaattgagcgcataagtacttgttggaaaggtatgacaaagctctagatgattctcatacttgttatcactaattaacccatgaaaattcccagaaatccctagaactactgatgttcgcccacccacaaaatttctggacagcacctctaccgattcgc

SEQ ID NO: 75713 - DNA, 933 bp, Zea Mays
cttcttggatgatttaaggtacaaggaagcagttccatcgacgcacactacacaaccattctttcctttagtcttttgccctgatagtgtggcgccaccgggagaatcacggatggtaacaaatataattgctcttaagttgaaatactcatggcgatactcatcccatattcgaactccttcattccacggctttgtcatatcttccataagaggctccaggaacacatcaatgtcaacaccagctgctttcgaagaatgacatactaaccgcagcactaggcaatcctgaacacactggacgggctcggggaatctcttctaagatttcctggagagaggcgtttccagagtatgcggcgtcatataggaaacacgagaagtcgaaaaggacccttgaagagactattgatgaaagggtacaaaaggctattaatgacgtgatgaagaaaatgaagaaaacaggataaatatcatgtgaactcaagccaggccacatgagtccacctctagtccctagcagcgtaggatctgtgcaagacttcgcatcgggcaccaagtaccctgtagacgatattgttgaggacaagccttgctttcttcatattccaatcaatcaatctgggacaaaaacaaaacaagctgctactggtttggtagaaccaggacttgttaactaccaggataatcctgtcccaccacactatgttgtggtccaagttctagagatcacagacagtggttgtgaagattgggagatagactttctagttgaggggatcataactttgtaggaggcaatgaacgagttggtcctttggcatcgacgcgacattaagttgggtgatgagccgatcttaagccgtctatcgcgtcataagtcaccaacgacgaattcagcaccaatgaaacagaaagatagttcgatcattc

SEQ ID NO: 75714 - DNA, 323 bp, Zea Mays
gttttataagatcacttgcatatagaagcagtgtcttgtatcttgtttaagccatcatctaagcccaacatagatgtcaccagatagcctggatttgtaacgtcatcactgacactaatagtagccccggcctacgtgttgcacgacacggcaaatgttcctccagtttacttgcgaattaacgtattggcatgatgacaaattgtttagtctcctcgaggattgcctgcgcaaatattctgctctcccacaccttcgatccgtcgtcaccgggaagtcttgcgtcttgcccaatctcacatgccatagatactcgtcaattt

SEQ ID NO: 75715 - DNA, 480 bp, Zea Mays
gaaagtagtttttcctttattgcttactttcatgttccatattgtttcctttaatgattgttagtatcttgactttgcttgctattattatatttgtattgactatcgaatgcatgggagatctacaaccttagttattttgttgataggtctttgctacaaacacttcttattaaggcaattggaaattggtttgttgtgatgttggtgatctccactaggtttgcaatgtatggaagtgatagtagttgaatggaaatgacatatttggatgtgttgtgttatatccatagtagaaaggataatatagtgggaggcaggcaacttgatcttgaatgatgaaaggatcacgatgcctaagagaggggtgaattgggcttttctaaaattcttacaaaagattaaaccctaaacatgagcccaacttcacccaatctactagcaagaagtaaaaactatgaaatggagaacaaccctaag

SEQ ID NO: 75716 - DNA, 1342 bp, Zea Mays
gaaaaaatggccttcacatgattgtaggttactggtatacctgaatggccacctactgctgagcagtgcaatgcaaaaacaatccttgtttgaagctgcagatcattaccaatccatatacggtctttgtagcgaaggagaccctcagacaaggcaatgttgggtactgcggactggtcaacaacgagtttagtgatcatagattgagcctcgacctcctgaagataactgaattggacatcagataaccattggggcacaatcatggacacttcgtgcaattcagaggtagagcagcgagaaagagcgtcatccactctattttcggaaccagacctatactgaatatggtattgtaaacctagaagcttggtgaacaccttatgttgccaaggggtatgtcgacgctgttcattcagctgagccaaacttttatggtcagtgagaatcacaaattcattgtgttggagatacacacgccattgttgcacgacgagaataattgccagatattctttttcataggttgaaaggcctctggacttaacacctaaggctctactgaggaatgctataggatgtcccttctgcatcaaaattgcgcctatacccttatcacttgcgtcggtttcgatcatgaatggtgaagcaaaatctgggagactcaaaacaggtgcagaagtcagagcagacttgagggtgtggaaggcagtatcatgttcgctagtccaaacaaatattgcattcttcttcaataaagctgtaaggggctgacatatgataccaaagtgacgaataaatttctggtagtaccctgcagtcctgctactcccaaaaaactgcgcaaatctttgagggatcgagggaccggccactgtgccaccgcttgcaccttagacgaatcagtagctaccccttgagcactgacgacatgacctaagtaagtcacttgattagttgcaaatgagcatttggacaacttaattttccattggtctctagccagcagatccaaaacttgttgtaaatgattgacatgagcctccaaggagtcactgtaaaccagtatatcatcgaagaaaacaaggcgtaacagtggagccagtgcgtggttcatggcacgttgaaaagtaccgggtgctccagtgtgaccgaatgccataacacggaattcatagtggccttaatgtgtttggaatgcagtcttgtgttcctctcctgccttcagcaagatttggtggaacccagctcagagatctaaaatggaaaaccaggatgccccaaacaactcgtccaatagttcatcaataatagggactgggtacttagacttgatggtgag

SEQ ID NO: 75717 - DNA, 907 bp, Zea Mays
acctttgatgacagtggtactccggtttaggcagcggattggctgacttatgtggaggataagatggatgtcttcgagattgtgtatggagatcgggttcgttttggcacgcaactattgaagggggaggctcaaatttggtggagaggcatggaggcagctcactcctcctcaccaggagtcctgacctgggacactttcatcaggtagtttgagaggagattctacccagtcaccttcctggagaaaatgaagattgatttgcagtctttcaagcaagagaagaagtccgtcacagagtatgaagtgggctttaacaaaatggtctgctttgttcctcatgtggcttacaatgagttggagaaggcgagccagttccatcagggtctgaaacctttctatcaagcatgctctaggcgcctttctgttggtggattttcgtactacagtggagtaggccttgggtgtggggatgcaacatcagtacaccatggagtcttagaagtcttcgggtgttgatcaacctcatggccaggatgcgaggaggggcaacactgggggtccagcccacaagaggggaaagtcacagcaccagcgccaccatccctaccatggcaaaccttctgaatcgagtacttcaggacggagtactcagaggtatcgggctgttcctaagcccaggctggggctagtgtgtttctgttgtggtgaagtgcatcgtcgtgccgagtgtcaggggagtggcaggtgctctatctacagccaagatcacaaggatgtggtgtgtaggaggaatcccaatgggaatctcagatgggagccagtgacttcttcctcttctcagggcactgtcaacatgatgtcaagcactgagcagcaattttcagtaccaccccctccgcagcag

SEQ ID NO: 75718 - DNA, 1140 bp, Zea Mays
gtcaccatacatgttgtttaaggactagtagaattacttacatcagttcatgaaagatagttgacagcttgtctttattttcaattatcattgtggcatcatggggatgggctgaaaggaacttttctgcaggtacactattttgatacgagtagttagtgtagttgcgtaccaatgagtgaatgagtatgccaccgcttatgatgttagtataactaggtcgtgaggccataagttatgtgcatccattatggtataaccatcattttgatcatttgtttcatcattcccttttggaacatgggtagaggtttttgtctacgctaataaccaattaaaaattatttcctatttctcacgccaatataaccttgtaacagattgcccgccgcaggctcaccgcccaaaagtctacaggaggatgtgttccttgtcacctgcttgctgcaagcatttcccgtcgccgtagcacttttctttcagagtacggtttacccaccctgttgtggtacgttattttcgctttgggttacctagagggagaggaactgcattacttctgggaatggagaccacgctatgatggagaaagtatttgggtgacagcagtggtgaagccttaggcagaggatccagctatgggtggctggcactttagatctttaggccgcacacccagggaaggggcaggcagagcagcttacaagatactttaggacttgttggatcgttttcctggagagattccaaccgtcatgcctgggatctttcctaggggtgatcctttcaaccctaagtgggaccagcatgagggtagagctctgacatgaggtgacagcgagtagcagcacagtgacaccacagcttccagcgctatgtttgcagttatgcaactgtataacagctcggagcacaatttgggaatggtcaacagttctcttgtcgtggctaagaacaagttgtaccaggctcaaaaggcgcatgatgcagagttagctcaagtacaagcagagttggcccaggtcactatagagaaggatgaattcatctaggtcagggatgttgtcgtgcttgacaacgtgctatggattggcgaatgctagaactaccacactttgctggtagaggtcatcagataga

SEQ ID NO: 75719 - DNA, 1726 bp, Zea Mays
gatttggaagcgaagcacctggtaccaaatcaatttgatgctcaattccacggagtggaggaagtctagctggtatcttatcaggaaaaacatcttcaaagtcctgtaagagatcaagaacaacactaggcagcgatgaaggtaaatcgttagttgaaagtaggacctccttttgtaagagcacaaagaatggggttgtggtgtttctcacttctctcaaatcactcttgctcacaaagagacactcagtgtggcgtggctgtttaggattggcatgaggctttatgtggctagatgggttagaactctctcccttacttggtttgggggtctcactcaattttcttttgtctgattcctctcttttcttgcgagccatatctgaagtatgtatctcctctagagataatggaacaagaaccaccttcttgtcattgtgaatgaaagtgtatttgttagaccgtccaaaatgcaccgagtccacatcaaattgctagggccgatcaagcagcaaatggcctgcttgcatggggacaatatcacaatccacctctccatgataatcaccaatggaaaatgataaatgaatcatggctgaaaccttaactatcccagaattattcagccattgcatatggtagggatgtggatggcgacgtggctgcaaaccaatcttctcaacaagcaaagcactaacaatattattgtagctcccatcatctatgatgaaacaacacacttggccttgcactttgcatcgggactgaaataaattatggcattgtccttgttcagctgcaacaaactgagtggaaagaactctcctaaccacctaagaaagagatggtgtattcattgtagaaggctcaaaattaggaaaatcagcaagcaactcatcaaaatcagcactagtaatctcgtcagaagatggagaaataacatcttgtaacatgtcattgtgagaaaaagttggaataggttgaatcgctaaacaattcaaacctagctcaaatgtgccatcctctgctaaatactcacaagtgtcaagattaaaatctacaaatacattggtaaactcatcatcctcttcactttgtgaatcataagaaccatcaacaagggcaataatagtacaacgattggaacattcggcttatttatgcccatgaccaccacacttaaaacactcaatcttgcttgtcttgcgttgggtggctacagtagaagaagtgggctaatttgaactcacagctttacctttcgcatccacttgtttggatgaagttgaaatagatctatttctccatgatatgaggatttgggcattgcagcttcttgctgttggaattgaggtgtgacatccccttgctgttgggaatgacgccatctttgcctttcaaccctctttgcaaaatgaaccaaatcagtgagacatgtgtaatttttcatatccactttatcagcaatgggtttattgaggcccaccagaaaccgagccattgttgattcctcggcctcagttatccctgtacgaagtaagcacatctccaattcctgaaaatatgcatcaacactgtgattaccttgcacaagacgtttcagcttcaaatgtagatcacgagaataatatgcaggaacaaaacgacgtctcatttccctcttcatgtcttcccatgttatacggtcatgcccaactctatgatattcagtatagatctgattccac

SEQ ID NO: 75720 - DNA, 403 bp, Zea Mays
ggggcctactgtatagaagaggtgtggcaggagtcctcatgaaatgcattcattcggttgctgggaagcaattgttggatgaaatccatgctgggcagtgtggaatacatgcagcgtcaaggactctggtcgagaaggctttcagatctggtttctattggccaacggcgaaaagcgatgctgccgagttagtccagaagtgtgaagcatgccaattcctatcaaagcaacaacacttgcccgcgcagcagctgcggaccattcctgtaacatggacgtttgcatgctgggggctagacatgatcggacctttcaagaaagctcagggaggctatactcatgtactagttgccattaacaaatttacaaaatcgatagagtataagccaatcgcttctctgac

SEQ ID NO: 75721 - DNA, 571 bp, Zea Mays
cacacattttataattataagaagaattagagacaaattagaagtaaacaaaagcgtgcatgtttcttgaaatgattaagtgtcttgatataaattgaaatttgataactaagtcataatgatttaaacttaagaaattggtggtagtatctctctatgattttgcttggtaatttaattgagtgctctcgtgcttgcaaactaaaatttctgcgtgaacagtgttggttgtgctctcgatttcgagtagacacatcgagtggtcaagtaggctcataatacaagttgtgtaatggagttagttcattttagaatgattgttgaaatgctccgttcatgagatgaacatgtagggttattttgaatcgagtcgatgtggtgtgatgatgatatttgtgattaaactggaagtcatgtaaactcatagtaaagcctagttttaagttgcaagcgatgcgggaaatgttttagtaaagatatatgtgaaatgtgaatgagttgttctaagtatgcggtatgtggtgtagtggtggtatgaaaaataggttagcacgcaattgactagttggcg

SEQ ID NO: 75722 - DNA, 457 bp, Zea Mays
aaaatgtcaaggatttgaggattgccaagaggaaggaacaaagaaaggaaatcaacacctcctcgaaaaacctcaaccatgcctccataaaaggtaacatccaaggtaatgatcaagccacacttcacactaagaaaaataagaagtgtagtgaatgctttgaagagggacacttgattaggtcatgtccttacattaaaattggcttgattattagcaaggatgatagactttgttttaaatgctcaaagaagggacacttaatcaaatcttgtccccatctaaaacgaaatggcatagcattaggaaagaagaaatcctcaaaacttgaaaaacgcctatgctacacttgccgtaagaagggacatcaatgcaaggattgtcccattaataacaaccccacttctagcttgtcaattatttcgcatgtaactaggcaacccaaaattgcaacttg

SEQ ID NO: 75723 - DNA, 292 bp, Zea Mays
gctgtgcaagctgaacctagaagttgtttcttcaggtgacttaggctacatctcggtggaacccacattgcaagagcaaatagtcagggcacagattaaagataagggtgttcagatgatcaaggaaatgatcaagcaaaaggcagagaaatacaagtgcttccggcaggacagcaagggaattctatggtttggagatcgattggttgttcccaaggacccagagctcagaaagaagatactagatgaagctcacctttcaaaattctccatgcaccctggtagcaacaag

SEQ ID NO: 75724 - DNA, 1008 bp, Zea Mays
gtagttccatgcagagctcaactgggttgagttctcaggctccaaaccacgtatggcagctctctgatccattttcctacaagcttttcactcttctcaaatactttcttcctgagtgcttccagtatcatcctgttggctcttcatacttggccattggctcttgggtgtgctactgatgcatacttaatctggatgcttcgctgctcgcagaagtcgaagaattcagagctagtgaagttggatcccagatcggtaatgatgctatttggtatcccaaacctgaatattatgtcttgtatgaattccactgccttggctgaggttaaagaggcaatgggcttgtactctatccattttgtgaatttgtcaatggcaaccagtacgtgagtatagtctccctaagatttcttgaaaggtccgatcaagtccagcccccagcatgcaaatggccatgttacaggaatggtctgcagctgctgtgcaggtaaatgttgttgctttgataagaattggcaagcttcacatctctggactaactcggcagcatcactcttcgctattggccaatagaaaccagatctgaaagccttctcgaagagagttctggacgctgcatatactccgcactgcccggtatggatttcatctaacagttgcttcctaataaccgagtgaatgcaattcatgaggactcctgccgcacctcttctatacagtgtgccccctatgagggtgtagcgggctgactgccttgcgatgcgttctgctgccgccttgtcatccggttcttcttcaatttttatgtacctgatgatagcctctctccagtcattggggtctgactctggttggctcaaggtgttgcactcttccatctgatctgagaggatacttggttgtgatatttcttggatgaagatcccgggtggagcctcggcccgactggatcccagcttcgacaacgcgtctactgccgcgttgcagtctctttccacgtgatggaac

SEQ ID NO: 75725 - DNA, 805 bp, Zea Mays
cttcgttagcaatttgcataacatctaaagcttctttcataaccggatcagcttcggggttgtatggctcctgtgggggagagaggtcggctgtaataaatatatgatggtgaatttcgaaggtaaaaacgagcaacaaggcaaaaagtttcaaataaaagtacctataatcatggcgcgttcgacagcttcctcagctttcttagcttcctcacgggcgtcgtgatattctttctcattctttttaatggcttcgtcagccatctcacgaccacccttcatccacacatcggagtagaatttgccgcccagtgtagaagcctcaactgaagggtctttagtattgtcaactgagagaatagattctggctaggccgcggccttgacatgttcacacccagccttttctagaattgccgcaacccctcgggcaccggaaaaagcacaaaaatctccgcgatcgctaaggatattatcgaaagcttcggcttctttacctatccattggataactccttcggggtcaccgcgaataaatttttattctgaggaatacgccccccaccttcgcaaagctatcttttagattatttgcacaatccaaggatctttcatagcacctctccctggaatcatgaagctcttcaacattcttttgtaaccttgaacttgtccactcatatatttcttgctttgccttcgcaacttcaaaattttcattcatgtcggcaagcttcttctttaaatcgtcaactttggctttgtgagtttcggcttgggcattaagcctggcttcgctaatttt

SEQ ID NO: 75726 - DNA, 608 bp, Zea Mays
ctatcatctttcttaacagtaagccccttgttagaatttacagccatacacttctctgcagttgacagaataaagttatcttgcatcctatattcttctgccaactctttcatggagcttttttttacaatgtttcttgtcatgttaccttaggtagacaaattggaaacattatactcaagggtttcagaattcccagttaagctaacagaatcatcgactttgttttgggagttatcttctgcaaaggtatatggtgtaataatggatcatctctttcatatttttctacattagaggcatactcttcattttatctcacgttcattttaagaaaatagcaagtgtcttaacttttttacatcttatttcggctgcagtcctggttgaagaaagcaagcgattgccttgaacagaataaactgggcattatcgacatagatgtcctcaataaactaaaatcagaggtttgtccttttcaggaaccttttgctgtcaacttgatttttgaagttcatctgctctgacattcatatgtttctgcataaactcatactctgaattggtatatctgacaattactaaacctggctagataatacaacttc

SEQ ID NO: 75727 - DNA, 395 bp, Zea Mays
aatagaataagccgaatcatgagcttctctaaaataagttggccatcaaactcatgaccttctgcagccctttgaaggacacaatgttgtatcatgatatcttcacccattaaacgttttggtggaccctctttaacttttatgcctcttctaaatgacttcatatcatttcaaaacgggtgattggatggaagaaactgtcgatgacaatcaaagaatgggacccttttaccatgctccaatcgatatgcttgtgtgtcccccatgcatatgggacaacacagtcgacagtggacacaccagccagaccaaataccatatgcaggcaaatcatgaattgaccacaaatatacagcatgtaaggtaaattcatgttttcgatgaccatcataagc

SEQ ID NO: 75728 - DNA, 429 bp, Zea Mays
ttctggaaaacggtaaccggaatcttctgcggaaaatcaaaaaccggaccttcagttaaccgattttttcggttcggttttcgatttaaccgaaaaaaccgaatacgaataaaactacagtcagcacagcacaattacaatacaaatgtttcgatttagagcacagcacaacacgaataaaagaatgcagacgcaaatgaggcttgccaaacgtcgtcgatctgtacagaagcaaataaaatggaaatcgaactgaactatccgcactgcagctggtttggttccagtgcgtgagggagaatgccagcagcggctgaagccgcctgtcttcagctccaaaacgattaaagcaaccgagctgcattagcatccatccttattatgagttcccaaaaaacgattaaagcaagcaactgcaccaacaaggac

SEQ ID NO: 75729 - DNA, 843 bp, Zea Mays
tcttctctgccctcggcatgcatgcgagctcttctagaaaacacagagccgaaacaagtggccgttgcactacaataatacactacactgcactgcaatttcgacaggttttgtgcaaccttgcttttcgtttgatcctcgagctgttgagcaacagagacataaaccaaatgcatcggatatataggccggtgatcccagatagtacttttggggaaagggatccaacgaaaaaaaccttttttgtttcataaaggcttccattccatattctagctctcgttgacaactgtgtttgcggcgcacacgctcgctctatcgttgtccacctgatttgggctgtcgaaaagtgtttagggtttagatagatagatagaccgtgtagcccatgcagaactagatgttatatttcttccgttaattcatcgttttcttctcaaaataatcgaaacagactcatgttataagttttgctcaacgactgtgtcaaaaatggaggcgtaaataggcatcattcgtcgagcaactagagtagtgtggactgtactgtgaattttctccgagagacgactgcagattccatgctcagcgttctggttctggctgtccccccctggctgcctggctatcgtggcgtacgtcactgcacgtgatgacgggacagttttatccgctgccgcccaacgtccccattgcaaaatgtctctgccgcccgcgggccccaactggtctcctccgattggttagtccagtctcggcgtccaagaagaaaaaaaaattcccgcgggccccaactgatctctctcatgttctagacggaaacctcgtgcactcacgatcatg

SEQ ID NO: 75730 - DNA, 771 bp, Zea Mays
ccatgggtgagactcctgccgccctcggcttgacagcagttacacgcatgttaacgcgttgcttgagatcgatggcgagccagttgaagcgccacttctccgccttgcgccaaatgtcaatgaattcgcaccgaccgagcttgccagtggataagatggatgtcatatcaatcaggggtcaggctctggaccctgaccccctgtctggtgcgtcaaatgtcggaggggaaatgctctggtcgagtggcggaatgcatccgcctttgtcctcggatgaggaggggggctagaggttcgcctgactgaatggatgaatacaacaacacaagggtttagagtagtttaggccaccagagcgtaatatcttacatccactatgagttgtattgattaagagcttgagtgtcgtgggtctgaatgtgagccccatgtgtcgcaagttccctcccttttatagtccaacgggggcacgctacaagggagctggaccctgacaggtgggcccagccgttactataatacaaggtgtgaggcgtcgagtagagctgacggtgctcgatcttcaggacgtgtatctcctcttagttgttgtgtgggctcttggggtcctaccctcttgcctcgtctaatcagaacacatgtgtaggccttggtgtaggttgtggcgtagtctgatatgttgtcatgcgtatgggtgtatgggcggtgtcgtcctgtctcctccccctctctcttgattcctcggtaacacacgaggaacaatagaggtca

SEQ ID NO: 75731 - DNA, 816 bp, Zea Mays
caaaggtgacgggcatgtagatgtgtccaagcgggtattctccttcgatcgacacaatgccgaagaaaggagtgtccgactcatggagctctttgtgtgcaactcccaagcctaggagtgtccgggggaaggtgacgttgatgctgcttcccccatccactaatactttctttgccctgctctctcggaacaccagatcgacaaggagcgggtactttcctggatgatcgaagttgagccattgatccgcccgggtaaaggtgatcgggtgttctgaccaccgatagggggcgagggctctggtggttgccactagtatctgtcgatcgttgagcttctgttgccttttgttttcttgcgacccgtgtcccccaaagatgacgtcgacctctccgttgacgcgtggaaattctccacctcctccctcttcctactgctgaggtcgtcgaggttcaccgggccctcctcatggtgggggaggtggtagaggttggaagggtcggccattcccgacggaatgcttgaagtctctgcaattcctcaaggtgtggcgcatatccttgtgatacgggcattgggcatcgaggatgtcgtctagtgttcgctcgcctccgctgggtacacctcgggcacgagagacgagtggtgcagcggcatggacctcttcacgaggcctcttctcccagcgcttgtcggtctgctgatttgcgtcacgccgcggtgcagacggagtaggcttcgctcccctgatgaggtcctaagccctttcgtcggtggtgatgtagaggtccgcctcccttaacagctgctcggagg

SEQ ID NO: 75732 - DNA, 601 bp, Zea Mays
accgtttctttccgctagctcagtctacaagccacgacaagcagtacacgcacttaacaagttagacctatatttcaactcatagcgctcatctagcagggtggtatacttgatctgcaaagtggtgatgttcaacatgtgaagagcacacccatcacattcagtcttgttggacaccacaactgaagctcaacagactcaagctctcaaagcatggtatcatgcttcaaaagtaaggagacatagcattttattactgcatgtccacacatggacaatgaggaaggagtgagtagatttttggatgcaacgatgaagatcacttgatcatttcatgtcctcacatgaagaatcaagaacatatagctccaaatatgaccatcgtcaagaagaagagtgaacaataaacatcatgctagattgagcatcgattctactacacaagtggtgaatgaggtcatctaagaaaggtttgttctattggtaaaattcctaagctgagtaattcacttcattattattggcttagaagacccaaatgctaaatgtgtgctagaatagtgattacttcacccagatttagcacaagtgctatttgggt

SEQ ID NO: 75733 - DNA, 562 bp, Zea Mays
cgtcgatggaggtttttgcaaagaattattgccttcactcgcagaagaaagttatcggtggcaagattgtgcagttaggcatgtgcatgttcacaccgaggaccgggaagacctcgggcgatgttgtggaactcatgtcgtgtgctaagaacaagtgggggaactagagggatttttggtttaatgtggtgatggaagacacggagggggttccagggttgcctctgactatcctatgctcgcactgttatgttgccttcccctagtttaaagtaaagaagggggatgtgaacgaggacgcccttcgccatgcgtcgaaaacgtgtagtggtcacgatttggtagaagagttcatcgcttatggagtgtggccgcttgcacatggctaggaggttggcgaggtgaaactatgcccgatgttgttcttgaagaatcagatggtgctgattctagccttcgacattgagttgtgtggacaggacactttggctttcgttagggaagcggaggctgaggcagtaaagattgttggtaagtattcgacgaagatggagatgtcgag

SEQ ID NO: 75734 - DNA, 470 bp, Zea Mays
ttaactatcaagatatgctcctgatgaggtggctaatgatgagagaaagcaagagcacttcacagaaggactcaatgggccactacaatatgcattggttgcaagtaccttcccatcatttcagaggctgcttgataaagctctagccattgaacacaagtatgttcaactgggagacttgaagaggaaggccattgcccaggggcagggtagcagcagtattttccctcgctacgttccgccctagggtacaccaactcatccaggaggaggaccacacccagctcagtacgctccacaggggactccactgacaccccacactcgtcaggctgcccccactagcaccccggcgaggcctacaagacaaaagacatgccccacatgcttcgagtgcagtcaggttgggcattatgcaaatgcttgcccggcggggaattccagtgcaccagctcaaaacaagcaacaga

SEQ ID NO: 75735 - DNA, 372 bp, Zea Mays
tggttctacaatatccttgtgataagcaactttgaactgcatgatgtcaattttaccggtttcctttcttacatctgatctatcatatatatgattaagtattgcttaacttatggatggttggacaattaatatcattggatgaactacccgacaattatccggtacctacccgagtagtatctgttatccgtttcttatccgtccggattattacccggtcccgtcctgtatccgtcccgaatcttaactactcgtatcctgtcccgtatccgagagaaatacattagggtaggatacgggatgaccctgtatccggctgtatccgtcccgttttcatccctactcaagcactcctccgacggccacgac

SEQ ID NO: 75736 - DNA, 560 bp, Zea Mays
taaaaaaaaacacggcgtattctgcgctggttcctgcaagtagcagctaggttccgtgtcgtcgtgctcggcaccggtccatcgctccctggggacaagccatttgatggtgcacgcacactggttggctgtgcaaaactgacgggtgaaatgcgcacagctcatgagaaggtcgtatacgtgagtgcgctagtactggacaacagtgcctcgacgacttggaaaaaatggccatgcccttttcttgcagcaatggcttgccttgatgcttcgtcgtgccacgtacttggacacaactactaccagcaaacgagatggagagagagaaaaaaaagacagcaacttgcagcaaacagaaagtaaactggaacctgcataagcatctccccggccgggacaactaactctgcataatcatgacctgacgagagctcgttgtttattcggccaattttccttcttcgaaaacagaggggggtttattaggtgtcagtctgtaaaaaaaatctaatgatgaccaacgacagtcagatgattttattcaagtaacgacagtctgt

SEQ ID NO: 75737 - DNA, 276 bp, Zea Mays
cttattaccaacgttggtgtcctgttatctagtttaacctgaacctgttcttgaaaactgtgtcagaaagtcggtttgttctataatatattgtctgtgctatgagctacaataagcaagagtattttaaattagaaagcagttttctaaatgatgcaaaggcagattggtttgagattgcacatggaattcttttagtgaacatcttatcttagtcaagcagtagttaagattaactgttttacttattacccccaagaactctttgaaactcga

SEQ ID NO: 75738 - DNA, 363 bp, Zea Mays
gtcaaaaaatggaaccctaaaagaacaagagacatcccgataggaaagggtgaccgagccgtgggaacacctacgcctccggaatacggtttcctcactcaccatccttcgcctaagaaggtaactcgtgttttgataggaataccgtgaaaagacatgccaacaaacgcgaaacaagagaaaaagtgcatgataaaacatagagaataaacaacaaaaagtcttggagcaatcagcatccatagacaaacttaaaagtttttacaacccagtagggacagcaattcaagcgatagaagaaggcgcgacaacaccctcgacatcactaggggcatcgtcgtagagtaggaccctgcgtcgagc

SEQ ID NO: 75739 - DNA, 515 bp, Zea Mays
ccgagggcaaaaaaacaccttccctttttttcacgcttcctaaagaaatgctcttctagttgaaggtctcgtaatgcctttgaaaaaatatctgattgctgaagaagaattgtctccccttctttggccttgtgtctgtattacatattctttacattggtgtacagaatcatatacgaagccaaaaaggggatttatcaaatttgaacatggctttagattaaattttgcattccatagtgaactgcttcggagtctttttttcacctgcacatgggggagcaattcacctttgaaaggatcacaatgcccaaaagggggtgaattgggcttttcaagaaattccacaaatattaaaccctaagcaagagcccaacttcacccaactactagcaacaaataaatactactacaaaaaagcaaccaaaacaacaaccctaagtcattacttcaaatacttgctaagcaattgaacaaagtgaaatgctcaaattaaatgcggaatgtaaagcaag

SEQ ID NO: 75740 - DNA, 1212 bp, Zea Mays
aggtgatgtttgcaagggtccacgcctcgatccacttacagaatttgtcgagtgcagccaagatgtgagtgtagcccccaagtgctcttttgagaggtactactagatcaagtccctagacgacaaacaaccaggtgacaagaatgctttggagtgcctacgcaggcagatgggtttgccgcgcgtagtactaacacccttcgctggttctcaccacctgatgtgtgtcagacaccgtggtgggccagtagaatccctataggaaggcattccccatgaggctccttggggtagcatggtgcccgtcgacgtcgccatggatgtcttctaggagttgttttccctgcttgattgggatgcatagctgctttattccattgtgccccttcttgtagaggtcttctccgatcacaacgaaggacttggcccgctgatgaagccttcgtgcctttgtttcatctcagggcagcaaaccattggtgaagaagtcacgatacgatgctctccagtcggccacatggttggctaggggttagtctcctctataatggcaaccgattctaggccggtgggttcatgcccgcaagtcgactgtccttctagtgggcttcgtcatatcggatggttggtttaaaaaggtcgatcgcaaagatcctcggagggatgctcgtttgtcccgacgctaattttgcgagggtgtctgttgtttcgttgtctcaccgagggatgtggttcagttcaaggccggcgaatcgttcctccaaccgtcgaacttctcgatagtttgccggcatcttgggatcgtggcattccgaatctttcattacttgccctacgatgaactgggatcccctcggatgtctagacgtcaaacacctagctccacgacaatgtgcatcccatttatgagggcttcgtactcggccacgttattagaagcttgatagtggagtcacacgatgtaccgcagtcgctcccttgacggcgacataaaatgaggctgccaccagctccccctttgtcatcgacccatcaaaatgcatgatccaacatttctcggtgattcgtgccggctctaattgggtttcggtccactccgcgacaaagttggcaaggaattgtgatttgatcgttgttcaaggggtgtaggagatcccatatcccattaattcaagagcccatttggcgatcatcctagaaatatctggattt

SEQ ID NO: 75741 - DNA, 660 bp, Zea Mays
ttcacggtggcggaaaacagatttaggggaaatgagaaattggagagttgtggcggctaattggaggcaggagcaggtgcttgggcttggtgataacttaacacagtcgaccatgccgtcaatttataggggcgctaagcggtggccagtgaatttggtttggcgtggtggcggtcggagaagaagagggttactggcgcacacgattggtggccacacccgtggcaaactcaccagtgacgagccagggctatggagcggtttatggtgactcaccgcgacgtggtaaagcggcgaggcacgtagcctggccggataacagcggacgccggtgatgccagtgtgattgaccacggcgggacacgatggccggtgagaacagtggccggaggttatctacaacgcgatacttcttaccgagaagcgctatctgtgttcgaccgggcgtgaatcgcgacgccaaagtggatctaggcgcaagatcaccgacggcgaggggggtgaatatgcgatctctttcagtcactgtaccatggaatccctattcagtgcacctgacaaaccaatttatagggcctagatgtcaaatctttacatgacaacttgctaatctgcctgtaacaaagttgttgcccgatgatccagctacattcttgctat

SEQ ID NO: 75742 - DNA, 453 bp, Zea Mays
cctttttttttttttttggctagatatgctcatatgcaagtgacgacgatagatgggctagcggtgtggggagttaaggcagtggatgccggccgtctataatcacgtcatgttggtatggtatgtacctgggaagcagaggattgtctgaatgaaagacgttacggggggaaagctccatttccactcaaatgttccaacagatagatttggagggatgggtgttgagttatatccacacaacgaacccctacctacgacgagtgacgacagggtccgtttccgtatacattgtatgtagtatacagagctgatggcatcttgtacgcacgcacatatgacacgaacaagctcgtacgtacgtacgtacgccatgtgtggggcgctcgcctcgctctcgtcgtagatgacacgccgcaccgcagcagcaacaacacatgtattttgttttat

SEQ ID NO: 75743 - DNA, 339 bp, Zea Mays
tggacatattagcagtaaagaagaaaataaaaagtgaaatccaagccaaaaactgaactgaatgacgaaccaaatttggcccctctttcttggctactatgtatatgttcctaatagcagcagagcaaagaggacactaaaatacctgaaaaatggtaaaactcaaagcatgacctaataaaggtagaatgcaaaataaaacaacatgtattcctgcaaaactacgtacccaaacaacctttataggaactctctattgtgattactttcataaacctggttctgcaagccagtgacttaaaacatgccgacaatgcaaaagtgtataacatcccagag

SEQ ID NO: 75744 - DNA, 382 bp, Zea Mays
ggcgttaaaactcgcaagcgacgaggaagaagatacgaccaagagagaatatgtacaatacaactctaagattgagagggaagagggaaggttttagagcacatgtataatataagcatcaagggaagatataaaggtgacaagggtaaagatgataatcgtgaaaaacataaccaaggatagaattaaggcaagcctcgcgaagtggcaaagtggcgaagtggagaaaacaatcaagggtaagattccaacaggagggttgaagtaaaaattcattaccaagggaagttacaaggaaacaatgaggtcaccaaggatgtgcaaaacaaagtgattgctcatggatcatcgagaaacaggagtggtcaaggacatgtaaact

SEQ ID NO: 75745 - DNA, 576 bp, Zea Mays
acgcgttaagaagcttataaaactcctgcacttcctttggggtaccctgttccgaggccaatgttggatactctctactaatatcagccaccaagtcatccatctgatcctcctcatcatcaattctttctgactctatgatattctgctctacttctccatgtgagcgccacacaagatagttaggcataaacccattcttgcaaaggtgatgctccagttcttcgatctttctcacatacttaaaattccgacacttggtacacggacacttcaccacacgaggtccaccggaaaatgcgagatccacgaattgttttgcaaccctaacccaatcctttgagtatcctagagtcacgctattgaatccatcatacatcacccttcttctattgtcatccatttctaaaactaaataacccaatgtataaaaaatgtgtaaataaacatcattaagcatataaacgtaaatccatactgtgtataataaccctattaaaaagaatcactagacataaaaaattgtttaagcaaacattgaacatgacatcaattaatctacaatgaacaagaaat

SEQ ID NO: 75746 - DNA, 517 bp, Zea Mays
cgcctgacaggtcttctcctgggtcgtcctacgagatgggccaactaaacgtagccaggctgggcaggctcgatctaagacgacgaaaatcaatgcccgagttaagcgctacatgggcacggacgtatcaggcagtacaattgtgattacccgataggctaagccctcggtggttactctggaaaatgggcgagaaggactccggatatgtagggatacaatgttctacaaaccaggagataagcaagtagatagcaatcatcacttgtacgggataactctccctggtcgtgtatataaggtcgggagataccccctaccatttcatctcatcttagcctacatcacccacagtaccaacttgtaatcctcacatcaataccagaaccaccatagtaagtagggtattacacgactctacacagcccaaacatgtataagtctactagtcaccccgttgtggtacaacacgaaccatcgagtcgcaatcaacgacgtcggcctactcaaaatcatc

SEQ ID NO: 75747 - DNA, 796 bp, Zea Mays
caccaattcatgctatgatccatgtgcatctgcgtaacactcacatgcgtcaacaaatataaatctgtataaaatgagagctgcaacaaatatattaaatttgttagtagctgcaacaagacactgatatgacaattcaatcatcaattttaatatgcagttctgattatgtgttgctgccagggagctgattggttaggggtgattgcagatgttgtaaataaatatggtgcatggatgagggacataatttcacatccgctcttactaaggagcagggtgagacacatgtgcagtggtcaagagatgatgagaataccatgttcctcatcctggcagcacatagttcctgttccaggaacttggcaacagtctcgtccccaccttgtcgaatccttccttaaatagcgtatcacattccttgacccattaacctgggtacatcaccccttaccatataagaccccaatttgacgatcaactaaacctaaagatagaaacatcgtacattggatgtgttctttcatgaactcaactttacaaagtctaaactgaactctaatttccaaatcctatcacaaccttccataaaataaacttatgtccagacatcttaaaccaagcaggtgggggaggggagggggctacgtcgatcaagaaaggtaagagtacaactgcacctattgcacaagacatgtccctgctgctggtttggctagggcagcagcaatcccaacactgccttctgttgctgccggttctgctaggccaagcaggcccattaagcgcagcccat

SEQ ID NO: 75748 - DNA, 461 bp, Zea Mays
cctaggtcctccttaagctctttgaccccttcaattgaactggaccatcacctatcgccgggaacacattcctttgtccgcaatgttcacggtcgtcgtggccagggcaaattaggttaccattcttcgaattaagttaggggaaatactcggggagggtttaatccggtgtatgccactcgggtgcaccggccgttgcataaatccgccggcacaacctcagcggagttcatcctccgcgatgccgtcgtcgtggacttcgtgcggtaaagaaatagaaatccagggaccatactgcaaactgtcagcgactgtgttaaacagtaaatgaacctacttcattttagccggtaagccgagggtccttctgcaagattgccagcgcgcgggcgcgggcgcgcttctgtccactgttgggtcagctgggctgaaatcagcccaatactattcacaagtttttc

SEQ ID NO: 75749 - DNA, 414 bp, Zea Mays
ctcggatgaaggcttggattattttgttgcattggatgtggctgcggcggagacttcgccgcgtgtggagggtgccggagatcctcctcgtgcgagtactgggtataggcggcgaagggtggtgggaaaacatagtgtgggtgaattttcgcggagtggtaggcgccgtcatatggggatggagcgtggccgtctccgagtagaccgggttagtaaacgagaattgttgtccttgccgcttggggcgagcataggcgagggggatcttcggaagctttttgagggtgaggaattgaggataatgctgttcaattacagggagatgggtatcatcccgaaggttgagccaatgtaatatgtgctgccctcgccatgtgtatgtaattgtaatttgtatggtaatgtggcctgttg

SEQ ID NO: 75750 - DNA, 417 bp, Zea Mays
tatgatttagagagaaagaaatggaaatatgagccgacagcggcacgccgaggctcaccagccaacactcctgatggtggcactcgctgcgcacccgtgtgagccaccgtcgcgcccgaagccgcgtcgacgacaaggccacgtcgcagccggaggcatgcctgtatcatgccagtggctcaccgggcacacggggttaggtccctgatctctgcaacctcagtctgtgtgcagctttccctgcaccgacgcctttgctccacgatcacaggtccccgaggggcctcaacgctggttagtggttactcgtccactccgtcatcagcgcggggagagagaggcagttaagccgtcaaagcgcatgcgatgcttcccggtcaaagcggcgtataaaaagaaaggaacactctggcggtt

SEQ ID NO: 75751 - DNA, 492 bp, Zea Mays
aaagcgctcactagcaacaattggattcgattatgctcaccatacacgggtgagggggagtttagagagttcgtctctctttggcaggccataggtaacatgcaagagcttaacggtttggaagacaatatttcttggagatggacggcagatggggcagtacagtgctagcagtgcatacaaaatccagttcgcatccaatttcagtaaaatgaatctctgtcccatttggaaggctaaagtggaaccgaagtgccgattttttgcttggacactacttcataagagaattctgactgccgataaccttcataaaagaggttggccatgtaacccaatatgctgcctctgcaactcagccccagaaacaattctccacttatgcaaggattgcccctttagtagagaggtgtggaacaaagttttgtctcgggccaaccttcctttactgactgggtttcccagtgacacttctttgtatgattggtggac

SEQ ID NO: 75752 - DNA, 541 bp, Zea Mays
cacgaatcaccaatcaaaccaatcaatcaaatttactttatttcctttgttcttcatcgcactaataggagtaatttagatctagtttagactttccccaaccccaaatctttatcactctttaattctacgtcgtctagagacatcccgggtggcctgccgatcttagggcacctctgtaactctcctccctaacgggtccctccatggggcgagttctagggttcttcgtgaggaagatgaccctctacgcactcgcgggctgttcggtctagagcacggactgtccggcacgcgagcagaggagacccgctctagcctcagtgtcatggatcatccccaccatcacaaagagcaccaatagacggtacactaccagtgtttggcaccgaatcgaagccaacacaagtttcatctttataaatctcattccatcccataattcttttatcaggctctcgatctttttatttaatagccataaaacaattataaaactttcattaagactcatctaataacacgatctttcttgcatgca

SEQ ID NO: 75753 - DNA, 342 bp, Zea Mays
cgtcgacgatctgcgcagccgccgtggcactccgtcgaggcgttcggctgaccgacgttaggcgggtgagagaagacgagttcatgaccgtagatgacagaatgaacgaccctgatttgtttgagaatacccctttcacgcgttgaattttgaccgtagatgcgagatcgtgcgatagaaagcaatcctgggtttgattgatcgctgaccgttagattgggatcggatgggcctagttgcataccgatttataaagccttcgatctaatcgtggcccttgattcgcgatctggcggccagaaaacatgcataccccttcgcggtcacgcatttgcatatgag

SEQ ID NO: 75754 - DNA, 949 bp, Zea Mays
cagcacttggtgggcaaactttgaggtcgtccaaccagcaggacatcaagttacttggactgaatttaaggaagcctttagagcacactatattcctgatggagtcttgcaaatgaaactagaggaattttttaggctaaagtaaggtcctgacacagtaatgcaatatctcggaaagttcaatcacttgtctaattatgttgttgaccatgtgaacatcgatggtaaaaagcgagattgcttcatgaggggtctgagttttaagctgcagaagaaaatgactacatggtatgacctgacatttaacagagcagtcagtgtggcaattgcagtagaagacaaggggcgggtgcaccaaaatgctaaaaggatgtggaaaggatttgggtcttctcaggacctggcaaagcgtcaaaaggtaataatcagaacagccggctctcccaatactccctatcgccaagccgcttatcctgctaaaactcctatctacatccgtcccactaatatgcaacgccaatccctacccacaaatagccaagttccacgcttgcctgctcccactagcactaaatatccttgctacaactgtagaaaagcgagacatttcattaaagattgtccctatccccaccaaaataactccaatttccagagaccagcaggcaacagttctcaaaatcagaacaagagtactcttatcaacaatgcaaaagggaaggacaacaggaaaattggacgagtattctatactcaagttgatgtgacttcagaacgacatcctgagcttatgggtatgttctttgttgcccatcatcctgccaaagtactttttaacactggtgcatcccatacatttctcagtaaatattttgccatgcattatagcatttctattcaagaagcgagatggggtgtggcaatacaatcgcatgggggtcgattgttt

SEQ ID NO: 75755 - DNA, 944 bp, Zea Mays
ttgcttgtaataagcgggctctacctcttcggcggcctgagacataaactcgtcctccttctcttgagcacgtaatcctgcctcagctagtgcgatgagctcactcaaccttgatgtgtcgtcctcctcttccccatgtaatcccgcctcagcgagagcgataagctcactcaaccttgatgtgtcctcctccattagttccgccgtcgccattttttcctgaacgtatcttgcacgagcctcatctgcgagatagctcacggcacatccaatctctgcaaatgtaatgagacaaataagtttgcaaagtcaggataaataaattgtacaagcgaaactatcatgtcatttttctcactcacttccattgagacgatcaacaagattccctaacatttatttctcggctctagccgcctcccattcccttgcatcctgtgctctcttctcatttgccgccttcaatctcctctgctttgcacacatcggactgtcaaaactcattgatttcatgaacctacgcatgtcctgtatgcgatcgttaatgtacaaatcgacgagctgagatccacaacgtatcttctgtcccattagtctctcagactctattgtatgcatcacctcttctttgtcgtcgtatctctcccaaccgcattttctcgtatcctacacaaaagacaataagtacgggtgcaacattgtagctgatgcaaacaaaaaataaatatcaacctcatcgtaatctaccatatgtccataaaaatagccaacaccaagttcggaaggaattaatccaaacttagcttcaataccacatttgcagagcacgtgatcaaacttcaactcttccgcccactcattttttttcttttcctttgcctctgctctagccaatgggacataggaccgtacaaccactctaagaaatgacacttacgccaccc

SEQ ID NO: 75756 - DNA, 507 bp, Zea Mays
gaaacaaactcttcccaaaacaaactatcactcacaacagtctttcacgctaaccactaactagacaatactaggatcaaggttgagacactccataagaaacgtctttaggaagaatacaacatataagacgctgtcgttgcgatgacccaccaataaaggcccgatgacccaccaataaaggccagatcaaaggttttcacctaagagaaaagaccctcggtacttcagataatgcattcatcatggtcaaggccagatataaccaattaagatcagacctagagatttctccccgaagtcgatgagaccgactcctataagttccatcaaaatcaaagatcaccagctttgcctccaccttctttccatacttataccgacataccaccaaatcttggctaatatcaaatggacatgaactctgaaacagagccctatcgaatcttggtgcagatatttatgcgacaataatcgttgggcggacagagcaacttatctgataac

SEQ ID NO: 75757 - DNA, 559 bp, Zea Mays
cgcgttttaaaaaaaggcctccagcccgagaccgagccagaggctcatttccagcgctctctctctgtctctctggcgattccctttcccccaccggcgaccttccctctccggcgaccaccgtactccggcgaccgtgctccgcctgggcttgtcctctccctctcggtgagcagcccatccatctctccctcagttctctctcactctctgttctggtgagcagaggctcccatttccaccgtttgtgaatttcttcaaatcctgtgaatcccagtgactccaaatggtggaatgtgttcctatgtgtgccttgatcactcctgcaggttattagctccttcgggagggttttcacacctcaaatgcccatttcaccgaaaacctaattccccgcacaccacgtgctcggtgaaatacccaaaccagccaaaaatgctccaattgaacccaaatttttcaggcaccttcacaacacttccagcaacatacttgccaaatttcacgccaatccgagttttcaggcttcaatttcactcaattccccgtttcgagcgat

SEQ ID NO: 75758 - DNA, 657 bp, Zea Mays
ttcgtggcgttggcgggggttgcggtgcatcgagaccagacaaatttctcatcatcgtcgcatcgccaccgcggatctgcccttcgctgtggtccactgtatctccgtcacgtacctcggtgagcatgcccctatcaccttcgcactatcatcctctacatgtaccatagggcagattggaggatagccgtagaaattgccgggggcacgtactccggccatggagccgccgcggtgggtgagcctggcgaccggagttggtgggcgtggccatggtcattggatcccgaggcgacaatggagattagaaattgcacacccgttcgaccggtatatctgctgaccatcagatctggatcgttcgtatgtggtgtgatcaggacattttaaattagggaccttcatccctgatccgacgactcctgttgcacaccggtttggtataagttaaatctaatatgggccctcgattgatgatcgaacagcccagagcaaagaatacccctttggctcgcgcgtcttgcaaaaacacccccaaactttatgataatgaacccgacgtcatgataccgttacaaactatttaaaataggtcctgttattaacagttagggccctgggcttcctggttattgtgtgcacagtccaaagctatga

SEQ ID NO: 75759 - DNA, 307 bp, Zea Mays
caccaatattcgatcaattaataacaattaccagcaaaagacgagttaaagaaagaactattcaatcaactaataacaattactgatagctactagctgactatcaattaataacaattactgatagctactactagctgattagctcatggtaacatcactagcagaagacgagttaaaagaaggaatgacagcaccggatattgtgaatttggacaatttgcctttcagggttcctgcgccctcgccgatgggacgacggctccacggtgcttgatgggccggcaacgcagtctctcaccggtgg

SEQ ID NO: 75760 - DNA, 480 bp, Zea Mays
cgaggatactgaaatgaaagagggggcatgagcggacatggagcacgctgaccatggtgagatcactttacgcggtgctcgagatcgatttgggggaactccgaaattggcgagctctagtgagcaattggaggcacagtttggtggcatgggtgattgattaccttacggacccgacgacacgctcaatttataggctctgggggcggtggcgcgtgaattggagttggcgcggtggcggccggagagaaggagatgtactatcacgagagcttggtggctttcatcgtggcggactcaccagcgacgagccagtgatatagagcatcttacggtgactcactgcgacgtggtaaggctttaaggaacgcagccgggccagataacggcaaactccggtgatgccagcgcgatcaaccgcggcaggacacgacaaccggtgataacagtggccggaggttatctatggcacgatatttc

SEQ ID NO: 75761 - DNA, 539 bp, Zea Mays
gctgacgctgcacggttggctccagtctgctgctttggtccttgaacagagttggagaagacagaaggagcgggctggctgaggtaaggacaattggccttgtagtgtccggcttcacggcagtggaaacaagtcctcacattggtcaactgacttccaccagactgttgggtgcggaagttactctgggtcttcataactggagctgactgagatggcttctgaaaagaaccggggtgcgccttaaatgagaaggcaccctggctcctctgtcctgggtggggtggaaactgagtcttctgaaacttttctgcctgttggggcttcttgatctcaaaccgacgtttgcgctcactgagttctgccttcctattcctctcagtggtgataaccctgttaaccatgttattaaagtcactatgggtggtgacttcaaccagggttctgatttctgggttaagacccccaagaaaagcttcttgcttcttatcgtcgtcattgatgtcctcaggtgcataacgtgacaactccgtgaactt

SEQ ID NO: 75762 - DNA, 653 bp, Zea Mays
ttgtgttctttcttgttcttgcttgtgtcttcgattctcaggcaggaattagccctcgtggcgaggtcaatcgcgcagtgcatggttgataaccagaggagaagtggtgctgtgattgcggggttctagtcatgttgattggaagtcgtatcgtctgtgtgacatctccaccaaatcgatagttaccttcacctgacggaagatcgggcacccccgttcctatcaagtggtattcaaagactcaggtattaccgttaggcttaccctagtttagtttcggtttttcatcctataactccagataattgccatacaaaaaaatttctgttgtcctagaacccttgtttagcctttgcaatttcgtttttagtttggctttgttcagttcgtgtccgtggtcgagtcgtgttgctggtttagggtgtatcttcgtcgtagatcaactgcaccttcgtcgctatcccatccaccattacccagatcacaagtcgatccaccccattaatcgacttgccctaaccactgtgattgcagataggaatttttgccctaaccgccgctttctagtcatgcctccaaaaacataacttgaggtgccttccttaaaccgggcataatttttcgctcgggtgtccaaaaaatctaaaattttt

SEQ ID NO: 75763 - DNA, 514 bp, Zea Mays
ctctattcagcctctttttgcctcgagccccgaaggccgttgtcatagcatcatctttagccttcgagtaggctcctagcaattcatcactagttgcttcagtggcatttagccagtaatcatttggctcatcaaactggctcctgtatttgaatgtgtacttcaggtagattaaaccaccttggctagacccaacagcagcctccttcgacatctcccacccacttgcgagtggccacactctataagcaatgtgctcctggactaagtcccttgagcctatataagtacattctgcattaaaagcagcctgacattgttgtatataaatcccaagagcagtggatggcctcctaatgtcgaagcgagaccatataggacgttgaataatccccttaatatcctccctttcagccaggtcattcttcacgtagaaccactcctgcatccaggcccccggccatgtcttccaaaatgtcggaactgggtagctcacctcagagcgaggcacgaa

SEQ ID NO: 75764 - DNA, 571 bp, Zea Mays
taggggacccaaggccttgcgaaggctcgcccaacattcccacactctgtttcgatactcagatccttctcttctcttgcaactcaatcgggccaaccctaggagaagactttgctgcagtgggggcaaccataggcgaagactccgcaacagccaaatctagcgtcataaaataatctaagtcatcctccaaagactcatcatccatcccagcaaacgggatcaccatcccttcaccctctgacgaccatgaatcaacatcagattcatcactactaagcactatcaaattttgacacgttaacaattcatcatttccattatcaccaaaatttgcttgcgcaggcctagacaccggaacctgcacagagccgattttaagaatcatacaaaacataacaccattgtaccattcctactatagtctttacacctccgcagaagtccccgccgccgcagggtcctcagcgctgcctttcttgagcaaggactgcttttcagctcccgcctccacttcggcatccttttgggccgccgagctttccagatcggtgaggtcctcaacttcatc

SEQ ID NO: 75765 - DNA, 1188 bp, Zea Mays
gaaaaaatacgtcggatggcaagggtttgcccttcgctgctgctttggctaacatgttagcttctttgttcttgttctgcacaatgtgttgcaaggtgaatcctttgaattgcttttctagactttgtacgacagcgagatactcaatgagtactagctctttggcagagtagtctttttcgatctagtcgtcgattaccttggaatcagttttgactatgcatgtggtcactccgagggctcgcagcttgtgaaggcctaagatgactacttcctattcagcgatattatttgtgcatttatttgagtctagtgcgaaatggagacgtgtgacatatctgtatttgagtcctatgggtgatgtaatgatttttgcagcgccggcacctacgtgatcccatgccccatcgcaatggatggtccagatagtctctgcacgaaactgctgtggctccgaaggccctgtccagtctactgtgaaatcggccaaaacctaggatttgattgttgtcttgggttcaaaggtgatgtagtaaccagagagtttagcgtcccatttagccattcaaaggtgatgtagtgcgaaatctccaagacccttatctgaaatgactcgtactttgtgtgcctcaaaataatgtcttaccttacgcaaagccatgatgacagcatacgctatcttttctaactctatcatgttgcacttggaggtggtaagtacttcggagacaaaatataccgggcattggtgggtcttgccctttctgctcctttcttggaccaaggctgcgctgactgcactgggtgaagctgcgatgtagagtagtaggggtaagactaggtctaggctagttaatgttaccagatcagatagatattgttttcaaagactcaaaggctgcggcttgttctaggccccaggtgaagtctgttgcacagcgcaacattttgaggaaaggaaggcttcactcatcgaatcgcgagatgaacctattcactgcaaccaatctgcctatcagccgttgtatgccttttgttgattgtggtggtgccatgtccatgatagcctagattttactggggttggctttgattcctttgtgcgatacgaggtagccaagtatcttgtcttggcggacaccaaaaattcatttttctggattcagccggagtcgggcttcgcgcatg

SEQ ID NO: 75766 - DNA, 398 bp, Zea Mays
gctggtatgaattaattttgctattggttcatatcgtgatgttgttgactgtgacgttgtgcctacagcttataatattctgctaggtagaccatggcaatttgatatagattatatgcatcatggtagatcaaatcaatattatctcatataccatgataagaaaattattttgcttcccatgtcccctgaggctattgtgcgtgatgatgttgctaaagctacaaaagctaaaactaagaacaacaagaatattaaagttgttggtaataacaaagatgggattaaattgaaaggacattgcttgcttgcgacaaaatctgatgttaatgaattatttgcttccacttctgttgcctacgctttggtatgcaaggatgctttgatttcaattcaag

SEQ ID NO: 75767 - DNA, 500 bp, Zea Mays
atagtttagcttttaacttctaattagtttaagaataagaagtttcatgttaattagaaagtgactaggaaagcatgggtatctatatgtatagccattttattatgtaggacaaaatatgggtaggttagggcaagaatagcctgggtaagaaagtttatggtgagaaagaactccgggctaggtggtaatgcatccgagggtcgagtttgacttctctccttccttgacagggttgatcttttttcttttccggtcgtggtctcattgatttgaggttagggtatttcatcagagttggggaatatggttaagatagatatggatgagatagactacatgatgtaggtcaaaagtttgtttgaagttaggtggggatagtcagattatacaattcatcatgactctattggttgggttagctcttctgctcatggttgagttggtctaatttgctaagttaacatctggctagtagggtctaacttatgccaccagca

SEQ ID NO: 75768 - DNA, 634 bp, Zea Mays
actgttgcacgatcaaacgattgttgtcgtctcttgttctgagttaataaattataaaccattagaatgtcctaattatacctcgttctgcacttctgctagtggattcgtactagcagcgtgtgtggccttggttatctccagcagaaactatatcttatcatatatttaaattttcactttaaaaattatatcaaacagtatcgtctatagttatatgttctctatttcacagtcgtacagcttacatcgagtaggtggcatgcggtgaccaggccacaaacgaccagcacgagggacagtggcttttaggctctatcctgcagatggtacgaaacattgtttcacgctatttacaacattatttacatagttaagtttaataaaataaagtatatgacagtagatgggataggagagttgttgaaaagtctggaacgtgaattatcactgtttccatttggcaaagtgaatctgaagcaaagttggcctccctgcctctgcctacaatttatgtgtagagctcaagattatcagcagtggttgatatggattggaatttggtttgtcactgttcacgaatcagggcttgcttgtcttcaaatttgatggtcgaataaaacacgtgtgaaaa

SEQ ID NO: 75769 - DNA, 326 bp, Zea Mays
catgtcgagcacccactcagtatgggcatgctcgagataaacttacaaggccatggtaaactatggcgacacaaagcagaaaccctgaaggcaaaggggcgcagagagctcgaaggcgaaagggcaccgcgagtgggagagaagcaaggcatggctgctactcgagggatgaacccctttttaaaggcagatttccccgctcgcgccccgaagcgtcacgggcaaagtctcccccgatgcgcaccagggttcccatcttatgacacggggggcaggcctcacatgtcatacagctggcccgaagcacgaagaaggcgaatcgtcgc

SEQ ID NO: 75770 - DNA, 521 bp, Zea Mays
gttgactaaggcagcgatagccttagccagtgtaggaggtacaagtggcgggttgggagtttcctccccgccgccgaaagtgcccacccagtcttgagcacgagttcgcgatggcatctgaggaagaaaaacatcctgaattattacataccaaacgtacaccatctttattaattgtgctgaactataataattatacatacttagtagtacaatttgacttccttacttcctttacataaggacattacttaaactatactactctaattctctttgtccttagctgctccactgccagcctcgggagaacgttcagctggaaggttcatggaaggaggggcttcaaaaaggtccaactccccattaggtcctccattagctattccagatggtccagctcccactgctgcaacttctgtcggcacatttggatgcagacggtcatataacacgtgcacctcttcatgtagggtgttacaatacgcttgcagattttctagggatgcacttaattccgc

SEQ ID NO: 75771 - DNA, 375 bp, Zea Mays
aggtagttcattcctgcagagtagagacggaactagggctccacttgaaaacagatgtaatactttcgcttttttgtaaggtactcaagagtactatttaagcagtattagcacttatctattttcaacttgtttctgttgtgtgcgatgctgatactgttgactcctccatggtaccaggccccccgcctgggatgcaggcttgatttgttgagattggataccagcgtgtctgaaaaggttgtcaataattctcgggaggcagcctcgccgaggtctggatctgtacacacagcttcagctaaggagcgttagtagtacacccataaggtcccctgtctgacattagttatcctttgatacatgctcaggact

SEQ ID NO: 75772 - DNA, 490 bp, Zea Mays
atttgttttaccctttttattgattgttgtgattgatataatatgtaacattgtgtgtgcaggtgatggttccatggatggcgcccgtgcctgatgcgtactatgcttggtgtcgatattgggcttccgaaggcttccagaaagtgtcagcgcatcataggcaatgtcgaggaaccaatcctaaccacaagtttcagggtgacgacgtactacgaaaagctaaaagaatggtaagtttgatctagctatgtcgatcagcaaatagtacgattgcttatgaatgttttttgtttatacaggaagctacgagtggccaaaagcctagtgacattaaggtctaccaggagggccacaaaggaccagaccctaacaaccctgaccagctctgtagctagacagccacagatcggctggtgagttttggcccaaaagtacaaacgttcaaagtatagaaattcctgcatttgtaaggttgtgaatgatgtatagg

SEQ ID NO: 75773 - DNA, 437 bp, Zea Mays
cttaagcttctctttgtggacatcatatactttcacaactgctctagtagttgttcttctagagggcaaaatgaaacgtgggcatgctttggccaaaaattttctaagcccaggacgctcaggcaaaacaaaaggttgttcatcttcaataatcatttcagcaaaactattccttagatcatcagcatcaaatttccaagttgaaacagtaccaacactactgtttccttgactaggttgcagttgcaaagttccttgattatcaactacctttttgtttggattctttttgcagattttcaaatgagatttcatggaggacgtaccatttatttttgggtcacagcgaaacagttttgcacaatacttgcacttgactctttcatccccattattaagtttaaccttgctgaagtgctcccatgtatcagatcttt

SEQ ID NO: 75774 - DNA, 375 bp, Zea Mays
atctcattggacaaaattgcctgattttattacaacagtggaggctgcttggaattctgttccttcctccccttgcacttttgaaaccctttccaagaagtttagagccaccgtcaggcgtctccaaagctggtctcaaaaaagggtgggccatatctcctctcagcttgggatggcgcgggaaattatgcacaagctgcagtctgctcaagataacagacccttgtcagtgctagaaaattggctgttgaagcagcttgatggtcatgttgtggccctttcaaccttgcaacgttctatggctcggagccgctctaggattacctggttggctgagggggatgctaacactgccttcttccacctccacgctaa

SEQ ID NO: 75775 - DNA, 434 bp, Zea Mays
aaccgacaccttaccaaaaagcacagttctgttttcagttttgtgttcaggtgttttcagtttgactaaactgaaccgacagataacattatatcggtcatccaaacaggaaatcagtttggactgaactgaaccgacagcctacagcttacagtcaaatacaggttaccgtatattggccatccaaacagaaaatcagtttttgtttacagactgattctattttatcatgcgcatttcacactattgcctactcggttttctgctacttcagaaattcagtctgctcggttcagtctgctcggttttctgtcagaaattcagttgcattttcagagcagagtgaagtaaactgaagctaactgaaattgcagatgtgcttaaactgaaatgtggcagctgtccaaaaatctggcagccatactaaactggac

SEQ ID NO: 75776 - DNA, 393 bp, Zea Mays
taggtttactcatcttcattttctaaatctagacgtgctaaatgacacaaatctacttctacagcactaaaacgacagtataaattacaagtcattatacagtaccacatccaccaatccatgtaagaaacatggatataactaattgaacaaatgactgtttgaaatctctttgttatatgggaaaataaggaaacatacaaaacatcgaatgatcttgtatatatccttctttttccatataaggcacattcatcttataaagaaaatcaatagattatttttagctgtgcagagtcaacaatgtgtcctctgttagcacatccaatggcacaatgttatccaagcatcaggtctgtcaaacatagcacgaaccagcaagaacaaggtcca

SEQ ID NO: 75777 - DNA, 396 bp, Zea Mays
gtcttaatggtcaactgccttcagttatactccgtatttcactatttgccttttagctgtaagatgtttaccatgtgttcttatccggccaaattaaataggatgtatgtgaatagaatctgctatccttagttgtcgtgatcgtttctgtgctgagttatgcaaattttgcaatgatattggtgggatcataacacccgattttagtttagcgagcttgaagtttcatgtatagggtataacatatgtttgtttgggacttcatgtatgccccgatggcaagtctgtagtgcctgtgggatgaaaatgtccctgacacattcaaccatttatttactttgtcagttgatattttgttttcagctgatcatgaaggatgggaaatttccatacgtg

SEQ ID NO: 75778 - DNA, 419 bp, Zea Mays
tcacaaccctaaagtgcttaggcgcttgggtaagaaggggtcacaagcaaacacgctccaagggcacgtgaaacctaaatcacgactcgctcgaggctaacctcgggcaggaaatgcattttcgactgggcgtctcgggcaacgctccggggcgtgcccgcctcggccaaccactccgaccccagaatgtgtaatgtgtataaactaatgtagtccgtacgaccacctgccccactgaaggtgccaaagtcaacaaaggacgacacaaccacggtctaatctactcttaccatccacaactatggtcaaggcgcgaatatgaggtactattcccccacttcgaacactgtttcaaccacccagagcgtgactacatgcaacgtctaatctcagcctcggcctcaaaagaaatctttgcc

SEQ ID NO: 75779 - DNA, 298 bp, Zea Mays
atatgcataatagtgactctctccccctggcagatggcttcagataaaaccacgcctaccgcctccgggattggagcagggtttcccctaagagctgaaagggaagccggtagagaaggaagtgagacccacctccccgcacctccaaaactacccttagatttagcccaagttctagccaaccaaacccgactcatcgaggtccccactaaaagtctagaaaatcaacgtccgaatggtggaaaaccacaagacaggatgggagatttcctgaggctgaagccttccacgtttgccg

SEQ ID NO: 75780 - DNA, 397 bp, Zea Mays
atcttatcatcaactcatctgtcagtcttctcatcgtttgaggaagatgttacatcgttggagtagtggtcgaggtcgctgagggaggcgaataaggcacgctccttgatctcagccttctggaggtacttcttcttgagtgattccttgtcaaatcctcccttggacttgtacttgccaaaggagtactctagtttgcccttgcgccgaccaaagtggtggtctagcgggctagcctccttcttgcgcttcttggggaaactagcgatgaagtggttggggttgctgtagttgaagcattcatccttcaacccaccacatcgctggttctggcggttgttgtggaactacatgaactaactgaccacaagcgccaacttctcatcctcgaggctct

SEQ ID NO: 75781 - DNA, 713 bp, Zea Mays
gtttgtgctagctggcatctcaaaatgagtctgcctctcatcatccggaagactctgagtgtggcaattagagcctcaatgtcctcgggggagggccgcactctaaggcccaggctaccatcactagcaggactgcaggagggttggacacaaactcagaaaatggtctgattggtggcaggttccaagcagaataggccacgggagcgccggcgtttgaaactctgcccctcaggatcatatctagtcggctcatcagatctttatggggattttcttgtttgtaacccgggtagaatcattgatgccactatacaaataagcagggtatgccttgtcctttaaaggctggatgttctagaacacgaaatcagcgaccacagcctcagcagtcagacctttgtccttcagcaagcaaacctcgacaagcagtactttagcctctgttatctctgaagaggtcagagattctatctagctcggcgtgcggacgtctggctgcctccctgaccgaggggggagggacttgcagtggttctccacaatgaaccactcgagacgccaccccttgatgctattcttgagggggatgttgaggtactctgttttcctcccgcgacgaagttccagactcgcgccgccaacgagctggtgctgtcccccagccatcccgagccaacaatgatacaagtacttccagagaccaaaatggg

SEQ ID NO: 75782 - DNA, 442 bp, Zea Mays
taggctggaagctcaccacaaaaggattccacgaaaagtacagggaagacaaatttcgttgagactagaacattttggcacatcttccgaagttttgaccgaatgtggactttctatattttggctctacaggtactatactgaaattgtatatggatgttcttttatcttgactacagtttgacacctgctaatattctagtatcttatttaacaggcaatgctgatttttgcttggaatgattattcagtgaccgaaatccttcggaaagaccttttgtattatctatctagtgtattcgtcactgcagcatttctacagttcctccaaagtatgttcccctttaacatgcttttgctgaccgaatttttttcttaaatatgtacatatcaacatgatatacaataagttttcctgaactatatatctttatgaagccaa

SEQ ID NO: 75783 - DNA, 373 bp, Zea Mays
gctagctgttgttgttggctggtgcctcgctgtcatgtacgcagttattacacgtacacatgacggaaacgatggaggagattagtactttcccacaaaggcaaagcattactactaggaggggaagccaagcaagggtaatggttacattttttgggggaatgggttcacacacaaatccaagtaactgcttgacgaaacaacgtcccatccttgttcttagcatctagtagtttgtaaataattataaaatgctaactctcaaattttttaggtgtactagtatgctacgtgtgtggctgttctgggacactggatggatagtgcagcgaaacctggccacaaaacatggatatctggtgcccccactccc

SEQ ID NO: 75784 - DNA, 281 bp, Zea Mays
cacgctccagccgctgaagctgtcggtacggtatgtttctaagactgaacaatttcaatggaacccagaaaaatccatatcatctactcctctgaacccttttgcagaggcacccagggatcgggtttgagtagaagtattcctcctgccttgggcttgccccacgcaatctctcgtacggacctccgagtctattctcatgttgcttcctcaccacagtctggaactcagtccaggacatagaaccttcatccagcttgtcaataagctccacaaacttc

SEQ ID NO: 75785 - DNA, 561 bp, Zea Mays
ggactctctaaaaagaagtatcctcaagttcaaaaactattgtacatagtacttctaactgctcataagatccatcactactttgacgaccacaaagtcatagtagtcaccgggtttccaataggggatattgttcacaacaaagaagccattggaagaatagccaagtgggcctgcaagctgggagctcatgacattgagtttcggcctcgcactgcaataaagactcaagcactagttgacttcatatcagaatggaccgagcaacaagtaccagacaacccggcggctacagaagtatgacgaatgtatttcaatggctcgctgaagctacagggagcaggcgcaggaatcctcttcattgcccctggaggtgaacaactcaaatatgctcttcagttatcattcccagcatcaaataatgcagcaaaatatgaggctctggtccatggattgaacattgtcgtatcactgggcattaagaggttgatggtatacagagattcactggtggtcataagttagataaataaagactgagattgctcaaatgattctatg

SEQ ID NO: 75786 - DNA, 374 bp, Zea Mays
cttagattgataagggggtgtgttacgaaacattttgtatagtcatcaacccctctcccatgacagttattccccaagggacacaccccttggggaacactatgttggcttgtatataagggaatctccttacaaaaaagaacttgtctctgtcatttgtatctctctcaattatctttttgccactgagtacaccacaacaggatatatacatacctaaaacagttagtatagtaattaatactctacagaaagaccaaaatacccaatcgttgcttgctgtgtattatggggccaaaacaacagaaggataaaaatgtcgtacaaagctgcttgctgggaattcaaacatcataaccgctggtggtgaattt

SEQ ID NO: 75787 - DNA, 488 bp, Zea Mays
gtgccattgtatgaatatggatgcaagaatcaccaccctatgtgatgagatgtgcaaactgaacctagaagttatttcctctggtgccttgagttatatttcagtggagcccaccctacacgagcaaatagtcatggcacagattggtgacaagggtgtccaagtcattaaggagatgatcgaacaaaaggtggacaaatacaaatgcttccgtcaggacagcaaaggaattctatggtttggagatcgattggttgttcccaagaacctcgagctcagaaagaagatattggatgaagctcacctttccaaattctccatgcaccatgacagtaacaagatgtatcatgacctcagatctttgtactggtggaccagaatgaagagggaaattgctaagtatgtatctgaatgcgacacttgccagagagtcaaggccagccatttgaaggtagcaggcaccttacagccccttcccatacaggaca

SEQ ID NO: 75788 - DNA, 896 bp, Zea Mays
agaaactcatctgatgtctcttttagtccttatccatagtttcctttattcctggcgattccttctctggtatacctttcctacaaatgcatcggtatcatttcccccctcccccaaaaacaggtcgttcgtgacctggacaccaggaaaacggcgacgaaagtcctccagctgaacccacgttgcatcaactgctgattgtcccagccattgcacgagcagttcccacacgcctcggttcttgcgtgccttagtaaccttctcatgctgaggcaggactctgccatgtaatattgggggtagaggaactattgcagccgggggagccccagtatatttctttagtaaagagacatgaaacacattatggatgcgggcgtgagatggcagggcaagcctgtaaggtactgtcccaatttcctctagaacctgatagggaccatagaagcgaggcccaagcttagagtaggcggctggtgtgattcctaaagctgtacgctgttgcagtcgaacccacacccaatccccggtagtgaactgcacttcccttcgagacttatcctgggattgtttcattgtgagttgagcctgtatgaggcgttccttgatctgagctaaaaagtcatcccgatcttgtaaccgagtgtcaatagcagctacaggggaaagtcccggttggtaagagataatagctggagggtctcgtccatacacaacccgaaatggtgaacagcgaaggttgtttgaaatgaagtcttataacagtactccacctaggacaaccactgtaaccatgtgcggggtcgatccccagctaagcatcgcaagtacatcaagatgatctagttagtaactttagattggccaccagactgtgggtggaacgctgaactcat

SEQ ID NO: 75789 - DNA, 301 bp, Zea Mays
agggcaccaaaaattataaacatttgtagaaatttatttaccactatatgagcacttggttaaaatctcaacctgtttggagttggtttgcctagaaaaccattagctaactacatagggatatttaaatcataagacttaatgctaatatagggtttagaagaagcttaagcgctataaaagggtttagaagaagctaatatcttgtttgtccaagtaagtttagtttggtcacttttgacaagtgcttggtagagtagaagtatgtgtatgcttgtcttgtgcttattttgaagtgttt

SEQ ID NO: 75790 - DNA, 458 bp, Zea Mays
cgtcattagccctgttgggggagggcctttgtggccgaaggtctctaaatcactaacttcgttaagaacaagtttcaggtaaaagcatttaccttcgtcactaggacgaagcagatgagaaaatgtcagaggggacaagatgattcatgcatgtggaagcgttaagcaggatgaagctgaaaaagatagcttcgaggtaaagtgctatggtttacaaagcaaagatggagtaaaggctacgaaggacgtgatctacaagataaatatgtggaaaagtacaatatttcccaatggcatgctcggtctccaccataccggtggtacccagcaaaaaggctagtaaagggccacaccttcatcaacctcaccgcaccgaaggtatccaccgactgtggcgacaccccacacacctcgggatccccttacgaatgcaaggttaaggcccgtgtcgaccagcg

SEQ ID NO: 75791 - DNA, 493 bp, Zea Mays
ttctgagttgagcataaagaacatgaaccgcccttatcatggttttcatgatcttcctattcaaagacgtcctgctaggcctagaggtgctttatctcctgctgctaggcctcaagtagtgataccatagggtggtcatcctagtggggtgctggttgtctgtgatatatatggacaaggaccccatgccagtggctttggttcaccccgtgtctttctattgaagtaggatggagacctagagaacacatggctcatggattccggttgttcgtgccacatgacgaaaagtactaaatgatggattatggggaggctacactagcgcaaaataaaattttcgaccccataaaccaagaactcctgctgttataggtcatggaattacaactagatgcgaagggcagcgaaagccgtctcgatgtacacgtatgcgtcgagaagtgtcgtgtagttgtcgacgtccttcacgtcctcgtgcgattcgtccaag

SEQ ID NO: 75792 - DNA, 536 bp, Zea Mays
acaacagagtccaatggtagaccgtatggtgtaaactaactggttgatacaaaaacattaagtgaccgagtaatctaggacattcggtttccaaagttgtttctttatgtgtcggttgttgttgctattgttagggaagaacaagtttttttgttgaaatattactctatggtaatctactgattattttttgtctattgcttaaggttagtcttgttggagctattgttatattgatttttctcactatatacctttttgggggtaagacgtcaaactgaagtatgaagtacttatgttatttataatacaaaaatcctttaatgatttatcatactaacaatatatgaagtgattttatgaagaatcttctgcattcaaggttgcggaaggtaacaacttctgcattcaagattgcgaaaggtagatgttgtgtgaaatcggtaggaccaaaactagggttgtgatcaatgcctttttaagtagttcaaaggcatgttgatggtctgtcattcatataaatagcacattcttct

SEQ ID NO: 75793 - DNA, 473 bp, Zea Mays
accaagttaaataagtatcttaagtcaattgggtcactcatatgtgaatttacaagccaaaccctaagttttggactcatttgcaaaaagggaccctaattgagatttcatgttaagtctgaatttcagagttttggctcaactttggggctttgtatctttcaaattctagggtttttgccctagggcaacacataaaaattgaagatcaatcattggagaacaactttgcttaaaggtctgagcatagttgttaagtaaagttgggagataattaagcccaaagttggactgtcaggtcactgggtctgaatttttagacaaacagtgccatcactgagacattgagcaaggattcaactatgatccagcatgaatctgcccatggtatctatgacaaacttgtagctggttagtagctctataactttgctgcagagtttgggttgtgatgccacagaaatttggaagaa

SEQ ID NO: 75794 - DNA, 565 bp, Zea Mays
tttcctccaaaatgaagagatgaattcccatatcatgcaaaaatgaaatgaacatatgcaatgaacattaaggataattaagcccattaggcgagttcatcaaactctattaaataattatcctccaaatggcttaaccatttttctgatgttgtaatatgctgcaaaatatatcatatcttcatatgttggagaattataggtatcacatacagtgtaccaacagatttttgaaaaatttggtggacacaacgtagataatctccatgtaatgcaacaatggagtagatctcccagtagtgggcaaaacttttgctgcctgaaagcatggtctctgggctgatatattcaagaaacataccgcagccaatgcttaggactccactaccctgtgcttgaccaaattttcaaaaaacaaaatggtaatcaccataaaggtgaataaccaacatcaagtctcctacatatctacttgggagaacacataggtaatcatcataaccatatgatgtagacctcttattgatgggcaaataacattttgctgtctaaaagcttggtctct

SEQ ID NO: 75795 - DNA, 1740 bp, Zea Mays
gccagttgagggtgatccctctctccggggttgtccctaggtgaaatttgaagtgttcctaaatgattttttctttttcctcatgggctactactaagtttccaattgggggctgcaggcaatggatgaagtttttacgtgctctggagctagcagataggtggaagaacttagtgttcgcgtcgcccaacctaatgcgagtgaggcgagcccgttgacggatcctcgatttttcaattatagcaagtcccagtgccctggctttgagtgccttcaagagatccagttcctcttgggtgaacacacactcctcttgagcagtttcgaatcggatgattaattctttggaaattgcaagttgtaatctcgtgtctcccactttggtcttacaccatagtttgatggcctttgttgcacgcactagtttgatatgaaggcgcttcatgggtgtaaatgaggaacgaagtggtttcagccaggcagtctgaaccgcctccttgaatccctccatctttacccaaaaattttcgaagcggaaagaggggctatgtgtcgttgtcaattctccctggaggagaagcggagtgtggtcagacatgagggagggaagggagtgcagatagcagctaggaaaaagcagctcccattccgttgtacagaaaaatctgtcaattcttgttagcgttggattcgcttgcccgttgctccaagtgtagcggcggccattgaggtggatttccttcatctgtaggctgtccagtgctgatttgaacgcacccatgaggcgccgattcaagttacaattatttttatccgaggcttgatatatgagattgaaatctcctaacgccaaccactttgtccaacgttgtgctgcgaggccacttagttcttgaagaaaaacaagtttctcagcgctcgactgtggcccataaacccctgtgatccaccaagctgaattgtctgccttcatagtgatcatggccgagacagtgtgtgaggtggtgtacacttgcgaaagtgagaaaaagtcattcgaagctgcaagcagaatcccacccctagatccaattgcaagcagcacaacagtgttgtttagaaaattcggacccaaggtacgaaggatggttgcatcgtcgactgtagtgagtttagtctcctgcaagcaaataatggtactaccagtatcccgaactagttcttgtatagaatcacgcctggccacttcattgagcccccgcacattccaactcaaaattttgcagttatgttgagacattggtagacaacttgaagttcccagaacactgcagatagtagacaggtccttgtaacgacgaacgacgatggctaagctgagtggtccagcagaatcgcagcaattgaaggcccctggctgctgccatgattctcagccaccgaacaaattggttgtgcagatacaccatgacgcattcaggacaaaagaacgaagaagtgatagacattgcaaaagactaaggcccctgcagagcgtgccagactgcatgtcttaaacctgcgcagcaggctcctgtggtggaaggattccgcagaggtccatcagcgcttgcagcaccaaggacgacagtggacccttgaagaggttgatgcaggtctccagcgtggcacttgcagtagcctgatcagacggctggccttccttaggcagcaagcccaggcgctttagcaggacctggcgtgcgcgttcctggatgttcc

SEQ ID NO: 75796 - DNA, 639 bp, Zea Mays
catacttcagtagcctccgggttgtcaggaacttgttgctcggtccactctgacatgtagtcaactagtgcttgagtcttcactgttgtgcgcggccgaaactctatgtcatgagctcctagctcacaggcccacttggctattcttccaatggcttctttgttgtgaaggatatcccctattggaaacccagtgactactatggctttgtggtcgtcaaagtagtgacggagtttgcgagcagttagaagtactgcgtacaatagtttttgaacttggggatatttctttttagagggccctagaacttcactgatgaagtagaccggatgctgtactggatatgtgtgtccttcctctacccgctcgactactaacgcgatgctcaccacgtgagtcgtgcaggagatgtataacaacagatcttttgccggctgattcggtgtggctcggcgtggcgacttcaatactggtggtgtggttaagaattttttcaatgtttcaagagcttcctgtgcttctgcggtccattggaacttctcaaccttcttgagcaatttgtagaatggtaagccttttttgcctagccttgatatgaacctgctcaaggctgccatgcatccagtaagcctttgcact

SEQ ID NO: 75797 - DNA, 624 bp, Zea Mays
ggaaggatccgtaaggcaggggtaaatccagcgttttacctcgggtgaggccacatgtactcgtgtggcccgaggggtccataggtcatgagtgggaagcagaccggtgcccacaatgtgactcagtgccaggcgtggttaatgcagtcagtcatttatggcgggtcaatccagggccgagagtgggattcactcgagtggttcccttctgacacgctcatcctcccttgtcaggcttcgccatgtccggcctaggctcggtgccacggggttcgatcgagggcgggtccttatagggttggcgcacctgcctcttccgactgactaatgggccctagtgatcagaggctcttccctcagcacgctcactgaccggcgggtcctagggaccagcgatcatttccccgaaaacttcactcacaatcttaccgtaacgaacatcactcccatccctaacagcaaagcctaaccctgatccgctggttcccattctgaattggctgaccatcatgcctaactagggctcaccagtagacaccaagctcaagactgattgaaggtacatgttttctacctcgatcctagtattgccatgcctacaggactcaatctctagctacaaac

SEQ ID NO: 75798 - DNA, 317 bp, Zea Mays
taagggactatagcacaacttcaactccaaaaatctagatgagacttaactgtaagtgaaaccatgcatataaatgctctcgacatgccttcagttccaattccaaatcagatctagcaccaaaaaaatcccagagctaacggatgtaatagaagaaactgagttgtgtagttgtgtccacgcagtaactcccacaagcaaacattttggccagccgtgacaccaaaaaggcaaaaatcaactagtaccgcaaccgggggcgtggctcgactacaggtacagctacaaatagcgccccgcgatgaactcgactcccg

SEQ ID NO: 75799 - DNA, 372 bp, Zea Mays
ctgagggaccatagagttcgcctagcagcgtcgctgaccgaagcagcgtaggtggatagcggcgtcagagactcatgtgctgacagagtcctgaaccctctatcacctgcatccattaccctgacatgaatgcgagtgatgtagtagcaagcccgaggaggctcgtacacttgccttgtctcatacaggggtcggacgtaggttcccaacgcgtgtagaacatcctgcagcaggttaggaaagtgccatatctcgaacattgaagtgtaatgttcagtaacaggccataaccccacgtagtggtcctgttgttcttcgttggcttcctcgttgaggttttcctcatcttcttcttcgtcatcttcatcatcg

SEQ ID NO: 75800 - DNA, 530 bp, Zea Mays
tgcacttaaaactaaactagtgccttaaaccaactcagccacatgcatgagatctgatccaaccaatagagtcatgaagaattgcatagtctgtctatccccacctaacatcaaacaaaccttcgacctacatcatgtagtccatctcacccaaaactattctaaccatatttccccaaatatacactaacctcgaatcaatgagctcaagaccggagaagaaaagatcaacctcgtcaaggaaggagaaaagccaaactcaaccttcagatgcattatcacccagcacggagttcttcctcaccataatcattcttaccctagctattcttgccctaacctaacctacccatcttttatcctacataataaaatgactatacatatagatacacatgctctcctaatcactcactaaggaaaaaaagttcttgatttttgaaataattagaaactaaaagctaaattgcaaaccactcttcctatatcctttttcttacaaatctcggggacgagattatttttaaggg

SEQ ID NO: 75801 - DNA, 687 bp, Zea Mays
gcatatttatgaaaatctacaagagagtgagtgcatattcaatttattaaaagacacaagcctcaaggttgctcttcacctaaaggaagaaaggtaaaagcaaaggtatgggaactcatctccttatcaatatcccatcaatgatagttcccatcaattggtatttcttctaaactatcataatctaccaatgtggatattagattgcttatttgacttaaatcttctaaaagtgcatataatcttgctttcacatgtgcactagttcattagaatctaattcatgcctttgctatatctgttctcatattgatatgcttctaagttatgttaatcaattctatgcgaagaaacatcaatatgaagaagtaaatttcctatgatttgattataaatgttaaaaggtgcatattcctcttttctgacgctatgcactaatattaaggattttacttcatgtctctgtgacatgtggatgatgatttgtctgtatctcttatctaaagaaatcatcatttgtcatatactcccttatgctgctaatatatctttttcgagtattttcaataagtttgaaaggaaaaagagacaactataaagggaggacactcaaatgataaagaagatgtcaagaacaacaacacctacttaaacgataagatcttcaaattaatcaatgatgtggtt

SEQ ID NO: 75802 - DNA, 440 bp, Zea Mays
caattattgccaaaagttgtgagaaacagataaatcttatattgcattgtcatggtactgttcttttagcaatctgtactccttgttgcccatagcaatatgtatatgattggtgccctccatcagattgtaatatttgataaacattaccagttttgctttaaccgcttcacctatcttctctgcatggtattttaacccgtttttgatacatgttttctagggaaattgtagaagtgcaggctacgtacatcaaacaaaccgaccaagctgcaggcaattggagttccacccaaaaattcagataataatttaaatattgaaggattggggcagttaaatttagaagcaagggaagcatgaagacagacagttgtgtgacctgatcgctcatccaaacttagaagttgcagaaattataaacgtgatcaaatcaactc

SEQ ID NO: 75803 - DNA, 511 bp, Zea Mays
cacaccttttcgtctactatatggatcaaaggccatgacgtcgtaggagataaagcatgggtcgccccgaacaagcacatcagcagtccccgacgtagacgaaccaacgtccaaagacctcatcgacggagaccgcacttcgccctgcaggccctcaacaaataccaagctcaaaccaaggcctggcgcgaccatgcggtcgtcccaagagagttcaacgaaggagaccttgtactcgtctggaccacctggatagagtcacggggcaaactggagccgaagtgggagggtccattcatcatcaaatcgaaggcgtcccccagcgcgtataggctgacaacgccatccgacgaagacctaaagcattcctggaatattgacaatctccgtaaattttttgtttaaaccctcagggcccacacgcccttgtaatccaccaaacaatactattccggcccgcactcttttcctcccagggggtgaggtttttaacgaggcggagccatgtaat

SEQ ID NO: 75804 - DNA, 653 bp, Zea Mays
gtgccatgtgcctcggcactttaaccacgccaccgtgactcgtactaacttattcaatgatcgctggtgaggtttccatgggtgtggccaccaatcgtgtgcgccagtacccctcttcctctccgaccgccagcgtgccaatccaaaactggacgccaccgctcttgcacactataaattaagcgtaccgctagcaccgttagataatcacaaagccagagcactcgctcctgcctccgattagccaccacaactctccaatttctctttctccccaattctgttttctgccaccgtgaaagagcccacaccgtggccaccgttctgtaggtcagctcaagctttcttaattagtgttcaagctttcctcatgtcccctgaagctcaccgacccattcgattgaactagaccgccttgaattgcctagaacaccttggattatcctcgatttccgccgtcatcgtgagcaggcatgctccggtccggatcagtgaaattagctgaggaattagtgttggggagggttgaattaagtggcaagcaaaggagaagtctagccatggcgttttccggcaggtatgggctcgtcggagtcgctgctccaccgcccacggtggaggacctcgggttgtgaagagataaaagcgcaagg

SEQ ID NO: 75805 - DNA, 366 bp, Zea Mays
gcacggtgctcgtacgacgatttctagccgcacagtgaacaacacccgaccccaccacgtggacggctcaaggggcaccacatgaccagaaaagaggatataccctagagtgccatcagtagggtcggacctccatgaggaaacgcaggacccctgtacgcacaacccagacccccaaatacggtccgagactcccaagtagtgtgtcgggtcccttggatgggatccggatccctccgaataaggtctggaccacccataacgaggtcccgggacaggggatatcctggtctaagcaagggtccggtactggcacgtgtcctggccttatcttgcacttgcgctccccgctcaggcagagacccg

SEQ ID NO: 75806 - DNA, 936 bp, Zea Mays
atcacgtccgcacagttcaaaatcggtggctagcgcgcatcttcctcaccaggacacacacccggcggcgccgtacactcggctcgacagagcgccatcgccggcaactcccaaatcggtgcccgaacgcataatacacgaattaaataggtgctacgcagggagaaggtaagtgcaaacgctagggacgatctcttaccggctaatgatgcgctaaaattcccgtccgcggtgacccgtggatctgcgacggtgatggagctacggcgagtaattgctgctccacccgttgcccatagctctaggaaccgaagctcgcgcatcaggtactcctcaccgacctccccgaagcaccctggtcaagctccgcggtcaccaaccggaatcgcacgatgcagatggtccaaaatatctccctcacggtgacgagcacactgcggtatcaatggtcaccagccctagcacgcatttgcgctctatcccgcagcagatgaagacttcgcacacgggctcctatttatccgtcgcgaggtgaggcagagtggccggtaacgcgaatcgtggcaatctccacggagctagtggcaacggttttgcgcatctgtgggaaggtgaagacgacaccagaggctgggacccacccaccagcgccatagcgaccgggagcgcgcgtctgcaggaccaggccaggaaacatccggagcccaaggatcccgattctctgttactcggttagcgctggatgcggaggggagattttgcagcgaacgggataaacccgacaggtatgacccaccaggcagtcagaggattggtccaatcccgcgcgcgtgcggatgctgacgccctggggccacttgccagtgcagagggaacgcgaacgcttcagtgcgactgacagagaaggcccacctgtcggcgcaaacagcagaagtt

SEQ ID NO: 75807 - DNA, 409 bp, Zea Mays
cctgacgaacctgacctccttgtgccgaacaggaacagaatttacggctcgagattgagaaggcgcgggagcaattcaagagcctactgaacgaatacgtttcgttgtcagctacgccgacacagaaacggtaggcatcgtcccgaagccaccggccgtggccggcggcttgtgcactcgtgctagctcttcacgacatgtgggtatgttcagaatgccagagaaccgaatgctagcaaggaagcggtgatgcttctggacggctttgccggtggcggtgtagacatagcgcgaaaggcgtgtgtaccaagctctcagaaactcgactttggtttattctccagtgtcgagtgattagatactgtacatacttgtaaaacaagaggtcaccttttctgtgtgacgaaaa

SEQ ID NO: 75808 - DNA, 529 bp, Zea Mays
ccgaggactcttatgcaaatgaccctgggtgaaggggtatcggacgacaacagtcgtcggatctgagatggaaggctcatattagatcaccgctctatgcaaaccggtacgtaatacagatcgcgggatcacgatccaatggctgaaacgccatcgacccccagacctaaccagatccacacgatccccgactgaaggcttggatttaatcactacgaagggttatcctaggatctaatctgggtcgtccgagagtcgatcgacggcatttgagctgtcttcttccctggtggctgagctcggtggtgcccaaagtccgtgcggcggttcccgctggtgagtagcatgcccggcgccccagagccctatttttcctaccagaagtgagcaacgcgaagagaagacggaggcggacccagttttaggttccttaccacggattcaggcgcggagacgaacgcccacgatggaacgcggcccacgacggacgccactcctccggtgagccattgcccgagttccgactggc

SEQ ID NO: 75809 - DNA, 473 bp, Zea Mays
gactttctatacgaggcactcacgcagcagcgctaaatacgtagtgcatctctagatccgtttcttactaccaatcgtcctgccccgtgatacttccaagcacgtggtcaacgactaggacagcagttcggtcaaggaaaggtagaggcggcagtctcctgtcggcacagcggcttccaataattgacgagcctagtagatgtggccagcaagccaaaatactagtagtacgtacgtagataaacgccaggacgtggacatcacagaaaactcaaactgtttccacgagacaggggcacgttctatgggcgcatggaacgtagtaggccaaagcttctctactgacagttttgtccggggtcccatggaacgtaccacttcagagctgagatcttcagtcgttggaggatgagagatttgcagcggaaaaccagcactgacttgactttttcaaacctggaagcatctctacg

SEQ ID NO: 75810 - DNA, 1145 bp, Zea Mays
gaagaagattacagaccccgcattggtcgatttctgcaaagctatggagaaaaccaatacggagaaaattactaatgaaatgctggctgggttatctgaaaactccagcgatagcaagagttttgatgaagaaagtggaaatgaagatgccgaagactgggcatggaggccgatccatgttatttttggaaagtagactattaagcaagagtagatcaaagcaatgaaagggagatactttcctgacatttccatcgtgagggctagaggggagagtaccgttcctcttcccgaagctgatgaagttgtgatttttagaagcttcatgaaagctggactttggttccccctggacaagatgttggttgaagttctaaaaccttttgaaatttatcttcatcaacttacccccaaagcttttatcaaagtaagttttttagataggccatgaagagccaagggttagcaccagatgctaggtgtttctgcaatattcacaaattatcatatcagatgaagacgactgggaaagaacaataccacaataattttggctgctacaactttgtgccccgctaagatgccagttatccggtgccgacatttcagaaaaaatggccgagctcttggatgcaggaatggttttatgtgaagattgacctgagtcaaagggagatataaaagggattattcagcgcgctatatggtctcgcttcggcattaggaggccactcattgcacttgggaataacgtgcaagcgtgccagacagttttcaacatagtgtgcacttatatcggcacaagagacttggtccaagagaatattgcttacagagtgtggccacttgccaacagatgggaaatgccgaaggaggctgtcgctagctccagtcaaaatggcttagtctatctgaagtataccgttcgatacagaagccagtttgatgaacctaatgatgattggctagatgctatagaggcaactaacgatgagctgcttggagcgtactcgaaggccgaagacgaagctatgacaactgcctttggtgcttggggcaagaagagattgaacagggtgtttgatgttatctggtttgtgtacccagactactgctatcccacgcgaaagcaaggggaagaaaag

SEQ ID NO: 75811 - DNA, 643 bp, Zea Mays
agaaaggggcgcagtacatcattcatgagtgcctgaaacgtggccggggtgttgcacagcccgaacggcatcactaggaactcatataggtcgtcgtgggtatggaatgtcgtcttgtggatgtctacctacctcatgtgcacctgatggtaccctgagcgcagatcgagcttggtgaagaatttggcgtcgtggagctcatccaacagctcatcgatgactgggattggaaaagtgtccttgatcgtgagcgtgttgagggcgcggtagttgacgcagaagcgccacggtccatcctgcttcttgacgaggaggagcggggaggagaacacggagtcactgcatcgtacgatgccttgcttgatcatggcggagcattgctgttccaattcatccttgtgcgccaccgggtatctgtaggggcgcacagccactggactagcgcccggcttgagaacaatgtggtggttgtggccgcgctctgggggtagaccagtcgactcgatgaagacgtcagagaaggagtcgagcacttcatccagtaagggctcggtggtctcggtggtgtgcaggtggggagggcttgtgtagcaatgccacgacaacaaacgtctcgtctgacctgcttgaatgccatggtgtc

SEQ ID NO: 75812 - DNA, 320 bp, Zea Mays
ggaaatcagtaccagcctcagaacaaccagacacctcgccttcctgccctagcaaccaaccaaaacaattaggcagcgccagcgcaaggaggatatcgtggatgtttccgcatggggggaacaaggtcactgggcggatcatttcccaaagaaggcaactcaacagccaccagctttcaacacctcagcaagacaaggagcaccacagcaagcaccaggaggtcgtggccaggcctacaattatggaaaggtgaaccacttggaggccgaagcaatccatggtgcaccagatgtggcagtaagtatgcttccagtcgaat

SEQ ID NO: 75813 - DNA, 436 bp, Zea Mays
gctattgcgaggttgcaaggaccatggtgattcagtcttgagtgagcatgtgacaatgcagctgctggagttggagcctgaaaatgcttcgcattatgtgacacttgcaaacttgtatgctgagacagggaggtggctggaggctcacgaggtcttgaagtggatgaaggaaaaaggattggcaaaggatgcaggctggagccttaggatgttagaggacaggtcaagcaaatgtataagtgatggaaatttcatggaatgtgcactttgagaaacatcagatgatcaattaacctttacagtatcaggtagttaagcatgccttactgtcacacttggatttaagggccaaaacccagacgcgaatcaaatgtgtctgagattaagtctcacacacatgatgacttatggtacaaaaacgaatgccacatcttta

SEQ ID NO: 75814 - DNA, 987 bp, Zea Mays
ctagtccctcggtcaagactcaacgctcgtcgttcaatgctcctggtccatcaacacgaacccacatgaccttcaccttctatatcgccccctatctctggactctacaccgcaacagaagccaagaaacatgtcgcaacaacacactcatgtctcggttagtccacccgactaaacccaagatgctacacgtgttaacaatcactcatcacaacccgaaccacaagggaacatatcaatcttgttcttaatgtcccccttgatgagtacattatccacaccaccgcacaaatgcaaaaatcagcagaaaagaatgaaggaagaagaactcactcaaataataaaaggctagacaaaagctaaatccatgtcatcgaaagtgagcaaagcttggtacccaaagatatgggcaacgactcaacacaactaagcaaagtttggctagccctcaagaagagacaaaaaatgggatcaacatcatttgccagagatcagagccaaattagagcgaaagatagcaataaggctgaaagctaagctagtccctccaaaaataggcaaatcgatcaacacaactagcaagacatctctcaaaaactcccccttacagaataaactacccctaaacaaaagtacttagggcctcataaagaaatgcatcctaaacaagatttatgtgtatagttctccaccttgttgataaacgcacacggcaagcactacgcaaatgcacaaaaacaacaactctaacactgtttttcttcatttggttgtgttctttacctttcctagcttagatataggctagttggtatgatcgaaaccaagattgcatagcagtgttttgcggtagagatagcaacacttacacaaaacaatagttgcactagcttgcttggtaatacgcataggttttgtttaagaggtaaaattagaggcatatattagtttgaaaatagttgtctgaattcaccccctctccttctt

SEQ ID NO: 75815 - DNA, 428 bp, Zea Mays
atcatgagtcatcaacaaaaaattctgagatatgtaccataaagatcaaaaagccacctgggaaggattacaaaaatgttcctaaacaatatgtgcctggcaagcctctactcaactgagatgtactcaaagaggtcctaggcggtgtaaaacggttgcacgactggtacacgagagcatctgctattggcatcaacacgatcaacgtttgtatagtagtagatgcttttgctagtggccatgaaaaggcaattgttacattgaaggacatgaggttgatgatgaaccttaagggactcgacgtatagctcataatggtggttggattgtaagtgtcactcatacttacacatatatacatgtgttattattagcgagttgtattaattttcaatatctaacatgcacgtgagccatgtagaatgcaa

SEQ ID NO: 75816 - DNA, 1064 bp, Zea Mays
cggtgatctaaggtggtttagttcaattggctaggtcgatgagcatccatagcacataagggtgctaaaacgagagcgaggagggcgtgaacggacctgcagaaggctggccacgacgagctcactcacggtggcgcggagaactgaattggaagaaactctaaattagagctctctggtggacaattcgagacacgggcgggtgcactggatgcgtggttacctagcggagctccctagggcagtaatttataggttccatcggcggtggcgtccaatttcgcaaaggcgcgctggcggtcggagagaggggaggtcactggtggctcagtcgtggcgtccgccggggcaacggttctaatatggcaagcctaggcgtgccacggttactactacgcgataaagaactacggcgtggcataattgaggtcgccggagtaccacggcgacaccgacggtccgaccacgtcgcacagctacaggcacaggtgataagcttcaccctgcgaccaaatccactcccccgtgagatctttttatgtccccattgatatccactgcgcgcctagcacgaatcacggcgatcgacgcgaatctgagagcaaggtcaccggcgacgagggggatgaatctgaagatctttctgcagacactgtaccatcagactccttatcagagcgcctgacagagcgatttcaggagcctggatctttgattttcatgtagtaactacttaatccatctatatcaaagttgtagctctataaaccagctacaattcgactatagagaccttgcacatttacttactccctcgagcttgaatcgagtccaaagttcatcagaactcactgtcagaccagtatcagactgtatgggtgactgacaacaatactttgagtccatttaactccaatttttgtacatcactcatgtcttgtgacttaaacaaagttatgctcctttagtagctctacaggtttgaggtattgaccctgggcaaattccttgtagatttagaaatatagagctccaaagctgaccccatttactgaaattcagac

SEQ ID NO: 75817 - DNA, 815 bp, Zea Mays
aaaatgtgccttttagctctgtagctagagcttttattccatattaatacaacataatacatgcaggatgaagcacacccaggctagctaagtcataccagattatacatgttccaatgtgacaacggctagaccatcctcaaacacatgaaggcataacactatttaagatgctttgtataccgttttcatattatctttggcaaacgattcaggcaaaactaacatactcctctcatctatatacaggtttcagtttttgtaagcatagaaaaagcttcatcacttttggatatggaagacttttgtgtacatagacatccatgttgttgaagcattctgaaaactgtgcttgcttatgcaaactttactcacgaattattactagatatagaagtatgctactttaatgcagctcggtacgtattgtgacatgtttgccttataactctgaactctacaagttcccatactagatcttggaatacgcgacatgaacatgaacaatagttgtaatttagttttgtgtatgctctctgtattctctagtacattacatcatctttttggcaatctgtttaaacatgataataacatgaagaatgtttatcttcatgaacatacttatcagatagaacataaacattgtatttacataaacaagaagctgtaatctacttgcataaacattctttgtattcttgctgttgtcataatgttagctccatatcttagtaaacaattcttcaagagcatcaatatctgataacccctgccatatatccgataaccacattgatattttaatctatcta

SEQ ID NO: 75818 - DNA, 776 bp, Zea Mays
agaaattctgaggcggcgaaagggtatgagtgatatctgaccgcccgatcaacagtggacggcatggattagctctgctatcgaccgaaccggtatctaactcagtttagaccagggatctacggcgggtatctaacggagcgcgaccaatcccagccaccttatcatgactggagggtcctgatctcacctaagggcttcgcatctggaacctaatctaaccgtccgatagctgatcaccggtatcaagtcgtcttctacctcccgttagcacatcgagcagcacccatgtcaccgcaacggagtaagccccgccggagctggctacgtcatcctatgcaccatactgttctaacgagcacgaccgagtaccgatcgccaagacaccgccagccaacccatatgaatctacctgctaagacccccctgcgcccgagcaaggcggcacggtgactctgcccgccaccggcgagcaattaagctaccatcggtacctaatcacgtgtcctaataggcgctagagaatacggagacgagagtggacatgatgaagggtacctcaacggcggggaagcagcgacattgatggtcttggaatcggtacggttgaatcggccatgagtcttaattcctagagcaattccgcaaccccgcttcccaacctcccttagcgaggctctaattcctgccccgtcgacgttgcgaagccccacggtcaatgtcggcgcactgaacgacggtgtagaggatgtacagcggctgcgacgattttcttt

SEQ ID NO: 75819 - DNA, 543 bp, Zea Mays
cgtgatggtacagtgaccggattggatcgccagctcagagaccttgccgccggcgatcttcgcacctggattcacactagccatcacgatttgtgccgctggcgggtggattcagctcgacaatgaaaagatcatgccacggatgagttcggactactatggcctcgttgtttctgatcacttgcgccggcgacgtggccttacatccatcaccgaagtccgcgtcgttcaccgcaactgcgccacatctcatgcctttaaccacgtcgttatgactcaggaaatcgatatccggtgatcgtcggtgcatctgccaccgtgaaagacactaagcgtttgcaccagtactcctcttcttcttcgaccgccaccacgccagcttcaattcacacgccaccacccctggagcctataaattgagtgtgccatcggcttcgctatgtattcaggcatctagcgcacccactcgtacctcagatcctccaccagagagctccaatttgggatttccccaaatcaaccaagaacaccgtgccttgtgac

SEQ ID NO: 75820 - DNA, 385 bp, Zea Mays
aacatgactgcgtgagagctaaaagcacgagaggggaacaacaaaattgccttcttatcctttgtcacgcctcaagaataagagtgttgttcggtgccctaggaggttgggaaagtggtgcgcgatgcgggtggacgaggctttgaaggggttgcagagagcatgccagtcgggaggaagttggggaggaggctccacacacgttgagaagtcgtgccacacgtttacgttggccatgcaacgaggaggttgcggggagcgcaccatgcaggaggggttgaggaggaggctccacatgcgttgggaagcagcgccgctttttgtcggtcgaggtgggccgtggggaaaaccctcgcgtttctgttgaccggggcgacgagcctcc

SEQ ID NO: 75821 - DNA, 763 bp, Zea Mays
ttccaatttaagtcttaaattccaatttggtttctaaaatatgtctattcaccttatttttatattgtcaccaaatgcacacacaataaaacctatcatgatgcacatattgtttcaggtgtcattggttaattaatgacttttgaagtgttggttcgcatgttataataattagaggcaaaaaatatgtatgtaaatcactatgttttcattttacatttttttgggtattacatcggcgagatccaatccgaaccattgatcataactcgagtggctgggattagaagggtggtactagttggggtgatccggtatgggccgttgatctgggatgcaacgactgtgattggatcatgaatattgtttcggttgggatcaatcctgaccgctaatcgtcgtgtggacaggtaggtttagacctagcgcactttgaatctagtgcagtcgtctgcgatcgggcggccaggagggcgtaccgatttgggcgtatggccgggatgatctaggtggccttttcttgatcggacgactaggattggccgatacctcttcggtctgtaatcttcataaagagcccatgctcttcttcgtatttaacccaccgtcccctcgcatagaaagatcaatgtgcttaagtcctgttattcataaattcaaccccaggctttccggaatttgtgtgcgcaatcctgggatttaataaattaggtaaattaatatagaaaatgatttttaatatgaaaataattccagaaacttg

SEQ ID NO: 75822 - DNA, 486 bp, Zea Mays
cgaaaaacctgtggcggaattgccacgaattatgggttccaaaaggccggtccggaagggctcgcgaccacttcaacgaaatctagagcgaggggcaagcaagtgacaggcacactagcggctaggaccctgatgcgtgaagtgtgaatggcgtcactagcttgtgttcgagtcctgtgaatgtgctactcatggtttatcacggagagaggcaacgggccatcgagtccagtcgaacggagttggcaactatatgagtcggtgcctaggattatgaggatggtcccctagcagaccccgcacttggatcttgcaaaaggacccagggcctcactctgaatacccgtttgcagctcaccgagcgccattgctcgaccatcgaggaaagcgtggtttggctcacctcccctcatcactacggaagagatgcgtggggagactaaaacaaaaagatggaacgaccccctagacggatctctgcatcga

SEQ ID NO: 75823 - DNA, 386 bp, Zea Mays
accgtgatcagcgtcgtggtgatccagaacgccgacgaggtgaagatggtctgggcaaagttaaagtgtccatacctgcatttaacgacaaggaaaatgctgattcttattatgagtgggagacaaaggtggaacaaatatttgatttgtatgagtaccctgctgagaagaaggcaaagttggcaacccttgaattcaaaggttatgccatcacatggttgaatcaaatccgtgcagaatatcatcgtgtgggacaggatcgtatcacttgggaagacatgaaaagggaaatgagacgttgttttgttcctgcatattattcccgtgacttacatttgcggctcaaacgccttgtgcaaggtactcgcaatgttgatgaatatttt

SEQ ID NO: 75824 - DNA, 541 bp, Zea Mays
attagaatcattccctctcatttggcaaatcgcctttggaatgatagtgaaggtgcactgtgcacataagtatagtgaattgggatagtgttaaagtgtgctaaaagagtttggaggaataaggtatcgctaatatgaggagatttaaatatctgcttattagcttattgggccaagagatataatgtagatggccataaactatggagacaactcattgacttcaagcatgacacagataggtctaacatcttctgcagctctattcaaattttaataggagggaattaatcccctttaacccctcaattcatacctaactgaacaagccttaagtggtttatgtcaatatgtggacagctaaagctgctaagatggctttttgtgggaagattagtaatgggaagaagcttaaattctgggagggtgattcaagcttagccattcagtattgggtatctatatttagtctatgacaaaactcaggcagttctcggtttgtgggacggttcaaatcttcaatgctcttttagaagatgtg

SEQ ID NO: 75825 - DNA, 805 bp, Zea Mays
tcctgcttatccggagtgtgttagcccttcaagtgtgcataacggcttcgcccaagatatcagcgcttcgatctacgtataactcgggcatccggtcttcgtcttcctggatcgagctcgtccggcctggttgtggcccgatggcctgtctcgctaggcaagccattgggaggcccatcacgtagcccatgatgtgtttctatgttcgtgaggacccgggggatatctatcccccacaatatgcgccttcgccaggcctgtcgcgtgtcagatctgaaagaacaacatagactatgagccaacacacatggatccgatgtggagatggcgaggaagcaaaggaaaagaagtcgggagctgaacaaaaggaatggacaacgacaatgtaatcgagtaagagaaaggaactcctactaggtaccaagccgagggagaaggaagacaccggcggagggactcgatatacaatagaaggtaccagcatgggcatggatttgagggattttggaatccagtgagcagtcctccacctgacggcacatgcaccaagcacaacgatggttgtagagcgatgacatctacaggcgacgaccacgaccagtcattaacaaggaggggcacttataggaattaacgacgaagcgtcggtcgccatgcaggcgtcgtctccgatctgagctgtgtcgatgaaggtccgatcgccgtgaccttaccgtcgtccccaatccgaggcgtctaaatggcggcacaatggcatggcaaggatggacagaacactccccccgtcgacggtagcgacgcccgt

SEQ ID NO: 75826 - DNA, 1018 bp, Zea Mays
atgaggtgatcgaagtgactagcaatttgcaggctcaaatggggttaaaccaagacaacatgcaacttgcggtgaatgagtttatccctcaatagtaatttatcaacgaatcagaataaatggcccccgaagatcctatagatttggaaggggattttcacaatcaaacaaatgatcagtcacatgatttaattttcttcgatcaatcgggatgaaccgcttgttaccttagagccattgggcaagatgtcacctttaccatagaagacctcatggctagaatttatgggcaatcttcaagctcctcaaaagattttaagattagctcaaccccataacttgctcagttattcgcatggtgggaaatgtgaagattaggctaacaagtgacaactacctttaaatttgctgtctaatatggtatggttgaacttctaaaagtgcttatctatcctcgctcctcggcttgatgatttaggcctagaaacggctggcttggcaattgtacctttcaaacctgcatgggctactcaacttctaaccctttaggcctctattttggtttcacctagatctgccccctcattctaacatggatgtctgtactcctgtacttattgagcaggagggacatcaggttgggggcttcgatgcctcctaggggcccctggtggcctctagggtggtgtatgatagcatggtgaacctgggtgcatggcttaaaattcctaggctaacatctatttctaaccctgcttccactagttgtttcttaggtttgtgggagtccaagactcaacttgattatgaagacccaacttgttccactggcagatagacccaagaagaagagtagaatgatttatgaacatgtcaacctagaggcttcgtgtcagggatatggtcctcggttcatggggcccatcagatggcaagcacactggggaaatggccctgacatctgcggcccatcggttagctagaggagataggtaatgtctaccctaaaagacccccc

SEQ ID NO: 75827 - DNA, 271 bp, Zea Mays
tccacaccagatgaatgtataagaagatcaaacacctcacctcacagcaccacgaaacaagtagttctattgaaacaaaactcctaatcttcctaaaccttgttcttgccataatgaaaagataatcatgtaatctaacatactttgcaccccacaaaaagggagaaaatctacagaactaatagagcaataaagccgacaagaagccaataacatcttgcgcagcacagttcatcgaagaaatgccaaaaactctacatagagcactgac

SEQ ID NO: 75828 - DNA, 330 bp, Zea Mays
tttctccaaagcagcttcgtgatctttgactttattttctagatctttaatggtagcttcgtttttctcgtcttcgagatcttgttgcatcctcaacactttacttagtaatatactctgccaaaacaatcttcgtcagaaaacatcttaatttaaaaaataataaaaagttaagagttttaccttaaaattagcatagaacaggctaccggcgatatgctgtcgccggtatctgcagaggtccgcctcaatcttcggtaggccaacattcttcgagaaagtcctaacgacctttgcctcggttcgattccgaaggcacctcaatttccc

SEQ ID NO: 75829 - DNA, 325 bp, Zea Mays
ctctctcgtttgatcggggacgcagagcagagcagagcaacgcagagtagctagctagcgccactctcatcactagtagtactatcgtacaaccagcccagcaacagcagactctcatcattatcgtaccactaccagcctagcagcagcactgcccgccggctacgctactactgcattcccgcatgcttgatcaagttgtagctgtagggagggggaataacatcacaggagagctgaggtggagcgccgagacgagtggatacacgtcatctccatttcaccagtgctgatttaattagtatccatgctgttgtaataataa

SEQ ID NO: 75830 - DNA, 1239 bp, Zea Mays
tggagctggtgctgactcggacgctggctaaggtgccaaggctgctggtgttggagcaggaacattgatggccatggcaggagtagtaactgcagacactggaggcactagtggctgagcactgatagctccgacgacctgagtagagaagtcgagagtgactggctgaagcagagagatagatggaccaaaagactggagctagggtcatgactggatagctggcaccactaaggcctgaagagctggagatggagcagactgcactggaggaacgagaacaccgatatgctgaagaatgtgagtcatgaaggactgatgctccaccatgtcagccaaaagttgatgctagagggtgtcctggcggtcctgaatggtatggaacatagagagcatccactcaaacatctgttgttgaatcgttgcatgacgggcctgctcggctgtcaggtgagcctgctgctaggtaagagatcgaagaatagcggctagagtaggatcaatagctcgaggtgcagccggaggagcagcaatggagccatatgcctcgtgatcatgggaacgaggcggcatagggggcggtggcggtatctcgatatcctcatcatctgaatcggaagaaatatctatagtggcaccctgatcctcgaactagcgaatcacctcatcgtcatcgttgagctcaggtgccaaaggatccattgaagcagaagctagagctatgtcctcaggagctaggcggtagaatccaaacgaaagcctagaggtgttaagagcggcctagaactgaggaggacggatcagctgcacgaagatatgatagaggtagtgcacataatgcagctgatgctgagctcaaagaccatccaacactatagtcaacaacattgaacacagagtgggagaccaaagtgctaaggagctagagctaaatatgagtggtagcctctctgtagcccatcctcagcagaagtgtgcgccttatcagctcataaaggaacatcgccactagggtgaagtctgtaggggagcgctgagaaccttctgtgaatggaggtctgaagagggcaacaacgtgagcggtaccgagagctattccgccgtgagggcgacgagggtctgaagtgtcatagcacaagtcgtgaagcctcatcatcgacttagggaatccaaaaagctcccggatctaagcagtatgcaaagtgacatcctctcgctcgaacccgaacctcatccatt

SEQ ID NO: 75831 - DNA, 694 bp, Zea Mays
tgccataggaggtttggaattcgaattgaggtatgaaatgacatggaattgagccgatacttcacgaataggtttatatgggtgaatatgagttaagtgtgtgcttggtttgaatttaggcagagaaactgaaatttaggcactcggctcggaattgatcgctcgtaacagggaattgtgtgaaattgaagcctggaatatcagattagcgtgaaattgcgcgaatatgttactgaaggtgttgtgaagatgcctgaaaagtttgggttcaatcggagcaatttttagtggttggggcatttcaccgagcatgtggcgtgcggaggtttagggtttcggtgaaaaggctatttgaggtggtgaaaccctccctaaggagctaggaacctacaggggattcaatggagcactagggcacacaatcaagcactgggattcactagaattgataagaatttgagattgagcacaaagggtggaatggaaggtttcactgacctggaaacacagatagagagagagggaagggaagagggtgctcaccgagaggagaaggggagcaaggggagcacgagcacgatcaccacaccggagatccacgccagtgatcgccggagagggatgcaaattgccagagaggagacagccaggagaacagagaagaactgagccctggccacgggctcgggcagga

SEQ ID NO: 75832 - DNA, 484 bp, Zea Mays
tcttcatcggacatatcattgcatagtcttaaggtgttggatggctcttgtattgctattgatgcaatctttcatcctcttcatttgagttgtcttttgatgagtcccattgatgtccaatgtgtggttcccctctatatcttccattttgtcaaatcccttctctccctctctcttatgttcttgttgtctttcttcgtgagggcacaaagcaattaaatgttcggtgctcccacaattgtaataacttctccttttcttatttggaaaccttctcttcactaccttgtatctgtccttcttaagacccttgtgatacttcttgacaaacaaagcaatgtcactaattttctcatgttgcgcaccttcactatcgctttcgctagaggaagatggagtttctatcttttcctttgctttcttgtgtgtttttagcttatttgttgacatagctttgctaaaatttaacttcctgctatgtgaa

SEQ ID NO: 75833 - DNA, 1369 bp, Zea Mays
ctttcaacattttttcaaccttttggttttttctttccaaatatcaatactttttttacttctaacaggcagagaccaattattcacaactaaagacttaaactcaggtctcaacctccaacaaagctcatatctaaaatctcttttagccggagaagtaaaaatcagttttaaggcataaaggcacatgatcagaaaaagatctactaagacctgtaacattcacattattgtaatgcagatcccattctgggctaccaagaaacctgtctaacttctcaaaagtaggaggattacgattattagaccaggtaaaatgacgaccactaagttccaattcaatcagctcatgaacatcaataatagaattaaaaagagaactccacttattagtccccccaggtttgttcttgtctgaatctcttctgagaatgttaaaatcaccaccaatcaacattggatgagaacacttcgaacagaaagaggataactcactcaagaatttctgtttttgctcattttgagcagccccgtaaacattaataaagttccaaataaatcctgattctttttgaatcaccagagtctgaatcataaattcacccaactctttttctctaacatcaaacatgtccgaatcaaatcctaccagcaaacctcccgacctaccattagggggagaccaaacccaaacgaagttcctattaccactaatgaaattcaaccacgaatcttcaaaatctttcttgttggtttcttgtaaaccaataaagttaatcttctctttcatgataatatcacgtaggaattcacttttcacttctttaccaaggccctgacagttccaaatcacaccaatcattctgaacaaatcagggcatgaccaccagtctggcctctcctcttaatagggatgttcctattattgggagatttaccagctttatttttttcctcacagttttttcctgtgctgaattttacgaccttttctcaggaccataacatcatcaagatcagacaaatcatcatccaaactatcattatgaatattattatctacatcagaagcaatgtaatcaacattggaattatcaacattaatcttaacagattgaacaactaaatttttcctagatagttctaaagatttaatcagatttaaattttccatagcatcattaaaagaagatcctaaatcaactccaattctatgagccacatccataagaacagcattatcagtattcagaacagagaaagaattgtaggacgtacctttgttgatgaaagcatctttagcaatagctcttgcagcaactttatcagcaattttcatttcctccgaagattccagtctgctgctcct

SEQ ID NO: 75834 - DNA, 854 bp, Zea Mays
tgcaatgccgatttgtcggtatcctcgatatgggataccactcctgctatgtccaggtgagaacccaatggctgccatcaagaagttccggggtggccagtccgacacggggttaaggcccatcatatgaagttgtggtctagcctaggctcgtttttgggatggaccgcctccgccacaagccccataaagggaggaatcgacaaacctcaactataggtcacagttcctatgagtgaaacctggaccacctcatggactcatcggattcctggagaaagatgttcgaaggagccccacgaccctgaaaagaagacactctcttgttgcagcaccgaatctctgggatagttctcggaccagtatatgacctcaactccggacccagctcccttgtaacgtgccctcccttggattataaaaggggaagcacttgcgatgcagagtggaggtcgattgacactctgacccactactcacaagctctcaagcaatacaactcatagtggatatagagtattacactctgtcggcctaaaccactctaaatcctagtgttttcatattcatcagttgggtcaggtaaatccctaagtccctcctaatcttaggatcagggcgggtgcactccgacaccgacctaaggatttcccctccaacatttggcgcgcaaggtagggagcaagctctagatcctggccccttgattgatatgacatcccgctcaccttctagcaagcacgaccaaggcgatcttgccgacatctggcgcaaggtgaagaagcgacgcctcaagcggctcaccattgatctcaagcagcgccttaacaggcgcgctgctgccatcatacgac

SEQ ID NO: 75835 - DNA, 396 bp, Zea Mays
aataaagcaccaatgtataaaggccgttttggattgtatctttctcggccacgaccatttgatcaatgcatcagaatgaatagaatggaggtgtcccccagcctggatagacaaagggactatacatgtaccatggattcatcgtcgtgccattccacatttgagtaggacaatataccgacgatgaataaacgggaggaaagtaccctggtctcataggatgaacaggcgatgcttgtcgcgtagccttttggggcgttttgttcggccgtttcgttttagcaggtgaccgaggtttctttgttgaccgatcatgtggaacagtctttttgctagcatttttggagagcaactgatcaaaagtagggtcggctttgatcagccgactatatgtgc

SEQ ID NO: 75836 - DNA, 433 bp, Zea Mays
cttccacattcagaccactgtgcaatttttactttagcctcacaaatttttaggagataaatatttgcagtcacataatcagtcccagaaaaaaccttggtaatttcatcaaacatcttcagcctatcaactactaacttagaaaaagaccattcttccttactaggtgcacaatcataaagtttctcaacccgtgttgcacggctaaaaacagcctcgtatggtattgcaatagttagcatcttgtatgtagagttccacctggttttgcaatcaaggcctaacttgtgtactataggtactttaacaaacttggccatatcttcaaatttctctactctcttaggtgtggctgtccaaaatgctacactttcacgaatcttttttatcgcgggctgtaccacatctaaaccatccttcactatcaagttaa

SEQ ID NO: 75837 - DNA, 639 bp, Zea Mays
cggtgacttatatcgggctagaagttcatacttcgagaacaaggcatgttgcataatctattgtttcatgaaagaatctggtagtaccaggtgattttgattcactaagctccaccaaaaggcaaggggcatgtgttgagcaccacatttggcacctggacacggatggacgatacgcgtccgggatcagattaactcgggcgagagtacttatcccatgcgtggttatcctaacctacccatggaaatctgttggatcccgcctaggaacatatctagacctcatattctataattataaaggggtgcgggcgattgagaacctcgaacacattacaatcgaacccatctatttactttatgtatcattcattccttaggagtagatgtagggtagtcctagttgtagctccacatcccctatcttcacctctatttaactctacgtcgtctagagccgtcttgggtggcttgctgacctcaagacgaccctaggatcttaactgacaaggtccctccagggggacaagattcacttcgtccacttcactcaagatcttttcctcgacctaatttcttaatctctaggcaactctacgccgtctggggacctccccgggtggcctgccgaccttagag

SEQ ID NO: 75838 - DNA, 497 bp, Zea Mays
taaagctataaaagtgagacaaatcagtgttggagaaagacaaattatggccttgaaactcatggagaaagacaaattatcacgttatttaagttaacacgccaaatttcctctacctaataacattgctattactgtagctgtatgcagaaagtataaacacctaggtgctaggctgagcctcatcgcctagcatttaaaaaaacattgagtatttgctgactgaggtatactttgagagttgggcttagatatgttacagatgatgctaatatatgactttctttgaggggtcctcgtaaaccaatcgggcattgccccaactatccttgattttatttgtctgttctgctgtagccatgtatccattgttgtcgttgagtacctttgccacggtttagttagttatctcactgcgagttgtcctccatcttgaactgtcgttactcacatgtgatgttgtatcatatttttcttcatctatcgctttcgatcct

SEQ ID NO: 75839 - DNA, 447 bp, Zea Mays
caataatttactaatacatgaagcagatcttcgtattgttttacatataatatggattaaataaataatacaatgttatacatatagtcctgatttttatatttatgaatcatgaagacttgttcttcgtgaccttcgtccaagattcattataccagaagggagataatgtctcgaaggatgaaggtatttaacgtttaactattgtgttgccttgttttatgattcacagcaatcaggaacaagtgaccaacattggcgcccaccgttggtgaactcagcgaccaccttcgtcaagcaagctcgacagacacctttgttatgccaccaaagaaaatggcgccaggggctcttctcgctcccctagacaataaccaagacaaagctcttttaagggaggctcgaaaccataagagaaaggccacaagtccaactccacaagatgaa

SEQ ID NO: 75840 - DNA, 498 bp, Zea Mays
ggctggaggtgaccgtccatttcctaccacgctcgccgaacagtcgcaagtattcaataagcaattcaaactgcctgaaaatgagtcaggcaacaaatgcctcttcgcgtaacacgacaccatctggactaaggtcaactgctcgggcgatatgattacaccccgcgatcacatcaagttactactccaggacggtgtgctaaacgctctgcgtaccaagacgtcccttggccacacccattggggggacggccaggaattttcaatagattttctgaacaagtcacatccatacagtatacacaatgaatgtatcgaaacagaaggaagagatcgatagagataaaaggaaatccaaatatagctactgaactgcaagtctagtcagcagaagcattgaagcacaaagcaaggtgaagaccaaccaagagccatctaccagacgtccaatctatcaccgatcaaataaatttcaaacctaacaaggcatgggcagac

SEQ ID NO: 75841 - DNA, 565 bp, Zea Mays
gaggctttcccttagtgtgctccctgatggatggtccctagggactaggaatcatatccccgacagtagccctcaagcccccgagaggagtgtgtctcccttcgtgagctgacaacaggttaggcggcccttcatccttccgccttccaagtgatcatggtgtttattcctcctcgggactagggttgtttttatggtgattggtcgtctctcgaggtggattcaggcgcttccccgcccctttataaatctcgagcggttgttcgcatgctggtcaccctcggcctccctttcgcttcagcctcttccttgagcacacctccgaccgagttggtggtcagaactcaggtcatgggaatgtagcgctctttgggccacgagcctaggtaggcttcttccattaggttcccttgactcccttctcacgattgacatcgttttccctcctcctttcatcgcactgcggtcaccaccgaccaaggggttgcgtcatcacccgtcagctcactatggctgggctcctcgtctccttacactctccctcaggtgtctccaaggatttgcg

SEQ ID NO: 75842 - DNA, 1227 bp, Zea Mays
gatgtttggacaaactcagcgtgggagaccatacaatgtgcgctccctaaaaatgcccatgcaagtaaaataattctgacaacacgaatcaacagtgtaggccagttctcctgcactccagatgagggttttatctatcagatgaagcctctttgcagaaacgattctgaaaatctgtttctgaaaaggacactatgtgataaagataagtttcctgctcagctggaggggattaaaaacgagataatcgagaaatgcgatggtttgccactggctattgttactctagctagcatgttagctactaaacagagaacaagggaagaatgggagagggcacttgattcaatccattctacgcacaagaaagatagtagcctggaagtgatggacaagatactgtctctgagttacagggatctacctcacaacatgagaaattgcttgctgtatatcagtacatttccagaggaccacacgatttacaaagatgctctagtatggagatggatggctgaagggtttatcgctgaaacacaaggctttactttggagcaggttgccgagggctacttctacgagtttgtgaacaggagtttggttcagcccataaccttgcgttcaagatatgaaatgcgtggagaaggaggttgccgagtccatgacattgtactgaacttcctcatctctcgtgcagctgaagagaactttttaactacgctgtatggcgcccagggggttccatcttcagaccgaaggattcgccggctctctgtctgggacagtccagaacacgcactggcagtctctagagcgaccatgaatctgtcccatctccggtcagttagaatatgcaacgttggagactggcccgtgcctgctgttctagacttacctgtccttcgagtgttagatctagagggatgccgtgatctgaggatcgtcgaccctgactgcattctaagcttgtttcatctgaggtacctgggtttccgcagcgcaagtggtgtcgtgctaccggctcaaataggaaatttacaccatctgcagaccatcgatttaagcgggactggagtgacacagctgccagaaagcattgtccagctcaagcgactgatgcatcttgttgggcaacggctcatcatgccagacgggtttggtagcatggaatcccttgaggagttaggtactatcgactgctgcaagtgccccgtcagttttggggaa

SEQ ID NO: 75843 - DNA, 477 bp, Zea Mays
tgaacgccaccttctaccatcgccggcgactctccagagccggccatctccacctccaaatggttatgcaggctttgtggtgttttttccgatgaaaggaaatcacagatactatacaagtaaccgcatccacgtttccagagtttttccattattttccgaaaccgtcccgatactctagcgatgtacatataaaactaatttccctaacacaatacttacgaacaatgactcaacattttatgccacaacgtatatactatttatgcactttttgtacattaccgattttatgacatatccttcaacatcttattctacattctatttacccgccaccatgcaagatccataaatttcgcgcccacgtaacagagtaatcacgtttgcatgtggaaattattccctataattccgcaccacttccaaatgtttaccgccttgccattgaaccaaccgcgtaacggcgtcgtctgc

SEQ ID NO: 75844 - DNA, 384 bp, Zea Mays
cggcggcgccgtcggcgacgggttcccgagcaagcatcaggaaggccctaatttataacgcgatttggtgcgaaacaaagagggaaaggtggcgggcataatggtggggatcctaccgaggattagatctctagaagtcccctcaacggcgctcggcggaagttggtccacgaagccggcgagcaatttgttgcccgatgatcaccctcaatgctcagatgatagcggggaacgcgcggcacacacagggcaccaacctccccatgaattgggggctcgagaatgataatctccgaagtcgtcaacagcggccaacccgtacaccgcccaaaggttccagctacgatggggtagggttctctagttagtatctcgctcgccgaa

SEQ ID NO: 75845 - DNA, 303 bp, Zea Mays
ctgatgaattctgtcttcatgccggaattggacaagttcgtggtggttttcatcgatgatatcctggtgtactcaaaaaacgaagaagaacatgcagggcatttgcatgtagtgcttcaacgtctgcgagagcaccacttttatgccaagttatccaagtttgatttttggctaaagaaaatcaaattcttgggtcacactatctctcaggctggaatagctgttgatcctgataaagtgcaagaggtgatgaattggaggccaccaacgactgttcgccagattcggagttttctgggattg

SEQ ID NO: 75846 - DNA, 304 bp, Zea Mays
gcgacgaagacacctaagggtgcaaaagcttcccaagggcgccactggattcaaatgaaatcttggtgaagacacctaagggtgccgccagattgaaagaaaatcttggagaagtcacctaagggtgcagagccgcctaaggttgccgccagattgaaacaaaatcttagtgaagtcaccttagggtgcaaagccacctaaaggcattaccggattaaaaaaatcttggcgaaaacaccaaacggtgcaaatgaggctaagggcacaagaataaaagcattattttgcaaatacatcccgaaga

SEQ ID NO: 75847 - DNA, 601 bp, Zea Mays
acgagattagttgaaaagacctcatcagcaagaacgacagaacaacccgggcagactgaacagctactaacggagccattaacagaactaaccacaattgggtgacccatcctctgcactaaaagaccaacacgtgacacaaaattctccgaaataaacgaaaaaactagcaccagagtaaaaaagagcatgggcatcaaatgaatcaactgagaccgtacctgtcaccacgtctccctgctctctgccatccgcagagggtagcacataagctctagaaacacccgtagaagaggaagctcccggagtgaaattaacagaagaaccccatggagttgcaggatgaggcagacgtggagctccaaactgggatggtacaggagcggccagtgcaggagtgggcgcgaccaggtactgagggaaacctggcataggcacgaactgagaagtcccgggcatatagaactgctactgagggggcggtatagaaaattgttgctcagcgcttggcatcatgttgagagtgccctgcgaagaggaagaagtcactggctcctatttaagtttcccattgggattcctcctacactcgacacggcga

SEQ ID NO: 75848 - DNA, 639 bp, Zea Mays
aaactcttgaaaactattacttcatcattcttcggttccgggactatttcgccacatgcgaaccttatcaactcatcatcattctttccaaaatagtcgagtttcttcattaaaaccaggtcttctagcttcacagtagatttgtcaaattcaatatggctaggcttactcgggttcaagataccatcattctcttcatcatcaccgatagcttcggcatcaatagtttttgctttggcatcaacggtatcattccttggcacagattcctctcccttctgaataatcattccaaaattcctcataatctccgagatcgaagctgtctcagtagcttcagtttctcggccctcataatctccagtatgcctagcagtagacctaatcctaaccatttgagatcttaagacgaagctagctcacagttgttctagcacttgagtcaaagaatagttaacagacgaacagagcacagacactttcgatcgcagtaaaaaatttcagcagcacaacggtgcaattgcaaggaatgctgtaataaattcttatcttaccaaccaatatgtttatatagtactgcaggtgaagaaggtgaaccgtcgtaccagttacactaactgattggtggaccgatacttg

SEQ ID NO: 75849 - DNA, 746 bp, Zea Mays
gttgctttagatcatgatacatcttagtgctttcaggatgaatagaatagcgactaagatgcgcttcatccaaaatttgttggcggatttcttcattctttggcaccactatgcggttgttgaaccatacaatgccttgatcatcttttctgaaacatttggctttttcggcctctattttctcacggatgtgcctcataccctcattatctttttgagcatcaattatcctttgtaaaaggattgactcaagctttaattgatttaaagttccatgctgaatcattcccaggttcaaattctccatttcttggcataacataatgtcagaagtttccattgtaagacaatgacaaaaagtcttgtgactcaaggcatgtgccactacattagctttgcatgggtgctaatgaatctccagttcataatccttaataagctcgagccaccgcctttgtctcatgttcaactctgactgggtgaagatatacttcaagcttttatgatctgtataaatgtgacagatattacccagcagataatgacgctagatttttagggcatgaaccactgcagctaactccagatcatgagttggataatgttcctcatgccggcgcaactgccttgaagcataagctatcactcggccttcttgcattaaaacacagccgagaccactgcctgatgcgtcacaatacacatcaaagggcttttcaatatccggttgagccaataccggagca

SEQ ID NO: 75850 - DNA, 1492 bp, Zea Mays
ggcaggggcctctgcgcaaagatcctaagacacagtgcgcagacgcgagggatggcgggttggttcctaggaagttcagggacgttttagtaagatgtacccgcgaaggggtatcggcccaagagcaccgttgaatgcgagatcaatggcacagattagaatcgaatcgctacgtcatattagccatcggatcaacgatcaatggctatgctttttaagatgatgcgatctactctggatcaccggatccaaatctaacggcctgagttcaatccaggtgaaggggtacgcggttctaatcttgaccgttcaatctaaatctggcgcccgcaacatcatcaaccctagatcaaatcttggtccttggtctgtgatgaacggttaggagtgcttctccaaccacggcggcgccgagcgcccccacggcggcgctccacaatgagcacccgattacagccctctggtgcccgattctaagtgacgaatgcagctacacgagaaggggaaacaatcgaacctgttagggttaatcattgggtgagccgagatgagcagacgactgtccatatcgaagggcagatccatggcgggtcatgaagtttagcaagcaattgcgggcacaaggtggtctcccgcgcgccctggatcacccgagcacccacccagagactcgacgaacaccataggccatcctccaggcacagatcgatggtgaagccaaggtacgatggtggcggcaactctcggttcgcgatggtgggtgatttctctgcgaccggcttctgtcgcgtttctggtagatggataagcgcacgacaaatttatagcgtcgcatgtgttctgcaagagctggcggctggggaggataaacttctggccctggcggatcgacgacatgccccgagcaggagggcgaaaggtgggcgccgtttgacggagagtgagatctgcggccatggacgcaggagtgcgcgcgacgtggatatttaagcgcatcactggggaaaatcgggatggaggtggtggcttaatcacgtccggcttctacgcacaccgatcgactgaatttgttacagggtgggagactcgttgacggctctggttgttgcgatttcatcacgcctagcatggagctgagtggaggaggattctaggtattggggtcccaccagtcagcagcttcaatcgtgcacgggtgaatcagtagagactagcgccagagactcgcgtgcgacgatgactttttctcccgcggcgccttggcggatgggctggcatcgaggccccacatggcagcgacaacgagagatgagagtgggctggtggagttgttattgggctgaaggcggtttgaggcccaactagcgcttaatccctttctatttctctcttttgttttattgtcttcctttcctttctatttttggatctcaaatttaaattcaattttctgttgtgaattttgtaccttgattaaatgtataaattaaag

SEQ ID NO: 75851 - DNA, 436 bp, Zea Mays
ttcagggcgttacagcaccgaagagcagtctagcgccaacatgatgcagcatgctggaaagaagaattatgagcccaatcagactaatcaattcaagaagaagaagaagatgaacatggatgaggttgtgtgctttgtttgtggtgagaatgggcacttcactaagaagtggaagaaacgcaagggcaagaagaattagtcagggcagaattatgccaacgtgactattggcgatcctagtggatctaggcacgataatttacagtatatatttttgtatgttaatcgaatgattggtggatagatattcatgtttgtactgatatctccatgttttcatcttaccaggtcaggcgaggttcaaccgtcatgatggggaatggcttgcatgctactgttcttagtgttggtacggtcgatctaaagtttacttcag

SEQ ID NO: 75852 - DNA, 564 bp, Zea Mays
atgaattatagtgcttggactggtgtgtagatttgctttgcgtggaattgacatgctcgacatctccttactagcttagttgtattcttgagactattggccagtaaaatccttatcgacgggctctactaaccaacatgcaagatgatgaatggctaccacactctcccttagggatgccaatgagtataccattgtcctgcctacaaaaacacaattaaggaggatcctgcttgcgccacatcattagaagtcccctttgtgggggatggatatctcctgagtcaccaagaagtggacttgcttcttgggccgcctgaaagggcccgataagtcatccaagggacacatcgtgggcctcgacagaaggtaactgaagccgacttaaactcccatgtatcagatcagggaagccaatagaatgccgcaagactcggtctgcacatgcaggtgggcgcgagctttgcaaaagagccaactcaatgctggaagactctgtgtaatcacaacaggtagtggatagactcacataagtgctctaatctgtacagggatatctcctta

SEQ ID NO: 75853 - DNA, 399 bp, Zea Mays
gtgattcgaggttacatggtcacgtgaacaataaaagtcccccttgcgcatgggcattgtgcccctatttatagaggcaacactatgtacaaacttcctataaaattacaatcatgacctcgaaccctactcatatgaattataaaatctgataagggtattgtcgttctttcttcttgaaaatgtgatgcacacgtcgctcgatacctccttcgtttctttgtgacctgcttttgacaccacaacgtgctttggctacacattaatgttgaagcttccattttccttctcctttcctgcataaaaggttgttgcgacgaaggctaacttgttaatcctaaaacaaaccacaaagcgattaggatttgttagttttgagcacctccagtagaggcacac

SEQ ID NO: 75854 - DNA, 425 bp, Zea Mays
gaaagggtgccctcattggcgaccctcgagttcctgatgaaagtaaggaaactatatccagaaaggtcgttgccgaaaagaaaccaaacgggggagagacactaaagatcaccatcaaatcctccaacacaaggggcaagcatagaaagaggggaggatcaaatcccctattctacgcatcacggacggttcagcctagaggcgcagacggtctagttcacccgcagatggtccgaccagtcaaggtggatggtctagctcgaccagaggcagcggcgaccataaaccttcaaacctcgatggcctgaaataggtacgtgaaagcaaaacacgactaaggcacttggtcggctaattaaagccagcccaacttttgaccagctattgtccaaatatatcaatatggtcggtcgtcatgattagcc

SEQ ID NO: 75855 - DNA, 345 bp, Zea Mays
ctgaattagagattcactatcacccaagcaaagctaatgtagtggcagatgcgttaagtcgtaaggctttcggtcattgccttaccatgaagacttctgacattacgttatgccaagaaatggagaagttgaacctgggaatgattcagcatggaacttcaaatcacttgaagcttgagtcagtcatcctgcaaagaataattgatgcacaaagaaatgatgagggaatgaagcacattcatgacaaaatagaagctggtaaagccaactgcttcaaaaaatatgatcaaggtattgtatggtttaacaaccgcatagttgtgcctaaaaatgatgaggtccgcc

SEQ ID NO: 75856 - DNA, 440 bp, Zea Mays
tcgaaagaggtgacaattttttggaaattttgtgccaaggggtatatctaggccaacgattccccaacattgtcgtgcaaatgggcagaagaggaacaaatgctctatggtttcttctacttccaggttgcatagctcacagttgtatgactgaatattcatgtctccttcttaacatatttatagttcttaggcgatccttaatcagcaaccaaaaagaaaacattgtgctttggttgacaaaatcatatccataactatttgaaggcaagatccacctcagatgcccaattagtgctaagccttggatgaggacaagacattggaccttatctattccccgcacataatctccatttaccaagtctcacccctctttttcattggaaagttttcctaggcactccattaagcatcacagcagaggttcctgattcttc

SEQ ID NO: 75857 - DNA, 398 bp, Zea Mays
taaaaactaaattctataatcatttctctgtttttaatcatctctggactaggcctcgatttccagaaaaatcagggttcacggtgaaagaattcttaagactcagggcaatggcgatggatggcgggttgattacctaggactgtggggtctcttttgcaaactgcgctagccgaaggggtacgggggtatcctggccgttggatgccgcgcgagtggcgcagattagaccacaacactactggcacaggacaacgtggtaaccgcaggatcttgattatacggttcggatccaacacccacgtggaaaaatcgtgcacgccatttagcagatgaacggccagagatccccggaacgaaggggtacgccatcaaactaatcctagccacccacatcc

SEQ ID NO: 75858 - DNA, 287 bp, Zea Mays
cttggactaaggcattgaggaagcaacacctcaaaagaagacattatgaagaccataagtgaagatcaacaagtatcaagcaaagtccaagacatgaagaaagtgtagccactggcggaccgtacaactgagagcaccggactgtccggtgcaccatggaacattagtccaacggctagttcatgatggcactatggaggaaagacaccagactgtccggttagacaccagattgtctagtgcaaggctgacacgtggcagcggtcacctgcaatggtcaattcaac

SEQ ID NO: 75859 - DNA, 440 bp, Zea Mays
ctataaggtttgcgatacgactgtcctatgcctgacacactaacactgtgtttatctctaaacaacccggctacctcgtccctaattctttccaccacgtctggcggccctacattaagtttgtgggtggaaatctcaggttgcctgacatcattctgtcggtttccctccaagggatgtccaagatgtgtggtaggtgtcctattaacgccacaccttctgctctatatctctcatggtctctggtggccgaagaatattcggccctatgttcctgtggtggcatggcatggttacaatatgtcgccggtggggcaccatagtgttgctgcgatgagtgtgggaactgtgtatattgtgcaactctcggttctgcatacgcatacccggacggtctggcgtaaggggtcggacggtccacgaccgggtcgaacggtccg

SEQ ID NO: 75860 - DNA, 1090 bp, Zea Mays
caatttttgtaccttcagactgttatatgcaaggctatccgcaagatcgtccttcgtcatggcgcagaggccagcttcaagcttcgggaaccccatacttctgaccatctcctggcagacagataattctttgttgtctggcaggcaatacaagaagtcatcttcatctgtgccattaaacactaagacccctttcgggtacttcagttctcgggcatagtgtttagcttcaaaaatttcttcttcagataatctttttcccgaagtgtgtcgaataatataatcaaggacttcggaaggcgcttagggagtaggagcgacagcttttccaggcaaaatctgttctatagcttcttcctccgctgccttttctccaatttccgaggatttctccttggcgggctctgaaggcccagcttcggcgtcagcctggctcattgtagctttagcttcggtcagctttgtctcggtttcaatctgcgctttcgaagccttggcaattttccctggagtagagcttgaagcttttattgtctccagcacatctagtacactagccatcctttttctcttgggggtcgctgctagtcctttttgtgtctttggcatctccactcctgccgaagggcttagaacttctaatgttttcgtcccttcgattctcggttcttcaattttgtcagtctttggcattgcagccggctcttcaatcctctgcgtaagagcaggtcctttggcttcaatagctgaagaagtctcaccgccaaattcaggcactatggccggctcaatgtagcgtggtcggtaagtaaggaccttcagctttttcctcttcggtgccggctcgcttgaaacagctgaagcggcagccttcctagaggttgcaccctttcttttctgccctcgtggcgggtagcgatagtcagtgtacacaaatccaatagcatcaaaaactctatttagccttttcttttttcgcctctcgaaggccacagatagtgcattatcttcagacttggagtatgctccaagtagttcatcactagtattttcaacacacttccgccagtcatcatctggttcgataaat

SEQ ID NO: 75861 - DNA, 1289 bp, Zea Mays
ataaaatatggagcaatatgaccccaaacctgctctgttagttgttctaatgaacaatcacgatggtacagtgcacacaaatatcagcaggttcagagtatctcgccgcccgtgacccttcgccgtgattggtgctgctcgccacgattcgtgcttcaggtctgtggattgagctcgctggtgaaaagatcacgccgcggataggtccgggacactgtggctgcgttgtccctcggtcatttgcgccagcgacgtggccttacggccgtcaccggaatctgcgttgttcaacgcgattgcgccacgcctcaggcctttaaccacgtcgcaatagctcgggtcgtctatatccggtgatccccggagagccggcacagtgaaagccactaatcttgtgtgccagtgacccctttcttcttcgaccaccactgcaccaacccaaattcacgcgccaccgcccctagagcctataaattgagtgtgccgtcgggttcgtaaggtagtcaagcacccaatccaccaagtcgtgcctccaattactcaccagtgctcaccaatttggagttttccccaaatcgatctaaacaccgccacgtgaacacctcgctgtggctagctcgtctcaggtccgttcatgccctctattcacttgtttcagtgctctgatatgctcctggtactctctgacctggccaattaagctaggacccataggatcaccgggaacacattggattgttcgttgattgcacggtcaccgtggacagagcgatttagggttaaaactctgcaattgtttgaggggaaacacttgttaagggttgaattaggtctcaaccgaattagagtaccggtcgttaagtattgtggccggtttaagctcgtcggagctcggttctccgtcgtgcgacgtcgtggactaggggatgtgaaggagtagaagcgcagcggtgtatctgcaaaggtcagcgagacagaggaacagtgggaaggactctttatagaaatttcaaaccgccagggttccctgcgcaaagtggacaccgcggcgggggtgtgcacgactttgcctaggcatgggccagagtgggccggtttcagcccagcactgtagaatctttttctttttccttttctaccagagttagagaattcctagaaaattatagaaaaataccaaaccaattttgctaggcttctatttttcgatagtatttaataaaaatagtttcatgatttttagttccaatagggaattttgggatatttaaaatagccaaaacccacac

SEQ ID NO: 75862 - DNA, 1001 bp, Zea Mays
cttcttgacacatattttgctcagtgctgcatgcatagtgaaagagaaacatcaaaagcatatcactgcatatcatactagcaagatcttggcggtaccgaccgtgttggggctgtgaccggtcgatatcgcctgtcgtgctgctaccacagtcggtagcggccatgggttgccacgtggcatgatctaatcagtttgttctatttttgaattatttttttaaatctggaacatggtctataaatagaggagaattgcttgagctcattcacatagccctcacttcaaatttcactaccacctcatcattctcctctcacactcgtttcattccaatcaagcgttgtaatgatgtcttcatccagcttcgacatcgacatgacaaaaaaagagttgttcgagttgtcacaactaagtataatgcagcagacgatggatcttacctctgagtcttccacgttgagcaggtgagcgaggcaacgttggatatacatctgccatgaccatgaagctgcccacggttggttgatgcgacgcttcaccaacccatgcgtctatcctccgctctactttcgtcgaaggtaccacatacgaaggagcctcttccttcacatcttggagaggctgggtgagcactcccccacttgactctttgaaccgatgcaatcaaccacaatagtttccccccaccagaagtgcacaactgccgcttgcgtaaggtagcgttgcccactccatcaatgagtacatcaaaatagagaaaagttctaccttagagtatctcgaacgtttctatacatgtgttattgcttgtttcgggggtggagtacatgtgtcattccactactgaagactttaggcgtctattagctaaggaagaggaaatgggatttccttgtatgatagggagtatagattgcatgcattggaaatggaaaaattgtcccattggatggatagggaattcacaagaggggatattggatccttgaccatcaagc

SEQ ID NO: 75863 - DNA, 466 bp, Zea Mays
tccgaagcttcttcgtcgaattggggcctcccaaagccgcaccacatgcccacccatccttggccaccttctgaagtcctaacggcaccaagaagacgggcaccagaggtgacatccaggccatattctttctcgccctctctgcttcttcgatgttgcgtacatggcggtccttgctccacaaaacaacaaggcttgggttatatagtcacccgggtgtgcgatggtcagcttctgatcgaaatcccagcaagtggttgcagctgagcgcagaattcgcgcgggtggttgagccatggagctcggaaatcatgggacgtcgagcgggttgttgaggatgggataagcttgacgagtgggccccaccgtgaacccgagtccgcgcgtgagcgcgaagcgaagctgcggtgcatgcacgacgggacacggagaatcgcaacaaactctagagaaggggaacatctgt

SEQ ID NO: 75864 - DNA, 897 bp, Zea Mays
ccaactcataaaatttcctagactcggattaaacctgtgatggactgcaggttaattataaataagtccgggatctctttacaaaagtggtgggaccgaaggggtatccagaaaccctggccgttggattagatctggacggctgtagatcacgccagacacagaacgccaatccaactgcaggatccaaatttgaccacccagattctaaacaccaaggttcaccccaatccgtccgatctgtcattgcgcactagacgcgatcttccccgaagcgctcctaggatctaatccaaaccgttctccttggaatcgacggctctagttgtttccccccgaatgagcgaccagggacggtggcgcgctcagagccgcggggagaactccggtgaggtcagctaactaaggcacaggtgctccaaatcgaacgcagacaggtgctacacgaagactaggaatctgtgatttaagcgaggcggacttaccggctaatcgtgatgcccagaccccccgcccacggcgaggcacggaaccagggtgacgaccctcctctggcgagcaattgagggatgtacggctaggtcccgccctcccgacgtggtcactcacgagcggtacgattaggcgaatctcctagacagtactacaagggcacgacgacggtgtagggagtggtcgacgacggcgacgctctctccctcactgtacacggcctcagcagtgctagcgttcagatgccaatggaggctcggtctgagggttggggacgtcgcaaggggctcgattttatagctagggcacagtcgggtcggtcttggacgcggtcagcagttgggggaggtcgcgaagatcagattctgttgcgatggaggaagatctacagtatcggggtcccac

SEQ ID NO: 75865 - DNA, 947 bp, Zea Mays
cagggatgccacactcgctgagtcgccgtcttgtggggccgtcttggtcagcctcacgtcttactcaggtgcgtcgtttacctttcactgacacgggggtcgaactcgtcagatcctcctcccaacagcatgaccgagctaggcagaggggtcgcgccattgtcgcggggtcagttgcggcccgaccctccgcacgcttataagggagggaagcagtgctcccgactttgcccttctcctccctccacctccctaaactcgcgaccaccccagttcggccgtggtgaaaacgacgccggagagatcaagatccgcgccaccatagaaattcgtgggttggtaacagttcggggttctctggtgatcggtgaagtattgccggtgctggtaacggaggttgcggcttgaaacaccacggcgcgctggtggaatttcactaattcctcgtcggtgtcgatcggcggaaccgcgtccaccgtcatcgctgcttgtcctcaacctcatcgttcccgtggtaagttggccatggctcagttccatttctggttcgcaacgcatagcgagatttagatcgggttggggggcagtagggctggaaatcgacttcatcggtggcctctctgccgtgtggggcaagcagcgccgcccaggtcgttgtgggtgtaggtgagggggtcctggccatcggatgcaccaggaacgactgcgattagaacattgaaataccccttcgctagatagatctggcccattggattgtaatcggatgacttagatcagatcgggatgaggacgcgcttcatccgttgatcatcgatctaacggccttgggcgctcgctgagtcacttaaacctaaatctaatgtgatttgtccgttttggatcggacggctcacaggagccaatacctcttcgctggccactttgctaaagagccctcgggaaac

SEQ ID NO: 75866 - DNA, 310 bp, Zea Mays
gtcaagcttgatacgaagaagtgaaacgaattataaattgggacggatgaaatatctcttttgtcacagcgacgacaatctctatctattgcgtcatgcctacatatataggttctgagaagcgggaacatactcgtatcctgttgtacttgtagatgtctcccccagcaacaaagcagtttttggtacttgcatcatacagtgatgcaacagaatcaaggtcggcatccacgttgtgcctccccctccccgacgaggcgacgactcaccaagaccatagcagtcgactgttataccgggcagaacgaat

SEQ ID NO: 75867 - DNA, 827 bp, Zea Mays
ccagggggtctctcacgttaaaatgcctgaccgaaggggtatccaggagcctggaccgtccgatccaatccgaatggtccagattagatctacatcctgttaaaccggtatgcgccatcagccgctggatcgagatccaatggccgggattttatgaaacccaagctaaccacaaccgccctattcgagatctatggtcctagagcccatcacgtctatctctactctcggcgactcggatcaagatcaacggatcagatttaacaaacaaagcgtatggctttgtctaatctctaccttcaataccaagatcgacggcaggaagcctctcttcctcccccgacaagaattggcagcgccaccaagcccccacggtggcgcgacattggagcacggcacacccatcaccctggtgcacaagtcttagtgaggttaagtaataaacggagcaggggcaatggagagctgaatgacttgggtcttacccaggattgcggcggccatgatgctgaccacaaaggtccatggtccggcgaccgaaagggaaccacgacgagcaatccccggtccctacggctccgttcacaccagacgataccacaaactgcaacagcgcaacccggagaagctccatgtccaccgaccggagtggcagcgctggcgtaccagagttgtctccacggcggctctcattttcaccttatttctctgcttgacaccatggctcaccgcgcaaggaaccgtgatggagttggccaagggcggccccagatttatagtggcaagggcggagaccgtgcggtggcattcaaccagccaaagccgaa

SEQ ID NO: 75868 - DNA, 1051 bp, Zea Mays
gcctgtatgcgctgggggacgccttcgacttgacgatgaatggaccttcccactttggctccagcttgccccgtgactctgtccgggtggttcggatgagtacgaggtctccttcgttaaattctcttgggacaaccacgtggtcgcgccagaccttcgtttgagcttggtatttgttgagggcctgcagggcgaagacgcggtctccgtcgatgaggtctttggatgttggctcgtcgacgtcgggggtggctgatgcatttgttcgaggtgacccgtgctttatttcctgcgaggtcatggcctctgatccatatagtagtcaaaaaggagtgaatctagttgcccgacatttggttgtgttgagtgcccagactacttcgggtagctggtcggcccatttacccttcctgtcgttgagaagcctcttcttgatggcagtgaaaatctcgccgttggcgcgctcgacgacgccgttagattgcgggtgatatactgaggcgaacgcaagcttggtgccgatggagaagtagaagtccctgaaatcctggctgtcaaactgtttgccgttgtcgactgtgagctcggacgggactccgaatcggcaaacaatgttttgccagaagaacttctgggcagtcttcgacgttattgtggatacttcccttgcctcgatccacttggtaaaatactcgacggcgacaaaggtgaacttgaggttcccttgggctgtgggtagtggcccaacaatatccagcccccagcgttgaagtggccatgtgtgggcaatcagctttgtgtattgcgaaggttgcttgaacggggagataacttctggcaggcttcgcacgacctcgtgatttgattcgcggcgcaaattatagcgggccagtagaacccttgacggatcaccttggcagcaagggctctaggccctgagtgagagccacaagttccgctgtggacttcgcgcaggatctggatgccttcggtttcggtgacacatttaagcatgggttgactgacccccttcttgtaaagttggccctca

SEQ ID NO: 75869 - DNA, 612 bp, Zea Mays
gacgtggcctaggcagtgcgccacgaccaaccgccatagcgtgtgcccgaccatgaccgacgacgacaatgtggatagggaaccgagcaggcgaaaccctagcagagagattgcaggcgagtgaatgcggaacgagaggggcacaagtgtaaataggtgccggaccatgactgacggcggcagtgaggacagggaaccgagcaactgaaaccctagcatagagattgcaggcaagtgaatgaggaacgagaggggcacaagtgtaaatagctcgaggaagcagtaggcttctcgcggacgtggccaccgaggacgactggcaagttgctccgtggccatcgcgaagggtggttgtgacggctactgcagagcggaggggaggatggggacctcggtggaggacgcgacgtcaaaaacgcacgaaactcggcgtggtccagcaggattctcaggggcaaggatgcgcatgcgatggttctgttcgacggtgaggggggagggcaggtcggggcatgcaatggtctacactgccgtcttattaagtagtagagatacacctatacacacgagagtgtcaggaacaattgattagaactaggccgttcatccgga

SEQ ID NO: 75870 - DNA, 665 bp, Zea Mays
atcgacttagattggaaaaatcctttcatcaagtaccttcaagacatatttctatcgatagataagtcacaagtagtataaacctaacgcaaggctaaggcctatgtgttgattgacgacgagctaaataggaagagtgcctcaagaattctaatgagatgtatcccaattgatgaaaggaaggtgctacttgaagacatccacactggcatatgcagcaaccacataggaacaaaggccatggtggaaaaagcatacatgcagggtttcttctaacaaatagtcgtggttgatgtgaaggagattatgtgcacatgcgaaggctatcaattatttacaaatcaggctcatgtccgtgtagctcaaatacaaaccatacccctttgatattgtggatcccttcatgtcaaccaagggagcagttgcctatctctttatgacttttgataaattcacaaaaataatcatatcatccccgcatttcaaaactttccactacaaatctactttcttgatgccactaagcattctccatatttaccattagaagtccaataccgactaaacttcttatgggtagaaaatttcattaaaaaactttttgacataagactttttagtctcctgaacctaatgaaatttgtcgtgtggtcccaaaataattc

SEQ ID NO: 75871 - DNA, 435 bp, Zea Mays
gaaccatgcttgtcaagctctcgccatgaggacatagggaaggtgcatgtacgccgtgtcatgcagctgctgccgataggtgtggctgagggaccacaaagctctctgagcagcattgctgaccgaagcaacataggtggatagcaatgtcagagactcgtgagatgatagagtcctaaaacctctatctcctgcatccaacactctgacatgcacgagagtgatgtagtaacaatcccgagggggctcagatacctgccttgtgtcatagagaggtcgaacgtaggttcccaacgcatgaagcacatcctacatcaagtttgggaagtgtcccatctcgaacattgaggtgtaatgctccgcgacaggccacattacaacaaagtcgtcttcttgttcctgttcattgttggcatcttcattattgtcgttttc

SEQ ID NO: 75872 - DNA, 298 bp, Zea Mays
gtaaaatgtctcagacaaagtgaatagctcatgtggatggcgagttagttctatagaaacagagggtttcttacgtaaaactctcaatcgaaagggtatcgcctggtctcagccatccgatcaagcatggacagccgcgattagatcggatcggattacacccacgcccacacatgtcaccgtcggatccaaaattcagggcccagattagatcctatctaagtgaagcggtacgatactatagccgttagattcaagatctacgatctatattcgattaagctcgcactgacgtaac

SEQ ID NO: 75873 - DNA, 1130 bp, Zea Mays
gaaggagaggggtctgactgcagaggttgtagttgctgattttgtcttcaagaatattcaaccattgaaggatagggcatatccagcctatctgtatcgaggcctagctgactccacccgggtcaccaataggagaattcctgctgcggatttggtgagccggcttgaaatgatacttaggggcaaggtgtcaaatgttggtgcccctgttgcttactcggcctggaacttgcctctttccaaggcctttactcaattcgtgtcaaatcctcctactggtgatggtggtttgggccttagagtgcgaccctctgccgaagaggttagtgctttggttgctttgcttggagaagttcctgaagatgaacggcaggttcattttgaggtgcctttggatcccagtgatgcagagataagtgctatgcttgatatgctggccgaggactcttctgatgctgctcctactgggacattggcagtggcgcctctcccagaagctagtaaaactttggacgttcagaggcctgctagtgctcgcttgaaacgcccttgccgagccagtcaacctgcttctcctattgatgggcagaaaaagaagaaaagacgccttcgccgtgtgtctagcttggatcgggatgctggcccttcggctcctgctgctgaggaagtgcccatgcctgaatttactgatgctgatcccaatgggtgtgcccaatctagtgctgaccccaatgggtgtactgcccgtgttgttgatgaagatgaggaggaggaagaagatgaagtccctctgattcggaagaacagtcggcgctacatagtcagtggggaaagtagtggagtgccttctcctgctttgtctgccctcgttggcctgcaagaattatctctggcggactttgaacaaactcttgaagacatggttccagaagatctgttatcagaaccggcagatggtggcgcgatggatgtttgcgttgatgtgctcggcgtcgggttggggtcatcccgggcagcgtcccgcacctcatcgaccttggagcgcggtcttgagggtcaggaagctgacttggatcatcttgctcccatggaagtaaccgaggaaccttcagccttagaggtggctgccg

SEQ ID NO: 75874 - DNA, 779 bp, Zea Mays
tatttccctttcaataaggcctgagggaaagtgtcggtgtttggacccgagtatctcaccaactagtgaaatgatgttgcatgtcttggtccagatgggtgatgcaaggtgacacaagtcatttatcctgattcaggctagagaaagccctactttcaatagaggggggatgagacttatattacttgcacttaagtgcttgcaatagtgagtacaagctagttaggagaagaaaggatcacaagtccgtgaggttgattgtggcaagtgtgaatatcaccatggagaaaaaactttgaagtgttccccctccacctaaagccttgggctcctctatttatagcctcaaggagggttgccacgagcgctggggcttgttgcatactatgaggaggcgtggccgagcacctgcagccgttatggcatgtggtatggtccttgtactcgttgttgacttgtgctgggaggggatgtctggtccctgtatttgcatctttgactgcgtagagagccaaggccagagccgagggctcggtcacatacccgagcatacatgatgggaaaactgtcgaagtcatagtggttggataaatgacgagtatggcaaaaagctcatggtaatacgtcaactctgttgtttctggtgatgtcggaggccccttcattggtagtatcgagcctgaagctattatcgggcgaggcagaagtcttctcgaggcctttgggtttgatgtcgtgcaggacacaatcaaaggagtggcctagtgcgtgattcacgg

SEQ ID NO: 75875 - DNA, 644 bp, Zea Mays
gaaacagaatattgtagatatcctgtactttccaaacgcctcatcaaagggacaaaaaaacgtgtccctgttctcctctcttgccgtgtggaaagtgcttcgggcgcgctttcatccacatcttggtgtcccccactccccctacagtgttgctgcgctgtagtgtcggactctggaccgctggcgagcaacgggaatcgggaaagccgaaacgaatacccataggggtttgatggttacagtacaacatcgcccatagcaactagcgttccttttaggccattgtcagtatcagtttcatcataatttcatttttattaaattagatgacatctcatcatatttaatgatatgatatagtatttatgatgagaaagatagagagagagggtttcatctagataaaacttaaaatacatagtttcatatataaaagttgatatatcactcaattcctgtgcactggcgtgcaggcatgtttgggggtcacatcgtatcacagattcacagcgccgtgcatagcaggccagaggcttttccttccctaaagttgtctttaagctcaatccattatacttttctcatatttttcggagctataagtactttttttttaaattatctatcgtgcgtttagattctcc

SEQ ID NO: 75876 - DNA, 743 bp, Zea Mays
ctacgagactctcatcgtggatgagctcttcagcaagctcaagtccacagagattgaccaccagactcgggccaagattgataatcctggtgcacccaccatggttgtgtgggatggatatcccccgagtccccatgaacactaaaacgtgtcgtgggccgcctgacaagttttctcttgggccgtcctacgggacaggccaactaaatgcagccatgctaggcaggcccggtctgagccgacgaaaaccaacgcccgagttaagcgctaccggggcacggacgtaacaggcgctacagttacgatcaccccgacaggctaagccctcatcggtagctcgggcgaatgaacgagaaggactccggatgtgtagggatacagtctgctacaaactaggagacaaacaagtagatagccatcatcgtctgtacggggtaactctccctggtcgagtatataaggccaggaggtacccctaccatttcatctcatcctagccttcagcacccataactctcagcttgtaatcctcacaacgataccagaatcgccataggaagtagggtattacgcagatctacgcggctcgaacctgtataagtctgtgtgtcatcccatcgtgttataacacgaaccatcgagttgcaatcaacgatgacgtcctacccaaaagcatcacctgggcaaccccgtggtgcacgattagatcgcaaacaccgatagctggcgcgccaggtaggggg

SEQ ID NO: 75877 - DNA, 1125 bp, Zea Mays
tgagatgacctatgggggagaatttaggggagataaaagggggggttaggagattagggttccaaacctcgggttgaatttttgggatgttacaaacctaccccacttaaaggaatctcgcccttgagattcagacggggctcgtgaaaaggtaagggtattccctcctcaaggagtcctcactttcccaggtagcttcctcttctccttctcagctccactggactttacagagtttcacttctgagttgcgggtctttcggactgctgagtcaagaatctttattggcttttctcggtactgaagatctttctgaatctagattgtctcttcttcgatgtgactttctggtacttgctggcatttgcggagctaggacacatgaaacacgttgtggatatcacacatggattctggtaattcaagatggtatgctctgggtcccactcagccaatgatgggataggggccgacgaatcacggtgctagctttcctttaacttggaaccttttgacaccacacatcggggagaccttgaggtagacgaaatctccttcctcaaatctgagttctctccgcctgttgtccgcataacttttctgccgactctgagcttcaagtaatcgtttgcggatcagggcaactttctcttcagcctctttaacaaaggcaggtccttccagtgtcttttcccctacgttggaccacatgagagggatctggcactttcgtccatacaatgcttcgaatggtgacatcttgatactggcctgatggctttatacgagaactctgcataaggcaaactagactcccagtttctgtcgaacgttaacacataggctcttaacaaatcttcgaggaccttgttgaccctttctgtctgaccatctgactgggggtgataggtggtgctgaagtctagcttggtgcccatagcttgctgaaggctcatccaaaatttggaggtaaactgggttcccctgtctgacactatcttccttggaatgccatggagtctgaatatctctttaagataaatccgggcaagggtggctcctccaaaggtagttttcactgggatgaagtgggctaccttggtaagacggtctattattaccca

SEQ ID NO: 75878 - DNA, 414 bp, Zea Mays
caagactaaggggtcgagtctgtttcccttttttgtaactagataacgcatacgtgtatgacaacccggtggggtctgcccccatgaacccggactattggtctgcacacatgcacgacaagttataaagagaaactacccccctcagctgtgctcttgtgatagttccatcttgctgctcatggtcctacctcatagtctttcagataatactttttagctaacccacccgtacggtttccatctgtctgacatagcaacatctggattgaacagccaggcttgcagtttagggcccctaatacgaaagtggggaggtccgatagcctgggggccgactctagagaacaggaccccgttccatagggtggtctggagcccgtgtagccgctcagctaggtcctgtaccgtggg

SEQ ID NO: 75879 - DNA, 402 bp, Zea Mays
aagttacctgaagattagaaaagaacaaaggcaaccccaagtcatgagaagttgcgttataacttgacgaaggaaggtcaactggaacaatctgaagagcatcgtcgggggttgattcagctccactagcagatatcagaattctggcatccagtgcgccgacctctaaggcgactccctcggttgaagctaaggaagcatgcatcgcaatcaccgcatcagaacatggtggaggcgacccgacgtggacatccatggaggtatgggaaggggagctcgctcggacaccctcgggggctgggttacagcttgcgctacccactcgagccggatcattaccgacaacaccctcggggctgggtaatcgccggcaccaccctcgggggctgcgttttctgcaac

SEQ ID NO: 75880 - DNA, 728 bp, Zea Mays
caacagtagcccctcatgggattagtttatttttataacgacaaacagtgaaatatacttcaaagggccatatgcatatggtccaaaaaactccctttgagttcgttactgaaaatggagaatagaaagtgcatgaagtatgcacaaaggcgtatttagttagatggatctagatgatagtgagtgatctatgtgtggctcttcgatttatgtgtcagtctagttgtataagaaaatgtggcatgtagtgttcccataacatctgctacattttcccacacactgctacctagagctccacctccaaagctcacttgtagtttcatagcaatcctcgcctctgaagctttttcatgctttttcaacaatttccatctccgagccactttgtcctaggactcacctttttcactcaagatgacatgcattaagatgactgctttggttcttactctcacgtcttctgaagcctttcaatgggagagtgctagcagcaccgaggagcattttagagagactatgatcaacattgtttaggtagtcaaagaaacaatgagcaatccagccagagcaaatgaagagaccgcagtgattcgtaatgaacctgaagatgatgattctacattcaaaaaggaagccaaagaatatgaaggggctctaagtctatagaagccaagttatatggacattgaaaaatcctatcgggtacctaggaacgaggtacccaa

SEQ ID NO: 75881 - DNA, 520 bp, Zea Mays
ttaccaatttggaaggcgaaaatagagccaaaatgtcgtttcttcgcgtggactttgctgcataataagatcttaacagctgaaaatctccagaaaagaggttggagtaatgatccgatctgcagactttgcaaacaagaaccagaagttgtaacccacttgttccaaaactgtatcttcactagggcggtgtgggcgcaactttctcattggcttgacctcgcgttgctgccagggatggcacaatctttgtcaatatacacttggtggaacaagtgcagagccaaagtcgataaatgctcaaggagagagtttgatggtttgatcatccttttctggtgggagatttggaaagagcgaaaccgcagaaccttccaaagcctagagaagtcagagtgtgtgattgcagggttaatcaaggatgtttttgggcagcaacgaattgctaattcttttgactttggttgctagtgtctctgcgtagcgttctttatctttttttctcattcttgagttcttg

SEQ ID NO: 75882 - DNA, 443 bp, Zea Mays
caatatttgggtttgctttactaggagacgagacagttgatacattcgagtgggtcttcaatacgttcaaaacatgcatgggatgtgacggaccacgagtgatgttgacagatatgttgtaataaatggctcgtatttattatggcacgtactatatgatatcatattggcttgcataatgttatgtaaatttatctatttcagatcaagaccctgctatgccaatcgcactaggcaaagtattcccaaacacaatacatcgattgtgtttgtggcatgtgcaaaacaggtatatgccccacttgaatgaattgtatgcaagatttgaggagatggatttcaaaacaaggttccaatctataatacatcatccattgaatgaaatggagttcgaagctgcctggcaaatgatgctagatgatttccagctaaacgagaacaac

SEQ ID NO: 75883 - DNA, 741 bp, Zea Mays
gcctaacggtactttaggttggctaaacttttaataaagtttaggacatttattcaaagcctcaagagttaaaatttattggttaaacttaagagtagtcgtgagatctaaacatgatctatatagtgctatatcaaggactgcgacatcaccaagatattaaataatcatttggtttgcttggactagctagcatatgtctaaacttgtcaatattcatctttggtgtttgtttattcgtaaagaattttagaccgcctccagtagcttacccatatggtcgtacaaaaaatcgttttgtactgtagaatgcactgtttgaaagaatgaagtttgaatatgggatagagatgagaaaactgatggagatagtcttatgtaggtatgtacgaggtttaaagcaagccccatccaacactagttagaccgtatttggatacgtctactagagttaaactctggcgcatgatactagttagaagtatataaatacatggctgagcccggggtgcggaggcagcggccacacttccccctaaagaaatgggccccacccccaaaaaaacagcgcccccactgctcatcaacccctaaaagccatcagacgactgcctagcaaatgtgaaccctgcgtctcctagaagttggaacatcacgccgtcaactgcttagcacctccccgccctcgccttggcgatcgacgatcactcctgggtcctgctcggtcctatgatactgccg

SEQ ID NO: 75884 - DNA, 457 bp, Zea Mays
aaaggatgttgcggaataaatatcttaagaggcacaccttgtcaaaagtatcctacaggcaaggtgattctcatttctggtctggaattatgaaagtcaaataattgttttttaacctaggatctttcgttttaggtaatggtgaacaaataagattctaggaggatgtgtggttgggagaccaaccactcatgaggcaatatccttcactatatcatattgtgagacagaaaagtgatacagttgcatctatcttgagtacgattcccttcaatgtttctgaaaggaaaatagggttaaccttttcctacaattaattttggtggttgaatgtccaacacaaacatatgaactaactagttgctctagaactcatgtattacaggtgcataaggttcaacacaaaccaataaaagattcaagttagggactaaaattaaaaggagcaaagacttga

SEQ ID NO: 75885 - DNA, 398 bp, Zea Mays
aaatttatatggatcagcctaagggttctatggttccaagtaaggagaaatttgtttgtaaattaaataagtcccattatggattgaagaagtctccgaggcagtggtacaagaggtttaattcatttatgatttctaatggcttcaaaaggtcccaatatgatagttgtgtctatattagatttgttaatggttcacctatctatttgttgttatatgttgatgacatgttgattgccaccaagagcaagaaagagatcgctaccttaaaggcacagttaagtagcaagtttgagatgaaggacctgggagccgctagaaagattcttggcatggagattgggagagacgggaaatcgggtttgttgttcctcagtcagcgcagttatattcagaag

SEQ ID NO: 75886 - DNA, 385 bp, Zea Mays
agacgctgaggaagatgcctgaacctcgtgttctgcagctgctgtcggtaggtgtggctgagcgaccacagggtccgacgggcagcatcgctgactgaggcagcgtaggtggacagtggtgtcagggactcgtgagcagacagagtccttaatcccttgtcacctgcatccatcaccctgacgtggatgcgagtgatgtaatagcaagcccggggaggctcgctcactcgccttgtttcgtacaggggggcggacgtaggtgcctagcgcgtgcagcacttcttgcagcaggttggggaagtgccccatctcgaacattgatgtataatgttcgacaacaggaccaaaccccatgaagtcgtcctgctgggcgtagtcagcttcc

SEQ ID NO: 75887 - DNA, 943 bp, Zea Mays
cagatttcgttgttaacgaccgagaaactcttccctattcaagtgtccatataagtcttgtggttgtactattttcttgggttgtcacttggtgagaaccagtctgtcggaggcagaaaatccttctggctgggtggcgaaatgcactcgccctagtcctccgttgaggaggggcttagaggtttgcctgaccgaataggtgaaataaagaacataagggtttagagtgattcaggtcaccggagtgtaataccctacatccactatgagttgtattgcatgagagcttgagtgtcttgggtctggatgtgaatcgacctctccattgcatcgctagtgccctccctttcattgttcaaggggagcatgttacaagggagctgggcccccaacaagtggccaggattactcttagacaaagcgtccagtgtcaggtaagagctggaagcactatatcttctgggcgtgtacctcctcttggtcatcgtgttggcttctagcatcctatcctcatgtcccatttaatcggaacgcagacgtagcccttggtgtaggttgcgacatagcacattgcagactggacgcaccgtgggcatttaatgtgagggatacgccacctgccccagacatgggctagcatgcatccctcctgcatctaatgctagtggcccatgtcggaggtctagtgttaggtgccacccagacgtaccctgacacgcgtcggcactggacccctgcttgggtagaaggcagtcttgggaacgtgtggcgatgcgacacccccggaccacatctaaacagggatccagaacatgcttgagggggtccggacctagccatagcggcccggacacgtggcggccctaggccttacttggcttgaggcccgggtgacatatgtggagtctgatgctgatcttgtagccaaagagtacctttattc

SEQ ID NO: 75888 - DNA, 601 bp, Zea Mays
gagggaatttattagtctgtgttctgaaggtgaaagagggcaagctaggttgcctttttagtcaactctagttcaactcgaactactcatatattattggtcttgattagtcctctccttatcaaataaagcaattctctcaccagtttattagttttatttccaaccaatgaaccagacaagaagccaacttgagcctgccagacacttgactacccggcatggaatctcaaccccggacaatcaaaatccaatgtctaggggtgctgcctgcctcgggcagctgtctcactgtgcaaaccaaacaagtcctctaccctttctcacatgtgcctagaaggtcacagtggcagagtgctcctctaccctttctcgctttttttataagatacattctagggaaaaatatttgcagcccagctgcaaacacaggctactgcacagcccctcacataacagcgtggctaaacgggtggcactagtaaagaacgcaaatcaggtacatgctcgtcgcaaacaggtggttttcccactggttatctgaggagatatagaggactaggtttaccatcagtgggaatttggtagttaagcaaaggac

SEQ ID NO: 75889 - DNA, 890 bp, Zea Mays
aaggagtctacagaactcttgtacaacccatctagattatcacgtgaggtggtcagtgactggatatgctccctctactgattgatctccacccttagtttatctacctcatcatgtagattggaatattctgtgaaatgggtcgacaacatggagtaggcaacacgaaattcttggtgggttacctcatggttctttatttccatgtcaaactttcactgtaatgatctattcacctctcgagcgctatcaaggaatgttgtaacctggcataactcggactgactttgagttagtctctcatcaagatcggaatactgcttggtcgcggctgtaaggcatcacattgagttagcagatgaataggtgacaaggttgagtgaacagaaataggtaccttactagcattttctgcagcctgagaagctattaagtcagcaagatgtttttaaaccacaaaaacattagactgcaacaaaagggacaacttcctgtggatttgaatagattgttccttcaacttgcccccatcttgaagcagcacaacaataacctgatccatcatgtgttacatggaaaaccagcaagccacacatcagtcgacaacggatacggaagaacatgcatgctacagaaatatctagaggtcgatgagaaaaacagaatcaagtgaagtcggtgaatgtgagatctcctttaaagccacaacgttctccgaggcctcaggactagagatgtcaatgtgaaatgccccatcgagttttgactccctagacccgtccccacaaagatgaacccatcctcatacccatcacgggtacaaaactcctctcatactcatccccgtctgggtacaaaatactcgtggggccccatacccgatttagcgc

SEQ ID NO: 75890 - DNA, 722 bp, Zea Mays
gtctagctgtcatctgaaaacaaaaattctgtcgtggttacttcgacccaagatttcaagttgtgacttcataacatgaggagaataatgacacaaaattatatcaaaccaaacgaggataatcattcattcattgcattgttcatacgggttacaacaaactaggagatccaccctacagcctagttccaaaagttggtgccagaagctaagcctatgtggtctttccattctgtgacatgtttaaatctaacctatctaaccctgagtggcagaggcaacactggccccaggtgtagggggtactccagagtaggttgtgtccaggctggaagctggctcgatctcctcgggatcctcctcctcttcgttgtctgcctccatggcgttcatgtcttggtgatgcatttctatgtgagcgttggcctcctcaagttcatcttgcacatcacggagctgattttctaggacctcaatggtgttgtcccggatttccatctgctgctctaatgcttggatgcggttgctcatctgttccacctgtagatccttctccaccaattctgaagataggtcgactatgaattcctccctatcatcgagggtaatctttgcagtctgagagagcccagtgaggtgtgtcatggcatcactttgtaggacctgcaggtagtacagtgcactcatgcagtggacgatgattctcccgacctagtcaggat

SEQ ID NO: 75891 - DNA, 646 bp, Zea Mays
atgatttagtcccatatagtataagagttctaaaacgaataagggagcttcatatttgacttgattattagtgcaataagatttcaatcggctagagcttcatatttgaagttcggatgccccttatgggaggtcttgtttccccttatatagttgagggagcatatagtcgtagttacatagaaaaatcgacggggtgcacctttctatgcctacagatcataggccatctcctatgctttcaagagcatgttgttactggctcgtttggcccccaaggtcctgtcacttaaaacctgatcgaaccagggcgtgttgggtcttgtagagggttgtttggagccttcttgtgaggaggcatctctaaggaagccatatgggtgattggccataaagttccttccctatcctcatgtcttattcgagggtgcctgaccgccttacgcatgtgataaggcccatcatggcctttcttcaatgtggttggtctttgttatcctctgaacagttaggtgattggacatagatgtcttcagcatcctgcatattgtacctatctcattcgatgcacacttaatcgagcatgtgcgccaaacggtcagtgagcataaatgtgttagcgctgcatagaatccatgggacctct

SEQ ID NO: 75892 - DNA, 1208 bp, Zea Mays
cctgagtcctggtactgaaaagatctaccgctgtagggtccctctgagctagcaaccaggactccacgggtacgtgtctgaacctacgtacccgggctgcaatggcacgctgaagatcaagcagtcgaggatcagcagctaacggtcgcacctttgtctcgtctcgctccctgaagcgaagtggtggaatgggcggagtggaaatgggagcgggaggtggaacaatggaagctagagtggtggaggtggtgggtatggtgaaagtggtggatgtctctggagcgacaggagctggtgcagtgggaggtggagtagtagttgtggtggaaggtgtagagggagtggaggagcgatgccgagacgcgaggcgacgaaccctgtaggcaatctggtctgaggagatctgcaactagccacctcgctctgcctgctctgtcgctgccgctgctgcaagtgctgctcgggcggctctgtccatatgccgcttcttccagccttcctactgctctagatataatgtcttgcccttgacctgcctgaaggggcgaggagggtcctcgtcgtctcctccccctggcgctgacacattcttcgtgcgcaccatcctgacctaagtgctgcataagtgagtgaaaggctaagcacgagtagataggagctgataagatcataaccgaagcgataagtacctggaaacctcacgagagagagagagaatccaggcaagacaggagacagacacacgggtaggcgagatcactgaaatgacagaagaggtgagcacatattagttacatagtcataagtatatgaaatgtgaataaatacatacacagagagttatgacacataaactaagtgatttggagaaacagaggtcaaacgacgcgaaaacgacgtttgagcgaggaatagtgccatagaaggtttgatattctaaatggggcacgaaatgacttgtaattgagccgatacttcacgagtaggtatatatgagtacaaatgagtgaagggtgcacttggtttgaattttggcgaagaaagtggatttgtggcactcggctcggaatcgatagctataaatgggaatctatggaaaatggtgtatgggatatcgaattggcgtgaaatttagcgaatatgttacttgaggtttcatgaaggtgctggaaaaatctgggatcgatttgatcaattttagctggttt

SEQ ID NO: 75893 - DNA, 328 bp, Zea Mays
ctgggcttgttgtgagcaggaactggtgggggaaacaggctcgtaatgtcactaattaggcaaggagcgaacgaattagaagatggctggctgggtgattggattctcagctccggcgggcttgccgccgcacggtgggttgcgccgtcgtgcccaaagtcggctggttggggaagatggtggccgagatcatgcaaaccgttggatgcaaaaggtgcggccctgattagaaatagaataccgattcgggtggacggatcgtgcgtcgtccgattccgatcggtcggcggtgaatcaatgtaggttatttaaatctgagatgttgaag

SEQ ID NO: 75894 - DNA, 403 bp, Zea Mays
gcggcccaactaccgcactgctggacagcctcgcatcgctcctacacgcacgggtttcgtctcgccgacaccttgggcccaaccgtcagtccgtggcgtgcgtgaatccgtcactggcgggtggctccactacatcagctggtcgctcacgcgttgattcttccgatcgccgccatgtgggccccacgtgctgacactgtgcgtcttctccgcgtaacaaaccaagcgcatggaccgccggtatctcgccagaattgcccataaatcggaccttgctctagtataaaccccttggccgccaaccatctccgggcgatacaagctaagccgccatggaacaatagcgcggagagagattggagcttgcacacagagagagatcagggaggaagagggtcgtcga

SEQ ID NO: 75895 - DNA, 537 bp, Zea Mays
cacaagtcccctacgggcacggccggatcagcgaaggcacacagcctcatcatacaaattatagttacatacgtacagcgagggcaccacacatcacattggttcaactttcgggatgatacccatctccctatagttaaacagcattatcctcagctcctcaccctcaaaaagacttcacaactccccctcacctacgctcaccccagccggcgaggataacaattcccgcttgccagccctgtccacacgaagacgaccaccctccacctcactcaccctacgcttcgccaccgtccttcgccgcctacgcccagcactcggaccgagaacttcagcatccatcacatgcggagaagtctccaccgcagccacatccaatgccgcaaaataatccaaatcctcatccgaagactcctccgtccacaccaccgaactcccagaaccatcagactcaaaaaacttagacacaaaatcatccgaatcattttccgcaaccacggtcgaagccgccacaaaattagcactttcagtagc

SEQ ID NO: 75896 - DNA, 1027 bp, Zea Mays
gcagggggcgaggtttttaatgaggcggcaccatgtaataaaataaacaggaaagtccccgcacaaaagaaagaagtgcgtcccgaacacgttgaaaaaggccgcaaggtcagccttcgctattcaacggcaggacagtcaccacaacaacaagtcttaagtcagccatcgtgtgcgacaatcatcatctatccaagcaaaaattcacctaagggtgcagccggattagcacaacaagtgcgccaaaacacctaagggtgtgaagtcgttcgagagacgcatcatctatctgagcaaaaagtcgcctaagggtgtagccggattagcacaacaagtgcaccaaaacacctaagggtgcgaagtagtccaagagacgcatcatctatccgagcaaaaagtcacctaagggtgcaaccggattagcacaataagtgcaccaaaacacctaagggtgtgaagttgtccgagagacgcatcatctatccaagcaaaaagtcacctaagggtgcaactggattagcacaagtgtgcaaaaaacacctaagagcacgaaattgtccacgaacaagtcgcctaagggtgcagccgcatatgcacattgacacacgaatcaaaccatcacccatagaaaaaggaaaaagctccagtatattcaagaaccgaagactcgcatagtcgtcccttggttaaggcgggcgagggcagcgtttcactcaaatcgccaaggcacgactacgcaaatatttcaaatattacaaagtccctgccttcggaatcagagtagcttctcgaaaattaaacaacttaagcctaagctcttcgccataaaaaagcgccctaagatcttgctcttcgaagccccgttcggttgttggtgcgagaacaatccagtgaggcccctccttcgatcgcgccctctcccattcttgaggacgcagtggtgacatacgaagcacctcacgaagcaagacccgcgggtgaggccccctagtcccatgagacaacggctccgggagccttcggcgcc

SEQ ID NO: 75897 - DNA, 299 bp, Zea Mays
gttagatctagatgagcgtgtgggattggttaaccacgtaccgtgttgcgaaataaaatctgtgccacggatggacgatccgatggctgggtcatgtcggtggcgtggcactttctgggccgtagatctcagatcggtcgattgtctgcgcttactggttggggcagctgtggatctaatcagaaccatcggttttgaatcggacgactcctatccaccaataccccgtcgcacgactcaattgcaaaaggaaccctggtttaccttcgaatcaacccaccacctaccctctcataaag

SEQ ID NO: 75898 - DNA, 1021 bp, Zea Mays
acagtttaagctcgtgagcgatggagcatatatgtttttcttgttgcttaaagtttaggctcatgaagcgttgaagcatacgatggatttaattttttttgtttttggcgcttgtagtttaggctcttaaagcgttgtagcaaatggtgattttttaagcatagtagcgttttaagaattttccatttattggtggagggcaatattcgccgtcagcagaaataattcaatatgcgccacttgaataaacatcttttactacatatgggccttcccatttaggctcaaattttccttttattcgatgagtgatattcatggggcggataactgctagcaccaggtccccctgtttaaacgatcttctttttaatcgcttatcgaaagctctagacatcctagcttggtatgcctccatgttttgcaatgtatgaagtcgcttttcctctaagttatctaattcttttaagcgcaattttgtcgcttcgtcttctgtgagattttcttgaatgacaactcgtaaagaggcaatttgtatttctaatggcaagactgcttctcccccatatacaaggtagtgaggggtcctcactgttgctgttcgcgtcgtaactctatacgcccacaaggactctagtagcttttcatgccagtgcctcttattatgtgagaccatatttttaagcaattttcataacactttattaaatgcttccgcttgaccattagcggacgggttatatccagtagagaagttgtgcttgattttaaatttggcacacatcctctcgatttgtttggtcctaaaatttgacccattatcagatatcattctactcgacagaccaaatcgatatatgagattagttcttatgaagttttctaaattttcagcttttacctcttttaatgccacaacttctgcccatttggagaaatagtctgtggtggctaaaataaatctatgtcctttggatgatggtgggtgaattggtccaactacatccatcccccacatttc

SEQ ID NO: 75899 - DNA, 601 bp, Zea Mays
gcttagtatttttgcagttttgagataatactatgttatttaatgataccgtggtattgaaagcaagatatatattcaaaacaggaggaacatgcccactatcaggtttagacagcaactgaacatgcccactatcaggtttagacaacatgaacttattcagttcatataaacagattacctaaacaatatcacaacaggatcaagatatatattcaaaattatgcccactcaagacagcatgaacttattcagttctaaaagcacataactcaagacagcatgaacttattcagttgataaactatcaggtctagacactagacagaacaaaaaagtgtttccctgccgcagaggaagatctagcatgaacgaagtgccaagcctgtcctccagttccaaagaactgaacctgctgctctgccgatcacccttggagcaacaactagcccaccatgggttcaatcatgtcctccagttccaaagaattatcgcggcgtgaacctttggaacactaaaagcgcccgagaccggatcaaggctaccatgggttcggataaatcaaggctacccttggagcaacaactagcccaccctgccg

SEQ ID NO: 75900 - DNA, 395 bp, Zea Mays
aaagacgtggagaggaccataccgcgaatcgcgcagccgtaagccccggccacgacgcatggcggcaccgccgcgaaccatttgctccggtgcgcaattcgccgctactccagacaccacggtcaccgttatcgcctccaacggattccaggaacgtagtaagatcacctgcgccggtcactgctggcacgagagctccaccgacgacgagtgcttgcggcggcaataggatctacctggtggctacgcccttacacagcggtggtggcggttttggggtcgcgattccggtagggcgagggccaggtacctacctatttgtacccagggcaagagcttcgcacggagttttcgccaggttcaacggacagagcaaaaatcggctagcttcccgg

SEQ ID NO: 75901 - DNA, 654 bp, Zea Mays
ccccatgttcgaactagcggtgccaagttcgacacgctataaggattgtgggttgcttggagaattcctatgcaaggcggcaccgttcgaaaggggatcggaacattgaaaaaacgaaaggccaaggggaagaggaccgcttgcctcaccgagaccggctgctcgctgatcttcgagaggtgtggttactgcgcctcgcgggagcgtacaaaactcgatcgatgcaaggtgatcaacactcagccaacgatctcggcctctttcggccggtccgaatacaccattgcattcaattaatctatcggatccgagcgcattccttggctaggccaatgcccacctatcgtcgactccttcgatagtacggaacgactaaccaaggtgctcatggctagagatagtaggcttactgtcctctactctgcctctagcaaacaccatgagtcttggacgggaccacctctgaccaaccggaggacctgtccccccttctgcatactagttagctggcgtacattgcctctagttacgaaacattgagttgaacaacaagaagaggacactagctgatgtcgagaacattgagcaatgagaacgactcgatttgtgatgatgttttggcgccctagactggttctatacctcaaccctcga

SEQ ID NO: 75902 - DNA, 352 bp, Zea Mays
acaagtgacagggtagtctgtcaagaattcatcgaagatgttctacttccatgtcacaaaacctgtagcagtttcccttcttcaacaaccggccatcttttgaacattgccaagcttaatgcttgcattcatgcattgttctctgaatttggtccgttcgtgaatatactagcctaaaaatgcatggtactgtatcctgttttgtttcttgtgataatgtcgtgcatttattcaaatatctgctgcatatatcttcatcaaaacagaattagggcctcagattacaaaaccaatagggagagaattaacaatgaactgtttggtggcacctgaaaaacctgctgtgggacaa

SEQ ID NO: 75903 - DNA, 2634 bp, Zea Mays
gataaggacctttcgactgcaagggaccactggtcagcgtgggagtaagggaactatctcccataaaagcatccgcccgctccaggataaacaccgcgacaccgaacctagggtcgggcgtgacggagctagaaagggggacagacaaaccaaagggaagccactcgagtggattccacgtctggcccgagactgacttgccataagtggtcggtcgcattaactacgcttggcaccgagctgaagtagagggtcggtccacctccgatggccgacccccaccatggcctataaaaggaggagatcggtcatgagggagggaacccacaggatttgactctcagaaccggagacgctcgacggaaggcaacgacacacaagacctaaagacctggaagccgaagccaaggcttagcgtagaacttgagtcccatagtcttttaggtccattcacgcataagatacatgggagctctccctccctctcctggcctcttggaacccctactacgagcgtcgagtaacaaaggtgtcggtagcgtgagccaccgaagactagatgtagggacgttctgtccgaaccagcataaaccttgcgccaccgagcacaccatacggagcctaggacacgcacatagaaatttacttgtcggagcagagtttcaaaacactgttagttggcgcgccaggttggggccttgcgcgttctcgatgaactctccaggctctggatggtcagcaaccatagtggcgtagtttaagtcctcaaaacgtccacccattttgggagtctcgacttcgtcatcgacgataggggaacaatgatcagggccccgaaagcccaagttccccgacaagcgacccgctcgacattgtcggaggcttcggcatcctcagctcggttcccctaagagaggcagcgggcgacgttgcacactgcgacccacttgcactgagatcgtgggggatgatagatcatgtctaggtctcaatccatgacctcttcttgtcgaggtcggacggtggacttagttccccatccaatggggccagccataatccgactcaggagtgtatcgtagccaactcgctggagggccgctctccgctcatggaaagcctcgactcgacctaccttcccaaaagtcgtcgccaagaccaaacccttcctagagcagccatggtcctacgatcagaagacgaaggataccacgatggcggtctgagcggacacgctggggcactgggtggacgcacactacggcaactggcgtccgccactttctaacttgcgacggggtcgaaccgtcgcagttccctcgggcgagcaagaaagtagcaactgacatggcacttctggaaaactcaccaaagtagaaactccgagcaaacaaagagctcattgagaaatctgatgccttctcgacctcgccatgcagcagcaggccaaatgttccatgtcatggcgcggagagcggggggctgaccagtgtaccttgtccaaccaatgggaaaagacattccattgggacagtcatctcggctcgaggaaggcactgcataggtcccaccccatcgacgcccaaggtcaggcaaaaagcgcagagcatacccgaactagggcccgcacgagaaaggacagaagaggtcaggcaatggccaacggtatagccagcgcctcggagccccctactattttgatgaggaccgaagtttgagcccccaaggggggctcgtgcctttagccgccacatcctttgagcgctagtttcggggtggtacacagcgcccactaacatcgaagtactcaggagaatcgaaccccaacctctggttgggagactaccagctgacatgtcatgcgagaggagcggattacgaggatttcataatccagaacctccccctatacttggcagactcagcatgggcctggcttgagaacctaaggcccgggtgcatctagaaccgagctgaactcaaagaatttttgtcgaaaatttccaaggcacatacatatgcctgggcaacccatggaacctcgaaaactataggcagaaaccaggcaaaaccatgagagactacatccgacgcttctcacggcagagcaatgagttgactaacctcgccgatgtcaacgttatcattgctttcatcttggggaccatgagcgagacccctggtgcacaatttggggcgtaagagcccacgaactacgaacaaactactcgacaccgcgactaggcacgcgtcaggggaggacgcagtgacgacgatagacacggtaatagtgacttttgcctagtgttgcactcggcaaaaataactcctttgtctagtgttgcacccggcaaagatttgtctagtgttgtactcgataaaggtagtacctttgcctagtgttgcactcagcaacaaaaattgaacccccaaaaaaacagcaaacaaaaatttaatcaagagagacacccaccagccagggcacttcgcagccatattttttgacatttccgcgcacatttcacaaccgacacaagcttctctaccactccacccctatcccacatgtgtttatattatgttttattccccacatattataccaaaccgagtgtaaattgattgtttaaggca

SEQ ID NO: 75904 - DNA, 1026 bp, Zea Mays
gtcagctagttgctatatagaaattagagatcaaagctctacaaggtgctctaacagaggctctgaatggggtttcccatggtacagtacactgaaaaagatcttccggttcatccccctcgccgccggtgacccgcgcgcccagattcgcgtggcgccgcgattcgtgccctctgtggcatggattatgattgaccatggaaaaatctttgccttggatgaactcagaaccctgtagccgctctgtcatccattcacttgctggcgacgtggccgcacggccattaccgcggccaccgccatttttcttggtcgtgccacgcctttggctatcttaccacgtcgtcgtgagtcatggtcgttacccagtgatcgtcgtggcttattaccccgcagtcgccacgaatcaccgtgccagtgctcttccctctctctggccgctagcgcgccttttcaaattcacgagccaccgcatttgggtcctataaattgagcgtgccatcggctctgctaggttatcacacacccaacgcattagcccatgcctcagatcatccaccagagcgctccaatttcaaagttaccccaattcagtcaaaactccgccatgagtgagctcaccgtggctagctctctacaggtccgatcatgccttcctcgctctcgtttcaacatccctgtgtgttgtagatgcttagcaacccggccaattgaactagatcactctagatcccagggaacgcctcggtttgtctattgatcgcgctgtcaccgtgggtagagagactaggagctagaaccttgcaattgatcgaggggaaacgattgtcaagggtagaattaggtgtcagccaagctagaacaccggccattgcgtatcttggccggtacatgctcgccggagctcggcttgtcgccgtccactgtcgtggacctgacattgtaaagaaaaagaaagggaagggtctcggtgtaaatgttagtgacacaagcaaatagtgcgcgggactctttacgggtttttcc

SEQ ID NO: 75905 - DNA, 382 bp, Zea Mays
tttgtgagctcggtaatttggacaatattttatttgatagatcaactatgccttgtccttctcatgctatattttactttgctagcaagtacaacaatacaagacaatttttagtgcatagagtttatatttcatcaatatatagtgtttcttcacattgcacaaataagatattggcatgttctcaagaagtggagaaattattgtttccatgtactttagtagaagtttcaggtttatttttagaagatcatgataaaaccttagtcatgaacatcaatcttgatgcaaaaccgaggacagtttgctctcaagaaagggagaatgatgagaacataacctgctcagatatgaccatgtcaatggctcctgctgcgaaggg

SEQ ID NO: 75906 - DNA, 717 bp, Zea Mays
tatagtattacaaattgacaaggcgggacgagtcttactcgagcatggttgcatggcagtcaagccctggcgtcacacctgtgtcgttcggtcgttgcctagcgcctgggtcagatactcggatccgggtgtcatttgatttcggggtaggccttctgctcaacccaggcctattcaccaaggtcaacaacatgtcagtttgagacttcttattattatcgggtcgcgccttcaattcggtgatcgtgtcttggtgggtcggccactctcaattcggggctgagtcaccacttggctttggttccctattcgatctttagggttatgcacgactctcgtttcatcactgccatccatcaccggattctagagccgctccttggtcgatcaaggtcgcttggatgcgcttacttcatgtgggctgctccatgatggagactacctgctcctcggctccgaagaagttcctgagttgctggcgggcttcctggctttggtcgtgcacttccacgagcggggctttgcgatgccccctcacccatttttggtgggtctccttcattactacaagatctagctataccacctcaaccttaatggggttcagcatatggccgcctgtgtggctttgtgtgagggatatcttgggatgtctcctctacttcgcctctagtgccactttttctcggctgaattgctccctaggcggctggcgcc

SEQ ID NO: 75907 - DNA, 332 bp, Zea Mays
gtccgataagatgtgtccgaatctaaggattgaaatagggggggtagattttcccactaacctagtagtaatgggtactcgagggttagatgtcatcctagggatgaattgtctgcatagaaaccaagcaattgttagctatgacaataggacagtaaagttagtgtccccatctaggaaagaagtagtaactgaactattcatacctgacctagaagaaggagcctgtcaccatatgtctgtagatgataaggaggccaacctgcttgaagctatcagagttgtgtcggagttccccgacgtgttttctaaggacttaccaggcatgccac

SEQ ID NO: 75908 - DNA, 595 bp, Zea Mays
aaatgatgtttagattcagaatacctaacaacatcatcacagacctgggatctaacttcactagctcagagttctttgatttttgtgagcagaggagcatccagatcaagtatgcatcagtggcacacccaagagctaatgggaaggtagaaagagccaacgggatgatacttgatgcactcaggaagaaggtgttcgacaagagtgaaaagtttgcagggaaatggatcaaagaactatcgtatgtagtttagagcttgtgaacccaaccaagcggagccttgcatggaaacactacgttcttcatggtgtatggatcggaagcagtgttgctagtggatttgatctttggagcacccaggctaacatttgaaagtatagcagaaacagaagcaaccagactggaggatgttgatatattagaagaagaacgtctgaatgttgtcacaatcggctagataccagcaaactctgaggctctaccacgacaaggcagtgcggcatcgatccttcgcaataggggacctagtgctccgtcgggtgctggcgagagaagggcgacacaaattgtcacctccatgggaaggaccattca

SEQ ID NO: 75909 - DNA, 793 bp, Zea Mays
cttcgattccccctggacaaaatgttggtcaaagttctaaaaacttttgaaatttatcttcatcaacatacccccaaagctattgtcaaagtaggggttttttatgggccatgaggagccaagggttagagccagatgccaggtgtttctgcaatatgcacgagttaacatatcagatgaaggtgactgggaaagagcaatatcacaacaattttggctgctacagcttcgtgcatcgtgctgaggccagctatcatgtgctgacatttcagaaaaaatggccaggctcttggatgcaagagtggttttatgtgaaggttgatctgagtcagagggaggatatatgaggggttattcagcgaactatatggtctcgcttcggcattagaaggccacccactgcccttggaaatgatgtgcaggcgtgccaggcagccttcaatacagtgtgcacttacataggcacaagagacttggtccaggagcatattgcttacagagtgtggccacttgtaaacggatgagaaatgtcgaaggaggctgccgctagatccaaccaaaatggtttagtctatctgaagtataccttttgatataggagccagtttgatgaaccaaatgatgactagctagatgccatagaggtgactagtgatgagctgcttggagcatattcaaagtccgaagatgaagctatgacaaccgccttcggagctcggggcaaaaagagattgaatagggtgtttgatgctatcgggtttgtgtacctagactactgctatcccactcgaaa

SEQ ID NO: 75910 - DNA, 271 bp, Zea Mays
gaggggcatcacccatggggttgtttcctactgctgccgtggggaaacatgaaaggaggaacagtgggtgtcggccttggaagatggctagaaaatttgggcgccatttgggagttgagggtggagcagagctggggcgcctgctgcaggtggaagaattcgtggggtcctggtggaggtcgatggccatggacaaagggagtctgaataggggcatggagctgttggtgtcttggatagaggcaggggcagccaaaatggtgcctcgacc

SEQ ID NO: 75911 - DNA, 407 bp, Zea Mays
tgcaacatcttgaattgtttgagatggaatgtcgctgtttctagatggaaagattcagggttagaaaaaggaactcccatcaaccatcacagtttactcctgcgttcctttgctgctcataactctgtgtttccttgctccatcacactctgttggtactgctagcttgaaagatcgatagagatccatcaggttccttacttgggtgccactctttctctttggtaggtaccctttgttctaagttgttgagtgagcagaatgaaggctagaagtagaagctacactggccggtttcaggtcgcgttgtctttttgtatcattcttgtccaaaaggttgaagctaaagccctgcatctttgctttgctgatcaatcgagcaagcatctgatgatgatatgtcatgc

SEQ ID NO: 75912 - DNA, 516 bp, Zea Mays
ctcggtatcagggacgacaccgtcaaagaggcaatagtggtgagggcaagtagatcgggtagcatccggaagccggccttggcacgtgtgaccatcgggtaatgacatcagcgacgatacaacgatatccctggctggtcggcgcaccggtgtcgctagtgcaggagccaggggtgctgaagttgtggccagcgtgggtgacgaatacagacgatcggtgaggatagctacatgtcggccgccggtgccacacgtggtgcagtaggaagcgctggtgttgcgcacgaagggatagggggtgctgatgccatgcacggttcggctggcacaggagctgcgcagggcgcagcaggagtcggcggcaccgcacggggcagaaatctagaagggaccgtaggtgcgggcaggggcgtggtaggaggctcgaacccgaggggtaccccctttgtggacaaggagccgacatggtggtagtgtctgcaagaggggttccaatggtggaaactgaggaacttg

SEQ ID NO: 75913 - DNA, 381 bp, Zea Mays
tattttttgttggaataagtttgagagctctattttaaggacatctactagagtgtcctaaaaaataggtagggtatgtaaaatgggtagtgacgggaggtgcgtaaaatggataagtatggtatgtggcgtgcagaaataggcataccctctctcttgcgtggcgtgcagaaataggcataccctctctcttgcccacgagcgagtattttaatgcccaccagcgcaaacggaacctcgaatacgaaagttgttggacgtcgtactctcctatccgcgtaatgttgtgggactaagtgtgcaagtatcaagccactggactcggtcttagactatggtcagcagatcgtgtatatggatgtacaaacactatttttacac

SEQ ID NO: 75914 - DNA, 281 bp, Zea Mays
ctgtcgggttgcgctaacactggtgctgtggtcagatgttgcctcaatgtgtggaaggcatcttcgcacttctgacctcaaacaaacttagctcttttcttcaacaattcagtcatgggcttcgcaattcgagagaaatccagaatgaatcttcgataataaccagccaatcccagaaaacttcaaatctgatggacaattgtcggcggcttccagttcatcacctcttgcaccttatcaggatcaacagctatgcctgcctgagagatagtgtgacccaa

SEQ ID NO: 75915 - DNA, 438 bp, Zea Mays
ttccaattgataatattgcgtgtcattaacaaccctatcacactaatacgctcagaaagcaaaaatagaaagaattagggatagtgaaacttagtagcactgacagaatattttttatttccatgataaaaatgttgaacataaacgcaagtccaacaaattcaccccaaaacataacatcagaaagcaaaaatataaagaattgtccctgctttctgtaactagggttgggtagaggagatagggttgcacaaaaatacaaaacaagaataggacaacttggctagtgagaaaggtcatacatgcagatgaacaagttgtcttattgtccacccaacagatgaacaaattagcttgtgatacttaatatgcggaggagtggtatttccacatgactaatgcatctaattttctgtttgctaaaaatttgtaaaacaa

SEQ ID NO: 75916 - DNA, 1412 bp, Zea Mays
tcttgcttttatccttcttctcaacaaacaatactggggaagcccatggcgacctgctaggcctaatgaaacccttagccagcatatcatccaattgccgcttcaattcaacctgctcctttggagccatccaatacggggccttatgaataggctacgtactcggaattagtttgatttcaaaagctacatcgcgctccagtggaatgcctggaagctctgctggaaacacgtcggcaaagtcacacaccacacggatgtcttgcacccgcaaagcagcctcactctccaccaccatggagaaaaaaaattcccgacttccttgaccgacgatccggaagcattgcgacaacatggataatgtgaactttggagaacttcccaagaataccacctccctacctgatggcgcctgcaataacactatcttccaaaaacaggatataactgcacgatattgagataaccaatgcatacccaagataacatcaaatgcccccaaggaaatcacaacaagattagctgaaaagacctcatcagcaagaatgatggaacaaccctgacaaactgaatagctactaatggagccattagcagaactaaccataattgggtgacccaacctctgcactgaaagaccagcctgcgacacaaaattctccgaaacaaacgaatagaaagtgctagagtcaaaaagagcatgggccacaaacaaatcaactgagatcgtacctgtcaccatgtctccctgctctctgccatccgcagaaggtagcacatatgctccaaaaatacccatagaagaggaagctctcggagtgaagttaacagaagaaccccactgagtcgccggatgaggcagacgcggagctccaaactgagatggtataggagtagccggtgcagtaggcacggacagatactgaggaaaaccctatatagcacgaactgaggagtcccgagcacatagaactgttgcggggggagtggtactgaaaattgctgctcaacgcttgacatcatgttgaaagtgccctgagaagaggaagaagtcactggctcccatctgagcttcccattgggattcctcctacacaccacatccttgtggtcttggttgcagatagcgcacctgccactccactgacactcagcacggcgatgcgcatcaccacaacagaaacacaccagccccagcttgggcttaggaacagcctgatacctctaagtactttctcctgaagtaccctattcagagggtttgccacggtaggggtggtggcgctagtgctgagactttcccctcttgtgggctggacccctagtgttgcccctcctcgcgtcctggccatgaggctgatcaacacccgaagacttctatgactccatggtgtactggtgttgcatctcca

SEQ ID NO: 75917 - DNA, 387 bp, Zea Mays
caacgacaaggagccacaacgaccacgtaccttcaaaccacgacgaccagaaataggtacgtggaaaactaacacgttcaaggccgctggtcagttggtaaaaatcagcccgacctttgatcaattattgtctaaatacgtgaaaaagaaggccagccccagtgatcggccaccaaagaggtctcacttacccacccaggagcaacaacaggttaggccgattggaccacctcaccaatcggaaaggacgggaggtcataatgtccaactaagacctaacgtacacgcatggacacctccactcccatacacacctatgtcatatcattatacatacataccaccaccaccatatatcccgaatcagatgtggggtatgccaccata

SEQ ID NO: 75918 - DNA, 291 bp, Zea Mays
gttcccagcaattggacaatctctccattatcttcaaagcttatgacctttccttcccagtcacattgcatggggctatgtctcttcaaccagtcataatattgcgtcataagctcctaactccaacacccgcatgtcattcctataggtgtggccattagcccaccactccatggccttaaccatcttatcactcttcaagatctccccattggccacttttactttcgctaatgaacacctctgtgggtaaccctacctgatccacgatggcctggctaacgaaactag

SEQ ID NO: 75919 - DNA, 677 bp, Zea Mays
gttgcatagaatggggagtgattggcaccaggtgatgtctcaatatggaagcttccttagccagattgacgagcagcctatgggaactcaacattctgaatttcaagttgatgggcaagccgagggctcaagaacaccagctgttccaaaaaaacatctcaaagaactaagctagcaaacttcactgctgatgaggacactagggtatgccatgtttggcttgctgtcagttgcgatcccattattaacacaggccagaaacgtcaaggattttggagttgaattactgaagcatacaactcaagacgaggaacattgcctgaaaggtccacaaaatctttgatgagtagatgggatactatcaaaacacagtgttccacttttgctggttacatgatggcagtcctccgacagaatcctagtggactcactgacgcagacaaggtacatctttaatgtaacattttcacataagtattgtaggtatttacaagtatgttcctgctgtaaccattttgttttctcgcagacatcactggcaacctctaggtttgcagctattgagaagaagcctttccactttttacattgttgggccatacttaaggaccaaccaaaatggatggacaaccacatggggcaacaaaatcagcatggcaacgctaatcccacccata

SEQ ID NO: 75920 - DNA, 357 bp, Zea Mays
gtctcagagacttccctgctgtagttttggcatagttggcagagggctttttgggcagcattctggcaggtatctaggaagcagtggccagtagcggtgatctgaaagggaggttgattagggtagcttcagctttctcccaggtggactgccatagagcatttctcaatcccgttctcgcggtattccttccagacatactccggcttcttgcggatccccatgcgaagcgcacaactccgaagaaggtgagggaatccttccacctccgagcaataggatgtcttaaggacaaaggtgccttccatctggtagcaagagaagaagggttgttaataccagggaaactagagaagg

SEQ ID NO: 75921 - DNA, 281 bp, Zea Mays
ttggagcaactaatgctagtcgccagtgcaatctccttgtaccctaatattcgtggtctacgtagcattggcgtccagtggaagcttccctggcaacgtacgagtgatgatgatcgtggcgcatgcgatagtatggacgtgccttctaccacgggaatggacaggcatgccacatgcgggatggtctggtcgccgtccgccagcagagtgacagggcacattaaatgttgaggcggcacatcgcttgccagtggagtagacagggcgcatttaatgctgag

SEQ ID NO: 75922 - DNA, 1613 bp, Zea Mays
cgacgaagcagtagggcggacgcggcgccgagagacagagagagcaacatgctcgagggagcgggtgagggaaaggcttcgaggagtgggtacgggctcagtggctcacggcgcacacttttgttagctacgactactggaggaagaagattgcagagagaaagcagaggaaggagacgggaattagggaatttagggtagtgtattcagagttcagtttttccatcccgtcactagagcagtattctccttatatgtgacccggttaccacgcagggaaacccacacacaccacattacacccattcaggtccgtgtacacgagtattagctcggcgagtacgtcgaccacgcccgagcaggtgctggccagcatcttgtggctgtagatcctcctgtgacacctcgggtaatactgctgtgttgacattccctgcccctttgaagcctgcttgcccccaagcaggagcaccagggaaacattgtttgagagcttcgcgatcttcccaggtagccagctctgacggtagaccagaccactccacaaggacctgttgaaccaatctattgcccttggtgacacctcgagtctgcaggatgtttaatggaacactgagctcaagaacagacgatggcagggtaggtgaaacagtgcctttgaacccggtagctagcttgagttgagaaacatgtatgacgagatgaatacggctggacgtcggaaggtccaggcgatatgcgacagctcccactttggataggacgcggtatggtccaaattacctgaagttcagcttctgatgggcacgaggtagtatcgaggattgagcatacggttgaagcttcatatagacccaatcaccaattgcaaacaccctttctgagcgacgcttatcagcttgacgtttcatacgatcctgagcacggacgagatgttgtcggatcagttcttgcatagttgttctttcttgcagccattcagacaactgcactggcgctgtagcattcatggataaccccagcgaatgaggtttgcacccatacaacacttcgaatggagaacgaccaagagcagaatggcagcttgtgttgtaccaaaattctgctgcggaaagccaagcagaccatttcttcgggcagacactgacgaagcatctcaagaaggtctcaagacattgattaacacgttccgtctggccgtctgattgagggtgatatgctgaactcaggcgcagctcggtaccagcaagcttaaagagagtggtccaaaactggcttgtaaatactgggtcccggtcagaaatgatggcaatgggaaatccatggagccggtatacatgagacatgaataggtgtgcgacggaagctgctgtataagggtgactgagagggataaagtgactgaacttagtaaatttgtccacaacaactaaaatgcaatcagctgttccagggaagtccctccacaaaatccatagaaatggtatgccacgcggaacgtggaactggcagcggttgcaacttgcctgggtaagccgagcgatcaggtttagcttgaaggcacacttgacactgctcaacaaactattggacagaagacttcaaattcgtcc

SEQ ID NO: 75923 - DNA, 860 bp, Zea Mays
gaaactttgcttgacatctccaccttgtcgattgaggaggtcaccggtcggctcatggcgtccgatgatggccctgagccagaatcgtctcaagtcggaggcaagctgtacctgaccgaagaacaatggctggagcgctacaagaagaaggagactgagagcagtcgtgctgccggcggtcctagcagtcgcgtcaggcgacgtggaccaaaaggcaaagggcgaggcgccaaggcggatgacacctgcaactattgcggcaaaatcgaccactgggcgagggaatgccgggggaggaagaaggaccagcaggctcagcaaagtcagcaggcacatgtggcccaagacaacgagtcgtctcttcttcttgcccatgttgcagatgtcgccatcaactcctcgccaaagctgaaccaggcacaagcaccgagcgatgcagcggtgatcagcaactcgtcgaacaccacggcagcgcgctcaccacaggagtgtgttcatctgatggagcagaaggtctttgccacgctcgacgaaaaggaggagcgagatccacgacgctggatctttgacacgggggcgtccaaccacatgacagggtgccgcgacgccttctccgacttcgacatgggcgtccctgggaccgtccgttttggtaacggatcaacggtgtgcatcaaggggcgcgacaccgtgctcttcgagtgcaagaacggcgaacactgcaccctctccaacaccttcttcatcccgcatctcacggccaacattgtgagctgtgggcggttggatgaggagaaccaggagatcttgatcaaagccggcgtgatgcgcatccacgacgaacaccaccgccttcttgc

SEQ ID NO: 75924 - DNA, 419 bp, Zea Mays
cctataccagctatttccaatggctttcagtttattttttacgacagtcgtccctcgaccttaataggtcagaaatagtcttatgtccgatggttgtcgtcagacataacttatggtcgacgaccgaaaagggtcgttggcatttgtagttgttaacggtcgtaagggttgtcttatctccgatgtctgtaaagtttgttggacagaacaatttccaacaggggcagaaagcccccttttttgtttatttctcacatttacaaaaaatgcacaaatttcatattttacagattatcacacatacactctcatacatggcaatcacattcgaaattatattcacaaacatcaattcacattcacattctcaaacatcaattcacattcacaaacacattgcaacatcacatatagttcaa

SEQ ID NO: 75925 - DNA, 543 bp, Zea Mays
gaagcaatttcgtgtggagcacatgaccgtcggattgaaaacctagaagttggtctattttgcccctagtagaatgtatagactctatgtagataggggtaatttaggaaatagaaataacccactatagttagaagggaggttggttagttcagtatcgcttggctgccatttgtttagtccctattgtttagaactcctagttttcctctctaggtagttacctcttgtgccaagttatccgcagcgattttgtctatcgactgtgcctgtgtttcatttgaggaagggtcactagattggtccatagttttctgttggcttcaatttcagtttgtgcaattgctgatttttttagtcttttgcttttgagttcttcctttctcttctatttgttatcttgtgaagaaccatcgagttcttgtgtttcaggtgttcttgggatttgttggtgggtgagatatacttctaagatcactacttacgccatgttggtccagtttgtggttgtgatcttagctaatcgtgttttgagttcgttat

SEQ ID NO: 75926 - DNA, 429 bp, Zea Mays
tttaaatcctctacacggtgccagccggtcgatgcgttgctaataatctcccacccattcactgctagagaaggtactgctagctagctagctgcttccttccacgtcgccccgtacgtacgcctcggtacacagcaaacaagatctcgatctcccttcctcctttcctttgggggcatgcaatgccatggctggggctgtccaccgtatgtttatgcgtacgtactcactcaacaacaacagcaaaaaagatcagggtgcacgtagtacgtactcactcatagtttatgcgtacggaagcccccaaagaggagtactacaagtagaggaagtgggcggccttcttttagagtgacagaaaccgtccaactcccatgcataaaaacgtactcatcttcttctctaccacgatcgaggagcggagcgctc

SEQ ID NO: 75927 - DNA, 404 bp, Zea Mays
gagattgtgtttggttgtgtcggtgtttctgttaacaacaactaggaagagtagagaatcggagatggaagaagagcagaggactagggaacgagcagttgggtattaggtaagaaaaattgaattatgttacatatttcgatgtctttctctcttgctcaccacgacacttatttacctggctcgtgcaagagctccctcacattggacacacgcacacagctggacccaagctaggccttaacccgctctgggccggatacacgcacatttggcttgcgctccctttttctcttattggcctagtatcatcttcttgcacacgatcagcctcttcacacctctaggttgattccttctcctcctcatagccgacagtcaccagcgatgagaacctgcttgct

SEQ ID NO: 75928 - DNA, 1071 bp, Zea Mays
agggcaacaaggagtcccgaaagaagatagtttgtatgttgaacttggtttgcaacatgagcatgaggacgacagggaatcaaatgatagggaagatgcgacaagtggtagtagagctagtggttatgataacaatttggatgttgaacctttagcaattttggaacttgaggtaataccagaagatagggtaattgtttatgacgcattgaatcctgtcatgagagttggctccttgtatcctagcatgaaagtatttaggctagctatgagacaatatgcaatcaacaaggagtttgagttaggcatcgaagtaacaaggacaagtcgttatcgaggtaactataagggtgaggactgtaatggagcttttctacaggagaagaaggatcgcaacaaacatgattgtcttgtcggcgatttgaaatgtctgcgtccaatactcaaatttagtgaatctaattaagtagtatccttagtccacgaattgtctgtacacaagcacatcaaataaattgtttgtacacaagcacaagcactagactatgaactttctgtacacaagcacatcaaatgagaactgtccacaggctcaaatattttacaagcatttgaagtttacaaaaaatctactcaacaaatacatttgaagtttacaacaaatcattctgggtttgggggtgaggggagaggatctaaagacacgcacaacagggggaagacaataccttacatttgggaacgaaggcggtgggaactgtctctcgcggggaagacgatgacgggaactgggagggagaccggacggtggcggcggcgatccagacgggatatcaatggagagatgaaaccttagatggacgtactctgttggataagatcatgtgactctatctctatcttgttggataagataatgtgactctatctctatcttctttgcctatataaataggtcccccttgtaccctgtacttgaacaacacaaagtagatctgttttcccgtggtttttttctcctccacattgggggagttttttccacgttaaactttgtgtctcctttttcat

SEQ ID NO: 75929 - DNA, 429 bp, Zea Mays
cgccgtaggactctataaattgatgccccagtgagttccgctaggtaattacgcatccaaagcaccagctctcgcctctgatcgttcacccgagcctcccaattttgtatttcccccaaatcggtcggaacgctgccgtgaaacatctcgcggtggccagtcatctacgggttagttcatgcccttttgtgtgatgttctagcctccctcatgtctcatgttgctcacagacccattcaattgaactagactgccttgaatcgcctagaacaccttggtttgtctccggttttcactgtcgtcgtgagcagacaaagcctgagccggatttgtgcaattgatggggggatttgtgtcgccgagggtggaattagatgtcggccaagttagggctctggtcgttatgtgttttgaccggtataggttcgc

SEQ ID NO: 75930 - DNA, 455 bp, Zea Mays
atctgaaacaatagtagaaggcataccatgcaaatgaacaaccacaacaataacgatcaattgcatcaactttgaatggcatcaagtgcatcacgttttgtccccaatttatccccaatttgttccatagagtacgtcaagtgcatcaactttgaaaaagaggttagcaatatgaatggcatcatccgttttgtgacaaggtataaaatgtgccatcttagaaaaacgatcaaccacaacaaaaacactatcgctccccctcttcgtcctagaaatatctgcccacggaactgaaggaataggaagaggcatatacaaaccatgtgggttcaatcgtgacttagctttttgacacgtcgtgcatcttgctacaaagcgctcaacatcacgccgcattcgaggccaaaagaagtgtgtggacagcacagcctctgtcttcttggcaccgaagtgac

SEQ ID NO: 75931 - DNA, 452 bp, Zea Mays
gggagctaggggacctctcgtactctacgcacggatcggagtcatgactgcggacagggcccaatcggaatcgctcaccggtgttcgtcatcgccgcgtttcagccccgcgctatggaccgactccatcaccacaaattcatgggtacgaccgcttccgttgatgtcactagttaatccttgtggtgtagcgtcacgcgggggaggaagttactcctcgatgggacaggaattgctcatcggtgccactccgatttcggtctgccgcggttcgctatggtcggggagctggacatgacaattggctatagtagattttcgagttcaggagggtcagggcgttgtgcgctggcaattaaacttggaatccaagtctgggggcgtcaggcggagtgcatcggtgacctgctccgccataggggggtctcagtggcgccacccggttgagtcagg

SEQ ID NO: 75932 - DNA, 645 bp, Zea Mays
ccggggcagggggaacccaggaataagcaagggtccggtgcgggcacatgtccaggccttaccctgcgtgctcgcgctacccacgaaggtggaagcccgctgctgccgcgtggctggtggctcgtgacataagccaatgggcggagcctgacgtaaggcctctaaagccaagaggtctctgcatttattgcggaaaggacgcatcgcctgccaccattctaacagacgatgtgccctctcggcatttaatacgtccagtcctctccgctggcagacgacgtcagggtcatcctgcagatggcacacctgtctagtctgttgtcaaacagtgcgcccgtgccaagcagcgcactgtgctcaccatcccttatacaagaagcttccccagcacgccgaggatacgcagatctcggatgtcagggcgcgagaagattgcaccagtggcgaatatctgtagctccaagagctatatccgttatgtccctgggcccatatgtcggggctcagtaccattacgcatgcccccttcaactataaaaggggaggcatgcgatgttacaaggacagggctcacttagacccaagtgactctagacaacgcaagctctcaggcaatacatcacacagtggagtagggtattacgc

SEQ ID NO: 75933 - DNA, 1250 bp, Zea Mays
gcgcagcatggcaaagtggaggtggctgaattgggcatgccagacccaagcttcctcttctcctcgcgtcgccaggcagacatgatgtgcaatgacgatgtcaagcatgtagagctagcctcggttgtggtggaccttggcaagcaggcagtgctcctcgttatggatccacatcaccccgtattccaccagcacttagcacccgatctcgttgagttggccaatggagatgttggttgtgaggcgcgataggtagtagacgttggagatggcgcggtgctcgccggtcttgtaggagaatagcacagtgccgatcccctcgatgtgggcattggagccattgtcgaatcacactgagccagtgacgctggcgtcgagacttgagaataccatctgcgggcctggcatgtggttggatgtgtcattgtcctagatccatcgcttcgagtcacaaactctagaattgtcgaaggcgggtgaataccttttttccgaggaagtggagctgcccatcgccacagaccgacgacgatatcgctgcaatcgaagccaacaccgcgcttcaaattggggaaaagttccctcccacgacacctagggcaagaagtagagtgggctcatcatcctgggccacatgggcttgtagcttgctcctccttaccttggcaatccttggcccaattgtctttcttggcataaattttgcacacatcgttgcctcgttggggttggcatggcccgcattcgtcccgatctatgaaccgttgttgctgtcagtgccgtgtcctcggccccatcgctggagtttgacctgccacggctagacctctagtcctgcttcttgtagtgctcaatgtactgctcctccgtgagcaacaacttgccaccgacggattacgccagtgcaggttcgttgtcatctgttgccttgagccttctagtcacctcgatcgagggcgtggagatgttgaggagagtttcaccggagatgacaagttgcttataccttgggcgtgtgatgtgtaggtactttgcaaccaccttctcgtctggctctaggtcactaagagttgctagatgttggacgatgttggtcagacatagtcatatagtgtagtcctcaatcaattcaccatcctggatcgcgatcaactcgtaagtgcgacgttctgtgcggctgccttttgcacccggtcatcgcaactgcaagggttcttgacggcctcccatgcccccttggccaatggctt

SEQ ID NO: 75934 - DNA, 643 bp, Zea Mays
cagcccctcacccaaactcgagcgcattcaccttgatccctaatccaaaactatgaactcccattagcaaatatgtgctaaactaacccctctaccacatatctgaagatggcattgggattcggaccctagacatgacaaaaccaaagatttgcctcgggctcaggctatgagacagaccctatttgagagctccatatctttggaaccagtaggccaaattctttgaccctcacacataatcggtagcttataggaaggcgaagaggttttgtgcactgaccaaggcaagagcaggcttgtatgagtgactactcgtgccagaactcgggtagaagaaacgcacacacgtgttcgaccctggtcggcacactggcgttcacccaaccctcgctcgtgcctataaaggccaatagcccctgtacgtccttgcctcagcttcacatactcaccacgctcaatcactggagcattggctatgaaccgagagctcctccgcccgctaagccgcccgagctccgaccaccacggccagctcaccccagccgtccctagtccacgccagcagtttggttagcttcgcaagagacccatgaagctcccaagccctcagacccagtgcaacctcatcggaaaccccgaa

SEQ ID NO: 75935 - DNA, 502 bp, Zea Mays
acaggctcgtaatgtacgtgttgcgctggccatagatgggttcaatccctatggaatgagcgctgccccatacacatgttggcccatgtttgttatcccaatcaatctccccctggtgtgtgcttttaaaggcagaatatattcgtgtcgttgataattcccgaacacccgaggaataaaatgggtgtgtacatggagcctttgatcgatgaattggtacgtgcttgggaggaaggggtatggacgtatggctgagctacgaagacaaacttcaaaatgcatgtttggtaccagtactccatgcatgacttaccggtgtatgggctattctgtgcgtggtgtgttcacggtaagttcccatgcccagtttgcaacgaagctcttaggttcatttggttgaaaaagggtggcaaatattcgtcgttcgataaacatggacaatttctccctcctgaccatccaattcgcctagacatcaagaactttacgaaaggtatcgtag

SEQ ID NO: 75936 - DNA, 486 bp, Zea Mays
aattgaatatctctctaatatattatgtctgctcatttgaatagttagcgtcagaaacgcaggatcctgctgcacgggagacaaccttttgatttggtcatctacgactacgactgcgaatgaccctcgcgtaccgtattggtgctaaagaagcgtagtagagtactaggtacgtactgtatctacctcgcaataatctctgcttgcagcccgcagcatggtcgattcctcctaatacaagccatatgcatcctgggcaggacacaagattcggcccgagcgacgacctatgtccatccccatattgtttgtaaacctactgtaccatattgtgccaaatccagcgggccagatcgatagcgtccatagggtcagattcaggcccatcaaagaggtccaaagcaacaaccacaaacttagactgatcctagttctggattcggaaagcccatccacatactactctagcaatctttccactttggc

SEQ ID NO: 75937 - DNA, 581 bp, Zea Mays
ctgaagaggccatgtgtgggcgattagcttcgtgaactgcgaagggcttcccgatcgtggagaaaatttctggcaggcttcgcaggaccttgtgacccgatttgcggcgtagatcatggcgagccagtagaaaccttgccggattacctttgcgactagtgccctgggacctacgtgagagccgcaagtcccgctgtggacttcgcgcaaaatttggacgccttcggtctcggtgacacatttaagcatgggttgactgacccgcttcttgtaaagctgtccttcaattagtgcgaagtcccggcttcgatgtttgaggcgcttggcctcattgatgttggttggatgatagtaaccctgcaggaacatggttattggtgcccgccagtcttcggtcatgataaggttgactatgcggtggccctcgccgtcattggttatttggagcccttctgtgctgcggacgactggcgtgctgatgacatggtagaatacgtcggagggcagggcctcgcctcgggcggctgccttggccaacacgtcagcctcctcattcttggcacggtccacatgctataagg

SEQ ID NO: 75938 - DNA, 287 bp, Zea Mays
catgccggcccatgttgctaaggaaaagactataaaggagtaacacggtctcaggaatggacatcgaagaattattcagagaacacatctccttctccattttgactgtacatcttccttcccacgcatccagttgcagggctctagctcgtctccctctgtgttctagtgctcctctcctctatccagaattccagattgtcttgcttgctgcaaaccttcattctcttgaggttaccagtgaatcgagtagttccgtgtacgagagagaggtgtgtgctaacaag

SEQ ID NO: 75939 - DNA, 347 bp, Zea Mays
caaaactcgagacaagccctttttaaagcgcacttcatagtcatcctcaaggagttgtgaaactgaaagcagattgaaatgcagattcgagaccaaagcaacatccttgagaataaagctctcattcacccgaatggtgccacaagaaacaaccttacctcttgacttatccccgaatgtgatgtattccttaccaatcacggggtcgaggctggagaaccattttgagcttccggtcatgtggcgcaaacagccagaatccatgagccacgtgttctccaggccttcgtcctgcatcaatagtaagacacggggtgagcaaatggcacagcactggggtaagtaaa

SEQ ID NO: 75940 - DNA, 633 bp, Zea Mays
cacggatacacaagggtttagagtggttcaggccgccacaacgtaataccctactccactatgagttatattgcttgagtatggagaagtctgcttaagagtccagacccccttgcatcgcatgtgccctcccttttatagtacaagggggtgcatacataagtgctgagccctgacaggtgggcccaacgaactagtgttaagtaatgtacaccatggagccttaagcgtcgtgacagatgaagatcttccctctctgtcactataaggatctttcaactagacattcctttgcccatctaccgcctcgagttggctacggagtggagtctaatatgctaactaatgtaggggctggccatgccgacatgcagcgaagttaaggtgaatgacccatgcgcgccctatccaaggcaatgactgctcatgatggcaccgcccatgcatgaggcgttgagacacaacgacctgccttggtaacacgtagattactatgtggtctgtcagcgcatgacgtgtcgataacactatttgccttggtaacgcgcggagcgatcatttgggccttcacagcccaacaaaatcctgcccatgccctgtgcacagtagggcatgactcagtcacctacatta

SEQ ID NO: 75941 - DNA, 572 bp, Zea Mays
acggaattaagtcttccaggggtctaaacatgaaattttttcgaaaaagagctaaaataaaaaaaatcggcagacacggaggtcgtacctgagcttcgtcgctgagctcgacgacctgaaggatgaccaggtccactagaccccgtacgccgacaacgtcgtgctccttacggccttttgtccctatgcttttaagacaggggctattggcaaactaggaaaccgctcgtcttcgacatcttcgtggaggagcacgttgtgtaccgggtcctccgccagttcgggctgttccaggcctcctcattgcctgtgcagcacatcattcctgcgaacgtacacaggtatctgctactagccgttgcaattcgttcaataaaaaaaaagacaaaatcatcctctgaaaggacgacaggaccatatttctacaaattttaaaatttgtacaatatttttacaaacaaaattaatttaaatataaaaataaaaaattggagagctagcattggcaagaacgacgctcaaggaaaaacgcgagcgctcgcgacctgtggaatgatggcgcggaaggcaaa

SEQ ID NO: 75942 - DNA, 590 bp, Zea Mays
tagctctgggtctggacttgttaatgttgccaggtcggacagatattgcttcagagactcgaaggcgacggcttgttctgagccccaagcgaagtctttggcatcgcgtaatgttttgagaaatggaaggcttcactcggcggatcacgagataaatctgttcagtgcagccagcctgcctgtcagccgttggatgtccttagtggattgtggcggtgccatgtccgtgatagcttgaattttgttcggattggcttcaattcctctatgcgatacgaagtcgggcaccaaattttgttcggattggcttcaatcaattcctctatgtaaccgaggattttgccttggtgtacaccaaagatgcatttttctgggttcagccggagtcgggcttcacgcatgtttgcgaatgtctttgtgatgtctgataggtgatttgctttgtttttactcgcaacaactatatcgtcgacatatgtgaagacgttgcggcccatctggtcctcaagaatctttttggtgagacgggagaatgttgagccggcgtttttgagtccttcgggcatccgcacgaagtagtacgtgccgaa

SEQ ID NO: 75943 - DNA, 339 bp, Zea Mays
gctgggtcgaggatcggtggggcgtccttgaatcgccggtggttctgggatcgaggatcgacgggacacggctcgctaggcgaatgtctggttctgtttcgattttttggttcagttgcccttctgattgaattttgcgcggttcggttcggtgccctacgatcgaggaccaaacaagtactgttcgcttttacttggtgccggtggctgtgcgtgtaacatgttcgattgatttcctactcgaggtagtgagatgctggcgtggaggacatgtgcaacttcagttgggagatgacagctagttatttccaatgttatgtggaaattactgaacatttc

SEQ ID NO: 75944 - DNA, 859 bp, Zea Mays
gaaagttcagctacagtaaaagtaataagttgttaatctgaagccagaaaaaaaatactaaagctttgaaacaattaaaatacctatgcgcctagcgcgctcggcagcctcttcggctcgcttggcttcttctcgagcttcatgagtttctttctcattctttttatagcttcggcgtccaattcttggcggccttctatcaaaacgtttgagtaaaatttcccgcccaacagagttgcctcagccgaaggatccttcgtgttctccacggtgaagatatcttccgtctgggttgcagctttaacatgatcacatcccgatttttccaaaattgttgcataccctctggcaccagcaaaagcacaaaaatcaccacggtcactgaggatctcttcaaaagcttcagcttcttcaccaatccattcgataatcctttcaggatcgcctctaataaatttttgatcggatgagtaagcacccaccttcgcaaaactatctttcagcttgttggcacaatccaaggattttcgtaatatctttcttttgattcccgaagctcgtctacattcttttgcaatcttgcgttagtccactcgcttatctcctgctttgccttagccacttcaaagtcttcattttctcggcaagctttttctttaaatcttcaatttcagctctatgagttgcgtagtgcgcgacaagattggcttcactagccttgactctgtccactaaggaaagcaaaattttgtccttctctgcagcctcattcctcagtctgataacttccgaccgaaggttgctaagggctatctggcaactttcatcctcatcatttttctgtgctctcaaagcgttg

SEQ ID NO: 75945 - DNA, 604 bp, Zea Mays
taacataatatgatgaaggtataaatactaacagtatttatgtgtggtgttaattcaaaaacagcaagcttgtcggttgtgggagcctagtgaataaagtaaataaaaacatgaatatatattattgttacttgcataaattgtaattgaaagtataataactgtgaataaaggaaaacaaacatttgattttggagtcttgtcaaatatagggacatccataactgatttttttcacaaacgtttccactgacaatctgtaatggaaacatatgaaatttgagtaaacaataacttgtatgctatatttaatatatgatttatatataaagtttgtatgaaaaaatttacctgttctgatactttgatatcatcagtaggaacatgtatttcctgatcatgttgctgattatcaggggttggaacaggtggagtggatactggagcatttgttggaggcattgaggtagtgggggatatctacatttggaaaatataataataaagtagttgttactgaaatgtaccagaaatataaatgtatcgttataaaaaaatggttaaacatacatatcatcacaaactacatcaatatactatcagg

SEQ ID NO: 75946 - DNA, 384 bp, Zea Mays
ttgtattacagatatgcaattttaaaactggtgacagatgtagttacaagtgttaaattggacaagtgatatgttgaaccctcagttgctttagacttcagaatttatcattttttaatagaatggaaaactttactgtcattcgcttttcctaaaacatgcatattcatgtctaggccatcatctgctcatcaacttctctcttgcaagtgatctaaagaggacttgaacctgggtgtggggggtttactttacacccatacctccaaccagctcaggtccttataaaagttgttgcagtaggttcactgattccatgattatttgatgtgcttcttataataaaagtagtacattggtcttattagttgaatgtgtcatgag

SEQ ID NO: 75947 - DNA, 884 bp, Zea Mays
gatgaacgccaagaaggtcttggttcggccgaaagtgaccaataaatgtaagggcaagagcataatcaccgatgatcctcacatgtccaatctgtcgcaaggagaggtttcttagaaggctccaggcaagagagaaattgtaaggaccactaatgaggctaggggcaccgaggagcaagcatgatatcccatcaggccgatatcttctatccagcacccatcggatggttcggctacctataaaagatggcctggactccacgcgaatggttcagctacctaccacagaagttccaagaatggccagtgatgccgacgacctcggacctttagaccgcgacatgcagaggtaggatcatggaagcaaaatatgtccaaggcatctggccgtctcgttagcgttgtatctacttttgatcaacttctctctaaatatataaacaagaaggttgttctacacggtcggccaacaaaatgatcaaagtcgtctgtaggaaaaacgcgatctgtgtaggggcaaaggctgactaaaccggcctgagaagtggcgtgacaaatgttgtctactcatttgtctctagggatatcgtggtactttccacctgtctagtcatcgccgatattttgtcgttgtcacatgtgggatagtccgacacctcgcaaagccaacctaagtcctacacgtgacgtgaaatccctagagttcgctagtatttggtctaaaaatccctagaaaaggatggtagttgaaataaaatgatattatatgtttgtggtggggtataaggaatgatagagtggaaactattgtcgaagatagtaaaataaaggaaggaatgtggctgacatgatagaaaaaatgaggtataggagaactaatttag

SEQ ID NO: 75948 - DNA, 286 bp, Zea Mays
gcctgaggcatcacaatatacatcaaaaggcttgctgctgtcgggttgcgccaatactggtgttgtggtcagatgctgccttaatgcatgaaaggcatcttcacacttctgactccacacaaacttgacttctttcttcagcaactcagtaataggcttcgtaattcgagagaagtccggaataaatcttcggtaataaccagctaatcccagaaaacttcgaatctggcgaacagttgttggtggcctccagttcatcacctcttgcactttatcaggatcaaca

SEQ ID NO: 75949 - DNA, 761 bp, Zea Mays
cgagccaagagcaaaaggggagagtgccgccacacgggattcgcgtctacatgcaatagtcgccttggggggtacttggagggctttgtgggagcactgtggaggtatcttgggcaaccccgaggactgcgacaactcgagaccatgggaatttgtcatcgtgatcttcttctccaccgtggtgtgcctgttgccgggatcaagcctcatcgtcgtacagtcgcgggtaattatggtctaatcctattcatgatatcgtgtgcatcgcgtatgactacttgggggtaggtttggggaccctgggcgctcaacggagagaactccgccgcgggagggctcgccgtcgtcgttctgctatggcctgaggagggagatagggtttgaccattggatactcgttggacggtgttgatcagagtgatggataccccttcgaccgatagaaccctaaccgtagatttgtgatcttagggatacgagcgaacccggttgatttaaaatacgagttgttgatcattgatccactggcccgcatcccatactgctttagtaggatctagatctaatcctgaccgcagattcataatcgtgtggctcagattcaaagatatcgcttcgaccgcgtcgttttgcaaaagaaacctcgtaggaaacagaaattaacatgcggtccgtagagcgtagtgaagagtttaactccgagtcttgggaattttatgagttagcccccgaactccctgactattgtgcgcgcagtccag

SEQ ID NO: 75950 - DNA, 830 bp, Zea Mays
cgccccaagcaaacgacacacctttctttgtaagctcgtgtagaggggctgcaatggagctaaaatcacggacgaacctatggtagaagcctgcaagtccaagaaaactctgaatctgtgtgaccgtcatcggtgtaggccagtcccgaatggcagcaatcttgctactatccacctctatgccctgtggagtaacaacataaccaagaaacgagacacgttgtgtgcaaaagatgcatttgtccacgttaccaaataagcgggcagcacgcaacgcatcaaaaacagcactcaattgttcgaaatgctcttccatagtcttgctgtaaataaggatatcatcaaaatagacaacgacaaacaatcctatgaagggccttataacttcgttcatcaaacgcataaaggcgcttggagcattagtcaatccaaacgacataaccaaccattcatataacccaaacttcgttttaaaagttgttttccattcatcacccagtttcattcgaatctgatggtatccactatgcaaatcaatcttagtgaaaataatggcaccactaagctcatctagcatatcatcaaggcgtggtataggatatcgataacgaattgtgatgttattaatagtgtgacagttgacacacatacaccatgacccatctttctttggaacaagtaaaacaggaactgagcaaggactaagagattcacgaatgtaacctttatcaagcaacacctccacctggcgctggatctccttcgtctcatccggattcatacggtatggggcgcggtttggaagctgggcaccggggatgaggtcgatc

SEQ ID NO: 75951 - DNA, 534 bp, Zea Mays
gttccatgcaccagtggtcatcggggcatcggtggccaggtgctcggtcaggggccaccgcggttggggcaagtcgtcacccagctcggactgaggaagaagaatagagcttggccgttggatttggaatctgtgaccacaattagttttgcggcttgaatagttctgagccgtggggataggaatcaactgtcacaattagatctagatgagtcatgggttccggccttcggatcgaatctcggtggccaagatctgtttgcgcgcatcgcttcggtgtgtgtgtggtgcgccatccgatgcagatcggacatgggagaatcgatcaccctgtttttagtcctatccgtccatcgtggatcctacggctagtactgcgtaccggttcatatcgggccgatctaatctggtcggtcagattgtgatcggatggctgacaatcaagcataccccttcgtggtgtaacaattgctaaagagaccctagggaatcaactaataaacctgcagtccacctctgagttgtctgagtctg

SEQ ID NO: 75952 - DNA, 705 bp, Zea Mays
cggtgaccattttcggggaaaaccggtgagctcgagctacggtggatgaggtgaagtagtgagaagtggattgaatgcataataggatggtggagagaggggagtacccaatttaaaggaaccgatcgtgcacttcacgaatgtggggcgagtgtgttcacgacggcgtcgagatatttgcaccgagacctgttcttcatggcacgccgtgaaacaatggcctcgggtagtaactatctacccgccacaactcccagcaccgtggtgaattggtctatggcgtggcacaaccaaggaagacggcgaccaccacagcaatggccgctcggccacgtcgccgtgcaagtggatacgacagcgcaaggctcaatccactcccctatgatattttcacctcccccggtaatatccagccaaaccaagcaaaattttcatggcaagctcgaatcacagcgtggagatcaccggcagcaaggttcactgaacctgtgatctaattcagtttactgtacaatgcaatactccatttcaatgtgtttgacagagctacattgagggcatattactcctatttccatgtagtaacataccaactcgactttagcaaagttgttcttctatataatatcttcaactttgtcacagcgaccctggtcttaatctcacaagatcatccataatttgtcactctaggttcaaaatacc

SEQ ID NO: 75953 - DNA, 460 bp, Zea Mays
aattatccacaatcaatctaaataacacaatagttactgcaaagtagttatgctttatcagacatctcgtatcagttgcaaattggcagtatgcagttgacaaatatgtattgctagaagatatctgttcaatagcaacttacggacaataagctgatgtttcccctgttaaaccatgtgcacgcatttgataaaacaggacaagcactacagcaagatgccatggattctggaggatgagacgggggaacatcagtatcagggccaaactgaggatccacctgccacatactattcgcttacgcaaaaaggcaatgacatgattgctgttcaagttggttcctggtactatactctctgcttccctctgttgttattagtcttcaaatgaatatatccatcatctgaacatacatgcttgcaagattcaagtacgttaaattgtatatatttcatcaag

SEQ ID NO: 75954 - DNA, 1274 bp, Zea Mays
taacgaattatgcagccaatcatattactttttttgttaacaattagactgtttttttaactacccatcttttgatgatgaaatcataccagaaaatcatacccacttgaggagggtcacaatcacacttcagaccatttaatatgcaaatgaattctagaatgatggagttcactagatatcagatagaatggaccaacaaattcctataatccaaaattcatcacatacctctggaagccggtcgacatcctcttcttccgccagctgatgctgatgatgaaatcatacaagaaaatcatacccacttgaggagggtcacaatcacacttggatacagaccatttaatatgcaaatgaattctagaatgatggagttcaatgtatatcagatggaatggaccaacaaattcctataatccgaaattcatcacatacctctggaagtgtgtcgacatcctcttcttccgccagctgatgctggtcccaagctcccctgcagtgcgcgacagcggggatgaagaatatgaccgactacaataacatgaaatacctcaagaaaaattgttgagatctgcttatattttaggagactcctttccccaagcttcacaaaacaaacgccccacaacaaaaacacccacaacagtataactataagagaacatgaagtttcaggcatagcaaacacttatcataatcattgattaattcacacaaataaacacccgtttttatttgaaagaaaaaccaacatgtgagacatacctccaagtttgcaagcccatgggacaccatctcaatcattctggtccttgtctgtcatcacaaaaatcaagggtaagcttaactaaacttttattccacttactaaactataataacagaaacccaaagaagctagaacaatcaacgaccctaaggatttactgcatagagggttcattaaatgtttcttcattatcggaagtaattatgaccccatagaaatcaacaagagctaagcagctacagtaaaatagtatttggcaaaactgaacaacattttttgtgctgccaaactctcacctcctgatcggatttatcattttcgaacttggggtagaacgtagccctgatttgggcctccatgaaggtgctattgtccacctcaaagcccaggacagacttgaagagtctcgagagcttttcaatcgcaatgccgtcgtgctccgctgccaccatcctggagatcgaggtggacactgaagcaatgccaggactgtccccgcaaa

SEQ ID NO: 75955 - DNA, 511 bp, Zea Mays
tttgaaatttcgttctgcatatgtagagattgttctcacaattatctagcattgtcatgtagttctagttgcaaaatggttattcagttacaccacagctgagccacatcgagcataatttgttaattgtagtttctgtattgctttgtcgccccccgcaggtcgagtttttttgtactgctttgtcgaacaggaacattttgtattgtgatggtagtagaggcaggaatgtactttcttacttgagttgcctgcctcatgtaaatcccacttggaggagggcatatgctcccatcagtcctcttgatcttgctatgtcttgccccccacccccactaccaccaagaaagaagaaagaacatgcttggtttctgcatgtgactaccctattcttttgctttatgataatcttgtccttatttcatgactggctttagagtttagaccaagactctgtttggcatggctccaactctaaactccatattgtagttgagtagagccatccaac

SEQ ID NO: 75956 - DNA, 826 bp, Zea Mays
cggcttggggacaagccggaattcaaggggaggagaatgtcatagtaccggaggagaacgtcaaggtggacaggccgaccagaattcggaagcccaatagtaaagttagtgggccggattggacccagtagttatctcgtttttctttttgtggctgatctggattgagtggagtatttgaggtggggtttggagtaggtaaaaggtgacttggagaagaaggctggccggctgcgtccggagaagaggcggctcgccgtcgtgtaagaactccagatacttttcataccctaaagatcttcgtgagaggagacgggtgccgggagcggtgctcaactcatcaacaacccagcagtgatcttacagaccaccaccgtgtactcagagagagacagaccgcctgcgcgccgccgttgatcggtgaccacaccaacgccggggttggatgagagagcagtgaggatcgccggccgccacagaaacccccgttcactcactacgggaatacaagccccagacgaccgacaatttctcgtcggagcttcatccagtccgccaagccgctcctcacgccgaccggaccccttcacactcctccactgttaagaattgttctagcacctcgtcaacatgttagcagaatattggatcaatgggtaggaaggattaggccatacgggatcgggactttctcgccgttgttaaacgccgccgcggatttggggttcgccgtgggccgcacggattgtgccaccttcatgggtactttggccgccactgtgatcgtgtagtcctggcgtagcgaatagagggacgtgtggtgaat

SEQ ID NO: 75957 - DNA, 441 bp, Zea Mays
ggccatatttgtgggggcgagcgttcacagtaaggactgatcacttcagtttgaagtacatattggaccagcgcttatccaccataccacaacacgcatgggtcatcaagctatttgggtatgacatagaggtggagtataggccagggaagatgaacggcgcggctgacgccttatcaagaagggatgaagaaccagcggtagcactgtccactccaactctggaagtttttgatacactccgggaagagacattgatagatccgtaagtccaggaactgaagacacaattggcggcaggaactgcaggagaagaatgggctgaaaaggatggattgttagtatgccggggcagagtcttcgttccaaataattcaagtgtgtgggatcagttactgatggttgcgcatgtggcaggtcatgtgggagtagagaatttgc

SEQ ID NO: 75958 - DNA, 443 bp, Zea Mays
gatcaatgaatcatatgaatgggctggttggggtggcttttatagctctcaaccacccatatagccattatggcacatatgccaaactgggcacaggtggacggtccgtggctagggctcggatggtccgcaaccctccaatggtcggatctaacactgcaacagttatgtctgacaacccaacggctagatcaacatccgtcttccctcggtgacgacacacagatggtttgcccttggtcccgaacggttcgtgctagctttaaaaatccttttcctcaacttgtcaccttcgagctgaagcaaattaacataggcagatggtccgcgaattatagccggatggtccgtgattcatagtcagactgttcgcgatttatagttcatgtccaaagtcattgcgatgttgcggacggtccaccggaaggggttggacggtctta

SEQ ID NO: 75959 - DNA, 497 bp, Zea Mays
agatgggaatcataccgaaggttgaaccgatgtaaggtgtgatgccctcactgtaagtgtgttactatagtttgtatgatgaggctgtgtgccttcacgtatccggctatgtctataggggcgttgcgcgcttggtctggcgcattcattatgttggtctggctgcgcctgtggttggtctgtgcgcggatagttttttggtgtagacttgtgcatggatgtaatgcgcttgcgttttggcgcgcttgttgatttagtccggctgcaccctaaggcgacttttgcacggatagtcttttgagaaggacttcgattttgcgcacttgttgtgctagtccggctgcacccttaggcggcttttgcacggatagtcttttgaagaagacttcgattttgcgcacttgttgtgctagtccggctgcacccttaggcgacttttgcacggatagtcttttgaagaagacttcgattttgcgcacttattgtgctagtccggc

SEQ ID NO: 75960 - DNA, 989 bp, Zea Mays
ggagagggaaggggaaggagggagagaggagaggggaggggaagctcaccttgggatctgacgatcggcggcaaccgtccaccggatcacacctagggcaagggaggtggaagagaggtggaagagagggagagggaggttgctgcgcagaaaaagaaaatgagatagggagaagaggggggcgcgcatgggggggtgaggcgctagggtgaggttgctgcgcgggaaaagaaaacgagagtaatgcctgaatttggtgactatcggagaagaaaaattatacccccaaatttagggcgttacatcgccgttcacacaccacaaccataccgccgctcaccgtgggcggacgtcctcactgcgcgataattggtatggtgtcgcccaccctgttctctatgtcgtgcactgcgtgtaggttagttctggggtgggggttggtcacctggggccgtagcgggggctcgccggcgtggttctgccgaatgctacagtcgcatcgccgtgtttgggtggccggtgtgggaaagggagatgggcgtgaaccattgaccgctgatcggaaaatcgatgtgtgagattagatgctagcttaacccttcacgaaattaatcctggttgtccgatcggatcgggctgttggtgctggtgtctggcgtgggggtctcgtgggttgtccatcatcgatcgtgtggtcggcataggatccgattcacatagacaacccctctaatcggcacccttgatcaaaaatccgaagttcagtgatcatcggaacccccccttggccgcaccgttttatgaatgagaccctgtactttcttgcaataaatccgccatccacaatagtattaagattatcgcagaaaggtcctaaaatttacaagttgaacccgtgttcccagaatatcatgcgcgccatccctgggctttaatgattcatataaataatcctaggaaaatgaattttagtagaaaaataaaactat

SEQ ID NO: 75961 - DNA, 331 bp, Zea Mays
cggaaccaccttttcacttagctttggcacgtcagccgtctcaatgtgcctaggtcggtgcgtcaaaactttaacctttttcgacctcgacacactagaagttgtcaaggtagcagctttccttttcttcccttgttttcgcatgggataacagtagtctgggaacacaaacccgatagcatcaaacaccctattcaatctctttttgccccgagctccgaaggcagttgtcatagcttcatctttgtcctttgaatatgctccaagcaactcatcgctagtcgcctgtatagcatctagccagtcatcatttagttcatcaaactggctc

SEQ ID NO: 75962 - DNA, 307 bp, Zea Mays
gcccgcggcggcgccgccccgtcgtgaccaaatccagtgcccggagctcgacaaatcaagtggcgaggtgtcaaaatgctcccaatatcatgacggaccaacagagggtgagattaccttaaatcgagatgggccacaagcagaccacgatgcgaggcggtccgacggcggcggacgaatcccccatgtgaaattccttgttgtacctccccttctgccgcacagagaggacacagacgccaacccagtgcggccgcgaatgcccccgatcgatcatcccgagttcgtcggtgtggtacccacggct

SEQ ID NO: 75963 - DNA, 345 bp, Zea Mays
catccctaagaagtgggcaccttttttcctttcgaatctgcttcaacctgatgccttcaattggtcgaagtcctttctgttgtcagaaattccctcaactctgcaggagccgggactgaaatccctcccttttgttgtccctaaggaatgtccgaatgattcctctctggaggatgtcctttctgggatctccaaggattctgacagttgtgatgggccgacaccaatcattgtggagtcagaactccgaagaagcaaacacttgaaataatcacgtgctgggttcagacatggggcttgcccaaaaaggaactacctcatgtgccaacataacttcgatgcccc

SEQ ID NO: 75964 - DNA, 500 bp, Zea Mays
atggattcacatcgagttgtttacatcttgtactaggtgcttttggtttgcttcagcttaccgaaaaggcaagggcatgtgttgagcaccatatttggcacctaagcatggctagacggtccgtgattagattagctctcgggggaaagtccctttcccacgtgtgcttatccgctaatcatgcgagaacatgttgggaagcccctagaaaggggtacatccgattgaagggatcccaatcgcatctttcaacacaatctaccttatttactttgttcttcattgtattaggagtagaagtaatttagaccaagtttagctttcctccaaccatattcttcatccctctttgactctacgccgtctagggacacgccctgggtacgttttggaacttctttcccgacggggtcattcccgggaggcgagttctagggcttctgtggaggaagaaaactctacgctatggtagaccgtctgtgccctatgctcggaccgtt

SEQ ID NO: 75965 - DNA, 367 bp, Zea Mays
tgatgattggctgaagcttgtggagaagatgttgattattgcccaatgctctgaccgggagaaggttctctatgcttctggtcatctgacagatcctgctactgattggtgggattcatacactgctacccacaatgctgctgatactatcacatgggtgaaattttctactcatttcagaaactaccatatttcccactggactgatgaagattaagaagaaggaatttctgtcgctgaagcaggggagcatgtcagtaagcgagtatcgcgataagttcattcagccctccagatatgcaccagatgatgttgctgaagatgagaggaagcaggagcactttattgaaggacttaatggacctct

SEQ ID NO: 75966 - DNA, 275 bp, Zea Mays
gcttctctacggctgcaagtgcagcagcacggtcaccctgcacggtgaggaccccagtcggggatggcatcttgaggaccaaatacccgtaatgggcaatggccatgaatcagtacagggccggcctgccaatgatggcgttgaaggggaggttgacttccgcaacgtcgaacacgacgttctccgtgcagaagttctcctcagtcctgaatgtaaccaggagtgcaatgctcccaaggggatacaccggttgtgggcccactccggagaatggg

SEQ ID NO: 75967 - DNA, 793 bp, Zea Mays
gtttttgatgctattgggttcatgtaccctgattaccgctacccgccacgagggcaaaagaggaagagtatcacttccgggaaggattctgcttcagctgctccaagcgagcccacgccgaagaggaaaaagttgaaggttcttactcatcggccacgatatattgaactggccatagtgcctgaatttgtcggtgagacctcttcggctactgaaaccaaagaacccgcgattacgcagaaacctaaagagccggccgcagtcccgaaggcatcattggccaacttagatgagccgaaggccgatatcattgaagagatagaggtcgagaaaataaaatcattagaagttataagcccttcggcagaggtgacaatgccgaaggtgcaaaaggatcttacgacgactcccaagaggaagaggatggtcaacgtactagatgtgctggaaacaataaaatcttcaagctctaccccgaagaagactgccgaagcttcaaaaacacaaattgatgcaaaactatctggagccgaagctaccaagagccaggccgaaatcgaagttgggccttcagagcccgccaaggataaatccttggaaatcggagaggaagaaacgaaaaaagaagttgcagaacaaattctgtctgaacaaactaccacccctactcccgaagcatcctccgaagttctagattatattatacgacatgcttcgggaaaaaggttgtctgaaaaagagaagcgagaagctcaatattatgcccagaaattgaaatatccaaagggggcat

SEQ ID NO: 75968 - DNA, 661 bp, Zea Mays
ctcattctctactctctatgtctagccatatgggttcagtgaggggcagttcgaatgggtgaagtggtgatttgtgtgcttttgtcaattccgagcttctatgcgtgaaattttgtaactcacaggtttctcgcagggcttggatggttatctctactgtaggggtgtgtacgacaacacttttagctccactgatcccgttgcttttagaatcttcaaggcaaatgaagctttgatgttctcgccatggagtattccatgtgccttctcaactttgatgttctcaccatggagtatttctaaaaataatgtgttcattcagggattggatgatagccacatagaggacaaaaaggaagagggactcagtttggagggctcatcagttaccaaggtgattatagttttctgcttgttttgttatgttgtgactgttgcataggagatttatgtgtggtttctgcatgatgtgttgttagggagggggcctattggatgccatgtttgatgttccaaaggtcaatttcctatcggtaagatgcatctcaatagtttcacctatacttttatgtagtttcctgccctatctcaaactctgttctggtgtttcaatgtatcaaaggttttgcagaagaaaattacatcgtttgatggtgatgag

SEQ ID NO: 75969 - DNA, 644 bp, Zea Mays
gaagcttccaatggtacagtacactaaaatatcccaagattagataacttcgccgacggtgaaccgtgcacccggattcacaccgatcgccgtgattcgtgccgtagggaagtagattgcgctcggtcgtgaaaagatcaagtcgcggatgagtttgggctattgtggcctcgctgttcctcgaccacttgcaccggcgacgtggccttgcggccgtcactggagtttgtgcccttcaccgtgaatttgccatgcctccggccattaaccatttcgtcgtgagttgtgatcgttacccagtgaccgtcgtggcttcttatcccgcaattgccacgaatcactacgccagtaacctctcctcctctccgaccgccgcgcgtctccttcaaattcactagccaccgctcaggagacctataaattgagcacgccatgagctccgtagggtaattacccatccaaagcaccatcacttggctccaattactcaccagagaccacgaattgctcatctcccccaaatcaggtttccgccaccgtgaaaaggtcctcaccgtggctagctcgattcagatccaatcttgtcctctactctgttgtttcagcactcttgcatgccactgatgctccttgacccactcgat

SEQ ID NO: 75970 - DNA, 800 bp, Zea Mays
ttataatattttactctgttataggtattgcatggttacatagaaactattaaaagaaatttcgctaacataattcaacggactgtccacgcatagcgcccatagtaattaaactccttccatcctaaaattataagcggtattttgtcagttatcgaaaaatcaatatcatatcagtcattttgaatacaccagtatagccccgtaggttgcgacgacacataaattattcgataaaatgttattacaaaataattagattgctgatgtttctccatcgtctcccgcagtccgcaaaccaaaactctacaccaccgcggcaccacaagagggagatgttgtctttatgcggccacaggtgttcatagaggcattcccgctggctcacttgctgcacgttggagataatattgaaaggatatatctagtgtatctctaggattcttttgcattagttttataatatttcactctattacacgtattgcatgcttacataaaaactattgaaagaaatttcgctaacatgatttagcggactgtccacgcatagcggcccatagtaattaaactctttccatcctaaaattataagcggtattttgtgagttatcaaaaaatcaatatcatatcagtcattttgaatacaccagtatagccccccgtgggttgcgacgacacacaaattattcgataaaatgttagtacaaaataattagattgttgatgtttctccatcgtcttccgcggtccccaaaccaaaactctacaccaacgcggtaccacaagagggagatgtt

SEQ ID NO: 75971 - DNA, 609 bp, Zea Mays
gcggcgttggattctgctaaataatgggccatttaataaatcatctatatactacttattaagactgtaaaggtagtctgcctctgacatgttctgccaccggtctgttctgccgttctgccatccaaccatgcccacgtgcaataaaaaaaggtaacaaagacttgggatcgaacccatgaccactcacttagctcatcccttcaaaccactagaccacctttgtttctttgttagaagtaacactcggtctccctttaccattttcgtggttctactactcatctctactacaccactcgcttagacacggtgcattccctgcctccagactcccacgatctccactacacgcgaggacgactctgcccgcctagaaaccaccgcttgctccgaaccccaccatgatctccactacaccgcttgctctgaaccccaccacaatctccactacaccgctcagcctcgctctgtgccttttcgctcgccgcctagtcaatgtggattcggcctccatgtaagctctctacatctacctcttcaatttctaggccctgtgttgacctctccaaaacctagacctacgtcttaacctaacctcaaattgtt

SEQ ID NO: 75972 - DNA, 465 bp, Zea Mays
ccaagggccatactccatatctaatgaattcctcaacaagatcgcgtccgctactcatgcgggcagcataccgaagggccccttcgtcctcatagtcctgcgccacctcgaatggtcggaacaccacataaccgtgagagcacataatggctgcagggagcctagggagattttcgacttcctcaccagagatataaaaccaaaagtcccaccagttgccccacttgttccgagcacaagggactatttccacaacttccgctgaagtctttccagtcctcggtgtgaaggtgcatgatccaaattgtgcaatcttatttcctattttcttcttttgccagtgcagacaatagtttttggcgaagacctccatagacggctggccgccgtatgaagcaaccgcccaaacatacttcgccagggcaaccacgtcgttaggtgtcaatttgtggacctgcatgtcga

SEQ ID NO: 75973 - DNA, 301 bp, Zea Mays
gctcattatactctcattggggaaacactatacagaaggggcgcatcaggagtcctcatgaaatgcattctttcggctacagggaagcaactactagaagaagtccatgctgggcaatgcgggatacacgcagcatcaaggactctggttgggaaggtcttcaggtctggtttctactggccaacgacgaagagtgatgcagccgagttagtccagaggtgtgaagcctgtcagtacttatcaaaacagcagcatctaccagcacagcaactgcaaaccatacctgtaacctggccgttcg

SEQ ID NO: 75974 - DNA, 273 bp, Zea Mays
gaaggaaagaagcttggccaggaataaaaagcacctagaccaaaaggaggaggccatcacagaactccatgataggctgaaagcttataatgcagtgctggagaaatagtgggacaagcaagctgcggctgaggcgaagctgcagcaggaactctccaacaaggctagtgatattgctcgtgttgagggaaacctcaaggcgagggaagcctccctggcgaaacgaacaactgacctcgcttggcaggaggaggacctcgccttcagggagga

SEQ ID NO: 75975 - DNA, 296 bp, Zea Mays
ccttcttgtcgtagcctctacatgaggtgagcccttcttgtcgtagcctctacatgaggtgagtttcaaagttggtgtatgaactgatgaaattagcgataatcaatgttcacatgtgctattgagttatttttgcacaccgtttggcagttatcatgcttattactatcctacaaaattattatcccatcttttgtatttatgccagatcgaagctaactgcctggggagcacaaaagcgaatgaatcatgctaataacaggttgtattttggcagttctcatctggacttccac

SEQ ID NO: 75976 - DNA, 749 bp, Zea Mays
tatagccttcagagtatggccacttgtagagaactgggaaatgtcaaaggagactgtcaccaagtctggcgaaggtgagttggttcgattgaaatacaccttcagatacggagataaatttgttgaaccaaatgatgactgactgaaatgtatcgaagctacaagtgatgaactgcttgggtcgtattccaaagcagaagataatgccttatccgcatcctttgggggccggggaaaaaagaggttaaatagagtttttgatgccattggttttgtttaccccgactactgctacccgctgcgaggacggggaaagaagaggaaggatgctgcttcggccaaaattgctgcttcagccgcccctgatgagcctgcgccaaagagcaacaaactgaaagtccttacccaccggccacgctatattgaaccggtcgtggtgcctgaatttggcgaagagacttcttcggctactaaaccaaaggatcccatttctcctacacagaaggctgaagaaccggctgtaatgccgaaggtaccctcagccgagctagctgagtcgaagactgataaggctgaagagccgaaaatcgaaggaacaaaaatgctagaagctttaagcccttcggcagaagtaacagtgccgaaggcacaaaaaggtcttgcggcaactcccaaaagaagaaggatggcaaatgtactagatgtgctagaatcagtaaaggctttaagctctactccttcagagaaaa

SEQ ID NO: 75977 - DNA, 473 bp, Zea Mays
acaaatgttttgaaaagcgtgcttagtgcaagaacatgttcgtagcaattgtgtaattctataagttagagctaaccatccatgcactttgccccaccactagaatgcaagactaagggatccaatggtgcatctcggcaatgaaagacgggaccatgacgccgaaccatctcctccccatatgtcacctatacaacatttatgaacttagaaatgatctttttaatagttcggctttttagaatttcgagtcaaaactcacgaatcgatccatggtcgtctggctactcagctgctcggggttactaggatctagtcctttgtggcccgctataaacaccttaatgttgctaggcttttagccactcgtagcttcctggcttgagaaaaaacttttaaaaataaacatactaattagtgatcgacataattacatcaatcttaacattcgtttggtttttctgaggtagttg

SEQ ID NO: 75978 - DNA, 370 bp, Zea Mays
aatccatgaaccatatgttctccaggcctccgtcattagaagaagagttgtcaccgatgtcttggtcgtcattgcccatcgcatcatcaccaagcgccccatggatcccccttggatttgtacttgctggaggtgtactctcgatttcccttgcgcctctgtgatagacagcaaagaagacaaagcaaacattgcaatttaggggttagaggaggaaccacctctagagactagggccatggtgggtgcaccagggttctcaatcttggcccaggtctagtggtcaaactctgtggacttgagcttattgaacagctcgtccacggtgagaatctcatagttaggcgactcgatgatcgctggaaccttc

SEQ ID NO: 75979 - DNA, 413 bp, Zea Mays
attgtgtcctgttgttcaatgccctaggttcaatgtctccataacttgaatggtgtgggttgatgtttggaacgatagctgcgatgacatcttaaatgttgccatgacagagctaggttcatactctagatcccaattaggtggacaactttgattatgttggagcgcttgcatgtctctaggtggcacatggttgggggtggcacgctcgttggaagaagggttggcaataatggcatgatatcctcttatctatatgtgggtgtgagatctcggttcttagtgctgacatcacacatcaatgattagttagtgctgagcccaataaatcaagtgttgcttggatgtcttgtctgttggacatgcaaaggctagattgcaagttttttgttgaaaagcaaaggagatgaaag

SEQ ID NO: 75980 - DNA, 345 bp, Zea Mays
tggagactggagagctggtggtccctcttctcccagcgggcgatctgcggccgcagcctctccacctcctgctaggtggcccgcagcgcctccctcctagacgatgaccgagaataaacaagctacgaagaatagcctgatgatcagaattgaccacaacaacaaaaactcgaacaaaaagcctgaacaaagaaaacaggtagtgagggggacctacctggccgtgtgggatgatgtcaagtgtcatggacgaacgagcgattgaaactgccagaccaaaatagtggagaaaacgctccaccaactataggctcctgtcagcctggtcaaaagctgcctcaatca

SEQ ID NO: 75981 - DNA, 525 bp, Zea Mays
gatataaagtattcagtaaagaagtcgttaccgatgtatggtttgttgggctttatttgccgcgtgtcacacttggtaaagccttcgtcgattgttttttaggctttgccaagcgttttaaacactcggcaaagcagctgatttagataggggatgagggttgagatgcagtggattagtttagttaaataatgccgtgcccgtgctcgaacggcgcacgcagaagtagcgagagagagagagtgatgtgaccacgcaggctggcgcgcagacgtggccctggtgacggagaaggaacgcatgtttggtggcatgtacgcgtcaggatggcatgtcatgcacgtaccttgccgcttgctagagcaccgaataccgatctaggagtatttattgaacgtaggatgtccgcgggagttggttgttgcgcgatgacaacgatacggacgtgcatggcttttagtttgtttgatgcatgttcccagtacaacaaggagaaggagatctgagagcatcagttagtttgag

SEQ ID NO: 75982 - DNA, 368 bp, Zea Mays
cagacatatgtcatcaatgcgagaaaggtgctgcatctgaggcccatgaacagatccaagcatttcaggcctcaagcagggacacctcgctgcataacctgcaggacctggctgcgtagcgcgcccaacttattttgctcccttacctgtgaggtacttactatacgtgtaattctgaatgaaacaagcaagtgtgtgtgtccatacaatggacacgaatatatcagtcctaatgcctcttattatcgtcgatcaggaggatgttgatgtgtcgcaagatgacttctcagggcccgaagctgagctccgctacaggagtttccaagtgcatatggctgaacctgctgaggagctgttgcctgatgacc

SEQ ID NO: 75983 - DNA, 654 bp, Zea Mays
cgttaatgagctatagactcgaccaaaggtagatcaacataaacatgataagtcaagatattccattagattcatgataaggttcttgtttgcctgaatcatttactcgatcaaataagattcgagggtatgcaccataggtatctagattaagcttcataaagaagaacatatataagggcccatgggttcgaccatgagcccaaggactcgacgatcaagaccgggaggaggcctacagtcgattctagaagcacaaatatgacaaagatcttaactaataaagaagatatgcttgtaagcatagagttggattcaattacgtcaccaacttggtagtcggcttggtgcctaccctataatcgttgtccctccttggaatataaaatgaaagacaccgaaactccatgagggcatgccatctgatcttgtattgcgaaagataacaacatatccaccacacatataacctagagtattatctcacatcgagtgcccgaacctttataaatctttgtgtctcctatgccatacctttagctttcaatctcatgaccaaccccatataacactattgaacaatcttcgacactcataatcaacaatgcatcgagtgacatgtttattagctttctgctatttatcttaaatatc

SEQ ID NO: 75984 - DNA, 627 bp, Zea Mays
cgacaatttacttgggcaaatggcttggttccacccacttttgaaaagcttgatagggttttaatgagcccagagtgggaacttaaattccctaatgtcacagtccaggtgcttgatagatctcggtctgatcatacgcctttattactgaatggcaaagcccccacgagcctgaaaaatttctctgagtttaaatttgaattaggatggttaactagagagggattctttgatttggtttcttctttttggcaacaagaacgtagaggagaaactgccatacagatatggcagaacaagatgaggtcccttcggcagtatttaaggggatgggcaaagaactcgacggggttaattaaaaaggagaaacaacaacttttagaattgattgatgaactcaataaaaaggcagagtttacttgcttatcgcctatcgagttgaactctaaagcttttgccaatgataggcttgccagtatcttgagagaggaagaagtacgtctcttccagagggccaaggtcaaacatctcctcgaaggtgacgataacacaaaatatttccatttagtggctaacggcaagcaccggaggcaatggattttttcgttggaggatgaggatggtgca

SEQ ID NO: 75985 - DNA, 303 bp, Zea Mays
ctagatgtaaatgtgaagaagttcagtttactgattgataacagatcagctcaagaactctccaaaaatcttgtttatcatgaaagaagcaaacacattgatacccgatataattacatccgagagtgcgtcagcaatgggatggtagatgtggctcatgtgagttctaatggtcagttagccgacgctctgacaaagccacttggccagatgaaattctcagaactcaggaggcaactgggtgtcgtcaagatagaaggttgacaagattaagggggtgaatgttgcatttagccattctgt

SEQ ID NO: 75986 - DNA, 473 bp, Zea Mays
cgactcgtcgtgttgcgccctaccagtggcctgcgcactcaggcctagtcccaataggtcatgagtgcgtcgccggctaggggagatgtgggccataaatgcactgtagtatgaggggcttgtaggtcatgagtgctctacgacctgagaggctcgtaggttatgagtaggaggcagaccagtgtccctcccgtggctcagcgtcaggcgcagtttaatggagtcgatcatttatgatgtcaaccgtggtttaggcatggaatacattcgagtggtttaccttcgctacacccagtcccctgtccagtttcgccacgttcaaccccggactcggtgccgcatggttcgtttggagcgggttttttcaggataggcattgtctatctcccttggctgaccaacgggcttcagtggacaaaggcatttttctcagtgcgcttggtgaccgacgggctccatggactaggatcgta

SEQ ID NO: 75987 - DNA, 294 bp, Zea Mays
ctcattagctaggaaaaagtggtgaattgcaccttccttctcttatgctcgatgctctttctgcaagggtcactatcacaaccattatcccttgagtagtaccaactacgtgattccatcgtatgtagctcctagtagttacacctatgggaattaaaaactcaatcctgcaattcaacatatgctcaagcctacatgtttgttccttgtacatgtgcagaagacaatcatcatagtcttcaaatgatgacccattattactgatgtccattttgttagcatgattgatctcca

SEQ ID NO: 75988 - DNA, 360 bp, Zea Mays
gtcaccagttctagacctagacgacatggatctagcatgtcgtcgaccatcttgctcattatagatgacccttatcactaaatggtcacatatcaacaaggagaggagtggaggagaggaggggtggaagttgttatggggggctctttgagcgtcgcggtgggtcaccaccaccactgccagctagagagtgatggcggtagctagagagtaggcactagggaattggaagtggaggctgagtcacccccaagtcgcttgtatggaggacatggacggagggaggaatttcctacattttctcccaacaaccaatttagacagatagcctaggtaccaaccaagtaaagttttgttgta

SEQ ID NO: 75989 - DNA, 303 bp, Zea Mays
cgcaacttggccacccggactgaaacctacgagtcccgagcatgtatcaaaggatggcgaatgtcagacagggaaccctatgggtgtactactaacgctccctagctgaagctgtgtacagatccagttcccggtgagattgcctcccgagaattgttgacaaccctttcagatacgccggtgtccagcctcaacacaacaagcctgcatcccaggtggggggccaggtaccagggaggagtcagcaaaatcgcacacagcataaacaagttgaaaatagataagtgctaatactgcttaata

SEQ ID NO: 75990 - DNA, 334 bp, Zea Mays
ccggtccaataattcaccaggtaatgaaatccttgtatgggacaacctagtactgactgacgaacatgtggcttctaagccgcaccaccctagctatggttttaggggcgaggttagggtagatttcgaggggattttctagaatacgattctccgtcacacagccgtcagtacaaacacgaagccgagcaaagatctagcaaacggaggacatgaaccctagaaccaagaacgcaaccaaaggttgaaaggcagaatggtgccgaaccagaaaaaatccagcgcggtcgcaatagcggagggagcgaggtcggttcaaacttgtagcgctcgg

SEQ ID NO: 75991 - DNA, 476 bp, Zea Mays
cttatgatggtcatctaaaacgtgaatttaccttacgtgctgtatatttgtggtcaattcatgatttgcctgcttatggtatttggtctggctggtgtgtccacggtcgactgtgttgtcccatatgcatgggggacacacaagcatatcgattggagcatggtaaaaaggtctcattctttgattgtcatcgacggtttcttccatccaatcacccgtttcaaaatgatacgaagtcatttagaagaggcataaaagttaaagatggtccaccaaaacgtttaatgggtgaagatatcctgatacaacatcgtgccctccaaagggctgcagaaggtcatgagtttgaaggctatggtcaagatcacaactggactcatatttcttttctctgggaacttccgtatgcgaaggtattgattttaccacacaacatagatttgatgcaccaagagcgcaatgttgctgaaagcatc

SEQ ID NO: 75992 - DNA, 404 bp, Zea Mays
tgattccctattcttattaagtaaaacatagtatgaaaaatgcttggacggtgtgtgttactgggagcatatgtgcttgtgtttctaaaactgcagacttgctggatgttacttgactgggagcagatttgtattgcatcagttctccatttaaaactgcagacttgctggatgctacttcggttctccatttttactacaactgctactaacaaataagactagctctgttacttcatcaccagtcttcacattctaatgataattaaagacattctaagaccataagttaaagacattcagtaatattttctggttgcttagatatcttggctatatgcgccaattgcaaatgctcactatttcagaatacaatttttcaattagacatagctagatcgatt

SEQ ID NO: 75993 - DNA, 280 bp, Zea Mays
gtgtgaatgtagcaaatagggttaacaataaataacataagaagtagaatctaatttaacctacctcctgttaacaacccgggcacatgattttcctttgcaccaccataacatttatatctaaccctctttcacagatgacttcacccacccccatcaacagaggagacactcgttttagttccaactacgtttcccatgagggtttcccttccatcttgtgggaggtgctcagctccaccggttaccctacaccccctcagtaaacggtgtagttgta

SEQ ID NO: 75994 - DNA, 497 bp, Zea Mays
ccctctcccttgcacacgtggtggagaggtctcatcgacccagacccatgcacctccattcaaggctatgacagcgcgacatgtatatatacccccagcgcacggaaagaaaggaggggaggaacagaagatcgactttcatctggattcctcaccgccaacatctcaacggatttctgttgggcaactcctgatgacaacaggaccccacatgcctgtgtcttcacacgacgagggaaaagaggggtgactgccttgcggggttcacgcgtcagcgcagtgtgtgatatgggcccgcagatgcaacaaatggagatgggcttttcggatcaactaggctgagggcaggttggaccgacagcgtaagtttcatccttgtaagttcttctctcttttttctacttcaggtttccattctaatacaaactacaaattcaaatctgttttgaatcccaaaatttaagttcaaatgcacaattcgaagaactagcatgcgc

SEQ ID NO: 75995 - DNA, 737 bp, Zea Mays
caataagcgacatggtcagtgatgcttctgaggcgatatcattcatttgtaacaatgttgttagctttggaggggatcctaataagtaagtgatactttgacatttgtttgcaagtagtagtacttacggttgttctttgagcatctctactttagatcctatattttgattgttaacttttaataaatgaatttatgatgaatctgtagaatctacttgatgggtcaatcagcaggagcacatatcgcggcctgcgctctcttagagcaagcaattaaggaatctaagggagagaatacctattgggatgtggctcaaatgaaagcatattttggtctatctggtgggtgagaacttgaaagcctcggtatctgttttaatgtctgtaaatttacatttttaatcatatatcatattattaatcatttctcaatagtgccagtacataagataattttatctgataaagcagtagcactaaacatacttgcaccatgcttgaataatgaaatctgatatatgaaactgggtctagcccttcacttctagaaaaggctagacttcttcgatttcatcagactcaattttgcattttggcaaataggaatataaaatgatctgtcaaacaaaacatactattgccaccctatttctgctgttccaaactgagatactaaggttgtgttgccaatcctacatgacatatatacttattttctgtgctctgcagtctgac

SEQ ID NO: 75996 - DNA, 372 bp, Zea Mays
gttaagtaagaatgcaagtcaatcgtaaacaagccgagtatctttgaaatctctctttattgatgacacatttccactttacagaatacattgtcgccccagcagttttgaaatacagcctagggataaaactttctgaggtgctctatgttccaggagttcccaacttctgtgccatccatctgagtgaggcgatatgatccgggccgagtgacttctgccactatgaagggtccttcccataagggtgataacttatgccgtccctctcccgttagaattcggcggaggacgaggtctcctatcgaaaagaaccgttgccgcacagccttgtcgtgatagcgccttagagtctgctggtaccgtgctgat

SEQ ID NO: 75997 - DNA, 271 bp, Zea Mays
gctttgcataggaaaaatctaatgattgagttttatggatgccgacatcaagtattgtaaaatgcgataatattaatctggatggctcaattagattgtttattagataagattgtagattggtcagtgtcggtgggaatgctgcctgttgcgttgaaacatgggcaaaagcaggctattttggtgtttgtactggaaaacagtggatatttaaaatcccaggctaaaatgttgttgataaaaaacaagatcaataatgatgcttttgaac

SEQ ID NO: 75998 - DNA, 1164 bp, Zea Mays
ggacaagcactgtagactgtctggtgtgcccataaccggtttttaaaaaactttcctcgcccgagcagcactcaggctcactctcctcccacgtgctctactttctctagctcctggcgatttccacctcctctccatcaacggcggtggtcgccagcggtcggcttcggggagctcctcaagccagagtccgtgttccatctctctcctgtagtgaagctctggtgaggagacagttcttcctccctttcctctcctctctgtagctcactcccacccatttgaaaatctttcaaatcttgtgaaattattgtgaatcaaagtgcatgagtgggttccttgtactctattgagtctccctgtaggtttccctctccctttgggaggtttcataacctaaaatagccatttcactattgtatcaaaaccttgcgcgccacgtgtttggtgaaatgcccaaactagtaaaaattattcaaatcgaccccagttttttccagtaccctccatccacttccagtaacactctcgccaaatttcactcctatccgatatcctagacactggttattcccccacttcccatttatagcaatcccttttgagccgagtaccaaaaatttgttttctctgcaaaacctcaaaccaagcacacacttcactcatattcactcaaatatacccatccgtgaagtatcggctcaattcccagtcatttcatgtcacttttcgaatttcaaactctctatggcacaattcatcgttcaaacgtcgttctcgcgccgtttgacctctatttctccaaatcacttagtttttgtgtcataactctctgtgtatgtatttattcacatgtcatataattatgactatgtgactaatacgtgcttgcctcttctgtcatttcagtgatcttgcttgttcgcttgctcgtctcctgctctgcctggatcttttgtctcttgagaagtttccaggtagctatcactctatttgagatcttatcggctgctctctactctcgcttatcttttcactctaccttgcatcagttaggtcaggatggtgcaggcgaagaatgtcacaccgttagggggaggagacgacgaggaccctccttgccccttcaggcaggtcaaggggaagaccgtctatcttgagcag

SEQ ID NO: 75999 - DNA, 458 bp, Zea Mays
gtgaagtgtggttgaaccggccttgattgtggtggaattggcattgcctcttgaactgtctgttctcacaaaagttcgaagttttgttgaaatttgcaggtgtagcctcttcaccccctataggctaggttaaattggtatcgaagcttcgttcctcatttatagctcttaaccgcgtgaggaaacggtcatgtcggctccaaggaacaatgaggatcccattatcaaggaaatcctgaccatggtgagcggtgaggtgtgggatccccaaatccttgacatcaccatgaagcttgcttaaaagatgttcctaaagatgaaagaggatgaggccaagagagaggccgaagaagaagaagaagcaaggagagaagtcaatggagaagacaaaggaaaaaaaaagatcaactacaatgatgacttggttgaactcctgatgtctaaggtaatgagaaaat

SEQ ID NO: 76000 - DNA, 747 bp, Zea Mays
gtaacaggctaacatgctctccttttgacaatcctatcgagtttcagattgggaaagaacgtcccttgggaaatccatcagttttttcagaacttccttcctgcacccattgctgaaagcatgcaaggtatggattctttcctatttcatttctgtggcaatgccggcatccatatgcattatgtgaataattgaaacactgcaaaatatcttaagtagcagaaccttaggagcatatattatagttctcttcatcccgcagcaaccacctgaagagaaaaaaaagttcggatgcacacttactttcagttaaactcttatctcatggttctgacatttcctgaggcataactctgaatctttctctgccatgtaattttgcaggaggaactggaaagtgcatatagcgcgaagcttcagcagtccaagaattccttggactggtaaaatctacgcatgtttctgcctctgttttatcatcagcccccgttcggccctccctgagcatccaacgggtaacatggacctggtgctaggtggaatatctatgacgctgccaacccgtgttgcatgcctgggatgcatgcaaccatgtcagtttgaagttgcgtcttaggattcatgttaacatggaacaagtccgagtacatgctttgtggtatttttacctttggattagtttattaggttgaagggttataatgacggtcaaacactcgaaaatggatgcatggagatctgcctcgg

SEQ ID NO: 76001 - DNA, 707 bp, Zea Mays
aaatagaatattcttccaatacgaaggatctctgggctccaaaaaaacacccgaactcatccgctcgggagcacatcgcgtctccattcctctcccagggcaggtacgctcctcccgtcgctcgttcctccccaatcttttctgccgccgcatatgcctccagccaccatatgagatgcggccaccgtgtgcccctagtctccagccgcatctcctctagccgcatctaccgccgcatctcgtttccctgtgcccatacactaccttgcttcttctggatctgccgaggcatatgagatgcggccagagcagccaccatcagatctgcagagcagccatggccgccgagtagtccacgaacaacaacgatttttggattttttttttccattgccgagcagccaccattagatccattgtccttttgtgatttgcttttttgtccttttgtgatttgagaacaccacaagtccattctacgattagcattatttctgcgattgagaacaccgtcagatctctgcggagcacgccatctaatgctttcatttttttacaggtgcaaggattgcaagtattcagagaacaaaaaagacttcagagcttaaggtattataatattttttattttctcatttaagcagtgaaattaagcatgcatgtgtggtttcaattggttatgttatcctttttatatagatggagaa

SEQ ID NO: 76002 - DNA, 579 bp, Zea Mays
cttttcccactctcgtctaggacaagtttcctatgcacttcgggaatttctattccactacgtcgcttgggtggtcccttcatgacaatggtgcccttcctaaactcctttctctgccttctgaaggggtgattgaagggtagaaaacatctatggcaatcaaagtaacatatcttgccaccagcactaagacgaaaacaatatgtatctttagcacactaaggacacgtcaatctaccatgcacgctccatctagagaaaataccatacaccataaaatcatgaactgagaacagatacacaacactaagattgaatttctgcttcttgaagcagtcataggattccactccttgccatagcttctttaactcttcaatcagtggttgaagcatcacattgaggcatacgccaggatgctcaggcccaggtataacaagacataggaacataaactcatatttcatgcacagagcatgtggaaggttgtacgatatggcaatgacaagccaacatgaatacgacgtggcggtcatattgaaagacgtgaaaccatcagttgccaagccaatactaacg

SEQ ID NO: 76003 - DNA, 525 bp, Zea Mays
gcatggccggtaatcccgggatcggtggaccctgcctgtcaacagacgcagctgttgcttagagaaatgacaaggaccaaatacagctcagagtcaggtaagaaagacagagacagagagggctaggctagccgtggcagtgtggcaccaattaatagctgattggctggggacgaactggatgaaagtaaacactaaaactttatcatgatgagaggaaaaaaacaatagctattatttggttgccacgattatacgacacctaggttcaacggtctattgttgttgatcgcctagactgttgttgatgtaacgagattttaactgaaaatgtagacgagtaaagtttaatactaccatgttatcggatactctctctctgtctatctcggttttcaaagagttagactctttaaattttgatcaaatgtatataataaaatgttaatgtttattgtatataactagtgccgatacatatatcaacgaacctatttttataataagcttatttggagatgcaaa

SEQ ID NO: 76004 - DNA, 717 bp, Zea Mays
gcttcggtagtctctttagcaggggcaggagtcgatgcccttgtcgattctaggacggcgtccagcacgctagccatccttctcctcttgggagttactgtaggagcctttgataccttcggcaattctggctccgctagcaggctcaagatttttggcagccctaccgtttcccctagctctggctctttggccgcctttcctttggcttctgcaccatgttttggtgtttcgactgacccggctgcaggagccttcggcaattcagccaattcttccctggggacggcaggagcaggatgttctgcctcagcagtggaagatgtcccttcaccaagcttcggcactgtggctgtttcaatgtatctaggccggtgtgttaaaaccttgatcttttttcccttcggcacagcagaaatggccgaagtagcaacttttcttttctttccctgctttcgtgagggatagctataatcagggtacacaaaaccaatgacgtcaaaaactctattcaaccttttcttgcctcgaccttcgaaggccaaggtcattgcatcatcttcggtcgttgtataggccccaagaaattcatcactggttgcctcaataccgctcaaccactcatcatttggctcatcaaactcacctctatatctgaaggtatattttagatagaccgggccaccgtgactagacccggcagtagcttccttcggc

SEQ ID NO: 76005 - DNA, 400 bp, Zea Mays
agctggaccatctcacgttgcgggacgtgcgctgggtggggagttagacctttttgagcctcctccttctttgaggttggtggacgtctggactcccacacctgacgatgaagccgccaagactgatggcaagcacgaataagggtgtaatagaagtagagtagagtattgtagggtattgtagggtgtattgctgtataatgggtattgtatcctgttaataggttgagcttttgtataatgggtaatgtatcctgctgtgtaatattgagtctgtatcattactttttatagtaatgtaaaatgggaggttttctctggcacattatgtttacttcaaatgtttttgccacagatgccgaccaggactcgtgcacaggatgcagccggaacatccggg

SEQ ID NO: 76006 - DNA, 823 bp, Zea Mays
gcagcaccagctcgttggtggtgcaagtctggagatgcgtcgcgggaggaagacggaatatcttgacattcctctcaaggacaacattaaagggtggcgccttgagtggtttattgtggaaaaccacggcaagtccctccccctcgatcggggagacaaccagatgtacgcactccgagttgggttgagtctcccactgccttggaggtgacggaagctagggttctgcttgttgagatctgtctgctgaaggagagaggtctgactgccgaagctgtggttgctgacttcattttcaagaatattcagcctttgaaagacagggcatatctagcttacttgtacagtggtattactgactcaactcgggtcaccaacaggaaaattcctagtaaggatctggtgagccaactggacatgatcctgaggggcaaggtatcaaatgttggtgctcctgttgcttattttgcttggaatctgccacctcctaggtcatttttcaatttcgtgtctaacactcctgctagtgatagtggtcaggtcttagagtgcgaccctctcctgaagatattgaagctctggttgctcctcttcgtgatcttctcaatgataagaggcaagttcacttttcgatgttggcaagtctggatgacgcagatgtaacacccctggtgttacccaagccctggccaaagaaacaccttaggtcctactcaaagtttatgctaaaatggaaagtgatgagactcaaagtttagcggcatggttaagataagcattaaccataacaagaaagacattctatccttcatacaatgttcac

SEQ ID NO: 76007 - DNA, 603 bp, Zea Mays
gagaaactcgtcacaggtggccactcaaaagtgcgtatatctgtgaatggttcacctgaatcggatactgaagagagagataccatggtagacacgtccgtcaacatgggcaaaggcaaggtcgctgttcgcaagaacagaccagtttctgaagaagcactgtcacgttcttcagatgctcggtcagctggaagcagcaagggctacaactccgaattggatgtctacgtggacgcattaaccacggtggactctgaagcggagacagactcggaacacaggggccatggacaatgtacctttgatcggatggattcagacaatagattctccaatgctcaaaacgccatgacatcgaggaacagcaacttcgacaagaaagataggccagatgttccctcagcaaatagagatatgagtaaccagcatgaagaagccacggtctccacacaaaacaccaaaccagtggttgttggcgaacatgagaggaccagctcgttagaggaactgcttggccaagaaaaacctgcttcttgggatcatgagaggactagctccttggaggaattgctcaccgaagatttcaatgctccagaatctgga

SEQ ID NO: 76008 - DNA, 867 bp, Zea Mays
tggacgcataattacataaatcagcaggggcctctgcgcattatttcctagactcagtacacagttcctgtggaccgcgggttattatcctaaaattccaaggtctctttagcaaatctgacccgcgaaggggtatcgctgattaggctgtcggattagaagccgagcgcctggattaactcacactctcgcgaatcggtatgcgctaagcaccatccgatctgattccgacgtcctagatttaaaatctctaaactgaacctcgactgcccgataggaatcggacgaccctgatctaactcatcgaacggggcacccaagatcaaatctccaccgcgcatctacaaatctatggtgtacgcgttatcctcttcctcatccgcgacgacgctataccctggtggtgccctcaccggagtactccctcccagcgatccactgttccaaccagagcgcgcccaagatcctaagaacgcggagataaatgcgaactcaattgtacgatccataccgatgatcattgccgggataattttggccgcggtgtagggcggaacagcggcgatgcaacgacaacaacgagcaattggtgggtacccgagtcgcgctactgctcgcagagggtacacacataacgtcgtacccaggcgatttgctccggctggtcccagggctccctgacggcgaggaggtgaagtgcggcgacaacgacacgattacttccgtcgtccccgaaattaggcctgcgccgcggacgtggaggtgcgatgaaaggaggggatatgactgggatccgatgactcagtacttaagtacccgcgagctggtccacgcgcacgaacgagctaccccgagatcaccgaccga

SEQ ID NO: 76009 - DNA, 721 bp, Zea Mays
ataaatagccctaagacaaatggctagctatttcccctccacttaggatggggcgccaagcatgtctggtgcaacactactatccccatcagataaatagtaacactataactagtttcaatactaatcattaacagtacgggacctctagttgttgatgtctagtgctcaccagacatgttggtgaatatagagccaaccactcgagattatttgtctgtgaataactcttatttagtgaggagtctagtgtaccactagacacgttcgatgagtgcattaactccttagccaggctactatctcataatagctcatgtttggtgcaatgtgtctagtgcatactagatgacaaggtgttgtgttgattactttaaatgaaatctagttcactatacgcatcctatgaactggtttaatgcatactgaatacatccatagcacatgcaacaccaccaactcatccaattcatgcgctctttgggttggatttgttttcaaccttgtgtcaggctgtcatggagctacctagagctagttttaacaagtgtgcattacatccattaactagacccgactacatcaacctacccattcatgccctctttatagtgcagacaaaggaaaaacaaaaatcttatcactaatctaagtttccctcatctcattgatacttagaattagcatgatacttaatattcatgcacatccttcaaaaaat

SEQ ID NO: 76010 - DNA, 1086 bp, Zea Mays
gaaatacaaaattagagctctcgggtatacaattggaggcaatacttggtggcttggtgcgtgattatcctacggaccagacgacgtgctcaatttatagaagacaagagcggtggccgatgaatttgggagagacgcgcgacagccggagaaaacagaaagttactagtgcagtggatttgtgtcttccgttgtggtgaactcaccagcgatgaggaaatatcacaagccgagccactgcgacgtggtaaagtgctttagcacgtggcgcacggcggcaatcggccaacgccggcgaggtcttatcccgatcgatcgatgagcaaggggtacggtgagcttagccgcggccggactcaagttgatccaggcgccaagatatttacccgcccacagttatccacaatccacagcgcacgaatcccggcgatcgacgtgaatcacggcgcgacggtcatcggcggtgaagttcaatgaacctgatccgatcaggctactgtaccatgagagtcatcttcagagtgcctgacagaggatggttagggtagattatctctaaattttctatggcaatatcatcacccttctacaccaaagttgtagtcctatcaaccatcttcatctttgttatagcatccctagtcaaattctcactggatcattcttaaattcgagccccaagttcggccaacaacactgacgaccacttctgctatcagattcagattcagttgttcaataccagtctgacagagcaattttgggcagcattttctttaatttttgtataacaactaaagagactgtctgcatcaaagttattctcctataatggttctacaaaattgatgtggtgacctagggcaaaaacttcataatttgaaagttacaaggtcccaaagttgaacccactatattgaaattcagacttagtcaaaagagcacaagtgtggctcttttgcaaataagtccaaacctcaaggttttacttgcaaattcacatatttgtgaaccatattacttaggacaccttaacttcatagtttttgcactttagtccaaaagtgcactaattttacacttgcc

SEQ ID NO: 76011 - DNA, 998 bp, Zea Mays
cgccagcaagcacctgccttaaagctgcgctttcagagttggagccctgcctgccaaacaggctcttattaggctctcttaaggattttggatgcactttattaaagttgcgcgcatgacatgactccatttcactattctgtgctacaacacaaaactattgtttttttcacttgtccagtctcacagtatgcacatcagattggtaaaaggaaaatctaagcaacattattccactagtgaaagcaaagttttgaggatatggtccatgctaggtcttttggtcctctcctcttccacgcatgacactgctatctctaacatcgtggctgcttgtaagtagttgaattctccattcagtctgcagtcaacaaattccatgagccatgatggatctttggctgccaatttctctttaagaatctcagcagagcatcgaatagacatttcctccaccccctcgccttcaattacccaactggaaacccgaacccctttcactaactcgaggagcactacaccatagctgtaaacatcagccttccctgttattggaagatttagagcccactctggtgcaatgtaccctctagtcccatgcacccttgacagcatctgtgctcctgttcctcgacttagtaatttaaccaatccaaaatctgcaatttttggttcaaattctttatctaacagtatgttctctggttcgacatcacagtgcacaatccattcatgatggagatatgccagtccttttgccactccaagtgcgatattgtacctttggctccattggagcacataagttaagtcctgataatcaaccagatatctgtctaatgaaccattttcaacaaactcggaaaccaatagcttgtgagtttgctcagcacaaaacccccaaattcttaccagattcatatgatatattcttccaatgatgctgagctcagatctgaactcttgttctccttgcatcatatcacttagcttcttca

SEQ ID NO: 76012 - DNA, 914 bp, Zea Mays
gcaacgcgcattcatatgcatatctagattgatcgatcgatcgatcgatacgatagtacgtacggctcgaccatgcatatctatcatccagggggtcccaataaataaagtattttatctccctttcagtatagcagctgacattctgatgggagagagaagaaaaaaaaactgaaaatgcagcctgaaaattctccccgggtgccaaacaccaaacttattggccaagtattttatttccgttttttagatagtatctgacattctgatgcgagggaaaaaaaagggcaagaaactgaattaatatgcagtctgaaaattcgctcgcgcgtttgtactctgtgccaatggggtcagtcacggagacagtcctgacagtacaaaacgaggtgaacatttatttggacgggcgggcgggcgtgtacaactcggccgccctacatgatccagcggttgctacaggtgcggaacagtgaactaactccacgaaagaagcagcggcagcagcagcctgcagcgacagctatgaaaaaaaaatacagccggtcagtaacgaattgaagaaactaagggccctaaacgatcgcgaaatgttgtggcctgtggctcgaatccaagaccacgatctctatctcttcggggagcagagcagatacatgtgccttgtagtgttgtgtacacgcacatgcacaagtcgtcgccgacggcgcctcaacacgccaacagcggcgaaccggcccgtgatggttttaatggaaaagcgtgtagtagtgcccttcttctccatccatcttccatctgccactttatcaacccgtcatcaattcatcagctgcatgcaccatcgcagtaaactctccactccatcctgtcatccatccacccacccacccagacccagctgcaccctctcg

SEQ ID NO: 76013 - DNA, 310 bp, Zea Mays
cactaaatgacaaggaatgcgacactttttagtaggatggttaaagcatccacacttcttacacttctcttgcttggaagtgggggtgtctttcctcggagcctttgtattttgcttatccggacgcttgttgcgtttgcgcttctttgaattatcagagttcttgggatggtttttggggccatcccctttcttctcattcttcacagcatgatgtatttcataggagcagctccaacacgacgttgcttatgatttttcatcgtaagctcatcatgcttttctgcctgaagtagatcatgtatgagtt

SEQ ID NO: 76014 - DNA, 527 bp, Zea Mays
cttgaagttgttgatggtctttgcctccgcttgtcggagcgaagggggcgcttgggccttcgcatggacgacattcgcggtcaggcctgtagagcttgctggcgcggccttcggcctgcggaaacattgatgtagaaatcaacgagcgagggggaggggtgttcgcctttgccccaacagttgagtcaaaacatattgctgagatagaatatgcactgtcagcccagatagagctacataaatctgaagtatcaaggctagagggaaagcttgatgagttcaacgaaaatttggaagttgaaaaagaaaaacaaaaaatagctgaagctgaatggaatagagtccaaaagattgctgaagagcttcggctatcaaaagaagaaggtttttctgttgctatgcaatgctgtgataaactgaggaatatgtttgctaaagttggtgcattctcaaatgatcaaaattttattcgcgacgatgctgaaggggccattagatggatagagggcgaagtcaaggcttttgat

SEQ ID NO: 76015 - DNA, 881 bp, Zea Mays
cggggacaaaacgtggtgctatatatagccttgggtggaggcgggctgacgtacgcagtgatcggcttgcacggatcgtaacagactcagccaataatccggggaaggagaaggttctagccccatggggtccatctgccgcaacccccacgcacgcagagaccaaagtctgagggcggaacaaacgaccggggtcaaggagagcccgaacagatcctgcgttccagccttccaggttgagcttatccagaggtggaagatgatcccggtatagcggacccacgcataaggctggctccaacaggccagctatcagaccaggcaaagctagtttagctgtccaactggtactgtagcgcctccaataaggcagctatcctggctaggcaaaatacatgggaggagagagaagagccaaattggctggcattgacacgccaggcatttccctctgacaaccgtcagttgggaccctgtgagagaatcgacgagcaggatgcttcggtgatttggcgcaaaagcaaatgggccagcagtcacagctaatttggcttccttgttgcaaactagacgcctatcgctgtccatgtaaaatgcagagggcaggtaaacagaaaaatggctgagcaatatggctatctgttgttggagccagcctaagcgacataaggaaatatttcgatgacatgctgtggtagtgacatcatcccggccgaaggaatagaaaaggataaaaaaacaaaagggaagttgggcttgcacccatgttagttttggagagcaatggggcaagcgaccatgggctcacggtaatggtggagcttctccatttattttattttcagttttctttctattttcttctttcagttttaaatttt

SEQ ID NO: 76016 - DNA, 523 bp, Zea Mays
aaaccgggtgtgacagtgctgatgggtgatcgagtagtgtcaccagcatgcgtggattgtagtcggggtcggttcaaagctcgggagaccttgggctcgcagcgtcagagaacttcgtctgccgcgggcgatgttcacttggggactcatctgctgtggccgtaagcctctgctcgatttgtgcccaagtttgggattatcatgttcgggatcgtcggggctatgtttaggtggcattaggattaggatccgagcattgaatcggcaatttgtgtgcaccggcgtgttctctgggcgaagctccgtgcggtcgtcgggtctcagcggcagaagcttgaagatgtgcctgggccgttgatctccccgtgttcggctcagattggatggctgatgttccttcgtcccgatccgatctgaaccgtggctcttaggttgtgtggctgagattggtggtcgcgtaccctttcacggcttatgatctgtgccatttagatttagatccgacgtccgatagttgcgggcc

SEQ ID NO: 76017 - DNA, 327 bp, Zea Mays
aaccgttcacatttacacgctggcagaaggttgacgaggtcattctggtgcctacgactgcctagcttgaggaattactcaaatttttggtggacttattctagtgttcgtttactagtactagtagaagctcttaggggaggctggttctagtgcaggtggttttgatcgatgggatgttagcggctgggcgatgacacgcacgcgtccgactgacgtcgtctcggcacaccatgcttgcacgctgcatcaccatccggatcggagcaggcagcagaggttagtgtcaggaaggaggagtaggttatattatcatctcgggccccg

SEQ ID NO: 76018 - DNA, 457 bp, Zea Mays
tgggcaaggcaggcaagcacacatgtgagcttccttttccctccttagattgattcgataaagtggagaggacttttatattcaaatatatttcacaattatgctaggattaaagtgttctctctcccacttttttgcacacatgattggcctttgaaatttctctagaaattttggggattcttatttgggacaaatgtattatatattataacaacctccaccatatccccaacgtgcatttagatattttttatgttctcgctatacactagtgttttaacaaaagacagttaagttgaacttgcacctagagcttaaaactgcatatctccataacttgaagaatagattacaccttgaattccagcttttgtgcgaatgatgtccactcaaattagaactagtacttggctgccaatagccctcctggtgcattgaacatatacatcataat

SEQ ID NO: 76019 - DNA, 276 bp, Zea Mays
actccagagaagcaacacatgcctcaacctaggtcatgaccataaactaagagcaaggacaaacccttagcaccagcaagacaccacaaattacattcatcctcagctaaagacaaggccctagcgacactaggcagaacgccttcaaaaacagacacgttgcagtgtcgccatatacaccaagctcctaaaatcactagagttgaagcctttttggatgcctccattaaggcgagtaattgaagtactgcaccaagcctcaaaattgctttcctc

SEQ ID NO: 76020 - DNA, 743 bp, Zea Mays
tccaagcccacggttaaggaaggcctcgtactgccatgtcatcgcttattctcgggcctaccccttgtctaggtagaggtctggtgcagatgtgtggccagacgcacctagcgtaagccaccggagaagcctgacgaaatcctctaacatattgcccgccagcattgggtgtggaggggatgcatacttacccgcgcagcgacaggtagtgtatccttggcattaaatgcatgcggcgcgctagacctgcaaagtacagattttacggttactcgcaagttaacgaggcaaagggcattaacccaatgcgtgtttgggcgcccttcattaagacttcacagttctttatgcattaccgaggcattaagggatggactgaggagacgagatgacaccgcccacacctacgcacaacagcgtatcagactacgccgcaacttgccgcaagggctgcatgcgtactccgattagacgaaacaaaagaataggatgttaggagcccgcacgacgaccaagatgggatacacgctcaagaagatctagtgtcatcagctctatctggcgtttcaccttccatattgtaaatactcccaggcccacctgtcggggtctaagctcccttgtatcgtggccccttgaactataaatgggttgctccatagcaagggaagtcgattcacagtcagaccgattaagcccaagttctcaagcaatacaattcacagtggatgtaggtattacgc

SEQ ID NO: 76021 - DNA, 305 bp, Zea Mays
cgtagagtttaattttgcagggaacaaaactttgaaattagtattctttctatgtgattggtttgacaacaataatgggattagacaaagtcaatatggcataactgaagtaaagcacaaggaatgacttcgaggccatgataattttatccttacacaccattgcaagcaggtctactatatgtcgtacctaaatccgaagtttaaagcatggtgggtagttcacaaggtgaaccctagggaacgtttacatactccttgcactgctggttatcaattcaaagacgaacaggccgatgatgttt

SEQ ID NO: 76022 - DNA, 473 bp, Zea Mays
cttcaatagagtcgcgcaattctaggatcctctgcatgccgggcgatgatttcgcgcccatcgccccttccccatgtacatgatcggtcaccgcctggttggcccacgcacgggtcatgcccgcggcaaccatggatgcgaaatctgcgcgaatccttgccaacgtgcgctacctcgctagattatagatgtataagtaagtgagctctgcggccacctcccccacctgtccgtgtcgtcgaagaccctctagccaccctcaattgacacggtggcatgccagtattaccaccgttcgcccctccctgtggccaagccttcccagctgcttcaatcgggggtgagcttctccctcatgtttgaattactattccgatagcgaatcacgggttggttagggtcgggatgcaccagcacgccgatcaagcatgctcctgtgatcctccgccgggggagccctagcagcacctccg

SEQ ID NO: 76023 - DNA, 402 bp, Zea Mays
gtggtcatgtggcaatcaaaacaaatgatcaggtgggacagttttttcaaacaaaaaggggctacgacaaggtgatcccttatctcctctcttgtttaatattgtagttgacatgttggctatattaaccaatagagcgaaacaagtgggtcaattatccggcttggtgccacatttggtggatggtggcttgtcgattctccaatatgcggatgacaccattctatttatggttcacgatttcgagaaagcagtgaatatgaaaatgcttttatgtgcttttgagtagttatcagggctcaaaattaatttccacaaaagtgaggtttagtgctttggagaagcaaaaactcaagaacatcaatatgtacaactctttggttgcagaaaaggggactaccc

SEQ ID NO: 76024 - DNA, 403 bp, Zea Mays
gatttccagttactctatcaagggggagaaatttgacttttgggcttcctctcatccaaggggggagagatgtgtgaattccgattattttttgggagtattgtgacaggggaggagatttgagcattttcgagcttttgctggttgtcttgagccatttgtctctttctagagggaccaactttgatttcagcttttgtgttgattttgtgatctaaattggttttatgctccaatgaagtttttttgtgcttcgatgagtttttggcttctggctagtggtgttgagccctgcttttgcctcttattgggggctagccttttcttgcttggtcgtgttgagttgttgcccatttctttggggaccaagctttgcttactctaaatgacttgtttggctttt

SEQ ID NO: 76025 - DNA, 494 bp, Zea Mays
gttctagataggcttattgatcctagaataacctcaatgtgctcctccttgacaggtcttgttttggagtctagcagataagaataggatcaacgatggtttggacggtgtctagatcagttttatcgatcgatgtgttgttcaaggttgtgtgtcgataacggtcgtactagttcttgctagtatgtgatccaagatgcatatcaacatcaatagataggaacgtggtaatgctttcctaaggtatcaaaagtgttagcactctccagtagttcttgttggagcaccttcacaagcgtatcactcccccttaatccgagcaaggatcaagtgctctatacagtctgattctttgccactccaacatggtgaatcacctaaaatggcttgtaacatggtgggatctcccacaagctcaactaagagatcaccaagctttcaatcaccaccaagccacatagttgatgtcaatcaccaagagtaacaagacaagc

SEQ ID NO: 76026 - DNA, 610 bp, Zea Mays
gcctatgataaattacacatacatttatgcagtttgcaagaatatttctgtctcttgatctgtatcagtaatgtcagctcattaattttatgcagtctaaataggttatgcatcatacaaatcagtgttatgcatatttacacatacatgtatgctaagtagatgtgcatgcagtttttacataactgttagctccctatgataaattacacatacatttatgcagtttgcaagaatatttctgtctcttgatctgtatcagtaatgtcagctcattaattttatgccagtttatgacacttcattccacatacgtatattccactttatgtcagctcagtaattttcattttctttatagttgtcaaaattgttcacagagttttatgtatattttcatatatatttttaggtttatgttgaaaccgatccagctacaaacactccacaggttggccaggcttctcttgattcggagatgcaaactgtgttagctctacgcgaatatttgtgtggtctgcaatctgacaccggcagatatgaagttcatactaaatctaaatctgtttatatgctggtagttttacgcgacctctctaattgaaataaa

SEQ ID NO: 76027 - DNA, 523 bp, Zea Mays
cgaatattggttagtgagctcacgtttccctagttgctttcattgcttagcttatctttaatcgtgtgttcttcttctgctgctatatcagatttggctcggtggtgctctgactttgaagagaagtactctaagagtcaggccgacttagcccagacttctgcttttctggatagtgctcgttcccttaattcctctctgaatgcacaacttgattctgagaagatggcacacgaggtaaacttccttggctgatcctgctttgctctccttgcttcgatgctgaatgttgttctttgcttgtaggaagaaaaacaaacacttgttgcttcccgtgacaatctggacaggctgtatcgtgacgctagtaactacttgaccatcatggagagcatatctaacttagaccatcatcgccacgagctgcaggtatctcaggatgaagtatctcgacttggcaagttgttgtccaccaaggattccaccatcagggaactgcgcacctcgaagaagcttgtcgcgc

SEQ ID NO: 76028 - DNA, 650 bp, Zea Mays
gtctatgcataggaggtatgggatcaaagaaaggttgattccataatcataggtcatgcatgcatcatatttaaacaattctaagtaaatattcccctcttagggaggtatggcatgtaccaagactacccagcggaaggcaaccgaaccccgaggcgtgccccgacacaagttggctcctcgacatgaggggagcagtagtggaagtaatgatcccataggggatctggaggtcagagttgaacgactcatgatggaactacatcatggaagcagggagcgtgcgcgagatagccgccgtattgcgagacgatctatagcctgggctgtaaattcacgatctatagcctaggattacgagacgaatgcccgagcctaggtagtggagctaagagtagccctggagaatctgtaagcatacaataacactttgcatgaggaagtgcacgtgctatacgaccggctgcatctgaacgtgccaccggaggttgcagcaatgggagcgggaacatctggagaagctggcggagggccttatggggagttggatctttttggagcccctccttccatgaacctcatagatgatcgttctcccaaagttggcagtggagcgggagcagccaaggatgaagataactagagtagta

SEQ ID NO: 76029 - DNA, 287 bp, Zea Mays
atcgacgtgcccaccttgcgcttcagactgaacaatacatgagcagaaaatcatgcaagatactcaagcaaaagaccaagttccgatatctcacgagaacttacccggaccggggcaggcctagccttcttggccatccttgggcccgtagttcccgatgttggtgtcaggagtggatttgcaggccgctccaccgctacctcctcctcgattgcagggataggcctgactcgacagatgcctacgtctcaagtagaggtacaaatgcctcaagctcgagcatcggc

SEQ ID NO: 76030 - DNA, 322 bp, Zea Mays
ttcgtgcgctagaattacgatacacaattaacaacgtagtcaccacaataatcaaacccgacatacatatatatcggtgcgctcttcacatagtaatttgcattttaacttggacagcacatgaacattactacttttcatccgcgaccataactatacacatttagaccacatcaagcaattcattgtgattacgagcttaaccaaggccacctaacaagtcggctaactagagcaacgacatagcctgctatacaacatacacgtcggcttaccttttattattgcaaactgagacacaacatacactacaacattttta

SEQ ID NO: 76031 - DNA, 441 bp, Zea Mays
catcattatgccacatcgtttctcaaaataaaacaaagaccatgggaaatttagccaaattacgtaagagatctgtccaaacataggttaaggttgtaaggcaccttttttcaccatacagttgctaaaaggttggaatataaataattcaaaagaatagatcaactttgaaacttaaaatagtgtttctaggatattgagggcattgtattcgcatgagaggttattagagtacagctagtggatgaagatgttagtgggctagctaatgaccttttgtgataacaagtttcttataatcccctctattcaaggcatactaaaacggtgtttatgtccactcaagtaaaacaccacacatcaatttgccacatcatttctcaaaataaaataaagaccatgcaaaatttagccaaattgcgtgatagaagtgtccaaaca

SEQ ID NO: 76032 - DNA, 473 bp, Zea Mays
aaaatacagctgcagtggtttaaatagctgactttagtctgaagtaaagagctcggcttctagtctgcagctgtcgtctcccttgtgggtgctaataaaattgagatgagatagtgacccctgaacttctagtcttctagatgacagcggagtaacggattagcccttgctgccgtgcgagtgcgatcgagcgactgctgctcgttataaagaatccagtgcgctggatcattttgtttcaccaacaaacagcatacatcctgcgcggaatacaccatcaaacggcacaattcacagtacgtggcgtgatggcgacaagcagagcaactgggttgatatgatgaaggtttatacgattaatatgccgctcgtggcgcgacttgttggaaagatggacgcagacctttttcccagtggaaaacaggcagttctgtctcttgaaatgttcaggatccaaaagccgcgcgacacgt

SEQ ID NO: 76033 - DNA, 631 bp, Zea Mays
cctgaaatcatcaagaattcgtccagttgtgctaaagactgtttccgaggcgactgtcaacaccggaattgctaacacatcacgtgccatttttgctaatactggaaatcttgatgaattcaccttccaccatccgagaatgtcaaacttactatcctctggttcagtatcttcaccaaggtacttctcaagttctgacttgttgctaccacttactgcaccatgtaacttcaactttttggcaagtagggatttcaccctaccgccttggctttgttttggtcctttgggatcattatcctgagttataccatcaggtggagcatgtgtgttcctatattcctcaaacaattggaaaacacagtctttaacagcagcccaaacattgttgtcattttcctcactaaatatctccccaattgctagtttggtgtattctgagagtttatatctaggatcaagagctgcagcaacaaaaattagcaaattcagattctccttctccttccctttcccctttcccctttcagttctgcccacagtgcctaggtcaactggttcatgccaaattccccaatacttatcatacttgtctttcatcctctttcccatttctattctcaaaggatca

SEQ ID NO: 76034 - DNA, 1304 bp, Zea Mays
acaatccctagctgattttcattgattattggtatgactaagctacacctcaacgacctcgtttttaaaggaaacaaggtaacctttacataatgttgtggcacataacatattacaaacaactgcaagcacaacgcaggcaaggaggaaaacaaagaaaacaaacacaacacaaacagacttgacatgagtacctgatcatcaaacaacgtacttgtcggctaacccaaaccaatgtaaccaatgtcgcacaattgtttccctccattgcgcacaacaaggggagaaatccttgaagtgatgagggactgtccaaccaagtggggactaagagtgaggaagcataccaatcgaagcttgccaaagaacaaccatatcccttgaacttgacgacgagcacacccacagagaacacatccaagcaccataaaccgccatcctacgcccttaaaggggaagaaacctctatggagggagggcaagaacttgggtccacccagcataagattgattttaccaccaacatgagacagatgacgaagcagaggtgtcaattgtcacgcaatcaggagccacgactattaccagccgcaaggccaaggctagcaaaagaagaacacacataaacaaccatcaagcgagcagagatgatagtgcaaaggtagaacacctccccgcgtaccaagcgtgacacttttgctgcacaaatatcacctttgcacagatttcagatgacctcgagaaccactgctaagagcgaccatagacgataacacaagcatcccgacttcgcctcaaacaaggtgaatgacacagaagctccataaagttggggttagcagaaagctaagcaaggcttttgccaaaaccagtggtcgtcgttgcacgaccacccgaaccattggacacaagagtcgacacagcgatttaggtggctagtagacctgtcatggctacccgacctgccccaaaaaacccaacccgacctgacccaaccaatgcaatgggtgtgggtatgggccataatttttgacccacaataattcacgagtcgggtacaggtcatgattttttgacccaaaaaccaacccaacccgaaaaaacctgacccaaccagaaaaaacttgacccgacacgtcaaatagaaaggcacgggccgaccagacccaacacgtcaaatagggaggggcacgggccgaccagacccaacactaggcacgggtcgggtatggactgtgataaattatccatgacccgattgttggggtctccttttctaccgaaggtcctcaaggggatttgat

SEQ ID NO: 76035 - DNA, 309 bp, Zea Mays
cctgaacaccctcgggggctgggtggcagcttgcgctacccaccaaagccggatcactaccggcaacaccctcggggctgggttgtagcttgtgctacccaccagagccggatcactactagcaacaccctcgggggctgggttttctgcagcagccgcctctaaggctgtaggctcccctgtcacctccatgggagtcgggcaactcggaccaacgtcttgccattgaagactgccttccaaagtcgacgatgcacgagacactgctcgggatacctccaatcctgcgtctggaatttctaaacaaac

SEQ ID NO: 76036 - DNA, 518 bp, Zea Mays
gtggaaagtttggtcatgacgtcaggtcctgggtggccgagacgacgatgccaagtggtggtggtggtggtggaggccaggacgggaggtggagacacgtcggtggatgacggtcggagcgtgtagaggggaccgacgctgtcacatcgggcgagaggggtcctggtggccaaattcttcacagaaaaaccggtagtgtcaaactcaatggaacaagaattgtcggtggtgaaccaatggacagaaaggagattgtgagtgatgtgaggggctacgagaacgtcgttgaggtagaacggtccagggagtaccgaggcacctaaagaggtgaccggaagagtggaaccgtttccaacgacgatcgagatagggtgtgtggtaggaggtgggtttgagcgagagagcatgcctgtggtgggagtggtgtgataggatgcaccggagtcgatgacccagtcagaaggcggtggggccaacaccatggtgctgtatgcggaggcgagggcgacagggtccca

SEQ ID NO: 76037 - DNA, 700 bp, Zea Mays
gtcgacggagttaggccccttccagagcatcgcccgagatgtcgtcgggcgagtcgtgacaatgtctccgcttgaggttggtctcgagcgagtcgtgaccgtctctcacataggattggtcttggtcgagtcgtgactgcgtctcccaccgggtgttggccttgggtgagtcgtgactgcgtatctcacccggggttggcctcgagctagtcgtgactgcatctcccactcgaggttagcctcgggcgagttatgagtgcatttctcgcctgaggttggcctcagcgagtggtgattgcgtccctgtgggtctgggcagagccgatgagtggagtcgtgactagatctccctcctgagattggcctcaggcgagttgtgactacgtctcccgcctagggttggcctcgggcaagtcgtcactacgcctcccacctggggttggcctcgggcgagtcattttgtagagttggtcagcggagttggtcgatggagttaggcaccttcctgagcatcgcctgagatgcccatgggcaagtcgggatgactaggcccttgtaccatatgcaacttggctctccatgctaggtagccgaagttgagtttagggtggtagctgccaaaattagtactagagacctagtacaagaatatttggcaaacaagacatttccaacttccagcggttggggaatgccgaag

SEQ ID NO: 76038 - DNA, 323 bp, Zea Mays
gttgaaccggactacaccagttgaactggtaatttgacgttattttgaagtttttggtgaaaattttaggtgtaacctattcactcccctctaggctactatagaacttgttcaacattattggtccattgaaagcgattgttgccccaaagccatttaaagaaggggagtcctagtcttctaattagaaacaaagtaggtgagggctaccatgcatctaattaggcgctacacctacgagatgtgcattagggtctacatgagctctatggccttgaccttccctgggttagccttgattcctcaatgataaataaggaaac

SEQ ID NO: 76039 - DNA, 606 bp, Zea Mays
cttaagggcacaagctctcagcatatcctcaagtacttggttagtcctcttagtttggccatcagtttgaggatgataagccgaactgaagttcaacttcgtaccaatgttttcatgaaggcgctttcaaaaccttgaggtcaattgggatccacgatcagaaacaatcttcttcaataccccgtgtaaacacacaattcgagccatgtatagctctgccagctgagaacccttataagtagtattgactggaatgaagtgagccactttggtcaatctgtccacgatcacccatatataatcataacccttcgaggtgcgaggcaacccggtaatgaaatccataccaatgtctttccacttccattcgggtacctttaacgggtgcagtagtccagctggtctttggtgttcagctttgactctttgacatacatcatacacagccacatgtgcagctacatctcttttcagcccataccaccagtacttctgctttagatcctgatacatcttagtgctactaggatgaatagagtaatcagagtcatgggcttccttcagtatagtctcacaaaggctatcaatttcaggaacacatatccg

SEQ ID NO: 76040 - DNA, 1040 bp, Zea Mays
cggctgtgagaacgtgcaggacgtcaacttgtctgatacgggagcatcggcagcagccagccccagcccctaggtcctcctactcctggcttcccgggcgagaaatttatttgtccatttgtccatagctagctggagctttgattagtcttggtatgactatctaagggagtgtgctacaccaatacacgccatcctctctccgacgacacatcagtaggagatgaaggcgggtatatataattagacatcgtaatccgcatgcagagcaggcaacctcagcccacggctcttatatataaaaccataccacgtatacgttgttttcaagtgttttgttcacactcgacaaagtcagatgatgtcgagatgaaacagcactaatattctggcattagagtaccaaacaagcaatacaaactaaactcgatccagagcgtctcctcctcctctctctctctctgtctcggttgtttagccacatatcactggctgcagcgcaagacggtaatgcttatcttagccaactaacgacgtgcccccctcatccactcatgctacatgcaagccaccgaagccgatcttcgtggctccctccactcacactgcatgcaagcatcgaagccgacttacccaacaactgctatcggccactatgcactaaggaatgctatgcctaatgacgtgtgaacccagccacatcctgggaccatgcgtcataaggccatacaacccgtctcttctccatggcgtgtgagcaaactggcccgcgtcacgcgcgcgttctagaaggacctgcaacgcaccaagtgcttcactaacaaatggacaccgtgatgccgtgcccccgcataacgcttgcccccgttccccgctccgtcgtcctcgcctgacgcccccatcccctcgggacgttggttggcgagagggccggtgaggcgactcgctccgctgttcggtttgggagagatctggacctgatcggatcagtcagtgacaccgatcctgatcgagtggcataaatattctaccgtcacatc

SEQ ID NO: 76041 - DNA, 839 bp, Zea Mays
gtaaagatcatatgggtttggtgcatctaagcattttccctagacagagcagaacatacagtaatatctggacaaatatacaacttcattgctctatccttgttctatgtttaacaacccaataataaaaaaccaagcattagttgcatctgtcacctacacaggcattctagatagctactacagatcatgaggttgatagattaatttattttagaaattgaagataagttgatacactgattgaatatcaaataatcacttgccttcatctctattgtggtcattgacctcagcttgtatgggagaagtaggttgtgcaacagtattcaggccttcggtgtaatcttgctcagtggcaacacttgaagtgaaatgtgttgcggtagtcaagttctatgtggatgcttggtttttggtggctcgtgaactagcatgtgtagtagtagttaggcttaaggaggattgttggtttatggcagcactcctttgcctagtgaatctaatttcttgtccaggaacatcaggggccacaaccctcttagatcctcgtgttccttgcgtagttttgtcagcaacatgagtggagttgtggccatgtacaccttttgcaacatgggaatcctataggtataatacactaatcatgcatatcaatttatttgcaaatgcatgtgtaatgatatataacatgaggaaacaaatagatgaattagaaacttgtttacttcctcttgctcagagccttcactgtcctcgccgtcaaacaaagaccctgattcttgaggaccatcatatttgctccttgctcttgtggcagtcatcattgtgcgtaactg

SEQ ID NO: 76042 - DNA, 368 bp, Zea Mays
tggagctcttagaagcaaaactgtgttgcactttccactgccgaggctgaatacatagctgctggtgcttgttgtgctcagttgctatggatgaagcaaaccttgagggattttggctgtgagtttaaaagaatcccactactttgtgacaatgagagcgccattaaactagccaacaatcctgtgcaacactctagaaccaaacacatagatataagacaccattttctgagggaccacaaagcaaagggagatatcgaattatgtcatgtaaacacagaaaatcaactagccgatatcttcacaaaacccctcgatgagactagattttgctttcttaggagtgagctaaatatcttggattctcg

SEQ ID NO: 76043 - DNA, 452 bp, Zea Mays
actggaattttgaagaaatgtctgaggagaagaaggtgtttgagttgccgaaggtatctgaaatgccgaagatgtctgaaatgacgaaggtggtcgaggagaagaaagctgtggacccttttattgctgtgttttacgaatccatggcaaaaaccaatatagaaaaaatcacaaaagagataatggcagatttatctgaagattctgatgacagtgataagtttgatgtggaaagtggagatgaagattctgaggaccggccatggtgaccaagccataccatcttcggaaaatcaactattaagcaaagccaagttgacgccatgagaggaaggtactttcgtgatacgtctattgtgaggattggaggagatagcactgcccctgttcctgaagaaaataaagttgttgtttaccgaagctttatgaaggcaggccttcggttcccattg

SEQ ID NO: 76044 - DNA, 366 bp, Zea Mays
ccctgtgtgacaattcgccttcttcgcgcttcgggccagcttgtatgacatgtgaggcctggcccccgtgtcataggataggaaccttggtgcgcatcgggggagaccttgcccgtgacgcttcggggcgcgagcggggaaatctgcctttaaaaaggggttcacccctcgagtagcagccatgtattgcttctctcccactcgcgcgtcctttcgcctccaagctccttgtgcccctttgccttcaaggtcttcgcttcacgttgccgtagtttgccatggccttgtgacttcatcccgagcacgcccagactgagtgagtgctcgaaatggtataccgtcttcttggatggaatgcgtcggcgc

SEQ ID NO: 76045 - DNA, 628 bp, Zea Mays
gtggttttccttggatttccccttctgccttcatcatgtttggttttgttgacttttgttcccttggattatgaccgaccatggactatggggcccgtttgtatctttaagggtggatcagttggctggaggagtcgttagagtctcgcataccgtacctattttgtccttcgtatgtcttagtcaggagcattgctgagtggtcaaaatatcataaatgtatccccacattgggttgtgctaccttggggtcatgggatcctactagagacactcttctttataccatcttatcttagggtgaccaaggttggggctgtgtgattgggcgacttggttgatatttttgtttagggcaattggggttaggtctatcctggtcgaggaatccttagctagctttgttatagttagattgatcctgatcgaggtaactaggttggaaaacttaatttgggatcctggttagaggttgcctcatgccatgaatttgtaggtcctttatgtcattcttagggtatcctaagtatgggtacacatcatcgagtctgagaaatcccaagctcacagagaaggacttggatccaaattacctctattgtggcattagaaacttccctgtattcgg

SEQ ID NO: 76046 - DNA, 1061 bp, Zea Mays
gttctaggtacatagtcctcatcttagtctgcttttgactgatgcatttgtccaagatcaataacaaacccccttcatcaacacctacatgctcattttttggtttagggttttgtaggtatttctcatcaaagtcagtggatacctttggttgagtggaagcatcagactgttgggtataatcactagcatagtggtatgtctggagggttagcactaggatgatgacgagcaatggacatataacaggtcttactaaatgcatgtttctggaacattttaagtaggttttggtcattgacacctcaatgtttgcttcgattgaacagagtagtaatatagtttggctacttctccataagaacatgggtacttcctcaacatttcgtccaaatatcttcgaaattggtagtatcaaagtcaacaacctaagtatgcagaaacatgcaaatcgtgcatttgtggcaattatcctaaattctagtttgaaggaactttccgggtccatcctatagataaacacaaagtaatttgggtcaccaacaacgcaggctacagctaaatggtgtgtccttctctagtgtgtccttctccaacatgtccttcccgaaaaacagcaaaatggtagagacaagagcaggaacaagagttggagaacatacccatcgggaagccatgaaggacgcttgtctaccttcgccggtgtcgttctccctcgccattccggcctccattcctcttccatggatccatgtccaagatctaatcgcacatggtctagggattgagtgtggagtgggcgccgccgtggtctaggatttcagaagggaaagctgtgttcgggggagaggaggggggagaactgaggggaggagagaattgagttgtgtttaagtcgcaagggcaaaatcgccatttaggcacacttaacaggacataacgacacctttgggtaacaaagctaacaacagcggcgcttaaggataaaaaattgctttctaatggcaccgaagcagtgacaaatttttgagtggttcgtctcatatcttttataatggctt

SEQ ID NO: 76047 - DNA, 458 bp, Zea Mays
tttcccggccgccgcgcgtaatcgctcgattcaccgaccaccgcccccggagtctataaattgagtgcaccaccgtcttcgttatgtattcgagtagctacagcacccacctacaccccaaacccccaccagagaactcgaatttgagattttccccaaatcaagtctccgccaccgtgaaacccacctcaccgtggccagccctttcccggtcagttcatccctcgctctccctcgtttgagcactcttgacgctctgtgatgcttgccgaaccaccaatttgtgcagagtagctttagatcaccaggaacacgtaccaattgtcctcatcgtccgcggttcacatggacagagcttgatagcttaccaattgtgaaattgatttaggggaatcattcggggagggttcaatccggtgtatgtcgctcgagagcaccggtcgtagcgtaaatccgcc

SEQ ID NO: 76048 - DNA, 769 bp, Zea Mays
ttgaagaggtcccttcaccaaattcaggcactacggccggttcaatatatcgcggccggtgggtcagaaccttcattttcttgcccttcggcatagcagtggtggctgaagtggcagtttttctcttctttccttgccttcgcaatgggtagtgataatcagggtatacgaagccaattgcatcaaacaccctgttcaatctttttttgccccgacccccaaaggctgcggacaaggcatcatcttcggccttcgagtatgtcccaagcagctcgtcgctggtagcttcaatgcatttcaaccagtcatcgtttggttcatcaaacttctctctatatctgaaggtatatttcaatcgaactagaccaccttcactggattcagcagtagtctccttcggcatttcccagtaatccacaagtggccacaccctataggctatgtgctcttggattatatctcttgtgccaatgaaggcacaaacattgctaaaggccttttggcatgcttcgacgtcaccttcaatagccaccttcggccttcggaggccgaagcgagaccagatggtgcgctggatgatttccttgatatccttcctttcaatcaaaccatttttaacataaaaccactcctccatccaggccccaggccatcttttccggtatgttggcactgggtagcttgcattagagcgagcaatgaatccgtaacaaccgaagttattgtggtattgttccttgccggtagccttcgtctcatataacagctc

SEQ ID NO: 76049 - DNA, 969 bp, Zea Mays
tcccttgttagaattcggcaaaggaccaagtctcccgctacgaaagatcgatgtcgtatggctttatcatgataacgcctcagagtttgctggtacctagccgactaaattactgtattcaatcgctcttcttctaatacatcaatatcttctagtcgagtggcttccgcttcggctatgttttcaaagattagccttggcgccccgaacttgagatcagctggtagcactgcttctgagccatagaccataaagaagggagtgttttcgtgcaaagctcggctaggttgcattcttaggctccagactacatacgacaactctctcatccactttcatgtgaacttttcattcttaacgaagactttctttctgagtgcttctaatatcattccattagctctttctacttgaccgttggctcttgggtgtgctactgatgcatatttgatcaggatgcttctttgttcgcagaaaacaaagaattctgaactggtgaaattggatcccaggtcagttatgatgctattcggtattccaaatctgaatattatgtcttgtacgaattccactgccttggctgaagtcagaaaagcaatgggtttgtactctatccatttagtgaacttgtcaatagcaaccagtacatgagtgtatcctccttgagctttcttgaagggcccaatcatgtccagtccccagcacgcaaatgaccatgttatatgtatggtttgcaattgctgtgctggtaaatgctgctgttttgataagtattggcaagcttcacacctctggattaacttggctgcgtcactctttgctgtcggctagtagaaaccagacctgaaggctttcccaaccagagtcctcgatgctgcgtgtatcccgcattgccagcgtggatttcttctagcagttgtttcccagtagccaagagaatgcatttcatgaggaatcctgttgcgccct

SEQ ID NO: 76050 - DNA, 486 bp, Zea Mays
ggttttgagataatcctgaggaagatctttacttgttgatcatagacagcactctaaaagctagagaaacttcgctggatgctctgacctctaaaaatcttctattaagagtcgttgtgacacccctgcgttcaaaaccacttgcttaaaaagttagaaagatacatcataggataaattattgttatatccaaagggcttagtaaggttatatctctggcctcagtgtagctgtggattggtgatccagtatcagcttgcctgcaaatgtatatctagggttttagacattttcattttctgaggtttgttagtgtcatactagtttgttactgacttattgtatgtcatgtagttcctcgtgcaaactcctgggcataatgtagttgtgcccagacctgatttgacaatttgtatcagaagaagtcaaattgcttaaatctctgtggtataatcatatttgagaactatataagtgaatgctag

SEQ ID NO: 76051 - DNA, 571 bp, Zea Mays
acgccacaacggaaaagcgccttctcgaagccatgcatgcatgcaaagttcgctaaccgaaccgtgcactaattaattccgtcccacacaccaccactccacctaattcaggctgtccttctctcgatacgaatcgaaccctttttttttcttcaaacaaacaaaaaattaaaaagaaatggccacacatttgcatgcgagaaagcttttcacgcttggaatcattgcgggatattttttatcagatcattgcggaataataagtgaagcaatgcaaggtgccgtatgtgatagctcgcattgccacatccaaatatgagtaataataccccatctgccctaaaatattggttgttttagcgctcaatttttatatctatattcacatatataaaacacatacatcaggtattacataaatccattaattatctaaaacggttttcaattcggaacaaagtgagtaatattgtggtatcactaagccgagacaataaaaggcagctagcagctaccatgaccggaacacgagaaaaggcgagcatgcaccatggcatgacttcctgcctgc

SEQ ID NO: 76052 - DNA, 1783 bp, Zea Mays
gattagagttgatcgtcgcaaccaatcttgtgtacaaataagagcttggaccatgaacggagttagagaggatctaaaatcatctaaaatccgcccacctgtactaaaaactgattcggatgcaaccgttgatatcggaattgccaacacatcacgagctatacatgccaatataggaaatctagattcattcactttccaccatgcaagaatatcaaatttgttgttgtcatcttcattgtcctcactaaggtatttgtcaatttcagatttggtaatgcatatggaaccactgccaaccttcatctttttagcaatcaacgatctcatcattcttccccctcttttttgagtttgatcttcattaacttctgccatcgaatcatcatttggagaatacatgcttctatattcttcaaacaaatcatagaaacattgcctcactgcattccaaacattttctcctttttcctcaccaaacatttccccaattgctaacttggtgtaattagatagcttgtaccttggatcaagagctgtggcaacaaagatgagcaagttcatgttctccttctccttcaacttgccctttcccctcccctcatttgcattctcattgtcattctcattgtcatgccaatttccccaatacttgttatacttatccttcattctcgtagccattgtttggcgcaaataatcgtcactatcagcccattgtcgtagcagcatcttcacttcaccaatctcatgaaagtactaattagttgtcatagttagttgagtggaaacacgaagagtgatatcataaaaatggccaagaaattcagccatcttttttgcattttcccaatcatcttcaagtggaattccataacctttgtctccacataactcaatagtgtaggttggatcatcttcctcatattttgcaaaaagctttctcataactgattgcactgtgtaagataagatatgttgaattccacctagtgcaaacatctagtttcaaaaaagcactggtttgtacattctcctcctctgcaattttcttaaactttgccaacctagaaggtgaattcttaataaacctaacagcagcccttacacgtttaactgagtcatccatttcttttaatccatcagaaacaatcaagttaagtatatgtgcagcacacctcatgtgaagaaacttgcccatagcaatgctagtttttttttattattcatttgtcttcgaacataatcaacaccagaatcattagagctagcattatcaactgtaattgtcatgattttagtaatcccccattcaaccaaacacctcataatgttttttccaatatcatcacctttatgacccttcactaagaaaaaactaataaccttcttgtgcaatttccaatcagaatctataaaatgtgctgttacagccatataactatcttgttgttgagaagtccaagcatcagttgtaagacaaactctttcacattgttgcttaaaaaaggttttgagctttgctttctcttcaaagtatgtagacacagtgtctctagtgagggttcttctagatggcacattccaacgtgggcaagcaattgacataaactttctaaagcctgccttttcctcagtagtgttgccggcggtcagtgctgattccttggtggcattaaggacctatattatagtggccacacagacacaaataaacatttgaagcaaaaatcactaaaaagaagagaacacagagacaaaatcaaaccatacttcattagag

SEQ ID NO: 76053 - DNA, 490 bp, Zea Mays
tgaagttgtggtgttcaagagcttcttcagggcggggcttcggttcccctttacgagatggtaggggaagttttgaagaagttcaaaatttacctacatcaattgacccccaatgccattgttagacttagcgtgtatatttgggctcttcgaagccaaggaaaaagtgctgatgccgaagggttctgtcgagtgcacgaacttcattatcagacgaaggctagagctgatggtctgcacaagaactttgggtgctacaattttgcataccggaaatataccaaggcccccattgattggctaccgcactaaatggctgaccgggtggacgaatgagtggttttacatgaaggctgatgagaagaagagggagaatttcatgaacatggtaatgagtcccttaaggctaaacttcggcatgactcgacccttgtgtaatatgcagctagggtctccttgccaacaagctgaagtggaatttagggtcgtg

SEQ ID NO: 76054 - DNA, 441 bp, Zea Mays
gtcgccgcatcttcttcgtcgacggcgtgaccatcaccgacgaggaggaggcagctgctgcagaacctaaccatgaagccgaggctctgtctttcctttacaggcagtggcgggagttcccatatgcgacaccatgcaagtccgggtggaactaggcaccgcgacactagtggctctcctggacacgggatccacccacaacttcattggagaggaagttgcgcgtcgcatgggcatggtcatccaacctcgtccacgtctgacggccacagtggccaacggggaacgcatcctctgcctcggggtcattaggcaggcaccgatcatcatcgccgtcgagaggttccttgtggatctcttcatcatgcctctcgcgggctatgatctggtcctggggacacagtggctcgtcaacttgggccggatcatgtgggatttcac

SEQ ID NO: 76055 - DNA, 412 bp, Zea Mays
cggtgaccttgccacggtgaaagccacgaatcctttgcgccagtgctctcccctctctccggccgccagcgtgccattccaaattcaagagccaccgcccttgggaactataaattaagcgtgccatcagctctgctaggtaatcacacacccaatgcaccagcccgtgcctcagattgtccaccagagcgctccaatttgggatttcccccaaatttgttaagaacaccgctatgtgtgagctcgccgtggccagctctccaaaggtccgatcatgccctcctcgttcttgttttagctctcttatgtgctcttgatgcttctcgacccggccaattgaattagaccgcgttagatcgccgcgaacacctcaggttatcctcagtttgcgccatcaccgtggacagcgtga

SEQ ID NO: 76056 - DNA, 653 bp, Zea Mays
tgcttcatcttcctgtagcactaaccttctcctgacccgttctccgctgtcagcaaattactccacatagttttagcaggagtaaaggtggtggtgttggtagcagcagcaggcagtaggccagtagcagcgtaatttggtgagtaataatctcgtcgtgtaaaacgtttcccccctgggctggctttttaacccccgcgggagaaaaattactggctattcccgtagagccttcagcccgtcagaattcagatcgcagggctgggctctgacgcgctgtgctgatgtattgtctgcactctgtagagtacctctccgattgtgcatgtctacttgtaatcttctgttcctttttgcaatggcgagtcattcagagctggaaaggcattccatctgttatagtagtattgttttgccgttctctgttacactgcccgcccgattcaatttgctctggcggaactgaaaagcttctccgtctcacacacgtgttcttttacttttaccgttattagcacaccgttagctcaatttgcggcgcagcagagatggattttgcggtagccgtacaattttcgcagtgtagtccatgaacccaggcctctcttcaattcttctcgtatatactattcgcaaaagaaatgtgtatatgc

SEQ ID NO: 76057 - DNA, 286 bp, Zea Mays
ggttcctaggaaccctagaactctggatgtgtagactttgctaaaggaaccctggataaagttaaaataaactcgccgtccctctccactgtttcctgagtcttaggagttttaccccgtagcccctacactttctagaaaatgaggcccagtccagagaagattaaaaacagagaaataattatagaaattcgtttttaatacaaaaacaaatctagaaacttgtaaaatgcatagaaaattcattttagctccaaattgaaccattccaatttctaaaattttg

SEQ ID NO: 76058 - DNA, 576 bp, Zea Mays
ttcaattgtagtgcttgccgacgatagtgtgcctggttttatgtctgaatgttttgagtccgacggtgagtctaggagtttgtttccttggacggaggagtcctcagatgaaggcttggattattttgttgtgttggatgtggctacggtggagacttcgccgtgagtggagggtgctgaggatcttgtgcgagtactgggtgtaggcggcgaagggtggtgggaaaacaaagtgtgggtgaattttcacggagcggcaggcgccaccgcatggggatggagcgtggccggctttgggtagacggggttggtaaacgagagttgttgtcctcaccgattggggtggccataggcgaggggggtcttcaggagctttttgagggtgaggaattgaggataatgttgtttaattacagagagatgggtatcatttcgaaggttgagccgatgtaataggcgatgccctcgtcgtgtgtatgtaataggcgatgccctcgccgtgtgtatgtaattgtaatttgtatggtgacgtggcctgttggctgtattcgtacgcttgtgtttgtccggctgcgt

SEQ ID NO: 76059 - DNA, 276 bp, Zea Mays
tcctaaaagcattaagcacactagcaaactaagatggataatttgaaccattcgaaagtaagagtaggaatggctcctcgccccattcctcaaacctcattccttgtccccaccccgtttagcttatcagggacaatctcatgctcatccccatccctatggatccccgttctctatttaggacccctcatggaatactgtaacacaaaaaataaatattaactacatgataacaattacaaatatattaattatcaaaatataacaagacaaaaa

SEQ ID NO: 76060 - DNA, 569 bp, Zea Mays
ccgatttgttcgggattgacccaaggttcagcagtgattcccgccataccctccattgttcacggtcgcaggggctcgagaactccatctatttctagacccgttggacgagttaggggaacaagactccgcctttatgcaccaggccatgaagccaacaaagcgggatgtggttgagattgcacgagctacgtgcgttctgttaccgggcgtgcaggaacaacgaaggggataagcctgacaaggttggcccacaccacagtggaacgagggcacacaagagactatgacaacccgggtcccaccatgacagcgacagaaagggctggcgcgagagttgggctggcgtggaagggattttgggccgaacgaatggtggcccaagcgtgcaggtaacctttttctttttcttttctaattcttttcctttcttcttatttcatttctattcttaaatttcaaactctaaaatagatttagacgcggtttgaatttcaaacttcactcatagctcaatccaagatccataatgtcaggcaaaatttattttatttatttatccgcctaaa

SEQ ID NO: 76061 - DNA, 1339 bp, Zea Mays
ctattataggagtacaaatttgattaagtacttaagccttggtattgtacaaaattaggagttaaatgggtctgaagtctggctgtcagataattcagagactaatgttgtataatagtgaagttaggcaacctttgagctaggatttgactatgatccagtaattgtttggctatggttactatagcaaggttatagctggatcatagggctaaaactttgacacagagagcaggtcgagtcactacatgaaattaggagcaaatttccctgcaagttgctctgtcatgctgactgaatgagaatccaatggtacagtgcactgaaagtatccccaatccactgaacctcgcctccgatgagccatgcgcccggattcgcgccagccgcggtgattcatgcccagcgcaaatggataacaaagaagggcaaaaatcttggcgctcggattactcgggctcgctcaccgttgtgcccgccgtacccacttggaccgtgactggtcgaaatcatcctcgccggtgttagccgctcaacgatcgtgcgccacgtgccttggtgtcttaccacatcgcagtagctcgtgttatgcatatccggtgatcgccggtgagttcgccacggtgaaagccaccaattgcttgtgccagtgcaccccattctctccggccgccgcgcgtgttttcccaaattagccgccaccactcatgaatcctataaattgagcgtgccctcagctcctctaggtattcaagcactcagcgcacccactcgtgtcccaaatcgttcaacagagaaccccaatttgggatttccccccaaatcggtccaaaacaccacgcgaagtgagctcgctgtggccagtgtgctacaggtccgttcatgctctctgctctcccgtttcattgcccttatgttctcctgatgctcctcgacccgttcaattaagctagaccgcgctagatcatcgggaacacctctgttcatccgtagtttgtgctatcaccgtggacagtgtgattaagagctcagatcatgcaattgagcgaggagaaaacgtttgttagatgttgaattaggtatcagccaagttagagcatcggtcattgcgtatcctggctagtgcaagctcaccggagttcctgctccgctgtccacggtcgtggacttcaccttgtgaagaattagaaagtggaggacctcggtgtaaatgtcagtgactgaaacaaatagtgcgcatggttcttcgctagttattcaaacccctgaggacctcggtgcaaactgtccaccgcgggtgcacgcgcgggcgcgtttgcctgttcacgggctgatttgg

SEQ ID NO: 76062 - DNA, 607 bp, Zea Mays
tcgcaaagctgcaatttcagtttacaaataacatatcagaatacgaagctttattgttgggcctgaaaaagttgaaggcgatgagagtacgaagtgcaatcttgaaatatgattctcaagtcatcacaggtcaagtggacaaatcaagcaaggcaaaaaaactcagctttagaaaagtatctcgatatggttcgaaggatggaggcttccttcgaaagattttcactgaaaaatatcccaaggctggacaacgagcacgctgacatgttagccaagtctgccgcccaggggctccctctacccccgaagtattctttaaaatactaaaagcaccctcggtggaattgatggaaagaactatcttaacggtatcccctacgcaaagtgaagactggaggacggagatcataaccttcctttgaggaaaccatccagtcgacgatgaagcatacatcaaaagaatgcaggcaagaacgaggccatatagaatcatagaaggggaattatacaaggaaggtgtctgctcacccctgctaaagtgtttttccagagacgaatgtaaagagtggataagagaaatccatactggaatatgtggatcgcacat

SEQ ID NO: 76063 - DNA, 732 bp, Zea Mays
cgctggtcggtccaccgttcagccagtatgcatgctatggcggttcgccttcttctcctgcaggactatataaatagataggttggtgagaagttacgataacattcattgccattgcactgttgtgctgttgaaaattttaaccgaagccgaagctctctgcattgtgctttcaaacaagcgcttcgtcacttaagaccagcttcgtctgaaagaaactgaacattgaaatggccagagtaagatccactgccaaggtgtcccatgagggaaatgagactgaagtaaccgatacagcacccatattagaagtgaggaggcgatcaggtctggttgtgcaagagggagctactgccaaaggtacctccaacgccgaagctgaacaagttatggctaaagtcgggagtgataacgaaagtgaagaggacaatagtattatgtgcccaaccaaacctagtcatattgaatttggaaaatccatagtaaaagcagaggacctggttgtgatgaagaagctaggttattttggagaaaatgaagatggactgattcgctttgctagagaggaagtaattctagagccgaaggatgatgaggttgttgtgtttgagagtttcttcaaggcggggcttcagttccccctttacgatatgataggggaggttttaaataaatttgagatatatctccaccagctgaccccgaatgctatcgttagacttagcatttaca

SEQ ID NO: 76064 - DNA, 286 bp, Zea Mays
attcattgctattgcactgttttgctgccaggaatttaaccatagccgaagcttgacccttgcgcttaaacaaagcaccacctcggagtctgcttcgtcacaagaagagcttcggaaaaaggtcatcaatttgaaaaaacttctagaagttcataatcaaatggctagagtgcgctccactgccagggttgaacgtgagagagatgagaccaaagccactgaaaccgttccaatttccgaagcaatgaggcggtctgggctggcaacatcaggggatacatctgca

SEQ ID NO: 76065 - DNA, 937 bp, Zea Mays
ccggaatgcagcggcgttgtggcggatgcggaggcagtggacggtgatgtaggtggcgtcgtcctggttaatccactttcgctgggcattaaggatgcgggtgaaggtggagtgcttgtaagcggggagctccttgcagagccaggcgatcctcgaccgacgccactgctccggcagctcttcgagctcgaaaacctccagctcgggggaccttaccgcgtccctctcgtcggcggtcgctgcccactcctcaccctggaacaggcctatcccggactcctcttcctcgtcgtcagattccagcacgagggcttccagcgctgacgctgcccttcgaggagacacggcgaggcggcgcgcgagaagcggcggggcggcgagccggacggcgggatgagaggtagcgaaggggagcggcagggctagagggcatcgcagcgatggggacggagcgccgcaggcgcagggaggggcggtggccatgaacgaatctactgggcagcacctttttctgctcaacggtcagcgctgcacggagcagcctaatctttccgcacagctacagactgcagtagccagtgcccagtaccttcaggcttggaaaaaaattggctgcactgcagcggcctgcaaagcaacgcctgtacaggcttgttttgattgacgccacgtgtttggccgcacaaatctcaaagaaacgaaggccagcccacgatctactccgtactttctagctcggctcgtcggcttccttcgggcttagactgtctccaacaacagactgtaaatcgttctgtccgctaaatatatcgtgtagcgagctattttactattccaccaaggtccgctaaaaggttctctatcttagcggatggtacagtcgtcctccaaatatggcgtcttcctatgcttacgctaaattgtcttcgtcctgtca

SEQ ID NO: 76066 - DNA, 977 bp, Zea Mays
gtctcatgaagatcgccatggtacagtgaccataaagatctccggtgccgtgtgctcgacgccggtgatccgccgccacaatttgcactcgcctgggagattcatgccacgggaagagtagataacgtcgaggcaaggtgaaaatatccagtgcggggtgaatctggtcgctggccggaccggccgtcgtgtcccgtcgtggtcaatcgcgctggcatcaccggagttcgccgttatccggccaggctacgtgcctcgaagccttaccacgtcgcaatagaccgctttaggtagcttgttcatcgcctaagacactgtcccgataaaagccacgatagcacttgcaccagtgacttcccctctctccggccgccaccgctcttccttcagattggacgccaccaccgtaaaactctataaattgctgccccgtgagttccgctaggtatttacgcatccaacgtaccagcccttgcctcggatcacccaccagagcccctcaatttcccatttcccccaaatcagtcagaacaccgccatgagagagctcgtcgtggccagacttctacgggttagttcatactcttctctgtgatgttctagccaccctcatgcctcatgtagctcaccgacccattcgattgaactagaccgcactggattgccctgaacaccatagtttcatctcggtttttgtcgtcgtcgtgagcaggcgtgctccgcgccggattagtgcaattggttgagggattagtgtcgccgagggtggaattaggtgtcagccaagctagagcgccggtcattgcgtatcttggccggtacaggctcgctagagccactgctccgccgtccgtggtcggggacctaaccttgcgaagaaacaaaaagggaggggcctcggtgtaaatgtcagagacacatgtgaatagtgcgcaggattcttaattggttattcaaacagttagggtcctttgtgc

SEQ ID NO: 76067 - DNA, 477 bp, Zea Mays
tggaaagtgaaggaactcaaagttttagaggcatggttaagataagcattaatcataacaagaaagaaaccctagccttcatacaatgttcacccataaacaaggttctaaaaccctaattccctcttaagccattaaaccctaaccatgggattaaaggggaaagagtgggcaaatgaccaaaacataaaaaggggcctttaccaaagatgaagtgcattagtaaatctacaaaatttattaagagaagtattacaaaaaggcccaacaaaaacctcaaaacaattcaccaagtgggggagcacactagagccattcaaaaattctctaagtccccaaaaccaccactagcccaaagatcaaaggtgttcacctttgtgctggtgccaaaaccacttggaccaaatagcaaaaactggccaaattacccaaggcacatccctgaaaaatttgaattcaaaccgaggtcgtttgaca

SEQ ID NO: 76068 - DNA, 531 bp, Zea Mays
ccaaggaagcaccacagtgcctcagcctaggtcaaggacaaaacctgacaacatagaaggccctttagccccagcaatacaccatagactatactcatccccgggtaaggtcaaggtcttagcgatactaggttgcgacccattgaacacactcattccggtggcgccaaacactccaaactcctaagctcaccaaagaattaaacccctttcgggcatcttcatggatgcgttcagctgagctgctccaccaaccgtccaagttaacctcatcaaaacccggtgtcaaggccgccaggctcaccctctgcagaaaataaaaccagaattgcctcgcgaagacacacgacatgatggatggtttcctcctcttggtcacaaagagggcaagaggtcgggtgaggaagaccccttctagccaaccgatcagcagtccaatatctattgtgcatcacaagccaaagaaataacttgcacttagctggtgcccaagatatccaaatgcgctcataaggggcaaaggaagtggac

SEQ ID NO: 76069 - DNA, 509 bp, Zea Mays
cgcaaatagagaagatcgagggtttgacgtgtccaaggcacgcgtcccaataccatcttctgatatgaggtagaggggttagttaggcaaaattttgtcaatggggtcattaggatttgagcaagggatcaaagtgaacacgctcggtctttggctcaagggctgaaatttagaattctgaatttcagaaatccctattgaaccctcacttgagaagcttgtttggagtttttatcaaactattttggccaagcttccataatctctattgtagtttatttagtatatttcaatgtttatatttggcctaagccatgattttatatttttcatggtcttttaccccttttcttcatttctacttaactagctcaattaaggttggtattaaggtttcaacacttttccctttttgaaaaatcttatttgtttggaacatgattctttagatatacacttagtagatcttttcttctcaagttaatttgatgcttcatgcttaatttggc

SEQ ID NO: 76070 - DNA, 520 bp, Zea Mays
aaaacattgtgtcatcttcagtagatatgcctggactcgagcatagtgttgttaactgtgcgagcttcagactgctcctgaaggtcacgttgttgccgaggccgaaaatgcccttctggttgctgatcatgacttggggcaggcaccattggtgggggtggtggtagttgagcccaggaagcttgagagtggcttgctgaagcagcagaagccatagactgttagttgcctacgtattccgggatatatggagagtagcacgaagcagtatggaggatctgcttcggctgattcagtcgtgcctcggcttcagcgatttccttttgcttttggatcgtgacctggcacgtcctcgttgtgtgacccttttcctcgccacagaaaaggcaaaacaacttccagggctaattaccgaaccttcctccactgaagcttcttcctcctctgcctctcggagctggtggtctgtaagaagtttgttgcatgcctgaagattgtgagctgtgatgactgctctgag

SEQ ID NO: 76071 - DNA, 375 bp, Zea Mays
tgctgctggacaaggtcgtcctgctgcgccgcctgctgctggtctgcctcgtccgccgtcctactcctcctccccctcctcctactcagccaattaccaccgaccatatttgtccaaaaacctaaaattaagagtaaacaaataagcacatgtaaaaagatgtatttaaaaacatgtgccaaataaaaagtcatatagcattacatcgattaaaaataatcttcatatgtgtcggggttagccggatcataactctcatcatcactatcaaccatttcaatctcaacaccatcggaagacgcaacctcgtcattaatgtcattgccttcaaggattactaagtcattatcattttgcacctcatcatcctcctca

SEQ ID NO: 76072 - DNA, 1168 bp, Zea Mays
gtgcagagtcagagggtcatatctcatatttgccaggtttacactctcttatgacctttggtggcatatatattgagaagtcgatcagagtcttttatgccatagtttggattgacctagatcatcagtggatgaggttcaggtttgactgaggggatgtgactctgcatgcaactcagatcatagagctatttagatttcttgagccgtcgacgaggctccacagtttgtgctatggcacgtcagatcctcctcgtcgccctcacggcggagttgcccctgccattgctcacgtcaccgccctattttgaccttcgttcatagatggttcacggcgctcgccagcagacttcactccagtagccaagtttctctatgagctcatgaggcacactttgctactgaggatgggatacagagaagccaccactcacatctagctctggctactcggtgccttgatctcacactctgagtttgacgtggtcgattttctaatttgtgagattgaggacacaattttggatgttctccatgctcggcgtcagctgccgtacgctcactatctctgttacatatttgctcagctaatccggcctcctcagttctaggccaccctcgaggcctctagactgcagttcggcttctgccgcctagcacttgaggacacagctctaactccagcaccagatatcagggttgaggatgaggccatcagacagtttgagaatcagggtgcagttgctgatacttcttccgatgatgaggaggatcagggggattccgccacaacctctcgtgccaccttgttctcatgatcacgaggctaatagctctagtgctgctctagctgctcctccagcaattgaccctgctttggctaccatcctttagtcgctcactcagcaacaggctcatatggccacagagcaggcccgttaggcagcagagcaggctaggtaggtcgctattcagcagcagttgtccgagcggatgttatctatgttctagaccattcaagaccgccatgacactctatagaagcaactcatagtagacaggacagagcaccgagcgttcatgactcatattctccaacataccggtgttctgatgatccctctagtgtagactgttccccctccatctcttcaggctactgttgtgc

SEQ ID NO: 76073 - DNA, 423 bp, Zea Mays
ggataacggatactaactgcataatacatacattgcttatcgtttgctataattcagtttgtgcataaaacaactacaaatcatacaataatccaacatgacaattagacatgttcagacgttgggtcgagtcaagatcgagtcatgggtcgtttggcacggcccacgcctacccagtgcatagtgttgggtcggatctggttgacccgtgcctccttattggacgcgttgggtcggggggttttagctttgggtcaggtttctagtaaaaaatcgtggcttgtatctgctcgtcacgctcgcattggtcaggtcggattttttcggatggatcggtcgggtcaggtggcccatgcttaggtctaatgacaatactagcaataagttcacatcatacaccataatagatcaacattgcaatat

SEQ ID NO: 76074 - DNA, 716 bp, Zea Mays
gccctctactactgcagggggtccggcaacctggggtccagttctagagaatgggtgctcgcctcctggagtggtccagagctgtgtagctacttagcatggttccgtacgctaagcctgcacgttccaccactctgcaacgggtaccctagtatttggagctgtgatcctgtgggtccgggcatacggcttggcttcccaggctaaatcctgcaggtcctgttgcatgtatcaaaggatgaaagataccagatggtgggtcctatgggtgtgctcctaaaaacttcaaaaccaaagctgtgtgcaggtccaggtcccagtccagtagtaggtagtctcaaactgtagagacgacctcctaggggccggaccaccaattttatctttggtatactggtatccagcctcgacacgtcgagcctacctcccagggggccaagtaatagggggaagttgatgacgctactcacaacaaggacaaataacatacagataagtttaagttccagtgctacctcattagcggttcttagaatatgttacaaaaccaaaagttattatagccgcccccagcggaaccctcgcgttgtttctacaggatcgactattcagcgtcggcaggatcacgctgaaagcgtgcggccaccatctccaccgcatcttgtacactctcccgggcgacatcttctgtggcggccaccggaccatcgatcacc

SEQ ID NO: 76075 - DNA, 575 bp, Zea Mays
gctcagcgcagacggaacaatttcttttgttttggcagctgaagacgccccttcgccaaattcaggtatcacggccggttcgatgtaacgtggccggtgagtcagaaccttcatcttcttgcccttcggctcagctgtgatggccgaagcggcaacctttccaaaaacagcaatctttctttttaccccttgcccttgcagcgggtaacaatagtccgtgtatacaaagccaatagcatcgaataccctgttcaaccttttcttattctgacccccgaaggctgtggacaaggcattgttctcggttttggaatacgacccaagtaactcatcactagtagcttcaatgcacttcagccaatcatcatttggttcatcaaacttatcccaaacctgaatgtatacttcagccggaccaaaccaccttcgctagagttagtgatggtctccttcggcatttcccagctttccacaagcggccatactctgaatgatatatgttcttgaattaaatctcttgtgccaatgaaggagcaaacagtactgaaggccttctgacacgcttcggcggcgtc

SEQ ID NO: 76076 - DNA, 367 bp, Zea Mays
gaaaggtccaatcatatccagtccccagcatgcgaaaggccaagttactggtatggtttgcagttgctgtgctggcagatgttgttgttttgacaagtattgtcaagcttcgcacttctgaactaactcggtcgcgtcactcttcgctgttggccaatagaatcctgacctgaagaccttcccgactagtgttctggatgctgcatgtattccgcattgcccggcatggacctcctccagaagtcgtttcccagtagatgagggaatgcacttcatgaggacgcccgatgcacctcttctgtacaatgtctccccaatgagtgtgtagtgagccgactgtctggcaatgcgctcggctgaattcttg

SEQ ID NO: 76077 - DNA, 297 bp, Zea Mays
gcaatactgtagcctatctatcagtttagggtttcactttcaccaacagggtgtcaaagccgtcaccttcccctctcccccctagccaccgcccaactcccatggtcggcgctcctccacctggtagctcgctgcccctactctcttccctgctgccagccccatctccaccatggcgccgctgccaccaaggcctaggcagacaccgccgccagctccccctgctcctcccatccctggatcacccacccctgcccctacggcgtggcagttgttcagaacatccgcttcctgatt

SEQ ID NO: 76078 - DNA, 569 bp, Zea Mays
cggagcgtgtgaaggaggcgaatgcacaacgcctgttgaaggagttcgagaatatcgccttccacgatggtgagtcagtagatgattttgccatgcgcatcaatgcacttgcagcagatctgcgcatgtctggggaagaaattgaggatacccgagtcgtgaagaagatgctgcgcgtgctgcctcagcgttatgcccagatcgcaatttcgatcgaaaccctactcgatctgaagaccctgacggtcgaggagctggtcggccgtctccggatggctgaggaccggatcgaggccgaaactgtcactgacaagacggggcgactattgttgacagaggaggactgggtgtcaagaaatcgacatcgtctcctgccagattcgtcgtcgtcgagcggtggggagaagaagtcggggtacaatcccggcaagtcgaagaccggcggccgtggtgacaagaagggcagccctgtgaagctgacgacggaaggtactccgcggcggaaaggccgttgcaggaactgtggcatctacggccactggcgtgtagactgcaagcggccacccaag

SEQ ID NO: 76079 - DNA, 717 bp, Zea Mays
cacttcacttcattttagatatttatatattgtggcatttttctaggacttcggttaacatgtttagacattgttcttgtgtttcctaatgggggtgcttagatccagttgagatctatgtccgtgtattggtcgttatttgttttctctaattactcggtggctctgcataatgctgtaggatttaaagttttcatagtatgctctctgctttaaacatgtaaaaatacactcatgttttatccacaaatttgtaccagttttgtttgattacttactttgcttatcttgtcatgcttgtgcttgcttggcctgtgatcacgttgttgtatattagaataatgcaaaggagatgctatgctataaacttataaactttacctatcaatgtattcattcacaaactcgccatcgttgcatacatatttggtttggagaaatcgagtgagatcctcaatttagctctaacaattctccttttattcagctgatgcactggtcaacactagcttggcgaaattgggctatgagtatgttattatagttctagatcatgatccatagctgaaaggtttttcatatcttctttcagatgattgttgggcaaagtctgcctgggactaccaggttagaagatcaagtttgcctacagatgcactattctaaccactaaccaccccaataattttcagcgttaacatcagtgcaagaaaaaat

SEQ ID NO: 76080 - DNA, 497 bp, Zea Mays
ccgacctgccacctacattttagaccagagaggccgttacgacatttttttgccacaagtgagctatagcacacgttttcatggtaacctagaccccgaatccaatccctaaaccctaaccttaaacaccaaaactaaaaggttttagtgtccaaaccaaagtaagcttgcaggcatggtagaattttagtgtccaaaccaaagtacacgttttagtccccgaagacccgtaaggctattttggcctcccgtgacacatgtttttgtcgtcgaacagtgatttcgtgcctcccgtccgccacccatgatttgaccattgagactggtaaggctgttttggcctcccgtgagctatagcacacgtttccattgccgagcgaccatttttatgtctgcattccgccacgcgtgtttttgtctccggagcaccttaaagcggttcttggcctcccgcgagctatatcacacatttttcgtggccaaacagccaattttat

SEQ ID NO: 76081 - DNA, 404 bp, Zea Mays
cggtggacgagcggccaacattggcttggacttgcagccgcatgttttttttctttccttcactgcatcagccacatggccccatgtgtcaggtttctatttcccttcctggtgtttagttcgatcggcaatcggcacatgctggtttcgcaggtgtggctgccgcccttcgtcctcgtgccgtgccacactgactcttcgcctcttcgtcccgtcgccacgatatgccgctccagtctatgcgcaacggttcttctcctcccccacatcaaagttcattctgcagtgatttctcataatcatggcaagtgttaccaccattaatggccttcaatctccttcaaaccggctatatttctcccttccctctccagctataaaagttgaggtgcgctcacctcctt

SEQ ID NO: 76082 - DNA, 645 bp, Zea Mays
tcgcgacggtggtccccgccgagctcctaactgcatgcatctctcccagcccggtcactgaagctctagagaggtgggataggaggaggagaaaccggctttgggcagaggagcacgaacgtcgagttccagcacagggggtgcggtgtccgacgcaggggtgaccgccgtgcagggagcagtcacacgagcagggctaccccgcgcaggagcacccgcggcggacccttttccccgctttgcatacccacggcggtgatgtctccacaccaatggttttgctctgctcagtggctatggcactctgcggtacgataattattgttgcggggtgcagtggttggggatttatattccagggctaagaacttcaattgaagttgttgcaatccgactggagtaaatcacggcaagatccgttatagtgggggcctaatccgagcgggtccgctggctgaccccgacagatgcgcgcgtgcgggtgagcagtacccaaggaatatggctgaccatactatcctacagattagcggctaaaggaataaaaataaaacgtcaatagctggacggcctggtacatgtgtgattgagaaattagatgacatgccattaataatgattctggtgcacacgcacgactgccat

SEQ ID NO: 76083 - DNA, 549 bp, Zea Mays
agatgatgtcgctggatgaaggaataatccgcgacgacgacaccgccgtgtgacagacagggcgtgctgtgtggacgatgtcgatctgtgacgaaggaccggcggcggcggcaacttccaggcgatgaagcgatctgaagtgacgagaaccgacggcggcaacaccggagaatagaaaactgtgtaatcatagttctaaatatcaattataaatatcaattattaaagaagacacagagcttaacgtagatagaatcatatccttttatccaacaatattacataaaatgcagaaccgtttatggtcatagtttaaattatgtagacttttttgggctaataattaataagcagttttaggccgatggtcagataaagtacgggtcacgtctgttcacatccgacgattgcaccgtttcttatatattgactctatcttagaaaaaaaacactaatattagtatatttgcatgcgggatcttactgaacttttagatcttaacagtattacatatacatcaaagatctacattgtgaaagtttccaacc

SEQ ID NO: 76084 - DNA, 398 bp, Zea Mays
gtcggcatcggaatagcccgtgagtgctggcgtagaggagcgatgaagttggagacccttgcacgatgtgccgcgcacatagcgcaagaccctcttgacgaacatccaatgcacgtctttgggatcatgcatgtgtaggcacgcttgctggacggcataggtgaggtcgggccgcgtcaatggttaggtactggagtgcgccaacaatgctgcggtagaaggttgggtcggcgactggtgctcctgcgtcgcttggaagcttcgccttcgtgtccaccggcgtggtcgcatgcttgcagtcactcatgctcgcgcgatcaaggatgtcgtcggcgtactgttcttgcgagaggaagaagccggtcgtcgagcgcttaacttggatgccgaggaagaag

SEQ ID NO: 76085 - DNA, 639 bp, Zea Mays
tactggatgaagctcacctttccaaattctccatgcaccctggtagcaacaaaatgtaccatgacctcagatctttatattggtggaccagaatgaagagggaaattgccaaatacatatctgagtgtgatacctgccagagaatcaaagctagtcatttgaaggcagcaggccctttgcaaccccttcccataccgtcttggaaatgggaggacatttgcatggattttatcgtaggattacccaatacctccaggcaccatgattctatttgggttattatggacaggttgaccaagaccgctcatttcttgccagtgcacaccacccacaagacagaaaagtatgtggaaatttacattgatcagatagtaagattgcatggtattccaaagaccattatatccgacagaggagcactgtttgtggcacgcttttgggagaagctgcaagaatcacttgggacccaagtaatccgaagctcagcataccatccacaaacagatggtcagacagaaagggtgaatcagattttggaagacatgttgcgggcatgtgcactacattacggaaaggattgggacaagtgtctgtctttggcagagttttcttacaataacagctatcagtccagtctga

SEQ ID NO: 76086 - DNA, 376 bp, Zea Mays
cttcgacaggtccactagatatagcatctggaacctgtaattattgttagaagttatggctaagtctcagtatgtcatccaaataaagaactagttatatgtctatgatgttggggatggatatatcctattcctagtcttgtttgttggcttactacgtgtgtgatacttttgtaagaaccttggtttctcattcaatgaacctacttttatgcaatactacatgatttttcttactttgttatcattgatatgtgcctttcattctcagaatggctcaaaacaatcacaacaccctcttccgatcatctgttgattccccgagttcaggcaaccatggagtgccaccaccattgcggaatcctcagctctggcc

SEQ ID NO: 76087 - DNA, 463 bp, Zea Mays
cacattgctatttgtcgctgaacggcatgaagcgaactttgagataaatggctagtaccttagcaacacgaagttgcgagtacatcgaaaggtaattctgagaatttttttcacaacgttggtgtgaaaaaaaacattgtgtgttctcgtcgaaccactttactcggcctatctaggacctctatgcttgtgttgcatacatctctcagaatttaaatacttatagccgctgaattgacttgggatagtgctttgactggtatggtatatactataaaccaaatggtaaaggtcgattctgaatagacatatacacggggtttatgtagtcgaactacactaaattccacccattggcatgcttaccattatctacctcagatctaccagaagtgagaagagtagacaaataactatgaaatcccacatcaccacagagcttgaagtgaaattgggcattaat

SEQ ID NO: 76088 - DNA, 594 bp, Zea Mays
ctgcaggggtactatcacccaaccgacagcaatgaggccaagcgcctcaaacaccgaagccgggacttcgcactgatcgagggccaactttacaagaagggggtcagtcaaccgatgcttaagtgcatcaccgagaccgaaggcgtccaaattctgcacgaagtccacaacgggacctgtggctcccacgcagggcctagggccctagcggcaaaggtgattcgccaaggtttctactggcccgccatgatttgcgccgcaaatcgggtcgtgagatcctgcgaagcctgtcagaaattttccccacgctcgggacacccctcacagttcacgaagctgatcgcccacacgtggccccttcagcgctggggcctggacattgtcgggcccctgcccacggctcaggggaacctcaagttcaccttcgtcgccgttgaatacttcaccaaatggattgaagcgagggcagtatccactatcacatcgaagacagcccagaaattcttctggcaaaatattgtttgccgctttggagtaccgtccgaactcacggttgacaacggcaagcagttcgacaaccaagatttcaaagat

SEQ ID NO: 76089 - DNA, 353 bp, Zea Mays
ccgatggatatggatgactcgggggcaaacgatgatgatgagtttcaggatcaaaacaaggaaggcagtttgggcgaaaaagggagtaggggatcggtgctgctagatcagtcaaatggttctactggtgctgttgacatggcatcatccgcacagcaaaacaacaaggttgggactaaatctgggagagatgggggtccggttgccactcactgtcttgcttaggtggatttggcgtagccacaggagaccgggtttgatgttggcattgtcagcgttgaagctctaggtggtatccaggaagtgacaggaattgtgcatgatctctgtcgcagtaagcgtcgcgccgactc

SEQ ID NO: 76090 - DNA, 511 bp, Zea Mays
ccccctgcacgtgcgcgcgttcgcgccgttcgcacgtgtcttgttgcctttcgcgtgcgcggtctgtgcgcgtcgtcaccgtccattcgcgctatgtcgcgcacgcgatccacacacattagttaatcatttcgctataactgttcataattagtaatgagttcttgttaatcgttgactaattggcaattcaatttatcttaaatgttttacgtaaatattttatattaactaaaaatcaaattagaaatataattttgcacatctaattataatctggtgatattcgcatgtcgcgtgttgcccgcacgctacccacctgtattgttcgcgtacgctgtcaccaccctttcctcgcgtgtcatatgtgtccacacgacgttcgtgcgtgttgttcacgtgtcgtcattcacgcgagtcgtgattcgcgcgctttaataaaattgtttattagccatgaagtattagctatttcatatataatacgtcataaacccgtttctatttcgtt

SEQ ID NO: 76091 - DNA, 500 bp, Zea Mays
tgtgaggcagccacgaattgacacctttctgcaccctccatccatcgatcaacggccacaattctaactggcgcgatctaatctctcccgtccacatcagatcagatggccagagcgcttcttcaacctctgactaaccagaaacggcgacggcgccagataccgagcggcagagcaacaccggtgccccaaacaaccatcccgacctctctcaagcacacgggggcacgatttctaccatggataggctctacgcgatgtggaggaagaggcgaatagcagagacctgatcgtaccggcggtggaggcgacagaaggccgtcgaacgcacgcggactcgaaagcgcccatgatgcagacaatgcaatccagcagcatgtggcgcggggtggagtatggcgaggaattggaacgaccatgggctacacgcgggtaacccccgtcgagccacttcggacgagcagagacagggctatggcggcgcacctagattttccctc

SEQ ID NO: 76092 - DNA, 520 bp, Zea Mays
atctctaatcgaacaacagtcatgccatgcacacactgatagtgtcacacctaagacccaagtacccaatgatgtcctcatcaaatcaccattgatcattcattcattccagactcgatagttggagataagtcgcagaggacagaggtgaacgatggacgagggacggagggagtaagggcaacgtccggtgttcagcactccaacatggtgaagaagcaaccaacgttcgggtgtccgatgacctagtgaagaagcaaccggcgtctagtgctggcaccgccaccgaggacaaggagactagagaatggtgtctggtcactaggttttgcatcatcgtgctcgggcactggattagaacaaggcaacaagctgaaccgctgaaggctaaagcgggtgcgccttggcttgatgccttgatgggctcatctgctcatgggtcgttgcatagttggacttcaccttcacgtatcacgtccgacgtctccactctagcactctccatgcctccacagtccgc

SEQ ID NO: 76093 - DNA, 628 bp, Zea Mays
ggctatttcaataataaaattacaattccttaaaataaaaggaaacaaacagggacttaatgtattttaggactctacggagggactagacgactgcagccagggctctccaccccgaatgaagaaggcgacaaccacagctcaacgcatccagacgacacgaacggacacacagtcgttgtaggacgtactacagagctcgctagctagcccgtatctttcagagggacacttttctttgtctgcaggcagaggcatgatcttcagatctgcgcgtgtactttttttgcctgctagctgacgatgacctacaagtgcacagcaggcagcggcggcgagagccaatggcggagtagctctggctatctgtcacactagcacactgctggtgtattcattatccctgctacagtacttattagcctgtactacaaccatactagccaacggagtattattatagttagttagttaggacgaataaattaacacgccgaattgtttgatcgtccgcgctctaactacgctcatgctcgtatatattacagtagcaaccatgcccatagagatatagacgttgcaataggagaaaaatagctatcgttattcatgaaaaagaagattctca

SEQ ID NO: 76094 - DNA, 470 bp, Zea Mays
taagcatcagatccttctttctgatactgttcaataggttgttgttccctactgcaagctggggaataactaaccatgaggttcttctaactgaagaaatggatcatttccacgagatggattggtgccaactcatattcaatgatttatgccaagcggccaagaagtggcatactaggagcgttaccaatgtttctacaaccatttacggatgttccatcgtcattcttgtaagcatatcatttttttgtttgtatgcaaatatcttctacattagattatgatttgttatgtctcacaacaattcatgttatgcttttgtagctgtactatctggatcatcttcatgactcagctgcacctcagaataaacgtggaacaccacacataaaatattttgataggaatattattcaagcattgacaagagctgacaagggcaagatacgccaaggacaagaaccatttgg

SEQ ID NO: 76095 - DNA, 525 bp, Zea Mays
gccggcaacgttcaagctccccgcggtggcgccatggccgcccccaaccatccaaatccaagctcgaacatccaccccgagagtgataagagtgaagcagatgaaaatgaacttaggggagggtagcataccttgaatagagcaacagagtgtcctgcccacaacactggatctccggcgatggtggtctcacaacgacgaggaaattcggcggctccgatggttcccaaacccaaaagcccctccaaacacgcgcgacatagactaacgagtcccccgctgagaaatctctactctatcgaacgctttctctcacgacggcccgccctctcttcctccctctctcccatgcgcttctcctctctggttcttctttctcgatggtgtttgggtggcgctggagaacaagccgatcgatcgagatagggctaaggggctccatatataggcaagcaccgtccggagaaacgacataaccgagccccgcggcgagctccgctcatttcagtgttcgctcgcaacgac

SEQ ID NO: 76096 - DNA, 281 bp, Zea Mays
gatatcttgacaagcttccgtttcttcagagctgatcccttcggctccgatacagttttctgctttttcaaagccttttggtcctctttaactgaccacatagcctgcctatttagaatgttgacaactctcttcctcttgactccttcggccccttcatcaagcctttcgtaatcaggatactcaaagtttagagcatccatcacacggtttagcctttgctttgggcaggtgccgaaggcaaaagtcattaactgatcttctttctttgtataatttcc

SEQ ID NO: 76097 - DNA, 423 bp, Zea Mays
agaggaccctatgggtgtgctactaaaaattcttagccaagactgtgtgcaggtcgggtcccagttgagattaccccccggggccatgtcaccatttccttcttaagaatcctggcatccagcctcgacacgccaaggccatatcccagggggccaagtaccagggacgaagttggtaacaacacacacaacaaagaaaaagcagcgtgcagataagttgtaatatcgcctgataagtagtgcttaaagagtatcttacaaaatcaagatatattacaacccgctccccagcggaaccctcgttttctccacgcaggcctggctactcatcgtcagtgggatcccgctggaagcacccggccaccacgtctacaacatcctgtacgccctcccgggcagcgtcttcagtatcggccaccggac

SEQ ID NO: 76098 - DNA, 498 bp, Zea Mays
cttgaacatcgattacctctctcaccatatgttcctctttttatcttaaggatggtgcgtcgtaggaatccgtctgtagttgagtccgactccgatgacgacgctcaagagatttgtgaagaaactcctccacggtccatatccaagtgcgggcgcggatctgggaatgtgctgcaaggtggtgaggccttagggtctcatggtgctcgtggtcgaacggcccagaatccctccggtcggtctcgacccgcggccaatccacaagcctgggaggcaaccagtgatgatgacggaggcaaagatgatgaagttgatctcccttctaccaacgcacccattatccgagggttggttcttcatagggcggaggcccgtcgctctaccaatgagccagtcactgatttcactgccagcgaagggtctgcccttctccaggacatccgcttccaaaatcctacattacgtgttcgtgatgttaggatcgatggtaatcggttc

SEQ ID NO: 76099 - DNA, 549 bp, Zea Mays
ctcgtggcagcaacgacaacgaagctatctcaagggtttcggtcacgggcgggtgcatggttttcctcgtcggggatggcgacatgcgtgcatgatttccaggcattggcaagcatggacgagccagcggtcggtcaaacatcccattccgacctaaactgcagaggactgctctgctccgaatgtatagatccaatccaatacaaggatcgtcagtggcaatagcggttttatccggaattccggatgacgctgcattccccggattcagatgggactatttggaacgcggaattttttttatcgaaatcagctcaatttcagattttaaaaaaaataaaactcaggaacaggagagcgagagtgcaaccaaggacctgaaggagaaatggtgatgcgaacaacggaaagggggagcagaaggggacgtggcacgtgcagacgtgcttgctagctatccaaaaccgatgttcgtcctgctcaaagtgcaacggatatgcttcttctcttctttttacccataataacaaaagagagatcggatcggat

SEQ ID NO: 76100 - DNA, 582 bp, Zea Mays
tggttgcggaaaggaccccagatggaggggagacattgaaggtcaccatcatggcctctaacactgaagggccgacgctggcgggtggctaggcacaaacccctacattgcgcaccacagatggtccaacacattggcgcagatggtttagttcacagccggatagtccaggcgggtctggcagatagtccgacaacgaccaggtatagcgacggacacgtacctttagaccacaatgaacagaaataggaatgtggaagacgaatacattcaaagcattcggtcggatggtcaaagctggtccaacctttgatcaattattatctaaatatgtcaagaaaagggtcggtcttaatgatcggctagcaaagcgaccacattcaccttcccggagagacatgtaggatctattgagtcacctaaaaacaaagtccaattaatacccaacataccagtatgggcacctccacctcagtatgcacatgtgccttatcattatgcatacccaccaccactatatgccctaaatcagatgtggggcatgccactatatctatatgggatgacataataccccacttg

SEQ ID NO: 76101 - DNA, 1442 bp, Zea Mays
cagagagtggtcatgtgtagtgtgcaagctatgtgtttcctcaccatatgcaacctgaaacacaatgcaggtagagagtatagtaatttatgaatgagttatgagaagcaagcatgcaataaatgtataactgaattacttacatgaccactaggtgtctgataaaaaaggggggtcgtgtaagttggagtgtcatgagatgcatcaatgtcacctccctgacccaaaaacaatgatactatgtttaaagcctcattcatgtgtcaattaaatttaatcgataattgagattacaatggagaaaacaaagatgaaacatatacatgtttttgcggtgtggcgtcaaacatcggcaagtgggaagacggatatgagctcatagggttgcagtctggtacatgtcgatgagacatgtttatgtcgctcggcatattattgccaacattaaaatggaaatcctgtatacattattatggttttgtctaatattttggatgcaaattggaaattaacatataatgtaaccatgatgagactgcataaaataccttgcttttccgcgtttgagtttgtgttcgtctccaaatctagggcagccctcaaaatgcacgacgcatttgttgttgcttttcgtgtatttcctcaaactgggtacctgtcaactccgtattcggttgtgaatatggcgtagtcagatcctgagtattctgggtacccttatggatgtgtgcctctgtaattaaaaagttgtagtatttaaacagcaagaactgataaatgcatagagttaagtacataaattgaaaaaatgataatgagggaaggtaacctgacgacatatgctgagatatatatggaggtttagctgtttgaggcgcttccgcaacattgtctgggtcgccagactccgcgcgaaggacatcatcaattaactcagcaaatgtgtccgctagttcatactgcttcacaaccatcttggtaagagtactttttatgatggaacacgctttgccaacttcagaatcatactcaacaaacttttcaatgaatttaggccggtcacgtggttggagctgcttgatcttacttgaaagcatatccttgatcaatgggagctggatatgaatagtatgatgaccacaaggatcgggacgagggacatcaaaaatgtttgtcctgtccctatgctgtgatgtaatgaatgataatgcatatgtcataattaattcttagaaacatatggatataatagtacataaaacatctgtattgtacataaggtatttatgcacacatatggcatgtatgttttgtcataaactgacctctgattgaaactggacactagggacagcagaatagcaagtttcagaagtgcttcggaactgaaaaaaacatttgtaaaataattaaatacatgaaagataaccataaataaattg

SEQ ID NO: 76102 - DNA, 715 bp, Zea Mays
caagtatataaaagtttgggcctagttgtaattgttttacaacagccgaggacgatgggttgattcacagttttccctgggtctcttttgaaagacggccagggccgaaggggtatggataaattctggtcgttggattaaaacctaggatcatgattagatccatccgcgcctaaacctgtacgcaacccagacccttggatctgagatcatcgcccaagatccggccatgcccgagccatcccctagccctcggatcaccaatcggacggtccccgtttaatgaagcgtgacggtgtaagcgttcctaatctcgtacgtcagctcaagatccaatggttgtcgatcactcagacgaaccagtacttgacaatctattcctagccatcaattgcaagatcaatgcttcatgtgtcctccacccgaggcgacaccggcgtcggcaacgtatctcaccccacggcggcgccatgaccagcccgcaccggcaaccatcccccaagtgtaaatctcacccccgaatgctgcataaccgcattggagatgcccctaagcaaataagaaggtccttaccgtggatttaggcgcaaaaacaatcacccacgatggaacatggctccgtggcgtcgcagtggttctggtgagcaatctccgctgccccaatggtcaatccttgccgtcgagcccacaaacgacttcaccaaccacacacgat

SEQ ID NO: 76103 - DNA, 604 bp, Zea Mays
gatgaagaatcaaatgctgcattggattgaagaagccgggtggaaatatcttctcaagcttacacagtaacatgggtgccaatcttttcaagtctgcaatcacggtccgagataactcttttgcataaagctagcggaagaaatagatcaactcagaaagagctagccagacatgctcagggacatagcctcgaaccatcgtaggaagaatccgttcaatccatatgtgtaagtcatgactcttcatcactaagactcacatagtagataagttcatcccctactcaagttagctgcatacccatcagtgaacatcaacatcttgatccactgaagtacttccttcctctaggccctgcttaggacgaaatcggccgtaggccttctccatgtatttccaccactaggcgacttcatctcttggtttggtttatcacataacgctgccagatccactcttgcctttacgttatcctttgacttatcaggaatgttcataattgttgcccaaagtgtctcggcaacattcttttcagtgtgcatcacgtcaatgttgtgtggaaggagcaggtcgtcataatagggaagccaagtcaagcccgac

SEQ ID NO: 76104 - DNA, 618 bp, Zea Mays
agttgacagaagggagtcatgtataatatataggaagtataagcgcctacatgacataaaccctgttaagataatgcgaatgaaatccatgaacaagagttgcatgacaagtgtagtaagcaagcgaaaacatataatcacacacatagtcatcaaaagatcctgagagcatatcattgagtttatgaggcaaacacaagctgagagtcacacattagagtaccatacatatattaccataaaagacaatgactctctcaactaacccccctagctctcacaactctcatctctctccctttggtggcaagcaccaaagggccaccctaacctagagatcataagaaggaggaggaggggtaggcgcgcaccaagttgagggcaaacggtcagagcagagactggaagaggatcggagtcagtctcggatctaggatctggtgtagaggttggagctagtgttgactctaacgctaactgcggggcctgagatgttggtactggagctggagccaaaactgaaactgccactgctaaagtagaaactacataaattggtggcactggtggctgaggactcacaactccaatgccctgagtagagaaatccagagtgac

SEQ ID NO: 76105 - DNA, 363 bp, Zea Mays
tggactcagagtagtgaaggacgaacatcaggctataactaagagtccagaaaagctagaggaccaatcatgagtggctgacacctagggtcatcgatgagtgcaagaggacatggagaagtacattatgttgatcgaatcaagatggcggttgatcaagtaaaattgaagcgctagaggacttagtgatttggcggtcaaggacttgaggtgacacatttcaagattgtggggagagcatatggagtaccctacccatgattgatttaattgtttgagcatcaaaaccatgagttgacaacatctagctttgtacctcaaaacttgggtggagttctagcgagaactgtaggtggcagtggc

SEQ ID NO: 76106 - DNA, 1077 bp, Zea Mays
gtggcacggaaccaactttctagacaagcacaatcagaagtagtagtagaaacgcaggttatagaagaaccagaagtagtagaaaaaccagctagcaatgcaaatggcttacaaaataggttcaggttcacttgctattgttgatgaagatatgagagactagggagaaccagaccactagtgaggtattttccaaccactttcatgcttccatcaattatgttggggatttaagcatgggattgagataccatctaagcttatgcatttataagctagttttgttattatatgtattacacccggtgcggatggtacgtgctttgatagtggccctaggcgtgaaaattgacgagctctcccactgtttttattcggatctgcatttattatgcctactaactttgattcttttgcaaaaattgttgggtgtacatgtgtacacacatctcctttactgggtcagcccttggatcctaggctatgcataccaattgagcaaatgcatttgatgatttgctgaatcttgacactagttaggatttcttttgtagcacctggagcatttatcaactatgttgttcaattaagcctacagttgagatgtagtctaaatcttgcatattttatttttctattccctccattgcatattataagatattttggcttttttaatatgtagtttttgcaacatacttagatatacattatgtcagatacatagtaaaacaatgtatgtaggaaaaagccaaaacatattataattttgaacagagggagtactattaactatggttgtgtgccctagtttaggtgttttaagttcttagatattggcactaggcatgcagattcactagcttcgtcgctatctctagtgagttcaatgtctatggagcacacttcacattggaatagaagtgttgaaccaatcccctaaaacagactgaaattcccaccaccttgccacataagctcaaatttcccatgttgagtggggattctccaacctgaacttcactttatgctatatttggagtcgttactacgaatgatagcaagtagtgacctctt

SEQ ID NO: 76107 - DNA, 748 bp, Zea Mays
aagatggccgagtgaagtcatggcttgtgcggcgacgcgggtgtagagcagaagagcatgaaggcaaaggggcgcagaggagcacgaaagcaaagaggcgcagtcgattggaagagaatgcaaaagggtaactgctgcacgcggggtgaatcctttttcaaggaaacctaagtcctcgttcagggaaacccttccgcgcgcccctcaatcgccgtaggagatcacgcgctacgaacacctagatccaagcagcccagtctatgactcgggggcctaggtccacatgtcatacactttgcgagtcgaattttgggtgcggaaaaagcggaccgccgcacgcgccggtagtgcgcctcctcggggccgctgcagaagacagaaggtaattttttaaaccattgcagcggtaacgaggcaccccgcgcatggcctgatgaaaccaccaggcatgggggccgtgggtcagtcagccgcagggacagatatggcagtaggcgtgaccgaaggagatcgacagagggtacgtcagcagacgcattgaaacggcgcaccaatcaccaatcaagccatgttgaagcaaagtacaagttttggccccacctacatgctcgcatcctcccctgaggtgggcccaggggccactgtcggtaccctgaaactagggtaccccttgctactgtataaagacgcagtacccacgcggttatctcttagtcgagtggtaaaagtgctgtgtgtgggaccaagc

SEQ ID NO: 76108 - DNA, 1229 bp, Zea Mays
ggagctcatgacatagagttccggccttgcacagcagtaaagacccaagcactagttgacttcgtatccgagtggactgagcaacaagtccctgaccatccgaaggctactgaagtatggcgaatgtattttgatggctcactaaagctgcagggagtaggcgcagggatcctcttcattgccccaggaggtgaacaactcaagtacgctcttcagctattattcccagcatcaaataatgcagcagaatatgaggcactgatccatgggttgaacatcgccatatcactgggcgttaagaggttgatggtatacggagattcactagtggtcataagccagataaataaagattaggattgctcgactgattctatgggcaagtactgtacagccgtccgaaaattagaagacaagtttgaagggttggaattccatcacgtggaaagagaccgcaacacagcagcagacgcgttgttgaagctaggatccagtcgggcccatgtcccatccggagtttttgtccaggaagtatcacatccaagtattccctcagatcaggcggaagaatgcaacaccataagccaaccaggatcggaccctgatgactgaagacagcctattatcaggtacataaagaatgaagaagaaccggacgataaagctgcagcagaacgcatcgcgaggcaatcggcccactacaccctcatagggggcacactgtatagaaggggtgcgacaggagtcctcatgaagtgcatttcctcgactactgggaagtagctattagatgagatccacgtcagacagtgtggaatacacgtagcatccagaactctggttgggaaagtttttaggtctggattttattggccaacaacaaagagtgatgcagccgagttagtccagagatgtgaagcttgccaattcttgtcaaaacaacaacatttaccggcacaacagctgcagaccatacatgtaacatggccatttgcatgctagggactggacatgattggacccttcaagaaagctcagggaggctatactcatgtgctggtcgccattgacaagttcaccaaatggatagagtacaagcccattgtttctttaacctcatctaaggcagtggagttcatacaagacataatattcaggttcggaataccaaataacatcataaccgacctgggatccaacttcaccagctccgaattcttcgatttctg

SEQ ID NO: 76109 - DNA, 672 bp, Zea Mays
accggagcacagcaacaatgcgcccaacgaggtaaagaccctggcggtaaacgggatgtccactacgacgtcttgcaacacgataacaagcataagtacgtggcatggctacaaagggcggtgaactccggcgagaacatttcgaccgatcgcgcggcaagtgacgcggtgaacagtctggggataaggctccaactcttccccgcgttgagatcttttacctcacacatttatcacaacgccagcgtggatagcggcgtgggttcaccggtggcgagatgcactgaatctgaagatcttttcactactgtaccatcaggatcttcttcagttgttctggcaaagcattttcacaggcgtttttcttcaatttctatgtgatcagctactgaccgtattacatcaaagttattaacctacataccagcttcaattcgatcataggaaccctggtcatttgctcactcaatcaagctcaaattggctccaaagttcatcagggttcactgtcagtcaaacttcagtgcctgatccgactgatagcctgacttttagtccattttctccaatttctaagtagctctagggttagatcacttaatcaaacttgaactactaacatagctctacaagtttgtgataatgacctagggcaaaatcttcatggattaa

SEQ ID NO: 76110 - DNA, 408 bp, Zea Mays
attcataatcgagcattgcatctaattgtgctaattcatttgctgctgaattttgctttgtttttatcagctgaaccctccaaccaactgaaggctacaaatactcctctgtttggacgagggtgaacatgagcttagacttgtcctcattcgatttgcaacgtctcgacaacccttgcacgatctgactctactgttagatcgtccgtacccatagtttatccaaaagaattattttacacggtatgtactgttatgtgttgtagattatattgttagaaaagtgaagtttgaatatataggtatagagatggataaactgtcatagatttagtcttagaggtacaacaccattccgttgcaagcctctgcctcaacaacttgtgccatttaaaatcacttgtcgtc

SEQ ID NO: 76111 - DNA, 640 bp, Zea Mays
caaaattgttccaataaatcaccaaaaggatattagtcgagtggtgctttggttgtgcctgttatgcgtcgtatcaggttcctcaaattgcttctgcatattcaagctagctgcgatgaaatggcatccattctttcttggtttgattggtcgacgatagcgcgcgagtggctacgcggtttatagaaaacttacaaattccccaaagggagtggctactcgaggtcgtcaattttagtttacctgacctgacatcacgcatcacatgtggtgatccaaattataggatgttttatttttccctagatatacatcttttactatgaatttgcatatcttttactatgaatatgtataggatacatgtctaggtttaggtgcataataattaaaattggtacacatcagacagttgagaaagaaaaatagagtgaaagccttatgtttggttttagtgattgaaataattagttaagtaacctctaacttattgttgtcatcaacaaaatcatgagaagaaactccggtgaaatatatagtgacttattggagtgcaccattcaagtggttttttgcagcatcctctgtaagtctagcttctttagctcgctagtagggctagttattgctagctagttga

SEQ ID NO: 76112 - DNA, 568 bp, Zea Mays
ggggagcctagttgcttctgtacaggcaaccaatcatatagcaattgatctatgcacgcacggacggtgtaagccgccaccgcagacagttcagtctatagggccggatagttcggctatccatttaggtgttcaagatatgccccctgccttttggtggaggtcgatgaaccaaagcatacacactgccagcactctttggaaaaaacaataggtctcacaagttgtcttgttctcgaagtaagaactatgcctgatgcaactctctgacttttcaaatcaataggatgatcatccaatagagctctaatgcataaaggtcgtttcagattgcatctttctcggccatgaccatctgatcaatggattaaaaggtatagaatggacgtgccccagcctgaataagcaaaggaactatgcaagtaccatgggttcatcgtcgtaccaatccacatttgaacatgacaatatatcgacgatgagtaggtgggtggaaagtatcctggcatcgttggatgaataagcaatgcttgctgcattgccttttgggtcgttttattcgactgtt

SEQ ID NO: 76113 - DNA, 393 bp, Zea Mays
aggcattagcatcatagaacattgatctatagctcagaacataatagttttaacatagtgatgtgctagttgcaaatatatgataacaaattcttacacgagccacggctgcgacatacaagagatgcgccacccagaggcattgaaacatcacataccattgatcgacagctcagagagtaataaaaagtatgaatatattcaaaagtaaccacagaactcagctcaacatcatcgatcctagataattagcactaagaaaggtgccatgttgatcctagctaattaggatcaaacaaatagcctaaaccacggttgcgacatacaagagatgcgccacccagaggtattgaagcaacacataccattgattgatagcttagagacttaaac

SEQ ID NO: 76114 - DNA, 419 bp, Zea Mays
gggagacttctcgcgacgtttcgaggcgggagcaggggagtctgcctttaaaagggggggttcatccctcgagtagtagccatgccttgcttctctcccactcgcggtgtcctctcgcctccgagctctctgctcccctttgccttcaaggtctctgctttgcgttgccgtagtttgccatggccttgtaagttcatcccgagcgtgcccagactgagtgagtgctcgacatggtataccgcctgcttggatgggatgcgccggtgtttggcggaaggatttgcgccgacaccctccaccctggtgaacttgccgctggagagttcatgccttttgtcctccccagcgggttggtgctgccggtcttgtctttcctctgctggaggtgcgcggccttgtgggagcggcgctcttccacc

SEQ ID NO: 76115 - DNA, 298 bp, Zea Mays
tcagaaaaagtttgccgaagctaatgaaaattttgaacttgcaaaagtggagcaagaaataagtgaatggtcaaacactaggctggagaaaaatgttgaggagctacgcgattccaaggagaggtgctttgagaaatccttggatcgcgtgagaaaattgaaatccagctttgccaaggtgggtgcatattcttccgaagagaatttcattcgaggcgacccgaaggtgttattgattggataagtggagaagccgaagcttttgaagagatccgcggtgatcgcgaggacatttgtg

SEQ ID NO: 76116 - DNA, 307 bp, Zea Mays
gcaatattgcaagggagcagagaaggcttggatgcagaaaagcaaaactagggcatagaatgcagaggcatgcgacagtgcagtacatatggggttttcccgggccagacgccatttctaaaaagcgccaagtcatcacccagctcttatttctaaaacgttggcgtgccatgtcatcactcgaccgttatttccaaaactgccgacgtggcccaatttaactcagcggttatttctaaaaacgctgacgttaccagacttcactcggccattgtttccaaagcggccgacgtggcccgttatcact

SEQ ID NO: 76117 - DNA, 471 bp, Zea Mays
tgaaactctaaaattatatcctgttatctgaaatgcttaaatgtccttagcatgtcaaccatcagccacctttcatgctcattgatttgaacttcaatctccttgagtcccatttgtcttgaaaaatcgaagatttagagaattaaatcaaaactaaaattgaatggcgtcataccataattcatcaaggtaaaattccaaagtatagtaaaattagatgtattcatacctggatattatacgggataggaaaacactcatctagtcatcatcgctatcatcatcatcaacaacatttggggtattgctctcgccattatcactagcatattgccatcctgtttcatcttcttcatcgtcgaaataatctttcttctgttccatttccctttgtctatgtagatcttcaactacacttgcatctataatatcaagattttctaccctaggtatatcattgttcacattcac

SEQ ID NO: 76118 - DNA, 573 bp, Zea Mays
ggaattggaaactgctaaatggaacattaaggtcttagagagcggtcgcgaacttctgaaggctaggtatggtaaaacgatggataaggcggttcacgcgggtcatcttctaatgaagaaacctggtgttgtggtccctgatgacattgttgtagatgttgtagttgcatcagggactgtggctaaggctcctaccctcggtggacccaaggttgattccacccctggaggtgcttctacatgagtgcatgatgtattgtaaacttgggaagtagaacaattgtttgttgtgtgggaggttcccctcccctctgtgaatgtattgacaattagtttagatctaagctttgaggttgcttcccccctttatttgaatcgtgcgttgagatgagttacacaggtgggacttagtgggcgtccctgccttttttgtgcgagtgtgctatatggtctaaagttaattcctgagttttagactaatcattctccttgatggggtttggtgtgcaccctttcatatgtatgtgtgagcatgtgacaccgacttaagtcgcttcccgacttaagtcgatt

SEQ ID NO: 76119 - DNA, 532 bp, Zea Mays
ctagctgaatctatcaggctcccatcctccactcaggaatacaaacatatagtcagacatcacccatgagatagaacaatacgcgcatggaatagatccatgacagccacaacgacatcctcttccaggtgccggcttggatagaagggagggggaaaggcaagcgcgtagctcgcggcgcagcacagcgtgtacgcgcaggacggtcgagaccgaagacaaggatgacgacgagtgaagtgacgcatagagggcatggccaagtcgcagtgcaagaacagtcaagagaaaacctagaaatctaggttgaatggggaatacgaaggaggaattacctctttctcgtcttcgccgacgcggtggccgccgtccaacttgggaaaaccgattcgcaagagaaatgagagggtacgattctggtttaataataaggaacaatgagggtaccattccccagctcaggctccaccgtgttcagaagattgattaagtaaaatataaacactttcctatcacaactcgtcaatagctc

SEQ ID NO: 76120 - DNA, 508 bp, Zea Mays
tgggcacatgccatttccacatcacattagttttacttggatctgtagaaactccttcagctgcaattatgtgcccccaaatacaccaactgagtttgcacaaaatggcacttagatctctcgatataaaactgatgttccctcaaaacagtcaacacctgcctcaaatgactccaatgcaattctaaagaaggactgtatatgaggatatcatctatgaaaaccaatgcaaacttcctcaaaaatggagccaaaatagagttcatagcacattgaaaagttggaggggcactggttaacccaaatggcattaccttaaactggtagtggccattatgggttttaaaggctatcttatactcctctccttccttcatcctcacctgatggtacccaacctttaagtccaaactagagaaaaacttagtgccactgccactcaactcatccaaaatttcatcaatcaatggcattaggaacctattcttgatggttaaatcattcaact

SEQ ID NO: 76121 - DNA, 416 bp, Zea Mays
ttggggcgtattattgggtcggtgcttagactgtgttctatgattgcgtgactgaccccgacgaggtctagggcaaaccatgcgaatacatccttgttgtggtttaaacaagacaagagcttttcttcttccgcttcactgaggtcttcgttgatcagaaccatttgattggggattgccgcatcatgggggacttttttggcctctttgttgctctgtacctgggccctgactgtctactctttgactaggcgagggcccctagggtcttcgttcccggtggtgagacaatgtacgttgctggtcggggacgaagtctttctcgatgtttttctagcgaactgttggtcctcatatacgattatcacaccctaaggacctaggattttcatgcacaggtacaggccgtgtatagc

SEQ ID NO: 76122 - DNA, 365 bp, Zea Mays
tatttctagagcagaggagcagccctgatttcatatcactaagtgaggcaaattcagaactgtctaagaagaacaaataccgccaccaccttggcacaggtggttacaagcgtcaggttcctaaatggagacaagaagacgccgagaagaaggctgcagggttgccgacgctgtccgagcaacttggtgaaaggacagctaattggatccgtgctagaaaaccaagggaaactgagtctggtgtatcttttgatgatcccactgtcgaagaagcggcaagaaacatatatgcaattgcagctaagcagactgaaggaacatttaagccgcaaagggagaaagacattctaacggttggtctcggt

SEQ ID NO: 76123 - DNA, 524 bp, Zea Mays
cgcttttagccgtcgtaatgcgatcgaacggctggagaaaagaagacgacatggacgattgaggtgcgagctttcctcccgtctttaatatatagaaagaaattcacgtccgttgatgaagcatcgtgtgcatgggcttttttctaccgacgtggatgcatgggagagcacttttgcgtcccgctttattatatagtaattcatatttgcctactgaagttcggtgatttctgtgccaccgaaaatctagaacactgagtacgtcggttttggattctgctgtacaccgaacgattctcaaatcattgacaccgatgttttcttccacggcgtaaaccctaaaccgaaaacaccccaaaacagccagagtagaagagtgtgagatcgtcattgacatacgagtagctagtccaacagcagtaccgcgttatcccccttagagcttgttcgtttatttttccattacacataaattgtataagaagtttgacttgcttggaatttaaatccacccaatctcactg

SEQ ID NO: 76124 - DNA, 1058 bp, Zea Mays
gcaatatccagatgatattatcctgtttttggagcatgacttggagaaagccaagaatatgaaattacttctcctgtcttttgagcaagtctcagggttaaaaattaactatcacaaaagcgagattttttgctttggtcaggcctccgatgttaaggatcaatatcaattgttgtttgcatgcagaaatggggactatctgtttaaatatttacggataccaatgtattatcggaagttaaacaatagtgattggaaaatagtagaggcaaaattcgaaaagaagctcagcagatggaaagggaagcttatgtctgttggaggcagattagtcctaataaattcagtgcttaccagtttagttatgtttatgatatctttcttcgagatacccagaggggttctcgagagaatagactgctttcggtctaggttcttttggcaaggagggaatcataagaagaagtacagacttgccaaatggaacatcctatgccaacctaaggatcaaggagggttaggaattcagaacatagaagttcaaaataaatgcttgctaagcaaatggctttttaagcttattaatgaggatgggatgtggcaacaattggtgcgtaacaaatatcttaagagatatccgttgtggaatgtgaaacttaaacatggtgattcacatttttggtcggggttaatgaaagtaaatgataccttccttaacctaggaaatttcattattaaaaatggggaacaaataaggttctggcaggacatttggatgggtactcaatcctttatgatttgttacccgtctctttatcatattgtaagacataaaagtgccacggttgctacagttttggctacagtacctttaaatgtatcattccgtagggtgcttgtcggtcaaaacctcactttgtggtataatttagtggcaagtatattacatgttcagttgagtgtcgatagggatatttttaaatggagtttaactaattctgggcagtttacagttcaatctatgtatatgagtcttattaataatgggaatgttttta

SEQ ID NO: 76125 - DNA, 396 bp, Zea Mays
aaagaccgagcgtgttcaccttgatccctagctcaaatcctaatgaccccattgacaaaaatgtgcctaactaacccctctacctcatatcagaagatggcattgggacgcgtgacttggacacgtcaaacccgggatcttctctctatgcgcggcagtgagacaaacccgatttctcccctctctatctcttgatccagtcagcaaaacctgcaagcctccacacacaaacgacaaaggaatgtcaggggaagatatctctcaacgagatcatggccataatctcaaagatttggagccaatccgcgcttgaacttgacctctctatgtgctgcctcgtgctcgacgccatgccaggcgccagagcgcgcactggcgttcgcccgcacacgcccc

SEQ ID NO: 76126 - DNA, 301 bp, Zea Mays
gatgattcacaatccccccctttttggtaattgatgacaacactacacattttatctaagagaagttttgattttcaaatcttcctcataccttaggtataagaaggattttagagatgagtttcataagacttatcttgatttgaagttccgttcgagagatagataagtctcaacaaaactcagagtgtaggaatagctccccctatatgtgtacatgatatttctagttgaagatatgacacacataatcgatcggagttttgatggagatcttcctatagtcatggttatcgaggca

SEQ ID NO: 76127 - DNA, 364 bp, Zea Mays
gcaaggctactctaataccaattatagttttctatgacccttttagatctaactcaatctcctgatatcactacataactcgataatggagttgtacatgtagatctgtttgttggtagatgaaaagggaggttttaggaatcatatatttagggtcgatgttcatggagacattggtcgccagtgtagagtcccatgtaggggctccaccatgtcattgtcctcctccttgcaactatgcaattgggatctatggagctactttagatgctggtgtagtaggtgcactaggctccatagacaccatagttagaggctaatccggtcactaaagggtgcaaggtgattagtgcctttatgtcac

SEQ ID NO: 76128 - DNA, 580 bp, Zea Mays
ttgtaatcttcgatgtgtaaagttttgaatctaatatgtaaattatttgtaattctcttctttgcgctgtatgaacttttatacacatactgtttttgagccttcagcgaaaaaacaccttcccttctttttcatgcttcgtaaagaaaagaatccatgcttcgtgagaatatccatacttcgtaaaaacattcatgcttcataaaatcatccatgcttcaaaaacaagggatcccttcttttgcaacatagctgatgaaactgcattgcttggcttacttttgtgtcttggcacatttttatttcacaaagcattctccgaagattgacttcgtattcaattcgtgtcattagtgtgatatgatgtatgaggtgatgctatgcgagatgatgtgatgatatgatgcaaaatatgatgctaatgccgaagacacactcccacacgcccacactgaaacacacaatctctgcattcccttaggaacagccgaagtcttctttgccatttattttcggcttcaccgcttatttttcggtgtaagttctgcatccccttaggaatgtcttttgaacttcttcg

SEQ ID NO: 76129 - DNA, 466 bp, Zea Mays
cgggctttactgatatgttgttatgccttacggtctgaaaaatgccttgccgacattcgtgcgggcgatgagtaagactttcagggacctaattagggacaaagtggaagtctacgtcgatgacatcgtggtcaagactaagagagggtcgaccctagtggaagacttaaccctggtcttcgacaagctacgggcaacccgcacaaaactgaacccagataaatgcgtctttggtgtctccgctgggaagttgctggggttcctggtttcatacagaggcattgaagcaaacccggagaagatcaaagcgattgaggcaatgaggcctccggcccgtatcaaggacgtccagaagcttacggggtcattagccgcccttagccgcttcatttcgaggctggctgagagggcgctgcctttcttcaagctgttgcggaagtccgggcccttctcttggaatgaagag

SEQ ID NO: 76130 - DNA, 325 bp, Zea Mays
atacataatttgaaacaagcccaagctcgccaaaagagttatgcagacaagcaatgcaaacccttgtactttcaagttgaagattgtgtttacctgaaagtctcaccaatgaagggtgtatctcgtttcggggtaaaagggaagcttgcaccccggtacattggtcctttccctgttcttgaacaatgtggaccagtagcataccgtctctagttacccgaaacattgtctgcgatgcacaatgtgttccacgtatctcaattgaagaagtgtcttcaggttccagatcgaaccattgaagtgacggatgttgccttagaaccag

SEQ ID NO: 76131 - DNA, 505 bp, Zea Mays
aggcggatgtggtccagtttgtacaacagcgtgcaacttgtcaaaaggcaaagagtgaaagaactcatccagctgggttattacaacctttgcctgtaccacagggtgtgtgggaagatgtgactatggatttcattgaaggtttgcctaagtcggatgggtttgatacaatcttagtggtggttgacagattttcgaaatatagccatttcttccctttgaaacatccttttactgcgaaaggtgttgctcaagtctttctggacagtgtggttaagttacatggagggcccaagtcgctggtatctgacagggataaggtgtttactagcagtttttggaagaatttgtttcagctgatggaggtcaagctgctgatgtctacagcctatcgcccacagactgatggccaaagtgagcgtgtcaaccaatgtctggagatgtatctcaggtgtgctgtcaattctcaacccaccaaatggaagaattggttggctctagcgga

SEQ ID NO: 76132 - DNA, 728 bp, Zea Mays
cttcattcaatgcagccaagttatttcgatgggccaaaggaaagacttcaggctgcctttttgtctgggcggggttccaatcctctcgtcctagaccccctcggatctcggggagagtctggtcgctaccaatgcgacgctcgaaaatgctgacagcgagctagccttccttcgcgcccgtctagcagaggcagaccgctgtgtcgtgggttagtggtgccttttccttctgtggcgacttcctttcagttgtcctgactcccttcttttttcgcgtcttatctagaactagagctggaggtcgccggcctccgtgagggtgcggatgtggggtggtcgcctttgttcgggcccggagcgtcgaccgagaagagtgcctccgcgtcgctaaccttgacaagttttagatattagtggtgcctgctatatcttccataccatatgttcttcaattctcaagcagtctctcttactccacaaacatgtgtctttggaggactgatctatttggagtgacacagtggcatcagctactgataccattgcaggtttagggcggtattctgcgtctagacgagtttatttgggcctcgagccaactataaccgtaggttcttcaagtatcgagaccttgatgatgatttcatgctaacaaagacctaaatcctttgtttctcgttctcattttttaacttaatctatgacatctaccattaaatacatagtat

SEQ ID NO: 76133 - DNA, 320 bp, Zea Mays
ataactttgatcgtgtctaaccattcttggcagggttccttgaagtgtttttgaacttaaagtgataaggcagccgaatgagttcaccctctttcttctcttcaagctttggcataccccacttcctcagcgttgggaatactctgttggctaagtattcctagactaggtccctagttccaatatgttcagacacaattctaaactcatacacaacatcttggcatggatcccccggtgtcatgttgcattgaggcctagtcagcccgaagattagcttcagcgggctctaaactagcttctccttttcttcatcaatt

SEQ ID NO: 76134 - DNA, 734 bp, Zea Mays
ccgcaacagctcgccaatgaccgctgtagcccctcagctggtgagtgccatggtaaaccgcgccggtgactcatcccttctttccggccgccacgcgtctccatcgaattcactggccaccgctcaagcacgctataaattgagcacaccctcggctctgctaggtagttaagcacctaatccaggaactcgtgcctcaaatcatccaccagagctcgccaattcgtgatttcccccaaatcggtttccgccgccgtagaaaggatctcaccgtggccagtgcacttcaggtccgttcatgtcctctgccctcttgtttcagcacccctacctacccctgatgcctctcgacccgaccgattaggctaggaccccttagattgccgggaacacttcatgctgtccattgtgcctcctgtcaccgtggacagggtgatgtagagctccaatccagcaattaagcgaggggaaatgtttgttaagggttcaatttggtgtctactgcacgggagcaccggtagttgagtgatccagccggtgtaggctcacaggagctcggttctctgccactccccgtcgtggacctcgggatgtaaagaaatagaacttgaaggggggtttttgtgaatgtcagtgacacagggaatagtctgttggatgcctttcaagttatttaaagcatcaagggcctttttgcaagaccagcagcgcgggcgcgcacgtctttaccttgg

SEQ ID NO: 76135 - DNA, 326 bp, Zea Mays
ctcagtctctgtttgtcggcttctggtgctcaatccaaggttgaagaagtcgtgctcccgcgccgtgctgctgcaccgccgcgtgattgcttctctattcgtgctcgccaactgtgctacaccgccgctactctgcgctgtgccggagctccctcccctgcacgctgcccagcctcctcgccgccggagaacgaagctccctactgctgtgcgtcgagccgtcgtcgttcgttgtccttcaccaaagttcgtcgccacccgtgactccgccccctgttgtggtgccattgccctgctgctaccgccggagttcaccgtgtcgcggt

SEQ ID NO: 76136 - DNA, 754 bp, Zea Mays
tgtaacattggggtagtacaacattgattgtgcaccaaaattaacacataaacaaacataaatatatacatagtacctgggattttctggatgtcctctgtttgggtgagcttgttttcataatgatctttgacttgacatcaatatcagtctttgatcttcttgacacaatcgggacttgtggggaagggacctttatcttctttgaacggttattttctgaagtggagggtgcaactgatctaaaattgcgcttcaatgatggagcattcatgaaatcatcgtcagacaatgcggatagagctgtaggaggatttttttgacacgacaagctagtgcctttctatgaacatgagtaactggtgctggctgaggatcaatctgctgctggttatggggattatcagcatgttgggctgagctgctagatcgtgttcgtcttgaaatgtcaacagaaaacacctcctgacttgactcaatcgttaatctttttgcattagatggtgggcgatcaacagacctcatggttcagcaagcaatgtaactgttgaaaaaattattgtatttaagtaaaatgatttatgcataaatatatgccaaaaaatggaatgttgtatataactgtctacaatgcatactacataatacgaaatggagttacgtatcttaaactaccttttccatttatatgccataatattaatgaaccatggttatatacaagcataaatattaattgactatttcatataat

SEQ ID NO: 76137 - DNA, 720 bp, Zea Mays
gctggtcaaagcaacgtatgcgactgcggggagcaggggactgagatcgtcgtcatcgcccggaccagctatcttggatcgagagcgggtcatgcggcaagggatttgtttgtccctgagaacggtcaatcgctgcatgtgcgaccggataagataagcaagggaaagaaaaatgatagtaatgacataggagaagtctgcatgatcaataatcggaattggtccgcgctggacgtttgatcgtgcccacagaattggtcctcgcgtaatacctgcttttggttatttaatatttggttaagggataaatgactaaatattatatggataaaaaggcctttaacatctaacataatgtgttaattcgggtgttttttctgcattaatattatttctcgcagtaaatacttagcagaaaattattaaagtgtatgtgaaggttactgcgcatatttaaattgctctaaatatttatattatgttgagcttcggactcacgacgaacgattaaattatatagtgggtactcagacacgtctatcaaactacgttattaatcggttgagttagggcattggctgcgccctagcaacgcgacgcaacaattgtgcctgttgcgcacgttgtgtggacttatcgtgtaccccgaccaccgagccacaattgcgcctgttgcgcttgttacataggcttattgtgttgtcgtagccctgatggtcg

SEQ ID NO: 76138 - DNA, 582 bp, Zea Mays
gtgaccagggtcttcgacgtgggttcccgtctccatcgacgactctcggcatcagcatcgcgtcatcgacgctcatcgatctctggcagacagtcgacttggtggtgttggcggcggagaccggagataacctgttcgacgagttgcctgggtgtcgttcactcggctaggtcgtcgacgcaggcttcgttctccatcgacgatctgcggcgttttcttgctacagcgttgttggtgatgccatccgctcagacaagcatcctgctcgttgtgatgccgacatcggagcagaagggcgaggaacgatgagacaaggtgatgcaggtcctggatcgcctcgacagtaggttggaggcaatggaggtgaagcagaagggtctgcacgatcatacctgcaacgtggaagcagcagtgcggaacatcccagttctgcttggaggtatggcccctcctgtgttcgatgaaatgcccccctactacagtgaggaggtcattgcctttccaaggtgctttggaggttctggttattcagtgttcgatgaaacatctgctgagaaggtggtctgggatgaagaagtgtta

SEQ ID NO: 76139 - DNA, 498 bp, Zea Mays
catgaagtagtcctgctgggcatagttggcctcctcgttgatgttctcctcgtcatcctcgtcgtcgtcgtcatcctcatcatcatccccagagtcgtctaggtcgtcgcctccgggtgcaggagcttgaatggctggtgcagtcggtgctgaggtcgatgacctagctgtgaaggctagtgactctgccaacgtggtgggtgtcggcagaagttcctccgagctgtcttctaggatgactccatgctccactcgaatgcgagggagatccactggaacttcctcaacaaccactgggtagacaggaatttgccgtggcggaggggcgtagctggtattaacccgggtggtttgaagggtacgaaccatctacaagagaaatatcaactcagttgaattttaaagaggtaaggctgataaaataattttgtaagaatgaaattagcaagttttgaacaaactaggctttcaatttctaactagtctaacgacctaggg

SEQ ID NO: 76140 - DNA, 343 bp, Zea Mays
caacaacaccaaagaacaaagaacacaagcgcacaactacatcacaactctttctagactcttctcgggaatatgggcgcttggataactttgttgtgttgctctaatgcttaggaatgaatctctagagcttgggtgacttggttgctcgaggaggctagttagggggctatttatagtataaatgccctcaaagagttattgagagaattgccaaaaatctactatcggcaggtgcaccacacccaacggtcgttcgtcatcaatgggaactgctccagccttccctcctcatgggacaccagccacatgtcagttagccgttgagatgaccgttgatggg

SEQ ID NO: 76141 - DNA, 508 bp, Zea Mays
ctgatccgacgtgccaccggacctctgccatgtcagcctagccgttggagtaaatgacgattgttgctctgttagacagtccagtgcaccaccaaactaggtcggtgtgccaacccctcttcggccgaaaaacatcctctctagtaaactagtccattgacacaccggaccagtttggtgctcctctgcccagaccaactttgttagacttgtccatttcttcttcaattgtgtttgggtacacatgaggttggtcctatgacttagacaaatatatctagtgactttccaatcaatctaagtcatgaaacatagttgttttaatttcttcaactcatattccttctctacctcaaattggctccaaaagattgaattgttgaaactgagctatccaaccactttagaggaatcaaatatgttcctaggggtgtttagaacttatccaaggtatagaactattgtgagttcttctattccaagtaattaccctctaaggctcgatttg

SEQ ID NO: 76142 - DNA, 453 bp, Zea Mays
attttatgattcttatagatgcttatactaaattgagcatgtgtgcttattgtccacatggaaccatacatttctgcaaaatttgttgttcggattatccatttatttgcaagctttctagagaactacacatattcaagtagaatggataatacagagagtttacctccaaggctctaaatgactattaattatatttctctaggcataaacatagagcaccctatacctaatgtgcatacacataatggactcatcgagtccttgatcaaaataataaaattcatttttggaccacctgtccaagataacatacttccaaccagctgttggacacacggttttacacaattggaagttccatatatggttttattaattaatacaactagtgtactaatctcttagtgcccattcccttcttccgccctctttctcaccacagtcgagtga

SEQ ID NO: 76143 - DNA, 565 bp, Zea Mays
cccggatccccctggtggggaggcgggacgaactgatccctgtcatcaaagaattcttcagcttcagcttcttcatcttcagtcgtcatgaatggaactccataagtttgctgatgccattcatttatttctaacggaggtgcatggaggggcatgtcaggtgagcggggagcaaatgggatacccatagatgtagccagacgacggagattgtcatcagtctcccgctgtcgcctggccagctcatgaacatcagaagaaatattcctgcacatggagaagaaagctgctatcccatgagccaatcttgctccatgccgcgaccacgaccatgaccatgtggtgtgggagagccacgactaggagaaggacgagagggaccagcagcagtttgctcacgagagcttgcaggagccttcctcaactgccctactggattatttgggtcaatccagaaaagggtataggagagatgtcttgtgcccttttcatatcgaaattgggtgaccacttcaatcattttcatgatgaagggggcatgcagacatcccttgataggaaagca

SEQ ID NO: 76144 - DNA, 352 bp, Zea Mays
ccagctccagatcattcactcctggtccttgtcctcttaggatgatgatctgtactcctagtccgggatgtcttcctctgggccggggatatatattactatcactggtggtcaatgtttggtcaattagggggaaagcctggctacccaaaaaaggtggcggtttaggtgtacatgacctcgagctccagtccagctgcagtgaaactgcttcatcgagctcacaacatgagtgactctgcttgggttgatgccgagtttggtggtctgttggatgctccatcctccaattccatcgacactcactaggtgttggggcaaaggcgcaacgcccctcgctcggtcgtctaca

SEQ ID NO: 76145 - DNA, 833 bp, Zea Mays
gagctctctcacagcggtgttctgaccgatttgggggaaatgagaaattgaggggttctggtggatgatccgatgcaagggctggtgcattggatgcgtaaatacctagcggagctcacgggggcagcaatttatagagttctacggcggtggcgtccaatttgaaggaagggtggtggcggccggaaagaggggaagtcacaggcgcaagtgctatcgtggcttttaccggggcactgtcttaggtgatgaacaagctatctagagcggtctattgcgatgtggtaaggctttggggcacgtagcctggtcggataacggcaaactccagtgatgccagcgcgattgaccacggcgggacacaacggccggtcccgccagcgatcggattcaccccgcactggatattttcacctcgccccgacgttatctactcttcctgtggcacgaatctcccaagcgggcgtgaattgtggcggcagagcaccagcgtcgagcgcacggcaccggagatctttatggccaatgtaccatggcgatcttcatcagacgttctgacagcacgatttggagagcttcgttctctctttttcatgtaacaactcggtcagttgtctgcatcaatgttgtcgtccaaataacaaactacaaatttgttataaagatattactcagttactcactcaattactcacaattcgatctccaagttcttccaagttcactggtcgccataattcagtcttctgtctcgactgacaaccaaactttctacccatttttctccaatttgtgtataacatcaaggctcagccatttaagcaaagttattc

SEQ ID NO: 76146 - DNA, 769 bp, Zea Mays
cgaccggtgggtcagaaccttcacctttttgcccttcggcacaactgtggtggccgaagcggtagtctttctcttttttccttgccctcgtagtgggtagcggtaatcagggtatatgaagccaatcgcgtcaaataccctgttcaatcttttcttcccccggcccccgaaggctgcagatagggccatcttcagccctggaatatttccctagcagctcatcgctggtagcttcaatacacttcaaccagtcatcatctggctcatcaaacttctccctaaatctgaaggtatacttcaatcgaaccaggccactttcaccggattcagcaacagtatcctccgacatttcccaattctccacaagtggccataccctgaaggctatgttctcttgaattaaatcccttgtaccaatgaaggcacacacagtactaaaggccttctgacatgcttcaacattgtcatcaatatccaccttcggccttcggaggccgaagcaagaccagatggggcgctggataattcccttgatatcttctcttttaattaaatcattctttacgtaaaaccactcctccatccaggccctgggccaccttttccgaaatgttggtactgggtggcttgcattagaacgggcaatgaacccgtaacaaccaaagttgttgtggtattgttatttgtcgatagccttcgtctcatataaaagctcgtgcatgttgcagaagcacttcgcactaggctccagcccctggctccttacagc

SEQ ID NO: 76147 - DNA, 371 bp, Zea Mays
aagtttggtcttactcagttttcacttcaaagtttgacgtcggcactcttgggagtttgaggaacttccttcagaatgtgagagatttttatgggaatgctctgcttgagtaccatgcttgccatatgataaagataacatttcttgttctgaggcatatatgaaaacaatcaaacatatattgggctgaccgaaatcccattgttcctaaggaacgaaaattggtattgatgcaatatataaagcatgtgcttgctgaacgtcttttctattcgtcatcacatttcttttctgctttcctaattttctcgaatgcttctttgcaaatacaccatggattaggattacctgtgggtttcaatctttttttt

SEQ ID NO: 76148 - DNA, 541 bp, Zea Mays
gtcgataatatccagcaagccccaagaaacttcagatttctgagacactagagggtctcttccactccaccacaacagcgacattctttcggtcaaccgcaatgccatgctgattaatcacatgacctagaaaagcaactttagaaatccaaaaggcacacttcttcaatttgccataaaattgattcttcataagcgcatccagaatgagacgaagatgtcactcatgctcttcctccgtctttgagtaaatcagaatatcatccaaaaacacaaccacaaagtcatccaagaactcatgcaacatcttattcattgcttccataaaagcagcaggggcatttgttaagccaaaggacatggcgataaactcgaagtgcccatacctagtgctaaaagctatcttctcaatatcctcttcgcgaatcctcaactgatgataaccagagttcaaatcaatcttagagaatacctgggcacctctcagctgttcaaagagaacgtcaatacgaggtagcggatatttattcttgattgtcac

SEQ ID NO: 76149 - DNA, 495 bp, Zea Mays
tattcattctcttttttcctcgacccccgaaggttgcaaatagcgcattatcttttgccttggaataagctccaagcagctcatcacttgtagcttcgatgcatttcagccagtcattgtttggttcatcgaacttatccccatacctgaatgtatacttcagccggactagatcaccttcgctagacttggtgatggtctccttcgacatttcccagctctctacaagtggccatactctgaatgctatatgctcttgaattaaatctcttgtatcaatgaaggagcagacagtaccgaatgccttctgacacgcttcggcggcgtcatcattttcgacctccggctttcggagaccgaagtgggaccatatggggcgcatgataacctccttgatgtcctccctcggtgtcaagtcattcttcacataaaaccattcttccatccaagctccaggccatcttttccaaaatattggcactgtgtggcttgagt

SEQ ID NO: 76150 - DNA, 373 bp, Zea Mays
tccaaattgacagcaaatcccgccgccagttagcttttcctgactatcaggaaacaccagggatttttcttcccaacaaggcaacaaaccaattgttcacaggtcttggttgccgtctccacagctctcgccaccagatgccaaatcggtgggggtatagtggtatacacgtacacgcgtgccgagagatggacagagatggcgcacatgggggtgctgctgagaggacaggaggagagaaagagagaagcttgcaatggcttgtcctggtgtggtttggtttggtcccagcaagcacaagagtaggccatggcagtgccagcgcgtccaaccatcatattttgcctgtcaagtctaaagtcttccccacgcc

SEQ ID NO: 76151 - DNA, 348 bp, Zea Mays
tgtgtgtatatgatgcatatatatataaattattcatgacctgcgtgttgttaccagggcaatacagatggagccatatgtattgtccaaatttaatgtaatgacccacgtgtcaacttgtgatgatccaaaatgtatatgtaatttgtttaccatcatatgttagataggtattgaaggactcatcacctaaaggatggcataattacatcatggagatggagatcaatgtgatggacatattattagagatggagatcatcatgtgacagtgagccataccgaatcacaacagttgtgtgaatgccattcttaatgttctacttgttcatgttgcatatattgtcc

SEQ ID NO: 76152 - DNA, 521 bp, Zea Mays
ggcacaacaacctctatggttgtggtccccttatatcgcgtccataaatagggagagggttggcacgcgaaccaacgtcaatatacagcctcctctcacatacgcatccagtgagaaatctgatctagtgtcatatggggccaataaagggaaagattgcctccgctcatcctcattgtctcggttcaagcaccactgccctaatggcttttccatctaatgctgaaggtaaaacttgtcttctattgtatatagtggttagggttttgagcaccagatcactttttgatgtctaacaatggtaccagagctagtatgttcgtggatcttaacccaagatgtcattagcccttaggcttttaagcaaatccgagcaaacccctaagctttggatttgtcattataaggtaagaaatagagaggaaagatggaaccctcacttggtttccactaaccctaaccctacccctaaccccacctcgagtacacatagagaggaatggaaaagggtaaaatactta

SEQ ID NO: 76153 - DNA, 297 bp, Zea Mays
catgagtgctcctccttactataggtgaattagatgggtcgggctatatgcgttggcacgatgcatgaccattttggcatgggcacaggcacgacacgacatgatactaacagtgcagggccgacatgaggctcgtcatgggctattcttgggcctaggtacaagcccatcgggtggcacgaacacatccatttacagttgggacagttagcacgatgctaggcacgaatagcccatcaaaccgagcactgcccaacacgaccgtttgtggcctagctttacttttcctaatcttgc

SEQ ID NO: 76154 - DNA, 320 bp, Zea Mays
tttgatgagagtctcctctagcctgagaagtgtctcgccttgttccttctcaacagcttaaccaagagcactttgtcttctttgttgagatgggtgtagaaccggcgaatctcctcttcttccacatcgtcggtctcattttccctgtcattattatcagtggaagcaatacaggaaaatgtaccttgtggtgataaagactcatcctcgctatcatcctcatattcctcctcatcgtcgcttttgtctccactatcattgttagcaataagacatttataactggtggaagacagacctgtcgatgaggtggattcttc

SEQ ID NO: 76155 - DNA, 359 bp, Zea Mays
cgaggcggggcgaacgaccaagtcccccgccaagcaagcctgcgagactgagtggacgaccaagtcccctgccgagcaagtttgcgaggcagggcggacgaccaggcattcaccaagtgagcccaaccactaggccagcgctgcaagcatacgtcaaccacggcaggaccgagggattcaactccttaagagaaagccttcgcacgaccacaataggtcacacaaaggcttgggggatgctgtcaggtacccgggaatgtggtacccaaaacaagcccataaacccttttctagccaacgcgccaaagtcccccgccgagcaagcctacgaggcggagcagacgaccaagtcccccacc

SEQ ID NO: 76156 - DNA, 637 bp, Zea Mays
caggctcggctcgggctcgttctgagcgtgagctggtccgagccggctcgtcgagttcgagcttttttccagccctttgcaaatagtggtaggtgactaatgtactgaccacattattttttagttaacatgaaccacattattttattgaaaactaaatacaattaattacataatcaaacaaataaattttacataattcaaaaaataaaattacataaattttaaaaaaaataattaataaaaataacaaacacgacaggaaattgatcaactttcagtagtgttagtaatttttggtagttgatatgtgactatcgaaaataactagtttattttggtcgacatggtatcaagctaccgaaaataagggccatattttcggtggcctattacaaccaccgaaaattagcagtataaatctctgatgcggatgtgcctgccttccttgcttcctatctcacacactcgtccacatcccttgcttcctatcgcacacactcgtccacatctctcgctcatctggtgctcaccgttgtcttgtttgtcgcttggtgctcgacgttggccgcccttgcccgttgcgctgcacgcctccactcccctacacccaattgtgcaccatagctcattcatg

SEQ ID NO: 76157 - DNA, 369 bp, Zea Mays
gatggccttgcgaaacaatgggtccaaagcctttcgcgaggtcttctagccttctagtggacctgggggatatctgtcccccacacccactaatgtcctgtatgcatatttttccgcgtgcagagtaagaagggaatcctttgatttatggtgtttgtaactgccataaataataaaattacctaatcaacttccataataaaatccattgttttatggtggccgcatggacatgggagttgttggttgagagtgaatctaacatttacgctgttatctataactatgtatgctcaaacttgaagatttttacgatcatgaatacaacgcatctgagttaccaacgtttctcactttggcttgttattt

SEQ ID NO: 76158 - DNA, 876 bp, Zea Mays
aaaaccttcccatcttcgcgtaggaccgtccagggagggaatggaatctgaccggtagacgcaatttctcattggaggaattcccgccgccgtgtggatacaccctgtcacgacccggcgacgaacaccggctcggacgagaaggaagaggagaatagaaggaatcagaagataagagttcgaggaagagcaggtatgtattctattattccataattccttctggaatacacaggctggctttatatatcagctgccgaccaacacagtacaggcccaaaagaattcaacaacctggcccactggcccagacttcactgcacaccacaacaacaattatcgctccgtctctacagggcctccggtgatacctgtcaacctccggcgatctgggttgtgacaataccaccctctgaagtaccatctggcccctagatggttgtgctgggaaaacgagcacgaactacagtataatcttcccatgaagacatctctgttggcaccccttgccacttgatcaacacttgggtgacagcagcggccccttttctgaccaacctgcggtctaaaatgctttctggtactggtgatacttcttcagaggatgatggaggtggaatgtcagcaaataccggcacattatttggaacatggggtttaagctgcgagacatggaacactgggtgaatcactgccgacggaggaagttgcagtcggtaagcagctgtgccaatcttctccagaatctgaaaagggccaaaatacttgaaagagagcttagcacaaggcctgtgatggacagacgactgtgcaaacggttggagttttagaaatgccatgtcacccacttggaattgtcttggtgttctattggtg

SEQ ID NO: 76159 - DNA, 337 bp, Zea Mays
cagaaatcttgtcctcgagattagtaagaaggaggatgcaactagtttggtgtgtagtctatgtttcagtttctaagtggttttaataccaaaagattttattttgttcaggtttataacacaaattagcaggtgattatgaagacatggttatatatatgtatatccactttatcatgtaggataaaagatgtctataaagcatagataggtttgggtaagaaagagtagggtaagggaagactccatccaagatttgtggatcttgattcatctgatgatctggcttgaatcttatccttccttgatttgatgttgatcttttcttctccggtct

SEQ ID NO: 76160 - DNA, 500 bp, Zea Mays
tagcatatgtgtgtgcgcgtgcgcgttattgttatataataatagattttaaaactattatacaaaagacaaacattatcgattttcaaccaggggcatccttgctagattttggaggtgttgtggataagcaacaatgagatggttatgcccatacatttcactactcattaatcgacaacaatatcggtatctaaaacattctaccaacaagactcctctaacagtagggacgcttccttgctggatccaatcatgattatattactatggatgtcattgatggagcaccatatgtgccaccgttgctatgctacacaccagtctcgtgcacatcaaaattctcctagccccatgcaccatagtggtcgagagagccccgcattctgttgctctaatgtaatacccaatttgtaaattgtaagagataatacaaatggagaaataatttctctttaactatatgtgagttcaacctttgtgcatcatcgcatgtgtac

SEQ ID NO: 76161 - DNA, 627 bp, Zea Mays
attttactaccagcacaactatcatgtaggaatatagtatgtgtgatagtttcttttacattcatttttactattagcacaactgttttatatgcttataatacactttggaatttaggaatagcctatgcataaacgaggggtttgtctattatttttttatctttatgccataaatatttggacgacaataatgatgcatatgcgcagcctctgtttgatgagcattctgtggcaccagctaactttttatagtcatattgccatgtataactagtgtgtgtagatttcatatagcctgtccgtcacaacttttgggtagagtttgccctttcatttgtaacgaagttatttgctgaatttgttcatttagaccataacgtgacattaagtattaataattcagaatacgatcttaatttaatagtttgggcatgcatgtattttgagctattgcatatatatgccgatcagaataatttaatttgggtgtatgtatgcatggtgccaagcaacattttttattttctcgcagggaaacaggcgacgatggcctgcttccgtatcaaatcagaggaacttgattttttttatttgacaccccatgacacagaatttcaacttcca

SEQ ID NO: 76162 - DNA, 410 bp, Zea Mays
ctggccacgacgagggcaaaccgtgcggtgttcttgagtggattgggggaaatgcgaaattgaagctctctggtggaggatttgaggtgcggacgggtgcgcttgctgcttgaatacataacgaagtcaatggtgcactcaatttatagactccaggggcggtggctctcaatttgatcacgacgtgctggcggctggagatagggaagaacacggtggctataaccgtggcgttcactggtgcaacggcgcaaggataatactcctaagggtgccacaattactaccgcacggtaccaagctagggcttggcgtaaccgaggtcaccgacgcttccacgacgacaccggtagtccggccacgttgccatggctaaaagcacggtgataatctccaatccgtgatcttat

SEQ ID NO: 76163 - DNA, 665 bp, Zea Mays
ctctgaatgaggattccattgtaaagtagctgaaaaagatcccaaaattcatcacccttcgtcgctgatgatccgccatcgcaattcgcgctcgcctgggagatttgtgccacgggaagtgtggataacgtcgagcgtagtgagaatatccagcgcagggtgaatccggacgctggccggaccggtcgtcgtgtcccgccgtggttaatcgcgctggcactaccggagttcgtcgttatctggccaggctacgtgcctcgacgccttaccacgtcgcagtgagtcaccgtaaaccgctctatagtcctagctcgtcgccggtgagtctgccacggtgaaagccactaatcgcacgcaccagtgcaactctccttccccggccgccaccgcgccattccaaattcacgcgccaccgcccctgaagcctataaattgagcgttcctttgggtccgtaaggtagtaaagcacccaagccaccaagccgtgcctccaattgctcacccgagctcgccaatttcagatttcccccaaatcaatctcgagcgctgcgcaaagtgatctcaccgtggtcagcatgctccaggtctcttcgtgctccctgctatcttgtttcagcatccttaggttttcttgatgctcctcgaccagttcgattgagttaagc

SEQ ID NO: 76164 - DNA, 499 bp, Zea Mays
gccgcgcatcgtcatccaaattcccggccaccgccgttgagccctataaattgaagtccccaccagccccgcaagatcgtcacccacccagccaccgagaatcgttagcaatcgttcgccagagctcgtgaatttcgaattctccccaaactggtctccgccaccgcatgatcaagctcgccgtggccagctcgattcaggttagcccaagttcctctgctgcttgttctagaatccttaggtaccccgcaaacccctcgacccctttaattgaaccagaccgccagggatcaccgggaacgcgtaccattgtcctcatcgtccgcggttcacgtggacagagcttgatagcttaccaattgtgaaattaagttaggggaatcgttcggggagggttcaatccggtgtacgtcgctcgggagcaccggtcgttgcgtaaatccaccggcacaacctcaccgtagttcatcctccgcgctgctgtcatcgtggacctccc

SEQ ID NO: 76165 - DNA, 430 bp, Zea Mays
ggagtgagaaaaactaacctagaagctttcccaaacggcgtctgcgtgggacatgctacagccacagggcttgaaggcccaatggctctagagtagccgctacggtcccacagcccttagtgaccattcctaggtagaaaaatctacaatagatctgattcacgctgctgactggtgtacggtgcccttgtccgtcccagaccacctcttcccaacacctggtccccttctaccttgttatgtgtcgttgctcgaactccttccgaggcttaaatgttaggtactgaagaaacctatgcaaatgaaacttgtatgaaacttgttatttgaaaatgaaattaatagtaaaggtgttaattaagaataaaatacctaatgctggcagtggctgcgactgtcaattcatctgcctccttctcatctgttgtcg

SEQ ID NO: 76166 - DNA, 320 bp, Zea Mays
tatcaccttcggtaatagtagacttcccaaactctaagtggctgggtttagatggcattgcaccgtactcatcttcaaattcatcttcttcaacgtcagcttgttttgcttcggcggcagatgtatcccctgatgttgccagcccggaccgcctcattgcttcggaaattgggacagtttcaatggcttcggtctcatcccctcacgatcaaccctggcagtggaacgcactctagccatttgattatgagtttctagaagtttttttgaaattgatgaccttttttcgaagcacttcttgtgacgaagcagaatccgag

SEQ ID NO: 76167 - DNA, 453 bp, Zea Mays
caggactacagcattacctcagcatgtcaatccattacatgctgaatccaattctcgctttaaatggggaagagtcaaggttgactatgaaacatcaagaaataacagatacaactgtttggggaaaaaccagtagtagtatcaaaactatcacaaaatcataaggcgggatcgcagctgctaataaccgagttccatttacaatatatttgtaagagagagaaaaacgagcaccatagtgtttacttcgaacaaaaaggtcacaaaatagacagcgcgaatctagcgtcatcgcacaaaccgcgccgacagttttctttttgaatgcatttttaaaaaaaaaaataacgaaagagcatcactcagaaacttagaaatgcgcagatcaccaaagccccaacgaaatctggcgcacgccgacacgcgaaatcacgaacgaagcaggcggcaaag

SEQ ID NO: 76168 - DNA, 324 bp, Zea Mays
gccgtaggttgaagaggggcggtggatcatcgatctcacagcgaacggccgagattagatggggtcggtaccggttcgtccggttgatcctgtccgtcgatgggcagatcggcggccagggaggattatgactttgttttagatcttagccgtaaatctctgatccgaggggtagcattgcgtaccggttcgttaagtgattcgatctaatcgtgaccgtcagatagtgatcctgcggccaggatcgttggataccccttcggccgggttgttttgcataagagccctccggtttttaggaaatcaacccgccgtccaccgcgg

SEQ ID NO: 76169 - DNA, 507 bp, Zea Mays
gtgaaggcttgatgacgccgtcgtagcactgaaatcgcaaccgctcctccacaccgaaggctgctgccgctcctccaacaagggatgtacgtgacctctgcaacacacgactccaacctccacgcccttgtcgagattcgccaagaccaaacacgacccacgccgaggaagagaagagcctttgataccaattgtgacgtcccttggccggcagcgatcaccgacgtgagatcgacccaggaaaatcgccttggacgacaccacagtacgagcgttgctctgtttctattctgtttttgcatacccgacatacggtgcttacagaccttatacacggttggccagcccacgccacaattctacagtaacaatcaatctggcccagctacggcccatacccttctacagttctactattcttcatccgtgccagcttcctcttctatctccgatacagcaacagacaccgaatgtcacatcccgctacccctacagatggtgtcgtcc

SEQ ID NO: 76170 - DNA, 505 bp, Zea Mays
gattatattaaccatgctacaaataatcataaatttaacattgcttggcaaggagtattgaatgtgcaaagtgttcttagagagtattaagcccacggattctgattatatcacaaacacccatcctttacccaacaaatctccaagacatgcttcttttagtgaagagatggactacattctctatcattgttgtatttgtctcacatcctgacatccccatatatatttcactgatgttgttacgtcatgaaatagctaatgtgacattattgtgcatacccctagcatttagtaaatcaccaagaggcatacaatatgcttaatttcaactaattgcttgtcatctcttaatgtgcactttatgcatgaaattatttgagctcgatttgattcgtacaaccatattattaagaaaatattaaatggtggaggtctaacattaattcaaaaattttcatgtctatttttgtgcattttcctctatgaattatcactacaaaac

SEQ ID NO: 76171 - DNA, 345 bp, Zea Mays
atgaaatgctagctggattgtctgaagattctggcgatagcgaaggctttgatgtggaaagtgaagactaagatgccaaaaatcagccctggaggccgagtcatgccatcttcggaaagtcatccatcaagcagagtcaaattgatgctatgaaagggagatatttccgtgatatttccattgtgagagctggaggggacagtgtcacccctgcacccgaagtagatgaagtggttgtctacaggagcttcatgaaggcagggcttcggtttccattgagtaaatttctagttgaggtgctaatgacctttgagatttttcttcatcagattaccctcgaagcca

SEQ ID NO: 76172 - DNA, 757 bp, Zea Mays
tggaaccctcgaaaaccctaaaaccaaaccctaggggcttatgtgcaaaattagtccacttttggactaaagtgcaaaaaccaagttaaataagtatcttaagtcatttggatcacaaatatgtgagtttgcaagttaaaccctgagatttggacttatgtgcaaaagagccacactctttctcaaatgcctaagtctcatttcagtgatattggctcaactttggagccttgtaactttcaaactatagagtttttgccctaggtcaccacatcaaaattatagcccaattataggagaacaagtttgcttgagagtgcaagccatgttcttgtgaaaaattggaagataattgagcctgaagttggactgtcagactgcctgaagtctgaaattcagattaacagtgtgatgggatgaactttgagtatgaattccaccttgatttagtgatcaaattagctcagtccttaaagtcgaattgtagatagtatatagttctacaactttgctataggtcactggatgtgttgccatttgaaaatcagagaaaaagtggcttaaacttgctctgtcagttcatctggctgaattcgccatggtacagtaaactccagactgaagaagattacggttcccccctcctttttgctcgtcgctggtggcccgtcgccgttgattgccggtcgctgtgattcgtgcgccgtggccatcggataagtcccgcccggtaaaaatcctcaccgccggtgagctg

SEQ ID NO: 76173 - DNA, 1392 bp, Zea Mays
tttaaacacccaatatgacacggactaaacttttagttagttgaaccaaacatagtcaaatccttgttcacaaaccgtggtcagtgcccaatgaatttgtttgtgctaaagttgtgggcttacaagttttgaacacctgtattggccatagggcctgtttgtttcggtttatggccaaattttggctgttaaacgcttcgtttctcagtccgcttctgtgaaaattgctcaaattaacgtgaatacatcatggttatcaaaaagttgcttaagcaccttttaaacgccttttaagcgccaaaacactctaagtgcctaaagcgctagaacgtttcacgaacagcgtaaaacactcgttttaggcgctacaacactaattttaagcgctagttttagacgtttaaacgctatgggccgtgaaaagtgacactttaacactttagggaggtccagctccacccccagcccacgagagaatcatcgtgcaccctaaaatgagcctgccaggggtcatccaccatccgctcgccgcccctgcgcctgtgatctaccgcggcaaggaagggagattgaaatgttggttactaatattcatgatttggatgatggttcctgagagatcatgatggaagggagattgagagtgatgcttgtgtcattgtggttgtgggcatgtcgttttagttgattgtgtgcatgtggttgttagatgtcattttagaagttgccgttttagttgattgtgtgcttgtgattatggatatgtcatcttagaacttgttttatgggagattggtatttcccttgatattattatgtgagcttatgttatgttgacattttggtcatgtttaaaaagacgttttaaagcttacttaaatgttttaaagtaaaaaagcaatcatgattgcttcaacgttttatcgctttaataaccatggaatacagaatccatcgagtcatcgcgatggtaggaatctgctgtttcctaaaccgtgtagaccccgctcccatattccttcgctcgcaagttccgcgatattcagattctgatgacaattggattacacatgaacctagattctcaaaaaagctcttcaggaaaaagctgcctcaaacaggcctatagggtggtaactgtaactgggtaatgtttatccatatcattgttcgagctttcttgtaaccttgttgctatgcaacaggttagttttctagtttgacatagggttcctactttttaagagtgaaacttgtttggaaagctatgtatgcagaaaattgaattttattgccctattaattgtttgggtacacttaaaggataattctattctatgcttacatgtaggatctctatattttggtcaataaatatgctgcttagcatat

SEQ ID NO: 76174 - DNA, 1088 bp, Zea Mays
agctccaacctctagaagcaaagagacgccctcgcagctaagcagcagcgtagcgaggtgtaggctagggtctgcctcctcatccagcaagaaaaagagcaccttcagaccctcgagcaagaaattttgaaactataggcccaggaggacccatcacacccttcgtacgaccctgtaagattgagcagtttcgatgaagccagatggcctctgcaaaatgacgcttttcgggacttcaatttcaccgacaataggtgttcgctctccgccaagcagtaggcaacgccttggccaaacagttatagggtcaaaaactagccaaagtgcaatgggaaggccgacccatcgcagttcatcatgagctacaaagttgcagtggcttcatctgggggagacgacaacacaatggcaaagtccttcatcatcaccctggagggacttgccttagcctagtacactaggctgccttcgctgacgattgatttatgggtagcccgtcgggagaaattcctccttaacttccaagggtacatgccgcagaccgatgccctcgctgagctatcattgtgtagacaactagagaggcaaaaccttcatgattactataacaagttcctatcgctcaagtcccagttgtcgttagtagaggatggaatcgccattcattatgccatcagcagcctgcacgccggccatttatatagcactgcactcgagacccaccacaacccttcaagagttatatcaattatccgaaaagtacgcacgatacgaagacctccactaccacaatgttgaggcacaacgcaagccaaatgatccttcgcatccggagagctccaaaccatgggcgcgaacgcaacacccttcgccacagacccaaatccacaatattcagtagcagcaacaacccgaagacacccatcgtagctacgaccaaagttaccagttggcacgatgcgacagatctccaaggggaaggggcacgaacgaggtacacctcacgaatacaagccttactgcatattccacgaaagctccagtcactcaaccaaagactatcgcgcatacaaagaggtaaaagagag

SEQ ID NO: 76175 - DNA, 530 bp, Zea Mays
caaggtcccttgcgggggtgctcctgcacagtaattgtgtagtgaaaacaaattttgattcgttcgaacagaaaacacttttcattgagttgatatttttcattgagatggtgcacggtaaagttatgtatgcatgagcatgtcgcactgacttaagacgtttctgacttaggctgattgcttcattagcagggtatagtaatcaccctaagttatgtatgcatgagcatgtcgcaccgacttaagacgtttccggcttaggctgattgctccgttagcagggtatagtaatcaccctaagttatgtatgcatgagcatgtcacactgacttaagacatttctgacttaggtcgattgcttcattaacagggtatagtaatcaccctaagttatgtaagtgtgagcatgttgtgttggcttaagtcatttccaacttaggctgcttgctagttgagagtttgtatgcagatgaacacataagctttattgacaatgaaaccttttgtttacaaagtgcggcttgctgact

SEQ ID NO: 76176 - DNA, 482 bp, Zea Mays
aaccacacggataatttcaccaccttggtaatatataattgtgcggctaatgaaggggccatgggaatacgactctgcaggaaatgacaatcaggaacgtaccaaccatttctcctttaatttgctgcagcctacagggtgtgcttatttaattttaagccatatcctactttaatttgatttgggtcaatcaagtctatcctgtgaggattagcgtggatttgacttctgggaaaaggtgacggctcacttgctcccgtctattgcttcagctgagaccctgacactctgacagtggcctcggcggcgggtgatcgatcaactactggttgggggctggctggtttgtttagcccggcaaattataatgtcaatggatatcttcaaagtaaagtgccttacctttgccacgcattgaattctccaacgactcaacctctctctcttgctgtttggaggtatcccctggtgcataattaaat

SEQ ID NO: 76177 - DNA, 375 bp, Zea Mays
gtttatgtgaaaagtgtaattgttttatgcaatgtgatgggattcgtgattatataggggatatatttgttaatgtgacgagtagtttagaaaatgctagtttgcgtggaggatgtgttattaagacatgagtatcggagttcatatattagtggtcgcgccacattgattgaagtgtctcgagtgcacgccaccatatggttgtatgcgagacatggtaaaataaagtgtgctcgacatgaatgtttggtcgttgtaggtagaaattattttggcttatatagagatgtggtgacatgccaaagtagtcgtcgctttctctatatttataagtcgagtcgtgacgatgcgtattatgcgttcgttaaattatgc

SEQ ID NO: 76178 - DNA, 616 bp, Zea Mays
tgttcaaagagaaccccaatacggggagtggatatttattcttgatagtcacttgattcaaagcgcgataatccacacatagccgcttgcttttatccttcttctcaacaaacaatactggggaagcccatggagacctgctagacctaatgaaacccttagccagcaaatcatccaattgccgcttcaattcaacctgctcctttggggccattcgatacagagccttatgaatgggctacgtacccggaatcagcttaatctcaaaagttgcatcgcactccggaggaatgcatggaagctctgccagaaacacgttagcaaagtcacacaccacccggatgtcctgcacccacaaggcagcctcaccctccaccaccatggagaaaaagattctcgacttccaggatcggcgatccggaagcaattgcgccaacaaggataacgtgaacttaggggaacttcccaagaataccacctccctacctgacggcgcctgcaataacactatcttccaaaaataggatataattacgttatactgggataaccaatccatacccaagataacatcgaatgcccccaaggaaatcacaactagattggccaaaaaaac

SEQ ID NO: 76179 - DNA, 480 bp, Zea Mays
cgagagtagacctggagacggtggtccatggcgcggtgactcatggcggcgcggagaactgatttgggggaaatcccaaattggggcacgctggtggaggatcagaggcgatggctggggctctggcttcgtaacaacttagcggagcagactggggcatcaatttatagaagctttgagcggcggctccgaatttggaaggggaagtcactggcgtgagctaccgtggcggtcactgaggcaatgcttcaggcgacggacaggcttcctatgccggttcactgtgacgtggtaaagcttcgaggcatgtggcattcgagcagtaggcggcaaactccggcgaggtcaccaggatcggccacagggcaagtgggtacggggctagctcatggtctcatccacggtgaagatcttttcactgtcgatcataatccgcacaccaacgagcatgaatcgtggcagccagcgcgaatccaggcg

SEQ ID NO: 76180 - DNA, 814 bp, Zea Mays
ggaacgacgagtagaagcggcgcccgccaaagaacgactgagatgagatgctacatatagcttcgatgcatatacctttgaattcccaccagcacccacccaggccaggacctcctagactggtttccaatgctcaaaatagaaatccaaactccaaagcaacgacattaatcttaagacaatggattactctaggacacctctcgagcgtgcaacaacttttcatagacgcgttgagctaatagcttggtacagaaagctttgaggtattggataaacaaaggaaagtttcacatttatgaaaattcaataatcgaggctataaggccaaggctataggtatcagaccgtctggtggcggtcaccggaccatccacagtttagtagccagaccatccgagcgaggtggctggactatctgcggtcgacataggcactacaataatggttctagctgattcggccgatatggttgattagaggatgcccctaataacttatttgtgggatccaaatgttagagtagataagagtattcaacgaaccacttttatgtatattctcatagatgatgaactttatcttcaaactcctagtgatgttatccttaggtgcttgggccctgatgacgctatattagccatgtgtcgaagtacatgaaggcatttgtggtactcatcaatcagctccaagaatgaagtgacttttaaggaggactggattttattggtttgatatgattgccaattattttaagtactacaaaggatgtctagtgtgtcaaaatttggcgatatacagatagtttctgtca

SEQ ID NO: 76181 - DNA, 381 bp, Zea Mays
tgtactgtaaataaaatgaagtttgtaatattatttgtggatttcactactcgtttttatagatcctgtatcaaatgtacatggttcgagttctcctggatggtcaactcaacacacgatcggatttaatgtatgcattgcttacacaggatctaatggtaggcgagtaagtgtatgaatagtttaaattggtggttatgtcatacctattagaagtcattttgctccacacgtcaaaactaggccaacccaattaatttgaagcgagcatgtctactatggaaatgatgaatttataaaaattgtgttgttgtctcttaataggtttagcccttagtttgccattatttcattttgacttttcactttgtgcatttttta

SEQ ID NO: 76182 - DNA, 371 bp, Zea Mays
gtgcgggcgagggccgcgttctgctgtcattcgggcccatttgtaagcccctccttggggtagggtttgtaatacatttgatcatgatgtacttaatatcattgtaatgaccctataagggggaatattctagagttgtagcaagtaacctggggcataattatacttagaagggcacacccacctacttggttacccataagtactcccgcactgtacattgatgggacacgcttaacaagatgctacagttccctgcttattgttttgttgagcaccagagttccctctctcccgagtgattggactcacttgaccacgtgccaatcggtaccaacatttagcgcccaccgttcgtgctacgataaaac

SEQ ID NO: 76183 - DNA, 351 bp, Zea Mays
caaaattcaaataggatgttcagaataggtcaagtctggttctaaggcaacatctgtcacctcaatggatcgatctggaacccgaagacacttcttcaattgagatacgtggaacacattgtgcacagcagacaagttttcgggtaactagagttggtatgccactggtccatatctttcaaggataggaaaaggaccaatgtaccggggtgcaagcttcccctttaccccgaaacatgatacacccttcattggtgaaactttcaggtagacataatcttcaacttgaaagtgtaagggttgacgtcgcttgtctgcataactcttctgtcgagcttgggcttctttcaa

SEQ ID NO: 76184 - DNA, 994 bp, Zea Mays
atggaatattgtgtcacgtgataccgtgaatgttaatttattacgatcttggttgagaaagaaaagtttgagatccttcacgatttcattggaccactgggtttatatgtgttcaagtgtgggaaatcactgtcgggcagatggttttcatacttgacctcttatagatctggtcgagttgctgcacatgcgaaccgtggagagtggagacgtggagtctataatccagtctaactgtgcgagtgcgatggcccatgagcccatcagggcacatctgcttcattcgttatgctcgacggcagttggaaatggactgatgcccaacactccaatgacttgagctagtcccctccataacctagcagtagcagtaaccgtcaggcgcctttctccactctcctcggtggcggcgcccgcatgcccggaggcctaggccctctcctcgaaggcgctcgtcggtcctttgccgctcgggtaaattgggtatacccgaacccgaaattgcgggtagtgttttttgttggctgttattgagtaacaatttctattacccgaatttatcaaaacccgaactacccgacccgaacccgaacacccagtcttagtattattagaggcaccagaccgatctgacatgccatcgaacctctgccacatcaacctagttgttggagttggagattaccgtttttctatcagacggtccagtgcaccatcggaccgggcgacacgctagcagttagctcctctttggcttcaaaaataacctctctgaaaagtggtgtgacgacccacgtgatcggtccagtgctctagccgtcggagaccagttccagacccctctacgcatctggtccggtggaccaccggatcggtatgatgtgcctctacatagaccaagtttggccaaacttgagcattttttcttcaaacgagtttggctaaacttgagggtgtttctatgacttagacaaacatatctagtgactttcca

SEQ ID NO: 76185 - DNA, 386 bp, Zea Mays
atcggccaatcctttggaggagatggtaaaactccaaggcggacttttgtgaataaggccctggagactgatcgtagagatgaaatgatcggtctattgaaataatattctgatttttttgcttggaattacattgagatgccgggattaagccgtgagattgtagagcattggctgcccattaagtccggtttcaaacctttcaagcagaaagctagaacatttcgtccagaccttctccaatgaataaaggacgaaattcaccgactgctagaggctaattttattggaccttgcagatacgcatagtgggtctccaatattgtgccagtggagaagaaagaatcaggtaagctcagattatgcattgattttcacaatttaaa

SEQ ID NO: 76186 - DNA, 521 bp, Zea Mays
gtcagagggaagatgtgaaaggaattatccaacgctctatatggtctcgtttcggcattagatggccatccactgcacttgggaatgatgttgaagtgtgcgaggctgctttcaatacagtgtgcacctatataggcacaagaggcttagttcaagagcatattgcttacaaagtatggcctcttgcaagcgactgggaaatgccgaaggaaaccgccactggttccagtcagggtggcctgggttatctgaagtatactttttggttgagaaaccagtttgatgagccaaatgatgattggttggatgctatagaggcaacaagtgatgagatactcagagtgtattcgaaggcagaagatgaagttatgacggttgccttcggcgctcacggtaagaggttgaatagtgtttgatgtgattgggttcatttacccagactattgttatcccattcagaaacaagggagaaaaacgaaagttgttgcttcggtgtctgctagcgcgccgaaaacaaagaa

SEQ ID NO: 76187 - DNA, 691 bp, Zea Mays
ttcgaaatgatttctgaatttgatgattgaatatgagccaatcttggcattttgttccttcgagggaattaccgcatggagggaaaagtttgcgataataccagcatggcgggaaaagtctgagattcatacttgcactacgagataaagttgacatagagcttgccctgcatagcgggagaaagttatggtggctcatgtggttttagtgtatcccatagtgagagaaaagtatggattagattttatgctatccatgtattgattgtacacttctattgtgtcaaggtcattatgcactcaataagtttaaggaaaatagaaagttacagttgaacctaaagataagaatgatatgcgagcgtgacttgcaaaagtactaatgataaaggactatgttgagtcttgatgtgaaatgaggaaagagtacttccatacaaatttagaaataacctcattttgcatgatgtaatcatgtggatgaagaaagtaatcaaagtacctccttcataggagttcttaatggtttttgaaattttggcagaaaagttcatgccatatttcgagggggagatatgtgagatcaattaaggaagatactctcttttacttcagataatgagaagcataggcaagagtgatctataaaagatgaatgtgattgtcgggggagtatgacagtcataataac

SEQ ID NO: 76188 - DNA, 446 bp, Zea Mays
ggtttttatgccatctatataaagtatttacactatttctatgaactatttatgctatttgcgcgaaaaaatcagaaccgtaatttatgacacctgtcccatacgtggggtttggatgttggactgagggtttgactggcatatgtggggaaggtttgacctcgtgcacataggtgtgggtggcgcacggtatggtccaactaggtcgtagggtggtcggctagggcttcctctaccattatatatgatcaaaagttgatagcatttgactttttaatgacactttacgaaaaagtctaaaatggtacctttggtttactccccttaattcttttaggtagtctgattaacaccctcattaagattcgtcttcttcatttctttaattttaaatttcaaaatttataagatggtagatagcaacataaaacaagttggcagatgcc

SEQ ID NO: 76189 - DNA, 496 bp, Zea Mays
gggaactggatggcttgcattggatcgagcaatgaatccgtaacaaccgaagttgttgtgatactgctccttcccggtggccttcgtctcgtataagagctcgtgcatgctgtaaaaactttttgcgctgggttccaacccttggcttctcacagcccaagcaaacaagcccatcctgattatagctttaggcataagttgatgaagaaatatttgaaatgttttcagcacttcaaccaagaacccgctcaatggaaaccgaagccctgctttcaaaaagcttcggtagataaccacctcatttgcttcaggaacaggagcagtgctatcccctccaagcctcacaatagtcatgtcgcgaaagtatcgtcctctcatagcatcaacgtgactctgtctgatagacgatttcccgaagatggtatggctcggtcgccacggacgatctttagaatctttgtctccactttctgcatcatactcatcgctatcgtcg

SEQ ID NO: 76190 - DNA, 762 bp, Zea Mays
ggagctcaccacggtaaaaggacaccaatcgcgcgcgccagtaacttcttgttcctccggccgccgtgcgtcatcgtctaattcaccggccaccgctcgtgggctctataaattgagcacgccctcggccccgccatgtagtcaagcactcaacacacccacccgtgtccctaattagtcaccagagagctccaatttgggatttcccccaaatcactcaaaaacaccgtagaactaccctcaccgtggccagctcgtctcaggttcgttctggtccattattctcttgtttcagcaacctcgcttgctcctgatgctcgctgacccgcccaattaagctagggagttctggatcaccgggaacacgtcggttccttggactgcctgcactgcctccatggaccggatggtttagagccttgttggtgaaattaagtgaggggaaagatttaggaagggtctgatttggtgtctgccgctcgggagcaccggccgttgtgtgaatcagccggcacaggctcaccggagttcgtccccgcgctgttcgttgtcgaggatctcgggcggtgaaggaatagaacttgggggaggtttttgtaaactgtgagcgactcatagcaatagttcagtgcacccagttcaggttattcaaaacggcaggggcttattcgcaaagtccacaaggccgcgcgcgcggacgctttccttctgtcgtgggctaatttgggtcggtttaggtccagtactattcatagtttttct

SEQ ID NO: 76191 - DNA, 495 bp, Zea Mays
gaagaagaagaagaaagcaagtgatcagggacgagtgaagaaaatagccagggcaagcgagctatttgaaggggccgagggatgaccatccacttcctacctcgctcgccaaacagtcacaaggattcaataggcgattcaagccgcctgaaaatgagtcaggcaactggcgccgtttcgcgtaacacggcatcggttggacccacgtcaattgctcaggcaaatgattacacctctctgtcacatcaagttactacttcaggacaacgtgataaacactctacgctaggcagacaccccttggacacacccattgggtgtatcgcccagaattttcaagattttctgaagaagtgatatccacaaaatatacgcaatgaatgtaccacgacaaaatgaggagatcggctaaaacgggaggaagcccaattttggttactgaagtgcaagtccaatcaaaagaagcattaaagtacagagcagggtggtgtccag

SEQ ID NO: 76192 - DNA, 574 bp, Zea Mays
atcaacataaatttcagcatacttctcggtcttgtgggtggtgtgcactggcaagaaatgagccgtcttggtcaacctgtccacgataacccaaatagaatcatggtgcctggaggtattgggtaatcctactataaagtccatgcaaatgtcctcccatttccaagatggtatgggaaggggttgcaaagggcctgctgccttcaagtgactagcctttatcctctggcaagtatcacactcggatatgtacttggcaatttcccttttcattctagtccaccaatatagagatcggagatcatggtacatcttgttgctaccagggtgcatggagaatttggaaaggtgagcttcgtccagtatcttctttctgagctcggggtccttaggaacaaccaatcgatctccaaaccataggattcccttgctgtcctgccggaaacacttgtatttttctgccttttgcttgatcatatccttgataacctgaacacccttatcctcaacctgagcccttattatctgttcttgcaatgtgggctccaccgagatatagcttaggttacccgaa

SEQ ID NO: 76193 - DNA, 627 bp, Zea Mays
taggcgatatagcgcactcttgcactgaatagtgatcctcccaacctggttaggttgcatagctcacacatccttggcgtagcgtacctggtcacaccacatcggatcatccctcttattagcggggaagagtccgagagggtgcatcattatctccagtgggtgatatccatagaaggtcatcaaagccttcatggctgcatccttagtggtgtcatccactttgaacccgactgactcagagtctagcgaacgccatcatagctgcaaagggtgaggctccaaggtcagccaaaccctacaacgtggcactcgatgcttctcgtacagctgcaccatgtatagagggggtgcgaggtacctagctgcgctcaacacctcccaaaaatagatggaaaaccctctcaggaaaggtagtcgaagctaaaccgggtgtctcctccgtcattgggtgtgggagaagccatctgcgtaagaaaggtgagtgtgagtgtaggggaaaacactaaaagagagaaaggtgtgctgggggtaaaagggaaaatttctgcatgggttgatccatgttgacttagtctactttttccttagcaatttttatcctagtttttaagttgtcaaaggtta

SEQ ID NO: 76194 - DNA, 2696 bp, Zea Mays
atttggctccctgcagttggtcgaagaggtcatcgatccgagggagagggtacttattcttgattgtaacttcgttcaaggatcgataatcaatacacattctcatacttccatcctttttagtaacgaaaagaacgggtgctccccagggagacgaactgggacggatgtaccctttttgctgtagttctgaaatttgaagtttcaattctgccaactcagtgggggccatgcggtatggtctctttgcgatgggcgccgtgccgggaatgagatctatatagaactctactcctctttctggtggcataccgggcaactcttccgaaaatacatcctcaaactctttgattgcagacatgttttctgctgccagattaaacatcattggatcgtttgcgggtggttgggcttgacagaaaactgcctttccttggtgatctgtgaggagaacagtcttgcttgcgcagctgatgatgcccttgtgcttagctagccaatccattcctaggattacatcaatcccttgggatggcaagatggttaagtctgccatgaacactaccccacttaagagaattctaacttgggagcacctgagtttgcacaggaggtctgatcccggggttcgggtgaccaaggggtggctaggggtgcagaggggatgtcatgcttttccacaaacttagcggctataaaagaatgggatgctcccgaatcaaaaagcacagaagcgggagtaaattcaacaaggaactcaccgagcactactcccggggcttgctgggcttcttgagcgtcgacgtggttgactcgggctctgccctgatactgagtcctactctgctagctgtttcaaggaagtgccttggaggtaggtgccgatggaatcttggggccattcactgagttggagtaggtcggtccgggtgcctttaactgagggcagttattcttaaagtgactggggtccccgcagtgccaacaggcatttgctggcggttggttgcttgcaacggagggtgcctgaagggagctctgactctgctgactgtagcgcaatggggtgtgtctttattggtttattgaagcttggtcccctgggtggaagcccaaagggtcgagctctctggtgacgttcttgctgttgagctcggagaacttgaaatttcctcttgaggtgccctttttcttcctcttttgccctttccacttggatagccttgttggagaggtgagagaagttgtggaagtcttggctggcgaggatggtcttaagctcgggccttaaccctctcagaaaacgggccatctttccggcctcggtgctgacatcctcaggcgcgtagcgggccagctctgtgaacttgtgcacatactcactgactgtcctcccgccttgagttagctcccggaattcatcctccttgagttgaactatcccctggggtacgtggtgctcacggaaagctgcttcgaattctgcccaggtagcatctctgacggcttcactgaaagtgtcccaccatgctaaagccattccagaaagctgatgagctgccagttgaacacgctgattttcgggacatgcgatggcttccaacttcctcttgatcgtgcgaagccagtcatctgcatcgaggggattgctggaccccgcgaacgtgggaggcttgagtctcaaaaattctcccatcctgtcctgtggccttccaccacctgggcgctggttttccagacttcgagtgaggacttcaatgagtcgggtttgattggctagaacttgggctaggtctagtggtagttccggaggtgcggggaggtgggtctcacccccttctccgccagcctctccttcagctcctagaggaagtcttgctccaatcccggaggcggtaggcgtggttttatccgaagccatctgccataggaaaagagtcactattatgcacatgccatttttttaactagttattttattcattacatcaagccattacataacacagcatactgctaccacaagctcatcacacacgagtgctatctagggtactcccgaactccttctctaaagtgtccccaaattccttgagaaggtcatcaaggctggccagggacatctcctcggtgtcggacgggttccttggagggttttcttccttctgctcagtctgacatccttggcttttggtcttcttgcagatttttcttgcgggggcgagcttcttcagtttcttgtcatagtccatttttagggtgcggtaagcttcacgggtattggtctcttcgccttcagctattgagaggctctcttgaagggacgccttttcttctgaaagttccctgactttttgctccaggctttccacccgggaggttagggaggtgcagtggagggtgaggtcatcatattggttatcgagggtgtgaaggtatccagccatgtagacgatggtgggatcattctcaataggatctcctcctgacagggcctgaagtcttttcctccaggtgggggtattcttgttgctgggtggaaagtagcgaagggggtttcaaagatcactttgttgtagttctgacacagttgtcggagggcttttcgggcaatattttggcaagtatcttggaaacggtatccggtaaaagtgacttggaaggaaggatggtttggatagttttggctttctccc

SEQ ID NO: 76195 - DNA, 786 bp, Zea Mays
attggctgagccgataagcatcaagagcatttaagaaagctaaaacaagagcgaggatggtaggatcggacttatggagagctggccacggcgagctcacacacggcggagttttgaatgatttgggggaacttcaaaattggagcgctctggtggacaatctgaggcacgggctggtgcggtgggtgtgtgattacctagcagagttgatggcacacttaatttatagggcccgagggctgtggctcttgaatttggaatggcgcgctggcggtcggagagaaagaaggtcactggcgcaagggatgtgtggctttcaccgtagcaaggtcacccgcgatgaacggacacgctaagacgagttactgtgacgtggtagagcacctaggcacgtggccaactccagtgaacttatctggaccggccgtaaggcaagggggggtacggcggccagcccctggtctcatccgcgacgaagatcttttcaccctgaagcgttatccgaccaccaacagcacgaatcgcgtcgccggcacgaatccaagcgcgggggtcgtcggcggcaaggtgcactgcacctacaatcttcttcagttactttacaatcaaaacactattcagtctgtatgacagagccatttgcagggcattaatctccgatttctgtgtggcaactcgttaatccctctgtaacaaagttcttggcctacaatccagctttaatgttgctatagcaatcaccctcaaatactcactggatcattgtcaaaagagctcccaaagttc

SEQ ID NO: 76196 - DNA, 927 bp, Zea Mays
ggagaacggctccgcttggaacagatgaagccataagtcccaatggggctcgatccccaggaacccctcgtagacggcggcaaagatggccacctgagcgatggagttggggttgaagttgtgaagctccaccccgtagtagtgtggaagtgctcgcatgaagcagaccgccgacactccgaaccccctctcatgaaagggggtgaagctcaccacatagcccggggcacgagccggcacctgcttgtcacctggcacaatccactctaggtgtggcccatggagatgagggcagagcagcccggcgtccaccaacgcctataggtcgttgtcggtgatggaggagatcggccatgggtcacgaggaggaaggacacttactttctcagccattggagctagggaagaagacgaaaggagagcacgagaattttttgtggctaaggaagaaggcgactacgacaggaaggcgaaagcagaatgtaaagaaccaaacatcccatctcgagtgaatttataagggtggatggagtcatcgaggcttaggtcgagccaccttgatacaaaacctagagtgggttgtgtcgcttcgaattccacacgcacacgcgccacaacggtcggcctacgggctaaagcatctcgtcgcattaaattccctctcttcctgacgtcagccggccagcgccgcttcatgtaaagcctcaaaaggtgtatctctctccctcccgctctttccctctacctgtttttacactatgaaagggaaatggccttaaaccatttcttatactgattttggtgcttgatgaccatcacaactattcggactaactagtttgcttagtctttgattcacaggttcataagttcaacagtttagtttctaagtcacaatcagctcacatccaaccaaatagaggtaag

SEQ ID NO: 76197 - DNA, 460 bp, Zea Mays
tcagtcactcggcagttatctctaaaacgccgacgtcgtcatcagtcactcggctgttacctctaaaaacgtcgacgtggtcatcagtcactcaaacgttaattctaaaacgctgatgtggcttcgtcatcattcggacgctacttcagaagcataaatgttgacaataataactcggccatcacccctaaaagcgacgatatgatgcccaagtgactcagctactactccagaggaattaacttcacagataaggcaaacggaggaatgattcgagaactacaagttacgacacaagcataacagacagagagcatcacggacaataaatatcgcgacaatcatcaactgaccgtgaaagcaaaataatcaatacaggaggagacgaaatcattcttcattaagggaagctacacaacttacaaatcaactcgttatgagttgatgctgcccctactac

SEQ ID NO: 76198 - DNA, 524 bp, Zea Mays
agaaaatggaaattttatgtaggatatttaaatgttggaagaagaagaaacatgcaggaatatcagcttgatcaagagaatgggcacatgaaaggaaaatgccatttgtgatttacagcttgcccatttaccctcactttgaagttatatcctaaaatgttgtcactgattgagtatcactcaattgcaagctcctccataaaaggaagctaggataaaagaataagcgaggcaagaatccaatcctaatctacctctctcaatttctcaatctgacttgtttgtataggctccagggaggcagggtcagcaaggaaaggaacttgctgttctgtcaagcttcatcgctgccactgcaccacctaatgtcgacaacagaaaaggctagagcatttgcatcaaagtcccaagattgctatagcacatggcatatgttgtttgccccttagcggattggtaagttaagaaattgagagatttcaaatactatcttctacatatggttattattaaatagatctccc

SEQ ID NO: 76199 - DNA, 771 bp, Zea Mays
tgaagcagacctgcaggcttctgatgctctgccttagttcgctggcacaaaccatcgagcccaacttgagatgtgtatccactatgcctccttcgtgatctcgacacatgtcattatctaattgaccacctaatcaccaagtccttgtgcccccatttgacatggtcaactaccatctcaacttggtcaatactatcttttctaatccacatgtacacttggttattaatgtccatagatgtcagccacacacgatccatcctccatcatttggtacatcagtctaagactcctatccatcattcatcacccctagtccatcaacacgaagttagttgaccctgtccattattgttggtcatatctatgcttcacgcatgtgcatcatgagacaagagacatgttcagcacaccaaactcgtgctatgattagtttcatgagtaaaccgaagtctatccatctcatgaccatcgcacatcacttatctacacatgggcacaatcatcaagtccttcaggagctacagctagtgatatggacctagggtaccacactacccaaataacatcctagctagtgtgggtcatatcaggcaaacattttaatgaggagatagtaacaaaaaatttcaatgtcagttcccagtacgaattgtgggtaaaaatcactttcgtcgaatagaaatcgtttgtgaagccgacgatggtactggccattacaaaaaccattcatgtagcatttcagttctggaaactataagtgcttgtttg

SEQ ID NO: 76200 - DNA, 559 bp, Zea Mays
cggagtaactccggcgagcccccgtgggccgcccactgccccaaaaccctaaccgagacatgctatgcgtagtgtgggtcgatacaaacggcagagacgagtaattaccggcctcgagcgcgagatgtagtcggtccccgacgcgcagcggctttgcgactgtagggaagtccggcgagcaatcgccgaggctctggtcttcgagcgcccctggattcactcccacaccaccacggttacccgcgctctcacccggttccaacacgggtcgaatcgatggccggccaaggttgtccactacgcagcgctcccttcgacactacggcggcggcgatttgcggtgcgggtgatatggtgtggtcgcgcgacgagagatggcagggaagggcggctacgggtcagtatttagccaccgagcatgcggggttggcggcacgattctagctaatcccgaagggaggaggaggtatgccgtgacccgccatgcacggagctttcgttggggagggaactgaccaaacgggcccacacaacagaggcggacagccacacgcggtgc

SEQ ID NO: 76201 - DNA, 411 bp, Zea Mays
ggaccacctagctatacaggctatggctagttttttgcctgcctggatagcttttggtcaacgttcaagtcttgctagctagctcggggatcagtagacatgcatgcatgttgttttgcttgtttgttgccaattcattttcatttcatccagtccagtttcatcagtttattcttaattgcatacaagttgatttcatgcatcatatccatatagctagctagctaattgtgccacgagctcaaatctaagcaagtgggtggccttttaatttttactaggtggatgggatcaacagcgacgctgcctacagagaacctgaacctctttctgctctcctcgtctcctagctgctgcgcaaatgcatgcatgaacacctgccgccccagcattattatgcgtattttgttc

SEQ ID NO: 76202 - DNA, 619 bp, Zea Mays
gttgtttttgttcccttcatgatccgaggattaggtatgtcggtttcccctttcctccacggttttctcgatttttattctctcaacctgactcatctgaatcccaactccgtgcttcaaatcgctatcttagtccatctctatgaagccttcctaggggtttatccacactttggtctgttgacgtatctatatcattgcaaacctggaatggttgggggcagcatcagttggtcagcggcgctagcttggaacttcaccgaggtaggaagactgagtatcttgacatcccattgaaggatagtatcaatggatggcgctttgagtggttcaccatggagaatcacaacaagtcgctgcacgcccgctctgggagacaacatgatgttcgaatgtcgagtaggatagaggccccaactgacttggaggtcgctgaagctagaattctgcttgccgagatagctagcatgaaagacaggggtttgactactgaagctattgttattgactttgactttaagaatacccaacctttgaaggacagggtttatccaacttatctgtacactagagtgaacgactcctctcagattacaaacaggcaatgtccgagaagaat

SEQ ID NO: 76203 - DNA, 461 bp, Zea Mays
cgcttgtagtttgcataggtcacggtggttaattttggaggggaaaggaccaaaggtggaaggaccaacatttaactcgacaacactatcatcttcatcgaatatctagggattggtatgtttcttttctttagatatatggtgcctaaacatgagatttgagatgatttggaatttatgtgctataaatttagttagctatttgaatgtgcattcatgaatcatgagaggtgtctaaggctttgtgttgttatctaggtgtgtctcctcatataaattcaatatttctgtctcaagttcagtcaaagtgcataccaatgccagaatcgatgcatttcataaagactacagcggcccctctcttgtacaatacttctccaatcctatgactacgtagtgggccttgcattcctccgtggccccgatgtgatactcgggtgttgtatctcctggacaaagat

SEQ ID NO: 76204 - DNA, 527 bp, Zea Mays
atgaaactaaattcaagtaaatatgtggcactgaataaatggtaactggttaacagggctgaagtgacaatatttgctgcataaacacaaagttcaattaatggtgtagtatgatggccaagaaacaaatcgaggataatatgatgaatgtaatagggaaagttgaggttctgtcgaagcaagtcaaagaagagaagctatcttcaagcactttaatggttggtacctacaaaatcaacctcgaaagtcagttatcaactacagaaatttaagatgtcaatttcatcacagtagaccatacctttttatcttctcctattttctcttggcaaccacaccaaatttaaggaaaataaaacaaaaccaaacacgtgtgcgctgatcgccatggccatgacaaccgaggggagggcgagtattctgtctccaattcgtcgtcgtccacctcttgctcatggtagctgaccatgcgacgcgcacgtgagttcaagcgtaccgttcggcaagccgaaggtgaggaccggaac

SEQ ID NO: 76205 - DNA, 1252 bp, Zea Mays
cactcggggcctagggccctcactgccaaggtgatccgtcaagggttctactggcccgctataatctgcgctgcgaatcgagtgacgaggtcgtgcgaagcttgccagaagttctctccccattcaagcaacccttcgcaatacacaaagctgattgcccacacatggccacttcaacgctgggggctggatattgtcgggccactacccacgacccaagggaacctcaacttcaccttcgtcgccgtcgagtattttaccaagtggatcaaggcaatggtagtatccacagtaacgtcgaagactgcccagaagttcttctggcaaaacattgtttgtcgattcggagtcccgtccgagctcacagtcgacaatggcaaacagtttgacagccaggatttcagggacttctgcttctccatcggcaccaagatttccttcgcctcagtatatcacccgcggtgtaacggcgtcgtcgagcgcgaaaacggcaagattttcatgccatcaagaagaggcttctcggcgacaggaagggtaaatgggctgaccagctgcctgaattagtctaggcactcaacacaaacgaattccgggcaactggattcactccttttcgactactatatggatcagaggccatgacctcgcaggaaataaagcacgggtcacctcgaacaagcgcatctgccgtccccgacgtcgacgagcccacgtccagagacctcatcgacggagatcgcgtcttcgccctgcaggccctcaacaaataccaagctcaaacgaaggcctagcgcgaccactcagtcgtcccaagagaatttaacgaaggagacctcgtactcgtccgaaccaccctgagagagtcacggggcaagctggagccaaagtgggaaggtcccttcatcgtcaagtcgaaggcgtcccccagcgcatacaggctaacaacgccatccggcgaagacctagaccattcctggaatattgacaatctacacaaattttttgtctaagtcctcagggcctactcgcccttgtaattcaccaaacaacattatttaggcccgcacccttttcctcccgggggtgaggtttttaacgaggcggagccatgtaatatatctgcaaaaatcccccgcaaaaactaagatgcaacatgttgaaaaagaccgcatcaacggtcttcggcattcgatcgctctaaagtcaccgcgagaggcagcgcagactaccctcgcgtgcgacactccgc

SEQ ID NO: 76206 - DNA, 449 bp, Zea Mays
gttttggcaggacagtcagatgccgagatctggaaattgcgactacagttgcacgtagcaatggtctacattgcaccacgcttgatggtagtcttggatttttacatttgagctgtcgttgttatttcaattctaaaattgtcaattgaatctgtagttagctggttcttgtatcaggtgatcaggtagggaaaaagggtgctatgacagcaggtttctatgattctagatgctcaaaactaaagtttgtgaagataataagggataacaagacaacaattaataaaaagatgggcatctggagattgtcgaaacaggctaaaagatatcctgctttggtttaattgtagtatactcttccattcacatgaagctgattcaagattgttacatcctgtaattatttcctgcagctgaatattgaatatttattttgaagcaaaagctag

SEQ ID NO: 76207 - DNA, 371 bp, Zea Mays
gaagaaggttgtggatccttttcttgctgggttttacgaatctatggcaaaaacaaatacagagaagatcacaaaagaaatgatggcagatttgtctgaagattctgacgatagtgatgactatgatgtggaaagtggggatgaagattctgaagaccggccctggcggccaagccataccatctttggaaagttgaccattaaataaagtcaaattgatgccatgaagggaagatacttccgtgacatgtctattgtgagggttggatgggatagcaccgcccctactcctgaagaaaatgaggttgttgtctacataagctttatgaaggcgggtcttcggttcccattgagcaaatttttggttgaag

SEQ ID NO: 76208 - DNA, 548 bp, Zea Mays
acacaagccctaaaccactgagacagaccgtccgcatatgatcacaggcggtccgcatatccgaccgaatgatccgcgtattcaaccggatggtccgacacattgttgtttgaggaggattgttacctaaatcctcgcccgtcccagcaacacttcccatcgcactatacaatgaaccaacccattaatacagaatcccatgcccatgggggcgagtactttccgactccgcctagaaggccggaaaggaatggtcaatcctatgaaccatatatggcaaatagtaatgcaccacataactcaaaccaatggggggaagacaacaaactaatgtccaaacaaccccacctgtgataggacaaagagctggtggtctcccaccacctgctattgatatagtaagggaagaaatagccagagcgttccgagataagctcggagtaagcatggtccctaggggacaatcatatcggatgcattatgacagccgatttgaccaccacccatacccacagggaactaggatacccgaattcgcaaaattttcg

SEQ ID NO: 76209 - DNA, 891 bp, Zea Mays
ggcctagtaacacagggaaaacagggcgtgcccgcgcccgcggtggagattttgcagaaacgtcctcggggttttggctaactgggaacgggttcttttactatttcattgagtcactgatggtttgcacataaaccctccatattctatttcttcgcagagggaggcccacgacgatgatgagcgcggtggagctccggcgagctagcagaccggcctaacggggcaacgactggtgttcccgagcggcggacaccaaatcagacctactccgagcatttcccctaagttaatcgcacggttggtgacctactccgccctgcccacgagaacagcgaaggctaaggacttttgcttgtgttcccgacaatgggtggcggcctaattcaattggacgggttggagagcatcaccagcatacagagacacgagaacaatgcacgaattggatggtgccttaccagaacggactggccacggtggagttgtgttttgcggtggcggagaccaatttgggggaaaaggggaattctccggctatggtgggcaattgaggggaagaacgggtgtgtcggctacatgatgacctagcgcagcagtcccggccttcaatttatagggagcttcgacggtagcgtgcaatttggccgagcaacacaggcggccagagataaggaagaataccagcgcagtgaatacgtgttcaacgccgtggcagctattccggtgagcaacggggagctaaagtgaatcgtggcggtgcggtggcgagggtcggacacgcggcgtaaggccgagaggcggtgatcaccggcgtgtacggtacggtggccggatttgtttatggtcggagtttatccccggcgacgtacactgggtgttatccactca

SEQ ID NO: 76210 - DNA, 461 bp, Zea Mays
ctagcaactcaacttaaattcgctggaagattgtatttatatgtgcaaccattaaaacagtgtatgctaatgtccaattctgttgtattctatttttttataaacttgcaagctattatttgtatcatggccattgtacacatgtatgcttttttgtacggtgcacttgcatctgtctctatttcactctctcacttatctgcttttttatgcttttctttcggatatactattgaacacatagataaccagacattttgtccaatattttgtattgcgttgcaacgcacggacacataactagatgggcttccgagcaaactttctccagacccagggccgggccggcataatctgagaccctgtacgtaattttaaattggggcttatatcctaagaaaaaataaaatatagtaataatacatatgttataatggtttacatagccatggaaaaggaaa

SEQ ID NO: 76211 - DNA, 465 bp, Zea Mays
caatacaccaacaatcatttcaaagaagaaaaccaatcatgaacacaaaggacaatgaactcaaacataccagcacaacacaaatccaattctactcattcaaccaaaacaaaaggtgagacaaggtctagaataaggaagatattataaagtcaaggaaacatattagaaatatcaaggagttagacaagacatatttgtcggtggccaagagtgaaataagctaaccatgaactattaaagtgaggataaatgatacaaccaaggatatgaagtgagttagggagaaagcattatcaaggagaaaagtagagaggcaaaggtttaatatatcaaggtaaatattgcgcaagggtggcaatataatggtacgaaagcaaaagtataagaattcaatagggagaaagcattatcaaggagaaaagtagagaggcaaaagtttaatatatcaaggtagatattgcg

SEQ ID NO: 76212 - DNA, 704 bp, Zea Mays
atttggaagtacatcaaattctaatgctgatgttccagtttgtcagcttgagagattcacacccattgttctaaataagaatgtacagcgtgtgcaagctgccaaggaattcatagaaaatagtgctggggctgaaaatttggaagatttctctgcagttcggaagcagacatattatcctcaggatggcagtgaggatcaaatcagggagctacaggtcccacgggaagtctttccgccaacagagaatttggttgttaaacagcaccttaaaagaaaaagggtccaattttcagaagcaaagcgtagtagcagaagaaccaagaacaatagaaggatcctgactaaatcaagattcagtcgtaagtttttctttgttagtgctcagtattttgaaggatatactctgatatatccgcaaaaaatattagtttcttctggtaatcctcacttgtgaattcttgcaggatcagatagcagaacaggagagatgcttgagaccagagagtacactgataacaaagaagacacatttcaaggagtagagtttctgttgactggatttcctaaacagaaggaaaaagaaattgagtccctaatacgaaaatctggtggctatgtactttctaaagtgtcaccctttccacttgataaaagaaagaacatggctgagtttccaagctggaatcctcccatagtacttt

SEQ ID NO: 76213 - DNA, 738 bp, Zea Mays
ccatgaaagcagaaagagctcctgacagcagaaattttctggcccactcaaaagagtctggcctcataagcaggcccataaagaaagctgcccataattttggaacggagatgaggtctgcgctaggggggggggggggcaaagctcagcccaggaggagaagcgctttctggccaagaaatcttcgtaggcagggtcctgagagggctgattcaggtgagtcatgaagcccacaatgatgttatcatcagcattcagattcaaattttgcgcgccctggtcgttctgttcgttatttccctccaaaaatgggtccgctggggggagggctggaagagcaagcacaacaacttcatgatcgtggacatcctcctgagggaagttgacagcttgcgggataacgatatcgttgaaaagacccacagatacatttgaaggtaagtcctcaagaccggagaattggtaactgaattgtttctcttcattgttgactagaggaacaggtgcaggcggttgttcttgctggacctgttcaaccggccaaggatcccaaccatcatcagcattattggcattggcatcctctaattcaatttcaccattggggggatgttgaggtcaaattggaaattgggcacaggttgccccaatccaaaaaattccaccggaagttgatgcccattatgagggtacggaggtacaggttcttcatcctcaggcatgttaccaagcatgaac

SEQ ID NO: 76214 - DNA, 537 bp, Zea Mays
cctaaggttgcaacaatatgaaaatcaagccttcagcatcccaaatgccctctccacatccttatgtgcccctccttgcatgcaacaagcatccgtagctttggagtatgtggaagcggaatggtcttcacgaacaccagccaccgaaggtatatgccatctgtgaggccatatatctggttgtaaccatggccattttacgtgaatttcatgtttggtgctttccttttaagcacgacagtgaacaatggtgactggttgagcacgttcacaaatttgttcgatcctaccaccctaaaaacatgcgagatccacaagtcatacgaggcaacaacctcgagcatgaaattcggggatcccatgtcccctcttgtgtactgtcctctccatccaatggaacatttcctccacttctaatgcttgtaacctatactctctattgatagttgctagagggaggtaaataggagaagcctgaaatttaatcacttaaaacaaatttgattctaaattagtcgattagagcaagaggtaaga

SEQ ID NO: 76215 - DNA, 1322 bp, Zea Mays
gtagaaaccgtggtctcacattaaagaaatatttagctaaatgattccgtagctgtcctgccaattttggaccttgtagccgacagacgctagtgacttcggttgtcctgttctgtgaacattctgttgaactttcacaatcaaggtatgcagttataagtggttgacttttgatttaagtttcctatatatattgctctacgattatctaaatatttcagttcagtttgttacatagtgtttgaaaattggaacagggcccgtgttcctttactcaacaggagtgttggagatattgcatgttgctcagccagaaatggtgaaagacatgggccactggactccatcagagctcgggaagccacaacatataatgaaatcacggaaacctctcttcggattaggtatactagcagcaaatggcgacctttgggcctatgagaagaagatcctggcaccacagttctttgtagaaaaaattaaggttctaaagtattacttaacgagcccataatataactgcatcaccagcctaagcctaactgtgttgttcttacaatgatagggtatgatagggctaattgtggatgcaaccgttccactgttacaatcatgggagaatatgctcgatggcacaggaggtagtaaggagatctatgttgatggatacctgaggaacttttcagcggatgtgattgctagagcatgttttgggagcaatttcgtagaaggaaaagacatattttgcaagctcaggcagctccaaaagttgatttctgaacaggatacacttgttgggctgtctgcagtgtggtaagtggacttttgatccgttgagagatttctaatgcgatgggaatggacaccttgactggttattaatcttgttgttctattgcaggaaatacttgcctaccaagagaaaccgggagatacaaaagctagatcaagaagtccggttactaatcctggatctctcaagggaagacaggagcagaagccgcagcaataatgccggcacgcacgtgtccacatacgacaaccttctgcatgccattgtcgatggtgcaaaccagagccccagctactgcagtgcccctgaagatttcatcgtcgacaactgcaagaacatctactttgctgggtatgaaactacagcggtcactgccacctggtgcctgatgctccttgctgcacacccagactggcaggaccgtgctcgggctgagattcgagaagtgtgctgtggacagacagcgatggacatcgacgtccttcgtcagctgaaaatagtaagagactctctcctggttcctgtggct

SEQ ID NO: 76216 - DNA, 703 bp, Zea Mays
ctgcgtgccgagcagggaaccggccaggaaatgggtttggtctgctgataccatgtagaattgcagctagaatagtattgattgatgtcacggatgatacgcttagtgtgatcgttctgcaaggaggtgtagggatggaagacatgcgaagaagatgaatgtcgtgggtgaggaagaatgtgcgagagctcgcattatcgaactcaaatgaactcattctgcattgcagtgatgatatgctgcaggagagcaacagaagatgcagtgagcacaatatcattcacatagagcaacgtgtagcactatgacggaacacaaacagtgaaggatcaaacttggccgcaacaaagccaagtgagtgcagctatgcagcaatccagtgtaccaggcatggggggcttgcttcaagtaagagaaccttgatgagacgacatggaaacaacttgaaggaggtggaatgaagagttgatagatctagactggagaatagaccgatctgcccccattgccatctgctcatgaaaatgtgtctcctttactgattgctgaaatgatctcaactcgactgatgggtcatgacacgccatcataatatgatttcacaactattcgataatagtggacgttaaaaaattgcctacgctactgtttgtgctcatgcgattaatcaattctttgggctataggttaactacttgacatc

SEQ ID NO: 76217 - DNA, 832 bp, Zea Mays
ggagatgatgtgattcttggaaagaattggttacaaagaactaaggcagtaatccaacatactaagagaaccatgtgtttggaaaccccatctggagaaagaatagtagttgaaaacaatcgacctccagctctgattggagcatctgacaaggaagaataatatgtcatttagctagaaggagtatgtcttacgaagaaaaaatgtcaaggtgttgcccgtttcaagatttgtaattatgctaagtgatatatgaataaatttggagaatctctcgcacctattgtgttttgcctctttataagagaataaagtatggtgtcatcttctatatgcaaacaatgtgatgctctattctagttgccctaaagtcccgctcaagtctttctctcaatttgtgctcaaagaaataatgttggatcagaaagatgatttggatatcatgctctgaaatctataaagttcaaaagatctctgttaaggattataacacttgtacactcttgtagtatgatgaagctatgcagaatcggaaatcatccttaactaatcttatattggaaatcaaaatgttgtgttcgcactttatcttaatgtcatacaagcctcttatgcagtctgtctcactaaactcttttaccctctgactggatgatgaaccccaatggaaatcaagtaaatgatgccaacatattcgatgaatggaatgaagaacaacaaaaggaatagaaaaatatttggatacatgattagtccacctcaaccacaagcaaaagccacgaaacacatggatacccaaacagaagaatcaagttagactcagctatataag

SEQ ID NO: 76218 - DNA, 495 bp, Zea Mays
cttaagtcggcaatgacttaagacgacgcaacatgctcacaactactcgccatagggagatctctatgccttaccagctgatcaattgacataattaggaaaagattccaaaaaccagcatgccacacttacttctgcaaacgttcataacgactgttgaattataaacagcagaaacaaaatgttatagctttcagcgccaagaacacattctaatatcctaccgagtattcgagcgcactgatcacacacacatatagttcacaaatgcattcagtatcttctaaacacaacaaaacatctctatttggcaatgtctttcgcaggagcaatcgaggatgaagggcgactcaaagcatcaggcgtagccttgacgttcgcaacaatgtcatcaggaacaactacaccgggccttctcatcaagattcacctcgcgcgaatgactttgtacatagctttgtcacgttgggctttcagagtggcgcagttgtcctc

SEQ ID NO: 76219 - DNA, 638 bp, Zea Mays
gtcagggatgactatgggtatgcccatacatggccaaggattgggctacgatcctaaggtaccctaaggcatatccgagacccccaggagcgattcatgacggtatcgtagggaggcattgagccctcagaccccatcaaacaggttcggtaccaagcaaatcacccgcaagtacttttgggacgtgtctccggacagctagccgactcctatcgaatggagcttggacccccactcggattacccgataacagctcacctgaaatgtcatgctctttgcccatcgagggtagcatggcactttccttctcttcctccttgtggagaggcgacgaagaggcgtataaacagaaaaactcaaggcacccctatatcgtcctctcgccccgtgcagaggctcgagggctgctcttgcacctatactgtgatagacttgttggaagctccagtaattcgatgaagacacttgggggctccattcgcacctaggttacggtaagttgatggatgaagccaaccacgcttgcagaggaaagaattaagaccccgaagtagtcaaccactccttcgaggcctcaggggctacacccgacgatgcgcttgcatgcatccattggaaacaaaaccttccactcctt

SEQ ID NO: 76220 - DNA, 481 bp, Zea Mays
gccacggatcgcgtgggcagggtacgtaggcatcctatatccaggtaaaaagggcccctaacacctctgcttcgtccttcgtgcgatgtagtagcattcagttttgagctcgggaagcttgggctcggatccgcctttccaaccatggcgtcgccgcggctgggcctgtgcgccaccgctctggtgatcgtcgtgtgggggagaatggttgtagccttttgacctctggccaacggccaagattaacatagggtatcgttttctcctcataagatctaagccgtagactgatagatccatggataaggttaagggtctatgtggaccgttggattagcgctaaaggttcaggatttaaacattctcataccccttcgcgcatttgttctggaccgtggatctttgatctcatggcccaggcgcgtctgtgtcctcaactgtgtggaattttaagaaagagaccctagggattggataaatt

SEQ ID NO: 76221 - DNA, 474 bp, Zea Mays
cacaacttcactccttcatttctcccagttttaaaccacaacagggaatcaaccttaataatctttgttcaccaactaaccctctaacaatttgccactgggaccttagtcttgtaccccttggatcagacacaaaacaactccaaaatccaaggaaaaacactaaaccaagccaacagtgaactaaatcagcacaatactgatcccttgcagacctccatgttcaaaccttggtttctcacaatttcatatgtcaactggtcaatcctccttaaccaaaattattcttcatttatagcccttcctacttggtataacactccatggctgaaaatgctcagaacaagagttgtggtgcactgaagttgagcaacaacactgaaaatccaatttcaaagtctgaaatagcatatcaccaagtctgacagaacatgtttgggaccattttactcccttctttgtgcagtactagac

SEQ ID NO: 76222 - DNA, 550 bp, Zea Mays
ctcccttgaagtaccgagagtacgcatcttctagcgagaaacgagtaaaataatgtactctcttgttatacaaaatagtttgttcttcccaattactaattcacgggatctccgatcacatagattgcgttaccactgtatgataacatcacgtgggcttcaatcccatttcccttgatgctccatcaatcacagcatgtgctaatccctttgtaaaagggttcgccaagtttcaagcagtattaatatactctacgacgatctctccagtatttctcaaatgccttactgatttgatacgccgtttcacatgtcttgagaactttgtattttcctttgcattgcctacaattgtgatcacgctttgattatcataatgcaacagaatggctggtaccggtttatcaaccattggcaagtccatcaagagctctttcaagcactctgcctcagtagtggctgactcaagtgctacaagttctgcctccatagtagactttgttaagatagtctgcttacgagacctccaagaaactgtaaccctaccaat

SEQ ID NO: 76223 - DNA, 309 bp, Zea Mays
ttcacagaccactggaatctttttcaggggtaactccgttatagcaaaagcacatgactgagtagagtcttgactgggtagaagcaaggtgaaactcccacagattggggaattgatttccacgatgcggctggctacatcaagcactacttggtgtctggtcatccaattagctcccagaataaaatccacattttccaaacccaaaacaagaagggtggtttttataatgtggctccccagttgaataggcacactttggtttaattgattagttgcaattttacccccaggtgtgtatatcatgaa

SEQ ID NO: 76224 - DNA, 840 bp, Zea Mays
gcccccgcgaatccatcctatttccgccgatgccgccttcctcgaaccttcgtcgcccgctgcacctccccgccgcgccccctacaaagccagccagcagctaaaaacctcctcattctcatccacttcctcccgcgcaaccgctcttccccaacttcgccgccgccatgggctcctcctacgacccctacccgtccccggccgccgacgacctcttcctctacctctccgacctcggccccgcctcgccctccgcgtacctcgacctcccgcccaccccgcagcctcagccgtacccgcagtcccagcagcagcagcaggggagcaaaggccccacgcaggacatgttgctcccctacatctccagcatgctcatggaggacgacatcgacgacaccttcttctacgactacccggacaaccccgcgctcctccaggcgcagcagtccttccttgacatcctctccgacgacgcctcgtccccgaccaccaccactggcaccaccaacagcagcgccagcgtcaaccactcctcctccgacgcgtccgccagcgcgccgctcaccccagccgcggtcgactcctactccccggcccccgccgtccagttcgacggcttcgacctcgaccccgcggccttcttcagcaacggggccaactccgacctcatgagctccgccttcctcaagggcatggaggaggccaacaagttcctgccctcagaggacaagctcgtcatcgacctcgatccgccagacgaccccaagcggtttgtcctccccacccgcgccgcagaaaacctcgcgcccggattcaacgccgccgccgccaccaccgccc

SEQ ID NO: 76225 - DNA, 351 bp, Zea Mays
gaagccaacaatacaccatacaagagaacaagtagatgaaacatgcatagaatatcgcatacagtaatgaatttaccatggttagaaagaggcggggaaaggtctcgcgagagttaaagcttatgctcaagacgcgctacgggttggtgaataattagacgctacgtgccttagttctacttaattctaactagttctaacaaacggattagctacatgcataattcgaatcatgactaactccagttgatcgacattaggtgaggtagatgattacttacatgaattaactaacgtaaccgatttctaatttgggttcccatttattgattacatcatacgatcactacg

SEQ ID NO: 76226 - DNA, 536 bp, Zea Mays
cttaaaccatctagggcctcactagccatgctgacggtggatcgacaagctccggtaaggtgtaccgaggtttcgagcacggtagggttcaatccaaggtcactacgcgtaccaggaatacatcagacatacgatgctcacctaggtttgtgcggaggagctacgggttggccggtcgacatggacagtgccctcagcgacgttcactgaatgacacgacgatgttccagttaaccctctgcggtagagttcaaacaagcaagcgcataagcttcaccacgatctatagactgcgaaacatgagttcaacaattatgactaaccttaggaaaggctgaccacgcggttgcaccactcggcggcgctggcgaccaccgatggggaaaaccagtgttcttggctatcgatggtggaacgacggaaacaaagggtggcttgggtgcgtaacggagaggcgggactgagcataggatcaatttaaaagaagtcaccatgacggtggtcaatttgaccgctgaatcacggcggcggcgata

SEQ ID NO: 76227 - DNA, 718 bp, Zea Mays
gtttgtggatgcacgatgtatcaaagttggagctggtctattaagctataattttgctgtagagtgttggtcacgttgctatagaaatctgagagaaaaattgccctgaagtcgctttgtcaggttaactgaaatggagctcgccatggtacagtgtcccgaaatggatcagaccgccagcgccaaaaaaatctcaccgccggtgactcgccgccgcgattcgtgccgtcgccgttccaatttgggctcggtaaggaacggataacgtcggagttagataacgcgtacgtggcaccataccccgagtccagccggagttattcaccggcggccgccgtgactcagtgagctctcgccgcgctgtcacacatgcttcgatttacctcactgtacctctcctctacgtgctaggcatgcactaaagaagttatccatggctgggaagtgatcgctggaccgccgcggctataaatagcccgtgatccacggcgaggtatgaacatcccgcacacagtgagttgaaccgaagcaagaatttgcgctacctctgcccccttctctcaaattaagtgtgcgcagtaaaactagagttctttgtgaagccatagcacccgctcccacccttaatcattcacctgagctcttgaatttcaaacttcccccaaactggtctccgccatcacgaagagcagctcaaccgtggccaatccattctggt

SEQ ID NO: 76228 - DNA, 645 bp, Zea Mays
ggcgagcctcgacctctcttgcctttgcccatggtcggatggagaagaggagaaagggagaagaaagtaacagatgatcgaaggatgagtgaagagaacaacggtgcaagcaggctatttatagaggccggggtgaccgtccacttcctaccacgctcgccgaacagtcgcaagtattcaataagcaattcaagccgcctgaaaatgagtcaggcaacagacgccgcttcgcgtaacacgacaccatttggaccaaggtaaactgctcgggcagtatgattacacctcacggtcacatcaagttactactccaggacagtgtgctaaacgctctgcataccaagacgccccttggtcacacccattggggggggggggtaaccatgaattttcaatagattttctgaagaagtcatatccatacagtatacgcaatgaatgtactgagacagaaggaagagatcggtagagatcggagaaaatccaattatagctactgaaccgcaagtctaatcagcagaggcattgaagcgcagagcggggtgatgaccagccaagagccatctaccaaacgtcaaatctgtcaccgatcaaataaatttcagacctaacaaggtgtgggcagataatattgtttgaattcgc

SEQ ID NO: 76229 - DNA, 645 bp, Zea Mays
ctttccacaattgaagcaaccactggaggaaatgggaagggcagggaaacgagcaccaggggcactcgactgattggtctgggtgggggcaggagtgggatgaatgaacataggttgtctgaagggatatatgggtgggcgaggagaagaatgatttgaattgaaaggtcggattaccaaccttgtcctcttttcaggtacctaagttgatctttcacccgcatatccttttgactttccttgccccgcatttttggcttcaactaacagtgatgtactgatagccctgcagtatgtgaggtccagacacgttgccatcttgcgctggagtctgtcatttagtcccctcatgaagaaattcttatttttcaagtctgtgtccctttgatcaatggcgtattgggagaggagattgaatttattgagatactacatcacagaatctcccccttgcttcagtgagatgaactcttccagtttcatttgtagcactccttccggaacataatgttccctaaatgccatcttgaactcttcccaagtaacttgatgtcccacaggttggatggcagaaaagtttgcccatcaagtgctggtggggcctcttaactgctgagcggcaaacaggggcttctgtatctcggt

SEQ ID NO: 76230 - DNA, 418 bp, Zea Mays
gcggcgcggagagtggatttgggggaaattccaaattagggtgctacggtggatgatcggaggcggggagtggttcactgggttcataacaagaagacgaaataggccgaggcatcaatttatagaggacggccacgaggagggcgaatttggacggggaagcgcacgcggcgagaagggggaagagtcactggagtttgctaacgtggcgttcactgggttacggtctacagcggtcactgccgagtcttcacggcttgcgatgagtggtgagatgacttaaggcgtgtcacaaccgagctagatggcagcacaatggcgacggtcacgaagccacgtcgccggtgcaagtgggtacgacacagggaaaacagtgccccaagttcatcccctgcgcgagattttttagcctacatag

SEQ ID NO: 76231 - DNA, 724 bp, Zea Mays
tgtgagaacatggaccaaatctggaaatccatctaccatttatgtgagcctcactgcctcagccattgtatttttccttctgctgtgcgcaaacagggacaggaagagtgctgacagtgtgtctcctcgaacccaactcgatgtccagagacaagctgtggtctatgaggccactgttcagttgggtaaccatagctgcattgaagagaacaatattagtaaagctctacaggcaggggcatgccaatacaagggcactctagtgcaacccattcaaaccacagccaccataagcgttgagctcaagcatagcattcaaggtccagaatgccaaggccacccatttctaatagctgacacattggtgtccatgccaccttgcatttacccacagagagttcctgatccagtgatcccccatctccgtagcttattccattcttgggaagtcattttagctggttgaggacagtgagcagataggttggttgggatcttaaaattgatctgggctaggacagtttgggcaggcctgaacccaaacccctcttttctttgtttgggctctgattcttgttgcgccaaatattttcctcatcatcttgacattaggaacttagtagtgaagtccaataatcttgtcggcacattttttatgtcaacactcccccttctcctctcctgggtaagaagacccttccggtcagccaacttgcttttggct

SEQ ID NO: 76232 - DNA, 523 bp, Zea Mays
gatttagtatttgttagaggacatcagttcagcattcgaatgatataattactctcttattgtctcagaattcatcagttcgtagatttgcagtggtgaaatgacgcgcgatgattatgaaatttgtttgcgggatatagaagtcatccctgtatgagtaatcataattacgtcagatcgtcttaagtcgctgctgacttaagtcgattatttttgttaatagggcgtagtggttaccctgaattgcataggcgtgagcatgttgcaccggcttaactcgccactgacttttagccgattgctccattagtagggcatagtggtcaccccgagtttaagtaagcgtgagcatgttgcaccgccttaagtcgctaccgacttaagtcgattgctccgttagtagggcatagtggtcaccccgagttaagtaagcgtgagcatgttgcaccgccttaagtcgctgccgacttaagtcgattgctccgttagtagggcatagtggtcaccccgagttaagtaagcg

SEQ ID NO: 76233 - DNA, 442 bp, Zea Mays
cttcggggtgcgacctcttatccttcttggacgcttactctagtttccatcaaatccggatggctaaggaggataggaagcataccgcttttgtgacagtagatggactatactgttatgttgtaatgccctacggtctgaggaatgccttgccaacctttgtacgggcaatgagcaagaccttcggggacctgatctgggataaggtggaaatttacgtcgacgacatcgtggtcaagactagggaagggtcggctatagtggaagacctggccctagttttcggcaagctgcgggcaacccgcaccaagctaaacccggagaaatgcatctttggtgtctccgcagggaagttgctggggttcctggtttcataccggggcattgaagctaacccggagaatatcaaggctattgaggtaatgaagcctcccgcccgtgt

SEQ ID NO: 76234 - DNA, 376 bp, Zea Mays
cgtcgtcacgagtcgtggagagtaaccagagaccgtcgtagctcattagccagtgaccgccacggtagctcgcgccagtaacttacccctctctctggtcgcccgcgtgtcttccccaaattagacgccaccgttgctgatctctataaattgagtgcatagctagctctgctaggttgttacgcgcccagtgaatcgctcatcgcctccaatcgtccaccgtagcaccttaattcgggatttccccaaattggtttcccgcaccgttgtaagcttctcaccgtggccagccatctacaggttggttcatgcctctctgcttggtgttctagcatcccttaagtctcctgttgctgatagaccagattgattgaac

SEQ ID NO: 76235 - DNA, 617 bp, Zea Mays
aaaactttaacctttttcccttcggcgtggtagaaatagccgaagaagaagcctttcttttctttccctgcttttgcgagggataacaatagtctgggtacacaaaaccaataacatcaaagactctgttcaatatcttcttgcctcgccctccgaaggcaactgttagggcatcatcctcggccctcgtgtaggcaccaagcaactcgtcgctagttgcctcaatgcaatctagccagtcatcattcggctcatcgaattgatttcggtacctgaaggtatacttcaggtaaactaaatcatcctcgctagacccagaagcagcttcggtcggcatctcccagctgcttgagagaggccacactctgtacgcaatgtgctccgggaccaaatccctggtgtcgatatatgtgcaaactatgtcatacgcagcttggcatgcttctacgtcaatcccaagagcaagagacggccttttgaagccgaagcgagaccaaatagggcgttgaatgatacccttaatatcttctcttttgaccaggtcatttttcacataaaaccacccttgcatccaggaccctggccaccttttccgaaatgttggaactggatagctc

SEQ ID NO: 76236 - DNA, 329 bp, Zea Mays
aaaagattagcatgagaataaatggttttcattctagaattcaaaaagcttcatcattcacaatcttagtaccttcagactgttgtatgcaagaatatctgcgagatcgtccttcgtcatggcacaaaggccgacttcgagtttcggaaaacccatacttctggacatctcccggcaaacgggcagttctttgttgtccgggaggcagtacaagaaatcatcttcgtccgtaccgttaaataccaaggcccccttcgaatactttagctctcgtgcatagtgtttagcttcaaaaatttcttcttcggatagtctctttcccgaagcat

SEQ ID NO: 76237 - DNA, 689 bp, Zea Mays
agacctttgtagtctctagcacaacatctagcacgctggccattctcctcctcttaggagttgcggcagaagctttttgtgccttcaacagttttgcctctattgaagggctcagaatttctggcattttcattgtttcttccgcctgtggctcttcggccttatcatctttagatatggttggcctgactgtaggcaccttcggcactacagttggctcttcagtgctctgcacaatcggagcagtttgttttgcttcgacagctgaagaggaccctacgccaaattcaggtactacggtcggttcaatataacgcgaccggtgggtcagaaccttcacctttttgctctttggctcagctggggtgaccgaagcgtcaaatttcctctttttctcttgccctcacagcaggtaacggtaatcagggtatacgaagccaatagcatcaaataccctgtttaatcttttcttgccccgacctccaaaggttgcggacagagcattatcttcggccttggagtatgctccaagtagctcatcgctggtagcttcaatacacttcagccagtcgtcgtttggctcatcaaacttctccctaaatctgaaggtatacttcagtcggaccagaccaccatcactagaatcggtggtggtctccttcgacatatcccagctttccacaagtggc

SEQ ID NO: 76238 - DNA, 574 bp, Zea Mays
caaagaaacaaaatttcgttgccttatacaccaccgaggccaagtacattgtcgtaggacaatgttacgtgcaattactttagatgaggcaattactcaagaatcctaatgcagccaccatggcccttgtctaaggaggtgcccttccacagctaacattcacctgccttgtctgctttgtcctctttgctacctatttcataggagccggttgagtgcctaagagatgaggatatgtcgcttgtagatagatagtttacatggttccataataactgcatgaatcgatgatgtggcagtggaaaatacaactccttcaactatgaagaccctgtccacttcatcgccaaccaccctaatatgaagggtaaccaaaaggctgataagtccgtctaccactctaataggctcaagggcaagagcaaatacacctccaggaagcataagtccaaggaacggtttgccaaggtggcactcaagtagaagtacatccataaggccaagctcaaggtgtgtgccttcctcgcctcccttagtgacctcgacaatgactccaaccacacatcctctttct

SEQ ID NO: 76239 - DNA, 781 bp, Zea Mays
cgttttcaaagagagccacaaggtctagcggcgtcttgtagggtacaatttgattcgtaactcgtcggaaccctgcttcactattaattactgggcctccagactgttgcactacccgaggaagcgtctcatcacctcccgcctgcctctcaacatcaaagctcctaggtcccaaaagcgttgggcccaccggtatcggatgactcatcatcttcctagggctgcccgtcggcggcgagctccccatgctatcctctttgcgaggtccctgccgcgatcgacgtgaaggaaaaggaacagaccgtgccttccgaacagtgacaccgaacgaaaattttggagatcttctcggccttcgtaaaggtccttgccatgcacgttggtttctaccatcgtcgacgttctgaccatcgcgaggattctacaccgacgccttccgccgtctctcagaattcttattcacactctggctgctaaccaagttcggtgagctggatgccacgctagagaactcgcccgacgtctctctaaccggcaacccgccttccgccgaactccccatggttcccagcccatcgtcggactcagcgaccgagacctcgccctcctcggtgctggtcacccagaagcgacccaaagaggccgaaggcttcctcgagctggagatcccgtcctcagacaaggacttccaaaactcctccgcctcgtcctcctcactatcgtgaacagagcactcacctgactcacctccgtcgccccttggcagtcccggagaccaccc

SEQ ID NO: 76240 - DNA, 530 bp, Zea Mays
aaagaaccatggttagttctttgttggatcgattcttcattttttggtaaacatacaactaagataagaaataaatggaataatgtatgagacgggtgaacaagaacgaaccatgatttaataaaatagttagttgtcactgtgttactacgtttctatattcacaatatttataatatctatcctttatagaacatacacaaatatgagctcttatagtttcaggatcactcaagtctcccaagtgtacaccggagaagtttgagaaaagtcccgatgatgaaggtggaaagagctcatagattatgcggtacattgacattggtgggacaaactccatcaacgtaatcaagcttcctgaagcacaagaagaaaaggaaaattaagttagtgtagctttatttttcaatttgtacaaccacaaccatcttaaaaagcctttctcaataaaactgtgggtggtaccgtcttaccagcaatggcgccaaatgtaaccagcaagaacacataaagtaatgatatgtgaagga

SEQ ID NO: 76241 - DNA, 508 bp, Zea Mays
gtatatttgaaaactccagcgatagtgagagtttcgacatggaaagtggaaatgaagatgccaaagatcggccatggagactgagtcatgttgttttcggaaagtggaccattaaacaagggaagatcgaaacaatgagaggcagatacttttgtgacatttcaattgtgagggccagaggagagaataatgttcctcttcccgaagcagacgaagtggtagtcttcagaagcttcatgaaagccggactttggttccctctagagaaaatgttggtcacaattttaaataattttgaaatttatcttcatgaacttactctcgaagctattaccaaggtaggagtttttatatgggccatgagaagccaagggctagagccagatgctaggtgtttctgcaatatccacgagttatcatatcagacgaaggcgaccgggaaagagcaataccacaacaattttggctactacatcttcgtaccccttgctgaggccagctatcatgt

SEQ ID NO: 76242 - DNA, 521 bp, Zea Mays
ttgtcattaattatcaaaacattatcaaaggggcctagatgattcacaacccttggcggcactaatccctcaactaattgcactaatccggcacggagttcgtctgtccacggcggcgatgaataccggagataaatcgtggtgttctaggcgatttaatgtggtctagttcaatcaaattgttctgcgagtaacaagagacttaagggaggctagaacatcacacagaagggcatgaactaacccgtacacgactggccacgacgagatgtctcacggcggcgttccgaccgatttgggggaaatacgaaattgggaggctctggtgaacgattagaggcgagagctagtgctttggatgcgtaataacctagcagagctcactaaggcatcaatttatagagtccatcagcggtggcgcccaattttgagaagatgcgctggcggccggagagaggggaagttcactgacgcgagttaccgtggcattcattggcgtgtcgactcagaggacaggtagg

SEQ ID NO: 76243 - DNA, 616 bp, Zea Mays
agaaaaagaggaaaattgcttcttcggtcgcgccggctgagcctgtgccgaagggcaaaaaggtgaaggttctaacccaccggtcgcgttacattgaactggcagtggtgcccgactttggcgcagggtcctcttcagcagccaaagcaatacaaactgcttcgactgcacagggcgctgaaaaaccaactgtaatgccaaagacgcatatagttgagccagtcgaagataaagttgaaaaggctgaagagccgaagattgacgaaaaaatgccaaagattctgagccctccgatagaggcaaatctgtcgaagatgcaaaaaacttctgttgcaactcctaagagaagaaggatggccaacgtactggatgcagtgctggatactacaaaggcattgagccctgctcctgcaaagaaagtcgctccaactgaaaccaagacgtaggccgaagccgaaactagtcaagcagaagttgaaactgtgcaagttcaagctgaagccgaagctgggccttcagtacccaccgagacagagcctaccgcccctgaagaaaaagcagcagagcaaattgctcctgaagtgatcgagaatcctgccccgaagctttgatcgaa

SEQ ID NO: 76244 - DNA, 310 bp, Zea Mays
ctctgccttcgtataagtccccggcagctcatcactggtcgcctcaatggcttcaagacattcgtcattcgactcgcaaaattgacttttgtagcgatagctatacttcaggtaaatcagaccaccttcactggaaccagcagcggtctccttcgacatctcccagtcattaacaagaggccataccttataagcaatgtgctcctgaaccaaatctttggtgccaatgtaagtgcacactgtgttgaaggccatcaaacatgcttgtgcttcgtttccgcctgcgatcgaaggcctcctgatgccgaag

SEQ ID NO: 76245 - DNA, 611 bp, Zea Mays
tcgggtttgtctcactgccgcgcacagagagaagatcacgggtttgacgtgtccaaggcacgcgtcccgatgccatcttctgatatgaggtagagggattagttaggcacaattttgtcaatgaggtcattaggaattgagctagggatcaaggtgaacacgctcggtctttggatcaagggctgaaattcagaattctgaatttcaaaaatccctattgaaccctcacttgagaagcttgtttggagtttttattaaactattttggccaagcttccataatctttattgtagcttatttagtatatttcaatgtttatatttggcctaagccatgattttatatttttcatggtcttttaccccttttcttcatttctacttaaatagcttaattagggttggtattagggtttcaacacttttccctttttgaaaaatcttatttgtttggaacatgattctttagatatacacttagtagatcttttcttctcaagttaatttgatgcttcatgcttaatttggctcacataaaatgttgattcttgggttagcactgagagaaaccctagttgacactgggtgtcacaggattgtcctcaccaaca

SEQ ID NO: 76246 - DNA, 370 bp, Zea Mays
gaaggctaagacgatcgcaactcgatggtacgtgcagagcacgtcggggacacgagtgattgctcaggttcgggccgctcgaaggcgtaataccctacgtcccgcgattttgtgtctatgtgcttttgagttctctatgggttacagatggtgtctcgaggaagaagatgagtacaatattcctatatcatttttgtagggtccccttttcagccttattgctggctgaattgaagttacagaaaactaccacgagtccacgatctacatgttttgcttgttttgcctcatgttgcgcttggccacagtcaaatgaatcgcccgtcgattaaccgtgcattgcacgcacaggacatgactgacttctcac

SEQ ID NO: 76247 - DNA, 1201 bp, Zea Mays
cgaccatcggatgtgaaatatacgatcacgatttaacatagcgaagaggtaagatcgatctgatcctgaccattacttcatagatcgacggtcgcccacgtgggatgtgctcgcctaatcctgaccgtttgatcatcaatccatgatcaatacccagcgcacgttaatgaccccacgatcctagatctacggctagtcctttctcctctaccccacacacgcccggcgctccccccagacagcgacggcgacggtacctccccacggcggagcgccattgccgcgattcggcccgatccacgcagtaatcaagcttcaagtaggaactgctacacgatatagagataagggagagactagcagcggggtcctcaccgagattcgccagcacaggagggctgccaatgacacaaggtggtccatagcggtgcccagtaactccggcgaggaaatctacttcaaccagccatcctcctgacttggcacggccctgagcgcctccctggtgacctggtgaggttccgaaccgacacctgagagcccgttgctggcgtgaatccggatgggagcaaatatggcggccaccatggtcggtgtgataggagaaccgagcagaggataactcgagctcgaaggacaggggcgtcgagcatccggccatgggatgggcaaggtggccatggagttcttgttttatatcccaggcggacctcaacaaccccagcgatcccggcggccggccttctctccctctcggtctcttcttccgttcacagctgaccgcacggcgatggggggggggtcgcgtccagaatttataccagaggataggggcaaggtctgagcggaaaaggaggcggtgaccggtaagctcggcccgggatctacgcatcgagatgaacagacaccaagtctgttacggcgacgttgaagatgaccctgacaggcggccccatacggcagtgacacagttgtgtgggcgaaggggatgcaggcgctgggttggggttttgggccgagagcgcggctgggctaagtggcgagttgggccaaaactgaggaatccgacccaacacaagtttttctcttttctttttattttctattttatttcccattcatttcaactattttaaatttaaatgagttactaattcaaatatagatgccaccacaaggaaaatccagcatgtgactaaac

SEQ ID NO: 76248 - DNA, 438 bp, Zea Mays
tagaacacctgtgaatgcggtagagtaattcacatgcgccgatcaatagacttcacatgcgccgggtgaaggcacgatgtccaatcaatggacttgaattattgaagcaaaattttattacaatacctgatatttaccggttgtagaggaaattcacaggcgcggtagaggaacaaggaattcacatgtgcggtacaggaaataggcggcgacggcgcatgcaaaataaacgactgtcgattgactcgcatatgggctcaccaaggcgtgggctctaaaccatgggctgaacaaggaatgggctgtgaacgaatatggcctgtgaacaaatatgggctgaacaagccatgacctagtttaaaatttacgtttatatttaggtgcactattaaatatacatatctatatctatactaatctattaaggacttgtttggg

SEQ ID NO: 76249 - DNA, 386 bp, Zea Mays
cggacatatagtccgtgtaaggagagggcgagggagatatttagactaaggtcatgtctgtgaacatcaccaaataagaatacagaaaccctcctcctatcttcacccttcccgagctatactttcctctcctccgtagccgtcataattggtcgttaacagtcgcgtccgtgtgctcgtgccgtcatgcggctctccccactcccctggcctcctctccagctgtccagaaggcagcaagcaggctaggatgattgccaccagggatgggactattctcctctgcatatcaaaatacacgcctaaggccagaacggattcctcattccctgatttatcagattggttaagaaatgtaatgactaatgttggcttttgatatggag

SEQ ID NO: 76250 - DNA, 301 bp, Zea Mays
taaaaatgctgcataaatcgatacctaatttcagagcagtatgagtaattgggtaaaccatgggcagtgataaaaacgagctggactatacatctatgcatataaaaatatttgcttggcagcattggcctgatgccgtgcactttactaccattatctacacacacatttttcctatgtgcttaaaagcacaatgcaaccagtgaatgtctttgtgagcgttagaccctgatgaccattttacttgttgatctaaagtcaactaatggcttcaaacgacgaatggtatgcatgagcccct

SEQ ID NO: 76251 - DNA, 589 bp, Zea Mays
cttatctgtactagtctttgcctcagcttgctcggctgagggtgccttcggcatggtggccggttcttcagccttctgcgtagaaggaattggctcctttggagcaacatctgaagaagttttcccgccaaactcgggcaccactgccggttcaatataacggggccggtaggtgaggactttcaactttttactctttggcgtaggctcgcttggagcagccgaagcagcaacctttctagaggttgcaccctttcttttctgcccccatggcgggtagcgatagtcagggtacacaaatccaatagcatcaaaaaccctatttaatcttttcttttttcggctcccaaaggccacagatagtgcattatcttcggacttggaatatgctccaagtaactcatcgctagtattttcaacacacttcagccagtcatcatctggttcgacaaactggtctccaaacctgaaggtgtatttcaatcgaaccaggccaccttcgctaggattagtgatggttttttcagcatttcccagttgtctgtcagtggccatatcctgtaggctacatgttcttgaactaagtctc

SEQ ID NO: 76252 - DNA, 567 bp, Zea Mays
tgcatgtcgacttcatgggcttcagcttgagcagatagcttggctttgctggctttcagtttctcaaccaatgatagcaaaatctcgtcttttgtgagagcttcgtttctcagggttataaccaacctccgatcggagtgctattcgacagctctcatcctctgcatccttttgggcctttagagccttgcttagaattaagccctggcaaacgaagattgaacaaataacgacgataagaattaccacaaaaatagtttaccataacaaaaattacaaaatgacaacccaaagtatagaaaccttcatgttgttgtaggcaaggctatctgcaagctgatccttcgtcatcacagacaagccaagttcaagctttggataccccatgttatccatcatttcatggcaaacattgacatccttactgtctggtagacagtagaggaagacatctttgttatctcctccgtataccaaggatcccttggggtatttcagctccttagcataatgtggagtttcggcaacttgctctgccgatagctgttttcctgaagcatgtcgaac

SEQ ID NO: 76253 - DNA, 383 bp, Zea Mays
atgatttggaggtacattaccatcctggcaaggacaatgttgtggcagatgccttaagcaggaaggcccagtgcaattgtatgaacatggatgcaagagtcaccaccctatgtgataagttgtgtaagctaaacctagaagttgtttcctcgggtgctttaaattatatttccgtggagcctaccttacaggagcaaatagtcatggcacagattggtgacaagggtgttcaggtcattaaggaaatgatcaagcagaaagcagaaaaatacaaatgcttccgttaggacagcaaaggaatcctatggtttggagaccgattggttgttcccaaaaaccctgagctcaaaaaaaagatattggatgaagctcacctttcaaaa

SEQ ID NO: 76254 - DNA, 523 bp, Zea Mays
tagaaattgagatactcaggatcttacttaagtctctataaatccaatccaagagcctagaacatctatgatgttggaatcctaatctaattgagaggttaacgatcataccttcttggtttgcgttgatggcggctacgatgatggtcgaggcgtcggcttgctatcccccttgagcggtttcattctccttgcggttggggaggtggatccactcctcttatgttgttctctgtgtcatttacgtgtgacattagatcgtttgtgcttgttgtcattgcggtcttccagtcactacaagcacctacgcgatgggggcctctgtcaatgtaagatcagggtttaggcaaagctaagcattggcttaacccaacgtccctttaatcctttatacgacacttgtgtgaccggccgcaaccatggttaaggtgtcccccagcgcagcgcgtgattagagaacattctaacaaaaaggtgcagatgaagtgtggacagcgatcgagccaagaatcaacgagtttgt

SEQ ID NO: 76255 - DNA, 419 bp, Zea Mays
gcgaagctgagggtacgctcaatttataggattcatgagcagtggtccgtgaatttgagatgtcacggtggcggtcggagagaagggggggcactggcgcaagcaattggtggctttcaccgtggcgagctcaccggcgatcaccgaatatgtgtaacccgagctattgcgacgtggtaagacaccaaggcacgtggcacacgatcattgagtggctaacgccggcgaggatgatcccgaccagctgttgttcaatggggtacagcgggtgcaaaggtgagcgagtccaagctaatccgagcaccaagatttttacccttcaccgttatccatctgcgctgggcacgaatcaccgtggagggcacgaatccgggtgcacagtcgcctgcgatgaggcatctgaacctggcatttctgat

SEQ ID NO: 76256 - DNA, 500 bp, Zea Mays
cgacgatcccccgctcagattcgcgctggccgtcgtgattcgtgccttggatgtatgtattacgctcaatggtaaaaagatctcgtcgcggatgaactcgagacactgtggccgctctgtcgctcgtccacttgcgccggcgacgtggccaagcaaccgacgtcgaggtatgcgtcgtccatcgtgatcgcgacacgctatgaccctttaaccacatcatagtgaatcaccttagcccacccattcatcgccggtggtcttgccacggtaaagtccacgaatcgcttgcggcagtagcttcttccctctccgaccgccagcgcaatctcttccaattcaacaccactgccctcggatcctataaattgagcgtgccatcggctccgctatgtagtcaagcgcccaacgcacccacccatgcctccgattatccaccagagagccccaatttgagacttcccccaaattaggccagaacaccatactaagtgagctcgtcg

SEQ ID NO: 76257 - DNA, 959 bp, Zea Mays
gagacgaggttacgcgcgtgatgagtttagtaaaaatccatcggtgtcactagtgttaagttgaggtttatttgcgcgtggaaagtaataatatgtttaatacttagaactcttagtcgagagtagaaattattttggcttatatagagaggtggtgacatgccaaagtagtcgtcactttcactatatttataagtcgagtcgagtcgatgcgtattatgcgttcgttaaattatgcttcgcatatagtgtgtgattgtgctcacaaattcgagtagacacttcaagtaagtcaagtaggtttgtggtacaagttgtgtaatggagttaattgttttagaataattattgaaatgctctgttcgtatgataaacatatatatgttcatgattgggaagtaaatgcatggtgattgcgagttggagactggtagtttacgatttatatgatttggtcggtgtgcgaatatacttgtgaatctgtgcgtttataaaaatgttgtagtatatgttgtgtctcggattgcggcgataataggcaagctgacgtgtatgttatttagcggctatgtcgttgctctagttagccgaattgttagatgacttggttaagctcgtaatcacggtaaattgcttgttgtagtccaaatgcgcatggttatggtcgcgggtaaaattagtggtgctcatgtgatgtctaagtgaaaatacaaattagtgtgtgaagggcgcaattgatatacacatttataccagggttgattattatggtgaatgtgtttgctgattgtgtatggtaattctggcgcacgaaataacttgtataaaattagtaagtctacttattagtcatcattcgattaatttaacgctaacaaatggtaaagtgttaaattggtttgagtctctagaacgcggcaattcttaaagtaaataggagctgaaattattaattgctg

SEQ ID NO: 76258 - DNA, 422 bp, Zea Mays
agttgggctatcagtctgtctgaaacctgaaattggatattcagtgacatgggatgaactttaggggccattttgaagatgatcccgtggatatttgaacatggtgactatagttggtttatagatggatcattagacaacaactttgatactagccgatcaggaagttgccatatgaatttaggagaaaatcaagctcaaagttagtctattaggtcaactgaataaactacgccatggtacagtgcactaaatatctcaggcttcagtctctcgccgccgacgatctgtgcatccggattcgcgccgctggtcgtcgcaattcatatcctgagctagtggattgtgctcgacgtgaaaagatcttgcctggataaacacaagccaccgcggtcactctgccttttgcccacttgcgccgg

SEQ ID NO: 76259 - DNA, 387 bp, Zea Mays
tcgatggccaaaccatgttggcgtcactggcctggtggtcaagacaaagtgttcccatgtctcgatagcctttgatgcaagggacgtggacctccgtagtgctccacactcggatgtaatgtcataaactgcaatgtggtaggatgggacttgcacaaggtgcttatcgataatgggagtcaggctgacatcatttttcttcatgccttcaaccgcatgggcataaaccacaacctgttacaaccagttgacaacaccctgtattgttttggagggaaggacacttttcctctaggcaaaatcaagttgccattatcgtttggcacaaccctcaatgcaaggacggaacagataaccttcaacatagtagacatgatctacccttac

SEQ ID NO: 76260 - DNA, 392 bp, Zea Mays
gccaagatgaatagggaatttgttaagaagaataaggttcctccgcccaagaaaatggggaaatcactcaagctcagtgggaggaatttgttcgtcagaagaccgaactgaaggccaaagaactgggcgaaactaattctcagagagcgaagatgaacaaacaccccccatcgcctggggtcaaccggatatcaccataaagttgtgcagtggaacaggataatcgaggaagctatagctaacggcactttggacccaatattaaaagatatcgatgagcgagctatttgttggatcttaggttgggcaggattgagtgaggacggcaaacttttgcatccagaattggtaggcaaagtttcgacaaaaattcaagaatatgcagataagag

SEQ ID NO: 76261 - DNA, 4509 bp, Zea Mays
attttttgttgctaacagtttaggctcgtatagcattggagcatgatgatgattattattattattttttgttgctaacagtttaggctcgtatagcgttggagcacaacattcttttatgcaaagtagcgctttaagaacttcccatttactggcggtggacaatattcgccatccggagatatgatccgataagcgctgctagagtatacatcttttacaatgtacgggccttcccatttaggttcaaatttgctttgcatcttatgagtaatattcataggccgaattaccgcgagaaccaaatccccttctttgaacgacctttttacgcgtttgtcaaaagctcgagacattctagcttggtatgcctctaagttttgcaacgcacgtagtcgtgtttcttcgaggttgtctagttcccttaggcgtaatttcactgactcgtcttcattgagcttttcttgaataacgactcttaaagaggcaatttgcacctccaacggcaggactgcttctcctccatataccagagagtaaggagtcattttggttggcgtccgagtcgtggttctatatgcccacaaggactcgagtaacttttcatgccaatgtcgcttattttgtgcaacgacctttttaagcaacttgcatagcaccttattgaatgcttctgcttgaccattagcagccggattatagcccgtggagaatgcttgatcttgaatttggcacacattttctctattttgtaatttttgaaagatgtcccattatcagatataattcgagctgggaccccgaaccgatatataaggttcgtccttataaaatcttctacattttcagctttgacttcttttagtgcaacagcttctgcccacttagagaagtagtcggttgcagcaaggatgaatttatgtcctttagaagatggggggtttattggcccgactacatctattccccacatttcaaagggccaagacatattggttgggtgtaatggttcgtggggctgatgtatgaagttgccatgtatttggcattcatggcatctttttgcaaatttcatggcatcgtcgaacattgtaggccaataataacccaaatgtcttaattggtagtgcaacttgggcccagattggtgtgcgccacatattccagaatgcacttcatttaaggcttcgatcacttcgctaccagcaaggcaacgaagtaaaataccatcacacgaacggcgataaagggtgtcatttatgcatgtataatttaatgacctctttcgaatcctagacttttcattagaatccagtggtagatatccatgaagtagataatctaagaaaggtgttctccaatcgcctgtctctatttcacatgtttctatagtcataactgaagtagatggtatatcttcttcctcagcaagtattgggagaactcttcgttcttccacatgaacgtctatattttggtatggatttagtgacatgctagcagccaagctggccaacgcgtctgctttctcattttgacttcttacaacatgctgaattttcaggtcagcaaacaaagccattaattattttgcccttttaaagtacggtaagagcccttccttttttaccgtgtatgttcccaacaattgattaattattagctgggaatctccatatgccaggagcttgtttaaacccatattgtgagctatttcaaggccgataattaatgcttcgtattcagcggcattgttagaaactgccgaggttagtttgaaagaatatggaagtatcgcatcatcaggcgtgacaaacacaattcccgcgcctgctcctgattttcggcaggcgccatcaaaatacatttgccatataggattcactaccatggtggtgaagactgcttcatctggcaaatcatcatcgatggggaaatgatcaggtatgggatgtgcagctagaaaattagccaaggcttggcctttaacagctttttgaggcacaaacacaatgtcaaattgtgaaagtaacattgcccatttagccaacctacctgataatgtcattttacttagaatatgtcggagtgggtcagctcttgagacgagatgtatagtatgttctagcatgtaatggcggagcttttgagatgcgaacacaagtgctaggcatattttttctatgtctgggtaattgcactctgccttcagcagggtgcgacttaaataatatagggagacttctttcctatcatcgttggtttgtgctaaaagagcacctagcgaagttggcatcgccgccgtatagaggatcagtggccgccctttaacaggtgcacttaagacaggaggatttgttaggtatttctttatatcatcaaatgcattttgacatgcttgatcccattgaaatgggactcctttcttcatgagcctagaaaagggcttgcacctcccggacaaatttgagatgaacctcctaatatatgccaagtgaccttggaggcttttcaattcgtgtaaatttgttggttgaggcatgttaacgattgttttgattttggttggatcaatttcaatgccacgcttagtgactacaaaaccaaggaattttcctgaagacaccccgaaggcacacttcataggattcatttttaatttatgctttctaaggcgctcaaacaccatttccaagtgctttaagtgatctttctcacgcttagattttacgacaatgtcatctatatagcactcgacaatcttatatagcaacccatcaaggataatggtcatggcacgttggtacgtggcgcctgcattttttaacccgaagggcattactttataacaatatatgcccttaggtgtgcggaatgctgttaactcttcatcttctggcgacatctttatttggttgtagccagagtaaccatccataaaggagaatatttcatatcccatagtggcatcaataaggatttcagagatcggaattggaaagtcatctttcggacacactttatttaaatctctaaaatctacacatacacatatcttcccatttttctttttcacgggaacaatactagacacccatttagggtattttacttctcgaataaaactagcagctatgagtttatcgacctcagcttctatttgtgggagaagttctggccgatatattcttttcccttgcttcacaggaggaacatcctctctaactgctaatttatgtacagccaccgctggatctaggcctggcatttcttcataagaccaagcaaatacatccctatttgcagcaaggaatttatggtattcttccttactttctttagataaatgtttgctaatgaagattggacgaggatcatcatctgtcccaatattaatttcttccaactcgtcaacagttggttgatttccatcttcaatctgtgaaggtgcttcagtagcatcaagaggtttggtggaagtcatattaacttcatagcctaaaccatatttctcttctttcaacactccatcttggtgtaaggcgttaaactgagcttgggacatcagcttttcgaaaggtgctagctgcccccggccgtcgcataaagaaggaccggtagatatatcatatcccatctgttgcataatataaagaactttgttatcatataaagagatgggtaatgctttatcatctctatttaagaaagtaacttgcgcagccattttgttatttttattatccctttcagtttgggcttgttttattttatattgcaccaaaggaggtaagggagttgggaatgaaatacctctattttgagaggcctttttatttataatgcgaaatatcggatcacctttcttcctttggttgcttggtatgtatcggtatattttttggcttgacgaagactcgtcatcttctatctttggaaagttttgttccaatagcaatgctgatgttggctttgagactttatcaacaggttcaaaatagaactttgcgtcagcatagaaagtttccgctatagtgaatggcttcttatccgcgaagatccttactatatcccccgactgatctttgtacttgatgcattgatgaagagtagatggaataactccattctcatgtagccacgggcgaccaataagagcattatatgaagtggccgcatcgatgatgtgaaatttcacatatgtcgtgaaatttttaagtttcagaataaggaatatggtacccaatgcttcttggcctgattgattgaagccatgaataacaacatttgatcgacataagtctcccttagagtaccctatctttttcagagttcgcaagggtagcaaatttatagctgaaccaccatctatcattatgcgattaatggcgagatcatcgatttcaccaaacatcaggaggggtctattgtgcgttttatttcctaacaataaatcctcatcactgaatgaaatactttgagtttggggtaatttcacttccgcttgcg

SEQ ID NO: 76262 - DNA, 667 bp, Zea Mays
caatttggcgtgggtggccatagcgatcggagaattcgtcgccggaatcgcgccttcgccacagacccgctacccgccgtggccaggattccctgcgacacacagtagggtaagactacgttcatcgcgtttatctttcttaaggcatcattttaggctgctaggatccgaagcgtgtccgcggtttggagatttggggcttgccagtcatggctccgccgtgcctgttggcagtttgggaagatgatgctgaggccgctagatcagtagcaggcggttggggtttgatctgggtcagagagactatggaccgttgatctgtcggtgtgtggcgtggattagacgggcgatacctcttcgcaacattaaaatctgtccgtagatccgttgatggacgcttgggatctggtgtaggcgtggctatctcgggaagcctcggatcatgatccggtggttgtgattcagtaccgtttcaggggggatcagttttaatctaggccgttagaatctgatcggacgacggttgtgcgatcataccccttcgcgggtcaattttgctaaagagcccccgtatttatacttaaataacctgccattcgcgcgactgttcctgtgtctggattattttgcgccggggcccctgacctttctggtaaatgaggcccag

SEQ ID NO: 76263 - DNA, 663 bp, Zea Mays
ctaaagtttaattgtcagactgtcttaagtctgaattcagactgacagtgtgtttgagccatctttgagcttggattcgaccataatccagtcagtaattggctatggttgctgtagtaagattgtacctggatcattaggctacaactttgctacagaatgatggccttgttgccatgtaaaatcaggagaaaatccagcccaaatttgatctgtcaggctgaccgaatagaggttccaatggtacagtagcagaaaaaaatctcaggtaccgcgcatctcgccgccggcaccgatccgcgccgtgatttgtgccgtgatccggttaagcgctcgacgagcatctcctcacgacgatattcttgatccgggtaagatcaccgtggtggagggtaattgtgacaccctagtgtcacctaattaagcatgaagcatcaaattaagcatgaagcatcaaattaacttaagaataaaagatctactaagggtatatctaaagaatcatgctccaaacaaataagattttcaaaaagagcaaaatgttgaaaccctaataccaaccctaattgagctctttaagtagaattgaagaaaaggggcaaaagactatgaaaaatataaaatcaaggcttaggccaaatataaacattgaagtatactaaa

SEQ ID NO: 76264 - DNA, 793 bp, Zea Mays
taccaaaactatacaagccatctatccttatgttgctctctttggcaccattccttcctatgatcatcttcaggtctttggatgtgcttgctacaataacatcacttctacggcaccacacaaattagctccccgctcaaccaagtgtgtctttcttcgttattcttccaaccacaaaggttatcaccgtcttgatctctccacaaatagtattatcatttcccaccacgtcacctttgatgaggcagattttcccttctctgcctcgccccatctaactaacaacttggattttttggatactgagaatgcgcctttgtcccctcccattaggactttgccctttcctgcaggtaccatggcgtcccctttggtgtctggttcaggttgacccagtggctcatctaaccagacccatgctactcacgcccgtcacagcctctgcacctcatgcaccgtccctgccatcacctgaccgggacttggtgccttctgcgacttccccgacgctcccctccgcaccaggtggcctagccctggcacctggagctgctccgacgcccctggtgctcccctctgtgcctggtggtctggcaccagcacctggagctgctccgatgcctcagcctctgcgggtgtacactcgtcggcgccaacagactacctcccctatagatctcccagtggctggtgttccagcggctggtgcctctggtgcttctttgttgttgactgagtttgcacccataccatcgccaactctaggtcttcctctcggcgccattcctacacc

SEQ ID NO: 76265 - DNA, 776 bp, Zea Mays
cgtgagtgaactgtccaaacataggttaaggttgtaagacaacttttttccaccatacagttgctaaaagttggaatataaagaattcaaaacaatagatcaccttttaaacctcaaatgacgtttctatgatattgtgggcattgtattcacactagagggtattagagtacaactagtggatgaagacgttattgggctagctaatgaccttttgtgatacctagtttccaataatctcgtctattcattgcatccttagatggtgtttatgtccactcaagtaaaacaccacacaaaaatagtgtttctatgatattgagggcattgtattcgcacgagagggtattagagtacaactagtggatgaagacattagtgggctagctaatgaccttttgtgatattatgttaactataatcccgtctattcatggcatcattagattgtgtttatgtccactcaagtaaaacaccacatatcaatataccacatcgtttctcaaaataaaataaagactatggaaaatttagccaaattgcgtgagtgaactgtccaaacataggttaaggttgtaagacaacttttttccaccatacagttgctaaaaagttggaatataaagaattcaaaacaatagatcaccttttaaacctcaaatggcgtttctatgatattgtgggcattgtattcacactagagggtattagggtacaactagtggatgaagacgttattgggctagctaatgaccttttgtgatacctggtttcca

SEQ ID NO: 76266 - DNA, 440 bp, Zea Mays
acgggactccgaatcggcaaacaatgttttgccagaagaatttttgggtagtcttcgatgttatcgttgatactgctcttgcctcgatccacttggtgaaatactcgacggcgacgaaggtgaacttgaggttcccttgggccgtgggtagtggcccgacaatgttgaggccccagcgctgaaggggccacgtgtgggcgattagctttgtgaactgcgaagggcttcccgagcgtggagaaaacttttggcaggcttcgcacgaccttgtgacccgattcgcggcatagatcatagcaggccagtagaagccttgacggatcaccttggcagctagggccctaggccccgcgtgagagccgcaaattccgttgtggacttcacgcaggatctggacgcctttggtctcggtgacgcatttaagcatgggttgactgact

SEQ ID NO: 76267 - DNA, 313 bp, Zea Mays
tcctggcaaagccaatgttgtggcaaatgccttaagtgggaaagcccagtgtagctgtgtgagtatggatgcaaaaatcaccaccctatgtgatgagttgtgcaagatgaacatagaagttgtttcctctagtgccttaagttatatttcagtggagcccactttacatgagcagatagtcatggcacagatcggtgacaagggtgttcaagtcattaaggaaatgatcgaacgaaaggtggacaaatacaaatgcttccgttaggaccgcaagggagttttatggtttggagaccgattggttgttcctaag

SEQ ID NO: 76268 - DNA, 784 bp, Zea Mays
tccactcgttagtgattgcatgtgtaggatgaagaacgagggtccaggtgttgttagcgaccaaagcatggaaatcctctttcatggtgcggtgccagtgtgagtcaccaagggcacataaataggttggggcaccaaatatatggttgtcaacgtgagtaggagcttctgcgggtggaaaccagtcttagcatgtgtctatataccatcgagattgttgatgggaagggcagacactgcatcgggttgtagcagaggtgcatctatgcgtagtacgcgcattgtgcgaggctagttagggtcatctaggttttgtgcggtcggccctattgaagtagtcaacccactgaggtaggggccaatggatcgaatggtggaggtagccgtagtgcccatagcacctaaggtgcgggcaggcggcctaggcatgtttgtcaaaggaggtggccctttaaatgtgtggggaaggatgccatgcataggtgtaggtgatctggtcagagcaattggtgacggtggcctgcaagtatctagcccaactggaggatgggcatattactcggtgggtgtggtatcatgggcctagacatgtagcggtcaaacaacaacttctgtcatagaacacttggaggctggtagggcaccaccttctgatgctatggcggttgcaagggggcactattagggctttaagcgctcactggatagggagcatcgaatctcggtgtgggaactcatccaaaaaatcaaagttatggtgtgttgtcgaggtgaaggcctcaac

SEQ ID NO: 76269 - DNA, 452 bp, Zea Mays
gtgatgagcgaggcaaaggacatgagacccgtcacgatagccgggaggatgtccagctcctcctacaaccacgtgaggaagcaaaggcccacctcctcgctagacgagtcaaaaggagcggtacacgcaccaagctcgtagtacgcgtccacaagcaatttatgtgctcgatcgacccctatgcgagtggaggtctccgccctgtccagatatccgtgaagactcttgtgccccgactccgcgtcggcagcgcgctggagagcgaggttggccttggcacgagcagcctgggtctccgcgtgggccctatcacgggcggcctgggcctccgcacgggctctgtccgtgttctccttttttgtggcaagttggcagccgaggtcctctttctcagcctccaccgccgacaacttctcaagcagggtgcggctcttgttcttcgctgctgattt

SEQ ID NO: 76270 - DNA, 720 bp, Zea Mays
gaagaagacatgaagatggtggccgctggttgattatttaaagagaaaacgagatgattgtttaggagctaattatttttttatttgatttctctgagacaagagctcttgtatgagttgtatattaagacgggggcaatttattggttggagaggagtggtcatccgttagccgattcgcgcagcgctcactcgttggctgggaccgacgcagggaatggagcgaactgacatacggatgaatgagaggccactgattaaaatgaactgatacatcttatttgggtgtcgcttggaaattaaattctcgtgcacaagtagaataaaatgaatcgaggttgatcggcttcggattcggcatcgaaataaaacgagttggattaaccaaaatcattgccaatgttgattttcgaatttagattggacacagagattttaagccgagttggataaaaatttattagagaacgacacattggagattccgcttgagaatacggacttagattaatttttggacatagatcgaacatcgagaaattggattcggacatagatcgtctagcaactgtcaagcgtttgattaattgagctttagacgagatttataaatcgagattgattatcaagtttgcattcgcgtcgagaagaaaagttttaacaggctccaaattcggcctttctagagattgaataaaatcagaaatcggtgaaaccttc

SEQ ID NO: 76271 - DNA, 353 bp, Zea Mays
gtcgcagtaatgtgccttggcgtgttcgatcatcgccggtaaccttgccgcggtgaaagccacgcacctcttgcgctagtgctctcccttctcttcggccgccagcgcgccatgccaatttaagagccaccgccctcgggtcctataaattgagcataccatcagctccgctaggtagtcaagcatccagcgcacccactcatgtctcggattgtccaccagagagctctaatttgagatttcccccaaatcagtcaagaacaccgcagtgtgagatctcgccgtggccagctctccacaggtccgatcatgccctcctcactcctgttttagcatccctgtgtgcttgtgat

SEQ ID NO: 76272 - DNA, 407 bp, Zea Mays
agggggttgtttccaccctttcaattcacttcgatacatcagttgtcttgatgcgcctgggtctacatgtcaaaaccttgattttctttgacttcgacacaccagtagatgccaaggcagcggctttccttttcctcccttgcttttgggcaggatagcagtagtcccaataacatcaaatactctattcaacctctttttgtcgcgagcgccgaaggcagccgtcatagcttcgtcttctgccctcgagtacgctccaagaagttcgtcacttgttacctcaatagcgtccaaccaatcatcatttggttcatcaaattggtttctgaactgaaaagtgtactctagacaaaccaggccaccctggctagagccagcggacgtttccttcggcatctcccacttgc

SEQ ID NO: 76273 - DNA, 1198 bp, Zea Mays
gcgggggccgcagtagcgagagggaaggaggactcgtcgaaggtgacatgtcgagagattatgatgcggttggtggcaaggtcaaggcaacggtaacctttgtggttgttggagtatccaagaaacacacagagagaagaccggggagcaagtttatgaggcgtggtggcagagagattgggataacatcgacagccaaagacacggaggtgggtgtgtcgggaggagtaccgtgcaaggcctggtaaggggtggaaaaggagagggttttagtggggtgatggttgaaaagataggtggaggtatgaagagcctcaaccaagaagacaggggggagatgtgcatgaaaaaggagggaacgaataatggtgtttacagtccggaggacacgctcagccttgccattctgctgggacgtgtatggacaggacatgcgaaggataacactatgggagagaaagaaggcgcgtgaagatgaattgtcaaattcatgaccattgtcacattgcacactcttaatggtagtacgaaattgcgtggcaacgtaggagaaaaagtgagcaatagtggagaacgtgtcggatttgagacaaagaggaaatgtccacaggtggtgcgagcagtcatcgaggattgcaagataatacttaaaaccagacatactgggaaccggagaggtccagagatcacaatgaataagatcaaaagggtaccaagcacgagactgggaagaggaaaagggaagacggacatggcgacctaactgacatgcatggcagaggtcagcattattgatatttttattacaagtaatggaagcagtgctggctaagcgggagagggcttcagaaccaggatgaccaaggcgttggtgccattgctttggagacgcagtggtgaggaagccagtggcagctgttgaggggcgaagcgggtagagggggccagagctattgcacctggtgatcacgtgttgggtcctgaggtccttcacagaaaaaccaaaggggtcaaattcaacagagcaagaattatgatggtgaattgacgaacagaaacaaggttggtaataagtttgggagaaataagaacattatccaggcgaagttggccaacggacgtggagccaatggtggttacaggtaatggagcgccattgccaacaataatagaggatggattggaaggggagggtggg

SEQ ID NO: 76274 - DNA, 684 bp, Zea Mays
gttgtgacaccccagtgtcaattagggtttcttccttaagctaaccccaaactattatcacatgtaacctcaatgaaggaataaacataaaaaatgagaacaaagatttataatgagtcttctcaaactctccttaatcttgtcatgaatcctaaggaaggaaaactcataaaccctaattaatcctaagtgaaccatttaagcataaagggtaattgggagaaaatcttgggagaaaaatacaaattttggtaaaaacaaaattacaaagttttagttcactaattaactaacaaagcatagtaagaaagttttgccatttgaactttttaaaatccccaaaacagcccctaaactaatgcacttagggggaattcagaaattcagaaatctgagtttcagctcctttccaaagatcgatcgcgttctcagtttttcaaaactcaaatcaaacaagtccaaatatcaaagtggcgccaaattcccttgaacacgccgtgacaaagtttggaaacctctctccaccgtttgacacacccttgacatggttttacctcgggactcaaccttgtgacactgccacctttgtgacacgacaactctctgtacactgccccaaaccgctcgacttccacacacaaacgacaaagctctgtcgggggagcaaatcttgcgcagtgatca

SEQ ID NO: 76275 - DNA, 737 bp, Zea Mays
gccacggcggagtccttgctgcgcgtggaggttagcgaggtgtctgatcctcctagtgcgaggaccaagtgccggcgacgaagggtggtgtcgaagcatagcgttggtgaggtttcgcgaagtggtaggcaccgtcggatggggatggagtgggaccgtcttagagtagatcggtttggtaaacgagagttgatgtcttcgccgattgggacgagcattggtgagggggatctacggaatctttttgagggtgaggaattgaaaataatgttgttcaattatagggaggcaggcatcatcccgaaggttgagccgatgtagtatgtggtgccctcgcgttgtccggcggtaatggagggcgtagttgtctttatttgtgcggtgggtctagtgaccattcgctgagtgtatgtaactgcaacttgtattataatgtggcctgatggccttctttgagtgagatacttcgtatcacacacttgttgtgctaattcggctgcacccttaggcgacttttgcacgaggtgtccttttagtaaaaaacttcgtatcgcgcacttgttgtgctaatccggctgcacccttaggcgacttttgcacggagtgtccttttagtaaaagacttcaattgacgcacttgttgtgcttatacggctgcacccttgggcgacttttgcacggagtgagacttcgtatcgcgcacttgttgtgctaatccggctgcacccttaggcgac

SEQ ID NO: 76276 - DNA, 788 bp, Zea Mays
ctacaaattaaacaagttctaacatttatttatgcattaaaaactaatttctgatattaatttctgattttcaatgctctctccattgggcctcaaattctggaaaggtcaggggcttccgtgcaagaatttgtaagaccctgcggactgttcctgtggaccgccggttggtttctgagtttcccgagggctctttagcaaagtgtacaacacgaaggggtatcgaaggatctcaaccgcacgatcacgcactcgcggttgagattagaccttgaaccagctctcaaccacgcccctccgatctacatcaacggtcaagattttatttggccgagatcagcacgcatccgtccgatctggcgtcaacggttgggatacaatacgtaaaggggtatttctacctctaatcgtggtcgttcgctacatgatcgacggccgagggccgtccttcttccttgctctgttctcctctccccgacggcgcatcccgctgccagaggactactccggcgacggccaccgagctcgatactacaccataatgcaattacgcggtactacacgcacacactgcaaaggcgattaggtcggaagctcatttaccaggaattaggtgacggttgtggctgcccacgctacgcgcgaccacccagctggaagcgaacgacggcgatgaattgtcgtcgagctgatgatccctcgaacctccggttgctaccatgacgtgcgcaaatccgcggcgaacacccagagcacgacaccgatgcccaagccatgcccaaacccag

SEQ ID NO: 76277 - DNA, 273 bp, Zea Mays
ggaggaagaccagttgaacacagtaattcagtcggctagataccagtagaccttgaggcgctatcatgataaagccatacgacaccgatccttcgtagtgggagacttggttcttcgccgaatcctaacggggaaggacggcacaagttgtcaccactatgggaagggatcagaggtcactcggccaggaacataccggcttactcaaatggatggcacggaagtggggaactcatggaacatagagcatcttagaaagttttacccttagca

SEQ ID NO: 76278 - DNA, 987 bp, Zea Mays
caaataggaaacgaagcatgcatcatgacatttacttctttaataaaatttctcccttaaattagatggttactaggatatatgtggttccaaattattcttactaatcttacaaatcctttgatctcttcttttatctttattccttaagaacctagaatggatcctcccaagcagacgcaccgtatgcatactagaccatgaggtgtgccaaagcgtcagatggcttcccatatggttgaggcggacaacagtagtcgtgcgcctccgttgcaagtggagcagctacaacagcgcctggatgtgtccttcaatgagcagtgtctcgatgcagcccatattcttgagctgctagcagagaagaaacaactttagaaggaagtagctgagcagaaggaacgcctggtagcaacgctgcggtcaggggaggcgtcgtttgctcgtgaaaaccatttgatgggccgtttccgggacatggtgctagtctataatgatcttgaggattatgcccatgagctgcatgagcaagtccaccagctttactaccagctgcaccccaacgccgtgcctggagccgtagaggcagaaggtggtgtggtgttagctgatgggggtgagcctgatgctgacttagacatagaagcaactcctatgcttgtgctaggtggtgagtccccaagcgatagtgatgtttctgaggtagctactgatactgagggttagtgtggcaggtgtactaatgtcgtgacctctgttgtaggcatagggttgtaagctatgccaattttggtattgtaatgaataatgccccatgtaccagttctatgtaatatatttcgtggttatggatgtatattcatgagctttgttttactccagatgcctatgtgtactcgcagttcgaatggggctggaacattgcgtggtgatgcagaagctaatctcaatcctcctccaccaccagtttcgcctacgctagcagacacc

SEQ ID NO: 76279 - DNA, 538 bp, Zea Mays
gacgattttacaagtttgttcagtgtttacgactgcataagaacatgaaacgtaacatcataaaccatgcaatatcgagacatcagaccatttatgctattgtatatacatgaccagtgtgtgcgtagatctgggttggtttaagattaggaaagtagtgttgtaaaatcgcgataaatgtgggacaattaccgctttattctcaacgttgcgtcaaagaagcgtaagatttgtggtagttgttgtatatcttgctttgtctgttttaacgtaaaactgatacaaaagaagcgtaaaattgtgtataatttagcgtaaactacagttgaatttataatggctaagagatccacagttcgaggcgtaaaagtcacacacaatttggaatagctgttgtgtatctcgcttcgcacaaggttgtcgtaaaatgcataaaaatatcgtaaaatggcgtaaaacgcatcaagaattttgtaaattgacgtaaaatgcatcaacaatttcgtaaattgacgtaaaatgcatcaagaagtatttt

SEQ ID NO: 76280 - DNA, 434 bp, Zea Mays
gatgaaggaacacagtgagttttagaaatggcagccggaagtggagaagaaggtgtgggagatgaatgaagccttgaagaccatccaagccaccatcgagaggcaaacgcagaagcaaccagtggatacttcatcagcaccggccagagatgcatcagcttccgctcatctgggagcggtggcgaatgatgcgatgcatggggaaacttgccaccgattcgttgaaaaccaccggaggttgggtggtgggatcgaaacgatctagacaccccctccggtcggaggtacgtccttcacccctgagagccctcaaatgtttgttgattggggttctgtaggcatgatatggctaattggtcgcagtggtcggcatttgtcatgcctaacatgaattttccgggtcccgatgggtcaaatcccaaattatggaaaca

SEQ ID NO: 76281 - DNA, 1402 bp, Zea Mays
cgggttggcttggacaggacacatacactttttgttggtgcttatcatgatttgggcgtggagatggctccctttgacaagtcatggggaagtggggacccgcttcctcggctgggtgcaagaggagttggagtccctcctttctatcatgatgggtttcatatcttatgcctcccttgttacctgcgaaggggcagcaaatgccttgtcccgtgagggctgtaggcacttcgaagcctttgaccatagtaatgaggacttcgactagggagtgttctaggttgaagacgacgtgatgaaacgttcggccggggcgctatacgatcggatgtggggtccccacggtcgcggagtcgtctaagagagggttggttggatgtggggtccctaatgattgttctttttgttgggggaggatgctttttatctaatttctaatgctttgatgtgttgtattcataggcgatgagggacgaagagatcgaagacctcgctcgcttggagagcttagtgactacacaggatgctggcgcggaggcagatgtggaagagcagtcgtcgcacgtgagggtcggtggtactgacctcagagcagcggggacctcgcagccatctacctctaggtaggtgtaaaagtaggagtaggcttgatgtgacaatacatttgatatttgttaatacttaaagtcggctgttgtgtaggttccggtgattgggcctacgcaagcaaattttggcttcttagacaaggggaaagaaattgttggggctgttgaatgtgttacaccattgtctttccggagtccaatggggcttagcgatgagggctatgaatttgattcatggtcgtcgagtagcgaaggacggttgggccccttcgcaaagatggatgaagagtcctcggaagaggatttggatttctttattgtgttagatgtgtctgcgacagaatctaggatggggaagtcttcatctagggctccgatgactgtggcgaaaagtaagagaagagtcgatgtaccgaaacaaaggctagggaatgccggcgcgccaccaagaggaggcgaaggctctcgaaggtgtcatcatatgggactgtgagggcctcacccgcgggtctcgctccgcgaggttcttcatatgtcaccactgcatcctcaagagagggagagggcgagttcgaaagaggggcgtcgccggatcgttcttgcgccaacaaccgaacgaggttttgaagaacaggaccttagggtgcttttcgaaggcgaagagcttaggtttctgttgtttaatttttaggaggctggtctaatcctgaagatggaccctttgtaatatttggaagatttgtattgtcctggctcgatgaattagagtgaaacgctgccctcgtcccccttcg

SEQ ID NO: 76282 - DNA, 592 bp, Zea Mays
cttgtttatggccggagttatccacggcggtcatatttgtgtgaccccgagcgctatccaaaccatccgaacaccgatcacggtgacgacgacacgaatcgcggcggagggtcgtcggcggtgaagattccctgcgctggcgatctgatccatatggggtactgtaccatggcgaatggggttcagtcagtctgacataccgtttttgagcttgattttctcccaaacttatatggcaacatgatcaacactttgtagcaaaattgtagagcaatataccatctacaacattgctatattgtgctgccacaaaaagtcaatggatcttgcttgaaattaagcctgaagttcatgtcagtccactgtgagtctgatttcagactttaagtagtctgacagtccaactttgggcttaattatctcctgaattttcttaacactatgctcacactcttaagcaaagttgttctcctttgtttgctctacaactttgatgtggtgacatagggcaaagaccctagagtttgaaagttacaaggctcaaaagttgagcccacaaatctgaaattcagacttagagtgaaatctcaat

SEQ ID NO: 76283 - DNA, 507 bp, Zea Mays
tcctagcgagctgatgccgaagaggaaaagggtaaaggttctcacacaccagccacgttatattgaaccggccacagtgcctgattttgtcggtgagacctcttcggccaccgaagctaaagaaccagctcccctgccaactatggaagggccggccaaagtgccggcgatagagaaaatagaagaaccgagggttgaagatccaaaaacatcggaagttctaagtcctttagcagaaattggggcagcaataagccaaaaggggccagcagtgacccccaaaagaaaaaggatggttaacgtgctggatgttttggagacaataaagtcttcaagcacaactccgaagaaaactgttgaatcttctgaaatgcatattgaagcacctgatgccgaagtttcaaaacatcaatctgagactgaagctgggccttcagagcccaccaaggtgaaatccttggaggcagaagaaacagaaataacaaaacaaatttcggctaaagaaac

SEQ ID NO: 76284 - DNA, 539 bp, Zea Mays
acaacactgacaactgttttccttttctgcccttcggcgcccttgttcaatcgctcataatcaggatattcaaaatgtagagcatccattactcgattcaatcttcatttcggtcgagagccgaaggctgcagtcaacaactgatcttcttttttcgtgtagttccctaaaatctcgttacacataacttcgatcgtgtccaaccattcttggcagggttccttgaactgttttttgaacttaaactgataaggcagccgaacgagttcaccctctttcttctctccttcaagcttcggcataccccacttcttcagcgttgggaacactctgttggttaggtattcctagactaagtccctagacccaatgtgttcagacacaattctaaactcatacacagcatcttggcatggattccccggtgtcatgctgcattgaggtctagtcagcccgaagtttagctttagcgggctttgaactagcttctcctcttcttcatcaattttaacataaaaccattcagatttccaatcggt

SEQ ID NO: 76285 - DNA, 698 bp, Zea Mays
ccaaattagaatgaaattaggcgatgaatggaaaactgcttttaaaaccaagttcggcttgtatgagtggttagtgatgccttttgcattaactaatgcccctaatacttttatgcgtttgatgaacgaggttttgcgcccatttattggaaaatttgtggtggtttattttgatgatatctcgatctacatcacttgtttatctgaacatcttgaccatctacgtgctgtttttgatgctttgcgcgccgcacgcttatttgctaaccttgacaaatgcaccttttgcaccgaacgcgtatattttcttggctatgttgtcactccacagggtattgaggttgatgaggccaaggtgcatgctattcagagttggccaacgccatcgacggtgacacaagtacggagttttcttggacttgcaggattttattgtcgtttcgtgaaggatttcagcaccatcgctgccccattacatgagttgaccaagaagggtgtttcatttaattgggggcagttacaagaggattctttttctcttttaaaagagaatcttactcacgcgcttctactccaacttcctgactttggtaagatttttgaactcgaatgtgatgcaagtggagttggcattggtgctattttgatgcaaggaggtaaacccattgcatattttagtgagaaattgaacggccctg

SEQ ID NO: 76286 - DNA, 356 bp, Zea Mays
cccacaggtctacaacaacctgcagctccaccgcggcgtgttctccgtcgatcagaacctctacagggacggctctacgcgctggatggtcgaccagctggccaaggttctcgttaagctcagcgaggtcaacgtgctcaccagcgtgcagggggagattcgaaaggtacttatgcagcaggtttaactaaccagaacacccgtacctccattgtcggctctcctctactacatttattaatttcctcttgctataattttggtttagtcaaatttgaatttcaattcattcccttttatatatatcatttgaatgaccaagctctttgagtagtaatgaacaaactgttgttttc

SEQ ID NO: 76287 - DNA, 596 bp, Zea Mays
ggaagatctattactttgtccgccatatatgttttatatccatcaatcacatctttaggaggcaaaggaacacattcaagagaagaacacaactgtcataaatgggccaccaaaacatttaagaaggtcataaattgttgacaagttgaataaacgggtttcaactacagatgggaatggttcaaaggttttggtgtggagaacaatttgactcacatatctagattatgagagctctagtatgtcaaggcattacttttgatgcacaacattgatgtaatgcgccaggaactttacattggtgaaagtatcataagcgcatttatggatttaccagatagtacgaaggacaatctaaaggctagacaagacttagcactgatttgtaatcaactaatggttgagctcaagaaatatggtgggaggacacatgccccattttgcctaaagtttagaaagaagaaaacaagtgatgacatggatgaaaagttaaaatttcttgatggttatggtgttggctttagaatagccgccaatttaaagactaggaagttaaccgagttgaagagtcatgattaccacataatcatggaaag

SEQ ID NO: 76288 - DNA, 629 bp, Zea Mays
gttgtgtatttaaaatacagcatcgcggaccaccgtgcatcaagatgtctcttttgtatgtatgtacgtttgatttgagtatggtgcttataaggttttagaattcgagattgttattacatctcgctttcacgccggaaaccacgcagaggagttccattatcctatggctttgcacctgcacgcatttgatgctgataaatgaggtccacgtctcaagtcttggtttttcttggtgctcccaactctatcctgaccatgagcaggaggaaggagcagcttataagaaaaaaaaagaacgctcttggcaccaaagacaaaaagatataccaagagcttggttggataggatcattggacggcgagagggattcccgccttgtcttgttatcgtcttcttcccttgattgttgtgtgcgtgcgtgtgactatgatccatgggagcgctaaagaatgctagcttcgagatgtgctcccgaaaacatctttgagataatcgttccttttttcctcccgaagatgcttcgtgagcatcgcttctctcagaaagctgaacacgttttataatccatcggttaggtcatcgttgttctgttatgatatgatataatcgttcctttttatttttt

SEQ ID NO: 76289 - DNA, 629 bp, Zea Mays
aacttcttgaattttgattcgaaggtcacacactctttgcgaagttgcttcgcctcgatgcaacctttgtgatgatgccacgtgccgcccttaattcccactggaaccttaccaccaagttttgaggttcaaacccaacaaaaccatcgactgtagcattatttgttattgaggctcaaccaccgaaaactctataggtagctgttggagcgaaggtcgtccgccccctcgatcggtctacttaaaacataaactaagcaggttatgtcagtcacaggaagcgaagtctacctcaacccgcaccgaaggcagcgcctcagttggagaactagcgaaggcatgggagcgaagggaccagtcaacctctcgggggctcttcaagacttcgcttgccatgactccaagcaccgaccatagaaagactcaaagacccggtgcctcgagcgaagaccgcaatttttgcccacgtgggttggcgtaatgggcccacattgcgccccattggcttactcgggccccatgtgtaagcaccaccccggggtagggttgatggtgtgtttgtttaggttgtacttaattccactataatgacctgtaatggcccccaaggggaaaattctaggtataac

SEQ ID NO: 76290 - DNA, 685 bp, Zea Mays
taaagatcaccatcacgacctccaacactatggacaggcgcaggcaagtggccaagcgcgaccccctgttctgcgcaccgcggatggtccgacacgtagatgtggacggtccggtacaccgctagatagtccgggcaggtcaagcagatggtacggtagcgcccaggagcagcgacgaccacataccttcaaacctcaacgaccagaaatatgtacgtggaagacaaacacgtataaggcatccagtcgactggtcaaagtcagtctaacctttgatcaattattatctaaatatgtgaaaaagaaggccagcccaagtgatcagccaacaaagcgacctcgctcacctgctcaagagcgactataggtaagaccaattgagtcatttcaccaattagaggattcagcacatcacgatattcattcaagacccaatgtacctacatggatatctccacacccatacccacatgtgccatatcagtatgcatatcttccaccactacatatacccaatcaaatgtggggcatgccaccgtacccatatgggatgccacaatcccccgcctggggggcaccccaaacttctgtatttgacatgttggcaccaccagtgtaagaccaattgggttcacctcaacctggtcaccagacataggtacaacgagattaccgaactactcgg

SEQ ID NO: 76291 - DNA, 272 bp, Zea Mays
atatgaaccaatctaagtcaacaaaataggaaagtacattatctaaatctaaaggaatgtgcatctaattgtagccctaagaactaaaaagaattagaaccaaatgcaattgtaagaatgcttgccttgggtgacaatatattgtcaaggaggcaaggaaaggatgtagggcctgagggaagttgggaattgggatggggagtttgctaaacaatctgagaaatgagtgacgcagacatcccgttttcatcgagaggaaggatggatgaccg

SEQ ID NO: 76292 - DNA, 383 bp, Zea Mays
gttgtgctcaacacagagctagaccacacccttgacgagttgggcaaggtttaggcggaggttgtggaattgcgtgctgagtgcgtagcacgccactatctggatggtggttctcccacccctgtcgggatttagcacccttactgttcaccgccccgtggtcgcttcgagtatggtacccctgactgcaggacccagatagatttggatccatagatcgatagagtcggagtctgtaataatgcttaattcagagtctttgtctcagttagtcttagttagagttagtttgcttgtcatatgtcttgatgcctatcgtgatgaacttgtaatgaagttggatcattgtaatgattgtcaccaaggtgtgggtatcccttgca

SEQ ID NO: 76293 - DNA, 1152 bp, Zea Mays
ggatgagggatgattcaaataaagtagttcatggggaagggagttcagttatccaactatctggaccattgattttgatagtgtgttaagtttgagtacaatatgtttggtgaatttagtgggataatgagtatggggtgatttggttgtgtgacttttgcaaagtttgaactgatggattatatagtggtaagagcataactcttttctactatataaatatatgtaactttctatctttaacgtatacaactttatatctaactttctatctttaacgtacataccattctatatttaaagcatgtttttattattattattttctcggccggtcccccctcccctcatcacctatgcttccgcgaaacaacgctccgaattcaacagtgcctaaattaagtgacacaaccctaaactttcatatgtctactatatagcatgtgttacacacgatctcgaggagatgatcgatgatggcggtggcgcaagtgaggagagggggaagggaagggaagggatgagggatgattcaaataaagtagttcatggggaagggagttcagttatccaattatctggaccattgattttgatagtgtgttaagtttgagtacaatatgtttggtgaatttagtgggataatgagtatggggtgatttggttgtgtgacttttgcaaagtttaaactgatggattatatagtggtaagagcataactcttttctattatataaatatatgtaactttctatctttaacatatactactttatatctaactttcaatctttaacatacataccattctatatttaacacaagttttttattattattttcccggccggtccccccgcccctcatcacctgtgcttccacgaaacaacgctccgaattcaacagtgcctaaattatgtgacacaaccctaaactttcatatgactactatatatcatgtgttacacacgatcccgaggagatgatcgatgatggtggtggcgcaagtgaggagagggggaaaggaggggaatggatgagggatgattcaaataaagtagttcatggggaagggagatgagttatccaactatctggactgttgattttgatagtgtgttaagtttgagtacaatatgtttggtgaattta

SEQ ID NO: 76294 - DNA, 486 bp, Zea Mays
gtttccgaagtcccagaatgacaaccttgttttctactatgttgtttgagcatttacctgactcgagtgcaaagctgtgacacgcgacgtaaatgtatttaacacctgaaggtgacgtgatcactactgcagcacctgcccccgcatggcaccatgcgtcatcgtagtggatggtccaaactatttctgtgctttggtggttggtgaggacctatctagtcgactatgaaattagcgaggacctgtgacttgattgttgttctaggttcaaaggtgacgttgtagctgaagagctcgactgcccacttcgctattctgacggatgcttcggggtttttgaacaggtcgcctagaccttggtcagtggggattcttattttgtatgcctcaaagtaatgcctgagtttgcgtgaagccatgaggactgcgtaggctatcttttccagttctatcatgtcgcacttggaattggtgagaacctcgaag

SEQ ID NO: 76295 - DNA, 1061 bp, Zea Mays
ggcaggcggttgtatcaagatatgagtctgcttatcctcctcaggcagatcttggtacgcagcaactatggcctctatctcgtccgaggaaaaccatactctatggctagaacggctaccctcttcatggatgggagggttggacacaaactcagaaaaaggagtctacaacaatgaaatatcacagtcaacacaaatcacacaataactcggtaagcgtcggacatgaaatcaagttgtcagaacttcccaattcaagaagattccagacatagtaagatcgtggagcaccaacattcacaatggcacccctcagcatcatcttgacctgactcaagattagttcctctaaaattcgtttgtttgtcacttgggaaggatctctcacaatggtacacacatatatagggtgaaccctgtcttttagatggtgaatgttcttgaaaataaagtcgatcgccacagcttcagtgatcagacccctgtcttctaatttggcaatctcaaccaacaagatctttgtctcgacaactttagagtcggttggggcctctatccaactcgacatgcgcacatctggctgccttctagagcgagcaagcaaggaatggttgtggttctctatagtgaaccactcaaagtatcatcccttgatgttgtccttcagagggatatctatgtattaaacatttctgccctgacaaagttcaaggttgtccccactaactacttgatgatgtccacccgccatccccgacttgcaatgctatagagatacttccacagtctaaagtgcggactaatcccaagataggcttcatagagatgcacgaagatgacaattttaagaatagaattagggttcaagtgagtcagattgagtgagtaaaaatcaaggaggccacagaaaaggggaaaacaagcaaacccaggcccaaatgaagaaaggaacaaaaagcacatattcgtggctatccaccgttgccacggtaatcccttgcccagttcactaggaacacaattccttcgatggaggaacatcaatatcaactagatggagc

SEQ ID NO: 76296 - DNA, 319 bp, Zea Mays
aaaaaaccgaactttgatacacttggttaatgccatgtcggatagttctagtttacataagtcatggtggcgcgaagctattttggtcgcattatttgttctaaactgaattccatcagttaagggtgataaaacaccatatgaaggatggaaaggtagaaagaccgctctcggatttctgtgtgcacggggctgtttagccaaagttaactgtatgcaagaaacgaaaactgggacaaaaaatcatagactgtctttctaggatatgcgcacaatagtgcaacctatagatttttggtgattaaatctgatttttcag

SEQ ID NO: 76297 - DNA, 1000 bp, Zea Mays
ttggtcaatagtttttttcctgtggaaatatgtagaagctgacaaagcccgtgtttccaaaccaaagattagtatttactgtcaaataaaaattaacaaaatagtaaacagtcaatgcactgacgtttatgtgctaaactaataaggtactatagatactaaatgatcgtcgtgtttagaggtaatgtagcaatttatgaaccatttttttttaaaaaatgaatagtcttgcaaagaagagaaacgtaatagtagcaacaatggagaaaaatactaaaatcagagcacaccattagaaaggcagaaaggaatgtgtaataaaatgaaccttgttggagcagcatttttcccccaagcagatatgtagaagttaatgaagcccgtctttccgaaccaaagattaggatttgctgtcaaattttaaaattataacaaattagcagagaatcataataattgaatattgatgcaaacaataactatataatagtaccactaatggaggaaaaaatagtaagattggagcacactgttatgaaaagccaaaaaggaatgtgtaatgagatgtaccttggttaattagtttttttcctgtggacatatgtagaagctgacaaagcccgtgtttccaaaccaaacattagtatttactatcaaataaaaaataacaaaacagtaaacagtcaatgcacggacgtttatgtgctaaactaataaggtactatagatagtaaatgaacgtcgtgtttagaggtaatgtagcaatttatgaaccatttttttaaaaaatgaatagtcatgcaaagaagagaaacgtaatagtagcaacaatggagaaaaatactaaaatcagagcacaccattagaaaggcagaaaggaatgtgtgataaaatgaaccttgttggagcaacattttcccccaagcagatatgtagaagttaatgaagcctgtcttttcgaaccaaagattaggatttgctgtcaaattttaagattata

SEQ ID NO: 76298 - DNA, 377 bp, Zea Mays
ggagaaatggccctggccgtcgatccgatgatgagcgctcacgattgaatctcgaataccccatcgtgatcgaaaatcgtaaccattgttcttggatctattgaccgagatcagatcgcgggatcctttaatctcgagcgttgattttagatccgacggctgtgatgggatcagtcgcgtaccgattcggccgaggtcgtgggccgtccgattcaatctggcaggggaaattcgatctgctatcataaaatctctatcatcgatctctgatccaacgaccaagacttcaatctaatctgcaccgtagactatcaatccaacggtccataaaagcccataccccttcagacgtctacttttgcaaaagagaccctatg

SEQ ID NO: 76299 - DNA, 841 bp, Zea Mays
cttgcgcgctcggcagcctcttcggcttgcttggcttctttatgagcctcatgagtttctttctcattcttctttatagcttcgtcggctagttctcggccgcctttcatccaaatgttggagtaaaattttctgcccatcagagtcgcttcagccgaaggatccttcgtgttctccactgtaaagacaacctccatctgggttgcagctttaacgtgttcgcagccagatttttccaaaattgctgcaacccctcgggcaccggcaaaggcgcagaaatcaccacgatcactaaggatctcttcaaaagcttcgacttcttcaccgatccattcaatgattccttcgggatcgcctctaataaatttttgctcggatgaataagcacccacctttgcaaaactttcttttagcttcttggcacaatccaaggatttttcgtaatatctttcctttgattcccaaagctcatctacattcttttgcaaccttgcgctagtccactcgcttatttcctgctttgccttagccacttcaaaatcttcattcttctcggcaagctttttctttaatttttcaattttggctctatgaacttcggactgcacgacaagattggcttcactagccttgactctgtctactaaggaaagcaaaattttatccttctctgcagcttcattcctcagtttgataacctccgatcgaaggttaccaagtgctatctggcagctttcatcctcagcattcttctgtgctctcaaagtgttgctcagaattaggccctacaaaaaagggggaagacaaaggatcagcacaagaataagagacacaaaagtaa

SEQ ID NO: 76300 - DNA, 530 bp, Zea Mays
cgctgacgcaaagctcgcccagcgttcggccatgttagcttaattaattcctgtcgtccgatcgcgaatcagcgctctacatcaatctttcccttgcagatcctaacaagatgttgagcccgcctttgggtccatgctggaaacctacagaacgcgattaaaaaacaaaacaaagggctgataaaaacaaagggagaaaacaccaccttctagctgggcgaaagagcagaggtgcacccgcgcggaggagccgaggcgaagaaggcgatgcaagtgcttcttattccacgccttgcattttcatttccctcccacctcccgttcgaatctgcgtcgggccgccacattccagctccacctcccccctcgggtcgccgcatcctagctgcctctcttttagggtttagggatttctcatcaatggacgcgatttcttctcagtctgccttcacctggaatgttccagtaaggtagctagcgactagcgagtcggccaaaccccggtaccggcagggcaacagctcttcgcc

SEQ ID NO: 76301 - DNA, 484 bp, Zea Mays
gcatatcaaacatgatatatatagatactatatttggagccctcggctttctccaactagagaaagccttagccaatgaggcaaatctggctcagcctaattcaaccatgctaaccgaccgtcacctaaaactttcgtggccaaaaaaaatcacatcccacgcaaagtccgcgtacccgtagccgagatacatggaaggaaacccaatcgtgcgagccgccacgcctcttcctttcctctcctcacatggtgacagtcgttcgtccctagccctagatctagcagcgctcacctatacccaccccaggaccatagacgcgccccccgccaccttctctcccacctctgccacccctcatggatgccatgaatggttgtagcgtgggggcacatgcgacgtggtcatcggcgacatcgggttgggcgccttgttcctcagggcccacctcctgggcgggcgagccgccatccggccccagcccct

SEQ ID NO: 76302 - DNA, 424 bp, Zea Mays
gccgcccggattcacgctagagactaacggataacatcgcggggagagggaatcttcgccgccggtgagctggactccactccggtgacaccccgcacttcccctctaccctgcggcttgagctgatatgctcgccagtgaaccgccgttctccggccttgcgtcgcgtgtcccaacctcgccaccgcatcgccatgactccctctagcttcccgtcgaccaccggaattactgccacgacattgaacacgtattcaccgcgccagggttctttcttatctccggccgcccgcgatgttcgatcaaattaagcgccaccgtcgaaacctcctataaattgagcccgagaccagctttgcaacatcatcacccatctcaccaccaagaatcactagcaatcgtgcaccagtgagctcgaatttca

SEQ ID NO: 76303 - DNA, 818 bp, Zea Mays
gaaaaacttgaactgtcaccgtcaccaccagtccaccaccaccaccactgaatatttggtagcaaatgcgtcaacgattcagctgaaaatttttagcccttgtatagaaaacccaattttcttttaaaaaaattgtatcgatgtgtgttgggtttagtaccatcagtccatgaggacgtcgtctgccaatcatttttgtcccgcacaattatcatgccttagctgtcctcacaatatccttctttttttagaccggattatactccgtgtgctgtttagtcgttctattttacaaaactgctgattctttttcgcctggaaattcatttgagtgccgcgttccttggactattatttttgcatgtgcctgtgacttcgtgcagatcattgccaggaaaactggatgttaagccgttccggttggtgtgcaagagaaagtacaccgcgtgatcaccaaatggcggtaactctatctatgcgttggttgcctggaataatagtggccagctaatgataatccattccccagtggaatgcagatgtcgattggatgattggccttcggccagccaggaaaaatacactgtgctcgtcatgctactcaaggggacctgaggcgttcggatcagggggcgtgtggtggttctgaagattgaaattaaggagcagtctgcagtcgtgtgatcaagaacgatttgctttttttttttaccatttcaattttcaaggtatctagactaatcttcttgagtcagcataagacgagaataaaatacagtcttaaataaaacctagtcggcagtatgcaggtctgaaac

SEQ ID NO: 76304 - DNA, 659 bp, Zea Mays
tgcatggatgccgcgcctcgacgaaattggacatcccggtggaaaaatccatggtaaggacgcccctgtccagttcaccttcgctccctccttgcatcacaactgtcggtagaataggagactctctaggggcgttggggcatactccagcaacatcgctgccgcgcggagtgctctgctcaccgtagctcaccatcgagtaggagacagacttttggccgtttgattaggtttgaacgggtgagatcaaagggggacgtgtggggctgccccgacctttggatcgagaattgagggtcgtgataagatcgggatcgaacaggatatggatcgttgatctggaatggacgacagggatcatacgtgcgtaccccccttcgttactttaaatctagacccttggtattggatcgggtggtcaatcgcatacaccggttcagattataatgtgggtcgttggatggagatctgacgaaccacatcacataatggttcggttaaaaccacgatttaatccgagccatccggatcggatcggacggctaggatcgccctataccccttcgtcgcgccccttttgctaaaaagaccccgagataaatagaatctaaccctggctcggattggacggctaggatcgccctataccccttcgtcgc

SEQ ID NO: 76305 - DNA, 426 bp, Zea Mays
gttaatcgaagtcttttatttaaaagacactccgcgcaaaagtcgtctaagggtgcagccggaatagcacaacaagtgcgttaatcaaagtcttttatttaaaagacactccacacaaaagtcgcctaagggtgcagccggaatagcacaacaagtgcgttaatcgaagtcttttacttaaaagacactccgcacaaaagtagcctaagggtgcagccggaatagcacaacaagtgcgttaattgaagtcttttacttaaaagacactccgcgcaaaagtcgtctaagggtgcagctggaatagcacaataagtgcgttaatcgaagtcttttatttaaaagacactccacgcaaaagtcgcctaaaggtgcagccagaatagcacaccaagtgcgttaatcgaagtcttttatttaaaaacaacg

SEQ ID NO: 76306 - DNA, 397 bp, Zea Mays
tgcatacttccatcgccgacattcagccatgctcagaccgccgcgaccccgtccaacggagagtagagaaaatgggatgtggactggacctgcagagaagcgccatgtttcctagtttctcccaggaagggtgaacaagagttgggtcatctggagagagaatttgacgaatccactgtcggatcgatgcacaatcggttggttcctctcacaattgacgatcagattctagaggatgtgtcaaatggtactgaattccatggtaaggatgccttcactgcttacatgttcatttgattgtagctgtaacttcatcttacaacacaacacccccgacatgtattctggttctattgggaatgctaaaacgaatatcccagcatgtgagagtgtcgcg

SEQ ID NO: 76307 - DNA, 374 bp, Zea Mays
gccactataggtcattacaatatggttaagtacaacccggactaacacaccatcaatcctactccgattggggcttacacatggtcccaaacaatctagcatggcgccgcatgggcctacttcattgacatgcgtgggtaatggttgtagccttcatcttagggtgtcgggtcttcgaatcatgtcatggcctccgcctataccgatcgatctcttcgcccaaagcctttgtttgattgaggtagaccccgctctccaactgtcatgacatgttttgttcacgttataaataaaccgagagaggggtgcgagaggccttcgctccaacactcgaggatgtctttgttgggaatttctagggcacatacatacgc

SEQ ID NO: 76308 - DNA, 480 bp, Zea Mays
agggttcctggcaggggatggacgcgagggcctaaacgctcgaagaaagagcaccacaacgttcgcaacatccatgaacggtagcgcgacacccagtagccgcggcgacaaacaggacgacgacggaccccaactcgatggagagcattgaacagagcgatgaaagtaccatgtcgtaagtcgattctagccattttggaacttgtcgtggtggattggaggccttcgtgcctcctgttcgttgtcttgtgctcaatggagagcatatgtatctaataacatgtttgagtgtgaatgtaaatgaaaggaacgaatagaagaactatcttgcattgatctgctgttggaatatatatacacggtgaagggttgcactgaacgggtgtcagttgctaagaggcaaccgttcatgcactatgccaaaggacatgccctttagttacatagtaaactgtctaatctatctttaatcctgttgct

SEQ ID NO: 76309 - DNA, 1996 bp, Zea Mays
tctccaaccgaggctttgccttcgctagggcttgagctacccttcgtctcttgtgactaatggaacctgctcagtttatatttatagcagaccgaatgagggggcggacgaccttcgctccaacactagtcccccgaggggtcggttcaacttggtgagctggtcccaaagtctttttcaagacatggctgagacgctaccctcgctaggttgaagttgtcccagcggggttatggaaatgtgatcattgataggtgacgtcttactgtgggactattggtttcccgatgtgccttttcgggttcataaaagtcgttccggctactgcgaagaaattttttacccgctaggtttacgggaaaccctagtttcttttgctttagcactttctgtgcatctccttctttttctcgctactggtcaactggcccacatgaagcagaccacccggcactgcagacattacgtgatgtcgtcatcttcttcttcgcaccgtctactacgaccgcgtattcaaacgcggcgtcgtcggagaagacaattagcgagccggtggcggtagtggagttgctatcgggtcacactgttcagcttggaacttcgagggtttactcaaaatgcgtgcaagaaacacagcgtttaggttattttgtgaatggtgtggggcgtgctccagggccgaagaggtctgagagcaggagggtgaattggttgtgttcgaagtgtttttcactgttggacttcgcttgcctacacaccgattcatggttgaagtgctacaaaggagattcatgagctaacgtcgaatgccatggtggccctagcgaagtttgtgtgggtggtgacttcgtacggcgtagccctttggtccaaggttttgcaaagaactacttccttcatcggcagaaaaaggtgattggtgtcaaggttgcacagtttgtaacatgcaatttcatgccgaggactggaaagacttcgggtgaagtggtggaaattgtgccgtgtgatttttggcgggatttttggttctacatggagccggaggaccaaaggggttcctaggccaccgccctctgttctatgctcgcattgttatatcgtgtttccatggtttaagctgaagaaaggagataagggtgaagatgtgcttcggtatgcagctaggacgagcagcggccacaatttggttgaggaatttattgcgtgcaggatgtggccgctcactcatggctgggatctaggtatagtcaagccgcaccccatgccctgcttgaataatcagatggtgctaagtcctgcctttgccattgagccacgagggcgggatgcgactacctttgtcttggaggtggaagcggaggcggtgaaaattgttggcaagtactcatcgaagacggagctgacgaggagttgggatatacgaggttcgaatgctaggctgaaccgtgtttttgaattaaatggtttttggtatgatccatacccttaggagggttctactgatgccggggaagaacgagggaagaaggtgatggttcgggtagacaaaggctgcttgaaagggaaagatggagttgtggcggctagaaaagaaaaattgaggtgaaaggtaagatgaaggcattgaggggttcgaaggcctcgaggtgttttgttgaggagttggcggagacgtgcgctagacctagggaggtcatgattttccccgacctccaggaatcatcttcgtgaatgctgagggtgaccaggggtgagtggcataaaaaagaccttgtttcctaggccgccggtgaagattacttgacgtcccgtttggctcacgagtttaaattctatccttatggaagaaatgttggtgttgttatgtcggtagtgatggaaaagcatcgttaagctgcggaagaagcggaaggcccttcttgggctggtggatgcccgttgtgacgcgaaggcgtcgcgtcccaatgcgaaggggcttaccgcagctgctgccatg

SEQ ID NO: 76310 - DNA, 673 bp, Zea Mays
gaggatttgtcacctacacatgaagaccagccgagcaggcaatcaaagaagaggaagacgacgcgaggaagacgatggggctgctcctccgacgacgcgaggaagacgacgaggtggaccctaagaccacgaaggcacaatgcatagagaggaaaacgcgtgggctgctcatgtgtgagaaggaagagggaaggggttcatggcagggtgtacgattgtatagaaaggagagggtatgtatagaaaggagagggcacgagaggtggttgtcaatttcacgacggctcttgtcttggccgagcgagagagacagctgcgcggcaagttgcacgagatagggttagacagagttagatgggtggtagacagggttagataaaattagacgaagacgatcagagccggcccgtgggcccaagatgacgaggtggacgccgaagggaaagacgaggatagaggaggatcgccgacgcgagcagcatgttgttcgcgagaagacgcggttcagtaatctcgcgaaaaggggcacgagatctggaataggttcgacgagaggaagaaatatatatatatatatatatatatattatcgagttccaaaaattttatagttttcacaactaccacattttaggtatttaattaatattagaaaaactgaaattcatatttc

SEQ ID NO: 76311 - DNA, 442 bp, Zea Mays
ccctaatctttcgagcctctactcatgcgtgagttagcccatgaagctcgcccgcgttctcggtggggactatgacatgtgtctccttaatgtcctatcccgtgcgagtgagaccatcaagctcggaacctcactatggcacggtagtggcccatgccattgtgctgctacactttggtggtaatttttgtaaggccatcgttccgcttgaggattcatcagcggtagatctagacctgtcactaggtgattttgatgttgctgcaaacaccatgcttggggtggtgttgtggagggcacaacatgcaatcgtccatagtttcgctattcgtgaccttttgtggctccacgtgtgatttggctgctctgatgatgcgtatgggttttgggtccccctgaccctgctttgtcttgagccctttttgggtttggggtgctttcc

SEQ ID NO: 76312 - DNA, 358 bp, Zea Mays
agattaatctttaccctagtgacattgctctaatttatttgacaaaacgtttgagagttagtagagttagtatgcttgcgaatagacgagagtatgctctcagtgcaattgatttatatgcacctgacgtgttgggtggtacaccaaacatgtgcactagatacatgatttgttctctcactcactatagttttcgtccgagtaccaagaggtccaatgtgcacaggatgtgcctaaccagataggagacacagagagtagtaaagtgagttattcaactataacatgcatcagacgtgtctggtgctagcacttgatgccacaccgaacaagaaactcaaagagcatttgaattggt

SEQ ID NO: 76313 - DNA, 818 bp, Zea Mays
ctagatcaaaagcttgctcaaccttaaaagaaatagtaaatgggagatgagtatgtcggcctagctaacatgcatgatagagaccatcaaaatgtcccctactacatgaatgatctaaactactggtaaacttggtcatgacgccaggtcctgtatggccgagacgacgatgccaagtggtggaggagatggtggagacacgccggtggaggaaggccggagcatgtagagtggcttcgagctgacacaacgggtgagagggttcctggttgtcagatccttcacagaaaaaatagaggggtcaaactcaatggaacaagagttgtcggtggttaaccgacaaacaaaaagaagattatgagtaaaatgaggggctacgagaacgtcattgagatagaacgacccagggagaactaagacacctactaaggtgaccgacatagtggaatcgtttctaatgatgatcgagagggatgggagggaatggaggggatatgggagagagtgtgtgcctatagtggtgaggtgtggtaggaagcactagagtcgaccacccagtcagaggagggtggggtcatcgccatggtgctaaaggtggtggtgagggaggcagagtcccatcctccagccaacggggaccaaggagttgaggtgggggtccctggggtgagagctaggatggatccggagtcattggtggcacgccatagggaggcgtcggaggcacaacgtagggaggctctgtcaggagggccagcatcgaaggacgagggcactcgaggcctggcctaaccacatggaaatggtctcggtccagg

SEQ ID NO: 76314 - DNA, 1594 bp, Zea Mays
ggcaaaagcactacatatttttataatcaccaagaagtgattccaggtttaatcaaatcaaaccttacagttttcaaaatctattctgacagtggacagaacacaacaactagtttgtaaaattcataactcttaaactgtcaggcctatggttgtgaaattttaacacaaccaagataagaaaagcatctatgactttcttataacgaccatgaacagattataacattaaattaggcaaacaatgcagtttctgaaatctgtacagaatttgggcagatttagttactgaatttgtgaaaagcataactcctaaacaatcagacttatggctgtcaaattttaacaccagcaagataataaagttatctaccccttttctatagcacatatctacagaaaatacaatttagttcatcaaacatacaacacagggaaatcactgcgtgcagtccaaaacagcaactaataatttcagctcctatttactttaagaattggcgcgttctagagacttgaaccattctaacactttgacatttgttagagttaaaataaccaagtgagaaccaacaagtcaacttaccaatttttatccgagttcttttgtacgctagaatcaccacacacaattaacaaacacctccaccacaataatcggacccggtacatatacgtgtatcggtgcgcccttcacacaccaatttgcattttaacttagacctcacatgaaacactactactttttatccgcgatcataaccatacacatttagaccacaacgagcaattcaccgtgattacgagcttaaccaagtcatctaacaattcggctaactagagtaacgacatagccgctaaataacatacacgtcggcttgcctattatcatcgcaatccgagacacaacatacactacaacatttttataaacacacagattcacgagtatattcgcacatcgaccaatttatacgaatcgtaaaccactaatctccacatcgcaatcaccacgcatttacttcccaaatcatgaacgtatatatgtttatcatacgaaccgagtatttcaataattatcctaaaacaactaactccattacacacttgtatctcaaatctacttgacttacttgaagtgtctactcgaaatcgtgagcacaatcatactccatatgtgaagcataatttaacaaacgcataatacacattgtctcgactcgacttaataatatagagaaagcgacgactactttggcatgtcaccacctctctatatgagccaaaataatttctactatcgactaagagttctaagtattaaacccattattactttccacgcgcaaataaaccttaacttaacacaagtgacaccgctggatttttactaaactcgtcatgcgcataaccccgtctcgcgtacaaccatatggtggcgtgcactcgagacacttcgatcagtgtggcgcgaccactaatatatgaactccgacgcgcatgtcttaataattcatcctctatgcaactagcattgtctaaactactcgtcacatcaataattatactccctttataatcatgaatcccatca

SEQ ID NO: 76315 - DNA, 684 bp, Zea Mays
atcaatgataaaaacttaggtgccattgtgtttaacaaggaagaaagatatcagtgccaacaccaagatgctaaattaaaaatgccatccaatatgaggcggataaaataaggcctagaatcacatgccagtgaagcattgatgctattttccacaggataacccaaggcaagactgagcaatttgccccccaaaaaatgcttaaatcagtatttaagcttaccaaatgtataagtcacgggctttctatcacggagagaacggccggtggtaagtccatctgatgtcaagtagctatcaagaaggagagcttctctctgttgctttttgagcaacctctctttcttctgcatgaatcagaaacagttgattaataagctcaaaacaatcaatcctctggcaaaacaaatctatcaggctgtgtgttagaactacatactttatggatcttttctatctctggaagatattcaatcttcagcttctttccaagtgaaacctctgtcctgttccgacttgaaaagagtttttcctacacagcaaagaacatgaaagtagccaatataaaaaacagataagaatacaaacaactgactaacattccataccagcattttcttccaagcacactatattcagtagccaacctattgttacttgattgaagcttacaactaaaagttg

SEQ ID NO: 76316 - DNA, 460 bp, Zea Mays
acaactcaaagtggtgttctttgattgtgattggttttctccaaactcaacgcgagaaaatcaatatggcatggtggaagtcaaacacaacgacagattaaaaggccacgacactataatccttgcccaccaatgcgagcaggtgtattatatgacatatccatctaagaaaaagggtttggttgattggagggtagttacaaagttaatcctcgtgaacgactatatgctcctggtaatgcaggttatgttgaaagtcaaatcgagcacgaagtgggggctgctgagattttccaagacgaagaacttacaagcacgtttaatgtacaaactgaaatgttggaagaatctttattaggtgatcaaaatgatgtagaggttcctccaaaacgaaaacgagtgacgagaaagaagaaagctacttggcgtccattaaatcgacgaaagcaactagatcctg

SEQ ID NO: 76317 - DNA, 1042 bp, Zea Mays
ttcgtctttaacgcctaaaacttagtccatgcaatggtcaggattagatccactactaggctgacaaatgaaagtgggaactagaagcaagtgagacagctcccatctcaaaagttatgaaggattgtggaatgatggctcaaaggggagaggaaacaactcccaaaagcacttctaatgccgaagttaatacttaagaggatgatgccgaagatgatgccgacatcctgagtccgagcaagcatagtcatatcgagtttggcaaatcaaccataaaatctgtggacttagtttttatgaagaagcttggttactttggaaaaaacaatgaaaaattgatacggtttgcgggtgacgaaataattccagaaccaaaggatgatgaagtggtgggttttaaaagtttttttgtgccgggcttcgattcccgatgtacgagatgattggtgatgttttgaagaaatttgagatatatcttcatcagttgaccccaaatgcaatagtcagacccagtgtttatatatgggctctgtgaagcaaaggcacaaatgctaatgccgaaggcttctacagagtccatgaattccattatcagacaaaggctagaacagatggcctgcacaaaaactttgggtgctacaattttgcataccgaaaggatacaaaagctctcgtgattgggtaccgcacaaaatggcctactggctagacgagtgaatggttttatgtaaaggctcgcaagaaaaggagggagaaaatcatggatatagtgatgagtcctctaagattgagcttcagcatgacaaggccattatgtttaataaaaataggctccccatgcccggtggccgaagttcaattcagagttgtggcagaacatataagcactcgggagttggtccaagcacaacacgggtggggatgctaaagctcagagacgaaggaaacaagctagaacttgtgaggctgccctatcgcttcaagtttcaagacacctttagcggtccatgtgccgaatggctagagatgatcgaaacaatgt

SEQ ID NO: 76318 - DNA, 855 bp, Zea Mays
gcattaggagcaccaccaagacttgatgagtatagttcataaactgttggatggtcgtgacacaacatacaattcccagttatcatgcaaaaaaataattatatataggacaaaaattaagaggtaaacacaaacataaatacacacatacacctcagtatgctcaatcttaaagtgggcaaatccatttcaccatcttaccaaaaagattgggtgtgtaggggaaaagaccttgcaatcactggatgcacattgaggtccccattaagtgatagacctttagcatcctctagcacaaacccctacaaggaccacaagaaaaataaattaattggcaagtaggccaaatatcgagaacctcaaaactgtcccgaatcactaatttctagggtgattgttgggtcatgcagattaaaattcttagaatagagcaaacaaccctattacataatcccctagaaaccaacatcagaagtcctaaactactaaataaagtaacacgcaagtctgcagcccattcctggattctggtctcgtgtgtattgagacgatggagtgatgaacagtacagtacagcttcaagttttgccccaaaactacgatttcataagacataggatagacttgttcaaacccactgccagatatatgcacctgtttgattgccaaatagctgactaagatgatccaagaggattactattttctagtgggcatctgtgattgtcaacagaaggaggcaatgtgagaacaggtgaagtgccaagatttgcatagtgctctcttagcatcaacaagccatgatgaacgaaatcatgagagctctcttactcttgaagagtctgtgaacagaat

SEQ ID NO: 76319 - DNA, 275 bp, Zea Mays
ctctatcatggaccgctggggccatggccctactcgtgaggtaaaaaatattagtatcctacttaattatttcggcccattattctaccgcgtcgtttgccctgcccctgccctgctgatcacgattagttgccgcctgccggcgacgccgccgcattgtaaagcaaacgacgaagcaggagatgaaacgagttgttgtcagcctgcccatcggccagtagccagtgaccagcgaccaggaccagagatccacgcatccaccgactccaagaggc

SEQ ID NO: 76320 - DNA, 526 bp, Zea Mays
gatagaggaacacagtttacctcgcgcttttgaaaaagactacatgagtccatggataccaagctaaacttcagctcagcctaccatccgcaaacggatggaaaagcggaaagaacaaaccaagtgttggaagatatgttaagagcccgcgctttaaagcaagatagaagttgggatgagagtttgccttatgtagaattctcgtacaacaatagttatcaagcaagtctaaaaataacatcgtttgaagcactttatggacgaaaatgtagaccaccgttttattggaatcagaccggagaaagtcaagtatttggtccagaaattctctaagaagcagaaaagcaagtacagattgttagagagaatttgaaaatagcacagtcgatatagaaaagctatgctgacaatagaagagagttgatctttgaagttggagacttcgtataccttaaggtttcaccaatgagaggaatgaaaagatttaaggttaagggtaaactatctcctcgctacattggcccat

SEQ ID NO: 76321 - DNA, 927 bp, Zea Mays
tctccatgactcctagcaagcaaacagtcatgctagtgggcaaggtttgcatgcaaatagcgggcgcaggcatgagacgacacccatggcgagtaatgggcatggacacaaaaagtgcccatgagcatgggtatgcaatatcaatatccacaagtattttatccatttccacctatggtccagggcctgacgtcaaaccgttacctagggtctggtgtgattcaatggacattatgtgagacctatgtagaaaactagccattgaaaaccttgttgtagagtatggtctaatgaacaccatcgaactaatccaattcttaatttacctctctaaaacctctctataggtcatcggccccatcaccattggtataatgctccactatacactagggtccaacatagcatagtgaaagcatttaggcctctagttgattttgatgattaatgacaatacaagattattgtgactaacatgtattttgcagctatatggtaagttaggtcacaatagtggaaattgggcttcaacaagtgaaaacaccccgaatgatgaatatagatgagatggctaaagaagggtgcttaaaatgtcacgtgttgctagttctaagtgtcgaaagagttgttggacatttagtttagaattagggcttttatttatttgtagttgtactataaagggggttttggatgaataacttgacctaggcttgtctcgtgtagtgtggtggtgcacacttgcataaaactagtgcaaggtatctcacatagacccacaaaaagttttgagtggaaaccaaataaaaatacacttaaaagagtttattgggtctctaggtgcatcgaaccagaccaatggcgcactaaaccgattacctagagtgccctattcggtgcccagtctgaaaatgggcaccagaccgg

SEQ ID NO: 76322 - DNA, 313 bp, Zea Mays
caaatctcttctttgtgtattaggataactatttctatcgagattgtgcctattttaagttgtctctgaccatccgtacttgctcctcgacatctccaagcacacctggtccagacatctaactctcaataatctagttctaaaacaatggggttttccacttatgtccatacaatgcctcaaaaggtgccatcttgagacttctagtgactgttgttgtatgaaaactcaccataaggaaaactgtagttctagttggtagcatattgtgttgcacaagctctccacatatcctctagtatctagttagtct

SEQ ID NO: 76323 - DNA, 465 bp, Zea Mays
atagcatttgagaacaagtccccaacaacagggttcactccatttaagcttttgttcggagacgaaacaataacaccggaagaagcaaaaataggatcaataaggactctagcttcggcaaaggacgaagactcttgcaaagtatcaaaagacactatagaaggggtcaggcttcaagcaatagataatagcaataaataccaagctgaaacagtcaaggggtgagacagaaagtgagactaaagaatattaagccaggacatttggtgcttcgaagcatagacaacccagaaacagtaggaaaaactacaactcaagtgggagggccccttcttggtattatctttgtcaagacctggatcatataggttaagagacatggacgggaatgatattccaagatcctagaatggagacgagcttcagagatactatgtgtagcaaccatgtaattttctttccttt

SEQ ID NO: 76324 - DNA, 757 bp, Zea Mays
caagggtatacgataggtatttttggcatgaaaatatctatgggttaagtgttgaggggaatattttgttgaaggttctcaaaatgatgaactttgttgttttaagcctgttttagagataataaaatgagccttagcgaggagcttcgataggtttggggagggagtgataacttcatcatcttggtccactctaggtaagtgaagcaaggtcgaagggagattctagtcacatatccgaagaggattgtgatgctatgaagacaaaggaagatagaggagacgtatatatatgacacgttctcatgaaggaaaagataggggtgcccctgatgagtttaataggtcatgtatatggagattgaggataacaacataatttcatacaaagatgtacatgaccctatccctataaatagctctacagtagcaatgcatgcggtatgagtgtcatcatttttcgtttcacgtgctcctactaccttcggattgcttagcctttgaagcctcttctgttgagccaccttcaaacactttttatgtgttcgaaggtagtagtgtaaacaaacaatgcatgacaatggaagtagatgatcatatatttcacatcacaattgtttgttctcatgtcttatctatttatgttgttgtacttctcacctttgccttcttattactcgaatggccaggggagaaggtgctatcaacttaattgtgttgtcctattgtggatctttacaagagccttgataggtga

SEQ ID NO: 76325 - DNA, 467 bp, Zea Mays
aagcattcacaatctagctcaaagtgaggagaagacagcccagtctcaggggtaatcaagccagcaacaacagtcaagcactcagtagcagtccacttaaagcacattccgctcaccggatttgtgaggggggagaggaggctgaagctttggtggtaggtttaacgcacaaccaagaagacattatgtgtattttgtggcaaagataaaggctacacaagaaggacctatcaacacaccatccacaagcaaaaagagtttgttgttgcggttgctcagccatctcagccgaaggaggtgtttagtatatattcgtactaatcaccctacattccacaatatgttcaaccctaggacccaagccatagctgccctcggcttcaaatgcttcaagtaacctcatgatgggtgcatggttgccatatgcttgctttattctagggccacctccctatgctcaggtccat

SEQ ID NO: 76326 - DNA, 375 bp, Zea Mays
cggaattggacaagttcatggtggttttcatcgatgatattctggtgtactcaaagaacgaagaagaacatgccgggcatttgcatgtagtgcttcaacgtctgcgagagcaccacctttatgccaagttgtccaagtgtgattttttggctaaaggaaatcaaattcttgggtcacactatctctcaggcaggaatagctgttgatcctgataaagtgcaagaggtgatgaactggaggccaccaacaactgttcgccagattcggagttttctgggattggctggttattaccgaaggtttattccggacttctcccgaattgcgaagcctatcactgagttgctgaagaaagaagtcaaatttgtttggagt

SEQ ID NO: 76327 - DNA, 792 bp, Zea Mays
tgctttgctgctcttgcttatctcctctagttctcatgcagcctatcagcgggtagtgtcagtggtcagggtctatgatctgtgacagttcaagagcaggactcagctcaattagtatggttcgggcaaagaatgacactttgggaggtggaggtgatggtcaggaccctcctcgacaggacaagagcaaggcggtctacttggagaagtagggaggcaagaagaagcacaaacaggatagagctactcgagaaatgataggtgcaacaacaataactgagagggcagaccagagaggcaacattcaaattggctcggatgagattgcctaccatgtcagacgatagtcgtctcggttatgctatacctagccagacttgatcccttgctaaagccttctactccaactcccactatagccccatcgcttgcagcctcgactactctagagtcaaccactacctccactacacccatagcttccaccttgcctacctccaccactcctgctcccttcgctactccacctgttcctccacctcgctttcgggagcgtgacgagacaaaggttcatagagctactgccaccatagctcgtcgattcaaacacatgccagtggacacttggcttccaacgtagcgtgacccagaggttggtcccttgtttagcacacagactcaggagtccttcatagcgcaacagactgcttagattgccctaagggctcaccggtgtctggatatgaccgctcttcattaggtagctggttcaaatattgagggccacatctc

SEQ ID NO: 76328 - DNA, 649 bp, Zea Mays
aatttctcgccggagcacgcgaatcgccgcaaagccgcccgcgccgtggattacctcgctcacctctcgattgccggtaagaccttagcagccgcacttaccttcgcctattcatcctatagcaccctttagatttgagtttgcggtctggtgcgttaggagggtcgtccgccggccatggcgccgtcgcgcgtgtccttgcgccgcctgggtcggtcaccggagagagtaaatcgggcgcgaccgttggattagctgtcaacggccgtgatatgaatcagcgtaccgattcggccgaatcaatctcggccggagatcagcggatgtgcgggtgaagggaaatcatgcttgtagaccgttggatgggaaataggtgacccagattagaaaccagggttcggttaaacgtgagtcatggatttgggatctaagggcgctgattcgatctggggttggggcactgtcgtccgttgaacgcggatcgtggggctcatatggcacacgagtactttaaccgtggtaacctaatctgagccgtccgccttcgatcatgtggcccatatgctatggtaccccttcgcgcgtacattttataaacgtccccctgtcttttatatatatcaacccgccgtccaccatgcattagaac

SEQ ID NO: 76329 - DNA, 464 bp, Zea Mays
gccggacagaagcggcggcactcgtgccgacggcgacgatctcaccggagctccaccacaagccgcaacagtgacccactaccaaccccgagtagcgcatcgcaaagggaataacacaacggattaaatgggcaacgtctcaccggagataggcgcggcaagaacggggattctcggaaatggcggagccacgacagtcctccacccccggtgagcgattcagtgattcttggtcgatctcctgccccaacacttcgtaaaacggcttcacacacccgagttcacctctaggctacctttgggggcattttcccgctgctgtcaccgagttatggcggtggcggatctctccaattctctcacccgagcgctctctctttccgtgttcggggcgacgacgactagatgcagtggagagacaggggacggggctaggttttataaccacgacgcgaggatctcgg

SEQ ID NO: 76330 - DNA, 1336 bp, Zea Mays
ctgaactttacagagtttcacttctgagttgcgggtctttcggactactgagtcaagaatctttactggcttctcacggtactgaagatctttctgaatctgtattgcctcttcttcgatgtgactttctggtacttgcaggcatttgcagagctgggacaggtgaaacacattgtggatatcagacatggattctggtaactcaagatggtacgctgcgggtcccactctgccaatgatgggataggggccgatgaatcgcggtgctagcttccctttcacttgggatcttctgacaccacgcatcggggagaccttgaggtagacgaagtctccttcctcaaatctgagttctctccgcctgttgtccgcataactcttctgccgactctgagcttcaagtaatcttctgcgaatcagggcaactttctcctcagcctctttaacaaaggcaggtccttccagtgccttttcccctacgttggaccacatgagaggggtctggcattttcgtccatacaatgcttcgaacggtgacatcttgatgctgacctgatcgctgttattatacgagaactccgcataaggtaaactggattcccaacttctatcgtaggttaacacacaggctcttaatagatcttcgaggaccttgttgaccctttctgtctgcccatctgtctgagggtgataggcggtgctgaagtctagcttggtacccatagctttctgaaggcttgtccaaaatttggaggtgaactgggttcctctgtctgacactatctttcttggaatgacatggagtctaactatctctttgagataaattcgggcaagggtggctcctccaaaggtagttttcactgggatgaaatgggctaccttggtaagacagtctattattacccagatagagtcattccctttttgcgtctggggtagtccagttacaaaatccatgcctatttcttccacttccattcaggccctgggaggggttgcaataggcctgcaggcttctggtgctcggccttcgttcgttggcaggtgtcacaccgggccacatactgtgctatctccttcttaatccctctccaccagtatctggttttgaggtctaggtacatcttggtagttcctgggtggatggagtaggctgagttgtgagcttcctcgagcaggacttctcgtgcctccccttttggtacacacagacgattcttgaaccaaagggctcattgttcatctgtcctgaggttcggaagttgttctttgcgagctttttccacaagtcttgctgtctctgagtctaggcgttgagctttgcatatgaggt

SEQ ID NO: 76331 - DNA, 500 bp, Zea Mays
ctcataatgaaattcttgtatttgtattcaaatttgtgaaacaagtttgagtttaaaaaaattagaatttgaaaataaaaagggaacaaaaaagaaaaggatgggaatttaaaagaaataatttatttccccctaaataaatgacaaggaaaacaataaataaaatattggaaataatagatgttatattttcttcaagggtgtgtttgatattggaaaacttgggagttcataacatgagttgaattgaatttaaagggagggattataaatgggagaagaatatagaaaggaaaaagagaaaatagagaaatcccagctgggccgttttcctcttcggccggcccaactcagcttctctccccgctcagcccatggcgctcactgccgtacacgtatgtggcttactagtggggccgccctgtcatcacctattccttgctccgtgcgcatctcaacagaacccgccatgctcgcatggtcagcactccctcgccgcg

SEQ ID NO: 76332 - DNA, 413 bp, Zea Mays
ctcttccatgggacagtgctccagatggatgatttctataattccattcgtctgtttaggaagagtagcgtagcatctccatctttggtatgatataacgacagaactgcaaggaacagaagatggtaggggcagaacagatgggagaacgacagggaacaaccgaacagagtagtacgtacgtgtaataacaaattcctcgtgttctggtcctgtttggttacaagggttctcttcaaatctatctcctttaatctccttatgaccaaacaaacttttagcgtaagatttgtaaatactgtatgtacgagaggttttgcagatagataaaagagtgaatgactaccggtcgcgtcgtcagtcgttcattacgggtagttaaaggtgacgtatggtcatggacgtcaggtgct

SEQ ID NO: 76333 - DNA, 449 bp, Zea Mays
ataaggattagggcaaagaaagatttcattatggatggtggatcttgactcatctgatgattccgttttgcccattgaagacttgagttggtgcttatcctcccatgacgtggttggtcttctttggccttcctcctggagttgctatccgagttgagggcatatggctatagctaggatagctagggtacatgaggtagttagatttaaacagagttttactttgcttttaggatatctagattaggcaacctatgatgtaggttaggttgttgtttacggacaagttagtccagggcattaatttagggtaagatatgtttatagaatcagggcctaatttatgtctaacttacttaagtaactcaatttggattagctcatgttagattaggtgggatctagatcagattggtataactagataagatctatttattttaggctag

SEQ ID NO: 76334 - DNA, 556 bp, Zea Mays
atccaaccacactaaggatctcaactcctagccattgtgctcgggaacatgaagaataagaaacatgagcatatgagaggggaaggaagagagggcagggccttactagtgagaaggtgacagagatagttgccctcggagttgcgtggtgccgccacaccatcacttcgcgccatcacctctttgcctcctatgccaccagcaatgcgactttgccttgcgtcatcttgcctccttgtgtcgtggctaggatttgatagtggttcatttcaggatggggagaaaggggaaagtccaattcgggtcagttttgtttctggattgggtcggaacgaacagctccaatgggcctaaccgaactccaaatcgtgatgactcgttccacctgaaatgaggccagcaatgggcagatatagccgaaatgaacgaggtttgaacaatctttgcttagaatatgtaggttctctagaagggtacatgctggaccttaataagatgtgtagtgcttgagatcttgctctatttttagttccacaggacctctgcgacctgctgt

SEQ ID NO: 76335 - DNA, 297 bp, Zea Mays
gggactgggggaagccgcctccgtcgttcatcgtccacaatgccgatggggcctggggtcaattgctcgccggtgaagatgcttcgtcgggggaccgcaccgatccgcggatggggtatcgccacgctatgcactggtatgctcccttcatgtccgcgccccacatttcgccctcgtctgctctcggtaacgcttggatccggcccttgaagctcggatgggcacgtcaccggcggggccatggccacatcaccttgaagctttttcggccactgcgaactcgccctctgttctcct

SEQ ID NO: 76336 - DNA, 321 bp, Zea Mays
gtctgtaatagctgttattttccaaataaattggggctcaactgactgagggagtaattatggagcaatgtgtgtcgtgtgcctgagggagcaatggagcaatgcgtgtcgtgttaaccgctatgcctatactaggtcattgaaattgcttagttatgcctgaatttgattgaccttgaccccttctattacttgtttcttttggtcatcatagttaggtgtattcagtatgttcttcctgggttaccacttcagttgctgatatgcattgcctctgcttattgctatgcattcctatgctgacactaatttccccatcac

SEQ ID NO: 76337 - DNA, 347 bp, Zea Mays
cacataaacagcttcgctacttgccactaactcctcgagtgaaacggttgtttctatctaaaaactgttatgcacatgcaatggcacaaagaaggtgtccgttagaatgatgagctaatggtgcagacttcagatggggatgcttggaaggctctcgacatgtttgatccagactttgcagccgaaccgagtaatgttcgaatcggcctcgcgaccgatggcttcacaccttttggtcaaatggcatcatcatactcatgttggtctgtctttgttattccatacaaccttccaccttctctttgtatgaaatatgaatttatatttctacgcttaatcaaacctgg

SEQ ID NO: 76338 - DNA, 631 bp, Zea Mays
caaaaacaaatagagttatccaagggtcggctaggcattgctggataaacaattatatgtactagttgaaaactgacaagagtacctgaaattttcaatatgtacttgaaattcaaattctatttgaatttggtttgtaattggaaaaaagaaaccgaaaagaaaaataaaaaggaaacccactcatgaccctgatcctctgagtcggcccaaccatcccacctccctttagttgaacgggtcgctgctcggtcgacccaaaccctgcgctacatccacacccacatccgatgacatcattgtgtaattcacaaaactgttcgccccagagtcatgcaccacacacacgtgtatgcctccattgttgtggggtgagtcccacttgacagattattcttcctctttttactcaggttcattcttaagactaccatccggactctgctccgtagaccgtcttccctctcaccattgggctctctactgtcacgcatgcacatgtgtaccttgtcgctagccgatggacccagggattgtcaggttccttcttccccgctcgataggactcatctcctaaacccatcgtgggctccacaattgagccggtcttgcactgccctagttactgtcg

SEQ ID NO: 76339 - DNA, 498 bp, Zea Mays
ctctgtctgacactatctttattcgaatgccatggagtatgactatctctttgagataaactcgggcaagggtggctcctccaaaggtagttttcaccgggataaaatgggctaccttggtaagacgatctattattacccaaatagagtcattccctttttgcgtccggggtagtccggttacaaaatccatgcctatttcttcccacttccatttaggcactgggaggggttgcaataggcctgcaggcttttggtgctcggccttcgttcgttggcaggtgtcacaccgggccacatactatgctatctctttctttatccctctccaccagtatctggttttgaggtctaggtacatcttggtagtccctgggtggatggagtaggctgagttgtgagcttcctcgagcaggacttctcatgcctccccttttggtacacacagacgattcttgaaccaaatggctccttgttcatctgtcgtgaggtccagaa

SEQ ID NO: 76340 - DNA, 782 bp, Zea Mays
gaggatgagaatggaccagcacttggttggatgataccattaagcagcatgtcgtgcaactgtttctcgatctcatccttgagggctagggcgtaacgataaggttgggctataactagagatgcaccgagtactagggggatagcgtgatcacagtcatgcaccagaggcaactcaatgggtacaacaagtaattttgcaaagacgaacatgatatattgcgcttcagggtgaagggctgagcaactgtctgaatcaagcggaacaatatccactgagaaaatctgaaccactatgccatctggaatggatcatgatgctccttgtaacataacaaaattcccttggtatggtagcaccatccactgctattgccaatgaacatgcataggactgaagctggacaaccaatccatacccaatatagcgtcataagaggagagggaaaaatatagaagttggtgttgaactggaacccttgcatagaccaagcaatggctggatagtgagtcaagaaaggaagttgagcaccgttggcaacctgtactgtaaacttggtggtcaggggtaggacgctaggtaactgtgaagccaaacaggagctgagaaatggatgagaactaccagagttgaccaatacacgaacagatttgtggttcaacactccatccaagcaaaatgtacgaacaccaggcactccagaaactgcagctgtagacagaataatgaatacttgttcttgtgaagagccagcatcatctcccatatactaacaatcctcc

SEQ ID NO: 76341 - DNA, 608 bp, Zea Mays
gtgcaatcgtgaatacgacaaatttaggcggggaagggcaggcaatgagaaagaggaggagttaccgaagttatctatcgtggcattcaccggggcactatcacaggcaatggatagactacctacgacggtctactgcgacgtggtaacaccactgactacgtggtgcacgagcggcaagcgaccaatgccggcgaggatcatcacggtcggccgtagagcaagtgggtacggtgaaccatccagtgaccgcgttcgagcttatcctggcgccaagatcttttactcccctcggttatccactttgcaccgagcatgaatcgcgacgcccggcgtgaatctgggcgcggggtcaccggcgacgagttcactgaacctggattctccttcaggtcattgtactatcagaactccattcagagcgcctgtcagagcattttcaggggtgattttcacaaatttttatgtggcaaacctttaattggtctgtagcaaaattaatctcctacaaaccagctttgattttttttatagcgaccataatctaacatccactggatcttactcaaaatcgcccccaaagtctgtcccagttcactgtcactcaa

SEQ ID NO: 76342 - DNA, 281 bp, Zea Mays
atatgacactagataggacatcctaagagggttgtagatgcgcgtgagacactgagcactcatcagatgtatctaatgaggcaccagatgcgacactatacaagacactcatatatgtgttgtaatgtgcacatcaagcggtgtactcactagacgtgtcttgtgagggttcatttataccaagagatactgatataataataggtagtttttgaactagccattgaagcttgcatcgaacatgtacaatagtggaggtatgtgtgcattagacatgtctg

SEQ ID NO: 76343 - DNA, 562 bp, Zea Mays
ccccagttctccactagaatccccaactcattttttctcaagcgatgctaatggattttgccttttgatttttattaattttgttcttaatttatatatatatttcttaattcttgttcatcgtagacgccagaccgttcctacaatggagcggttcttcaaaagaaaattgccatcaaccaatgatgaagggacttcagaaggaaatcaagatgcaccaaacataaatgtcagtagccattctcagcctgcccaagattatttggtgctgtcaccaaaagatgtcaatttagatgaacttccatatgatccggctgataggaggagaatcacagattatcctggcttaagctacaagattagattagaagaaggtacctggttaaaggtcctcacagaccacaacctagttttaagtatccacaaaaaatcatagtgggcaagccacgtcgatttaacctagcatggtttgatgagtacaattggattgaatatagtgagaaggtggatagagctttttgtctttactgctacttgtttagagattgtattgaaggtcagg

SEQ ID NO: 76344 - DNA, 399 bp, Zea Mays
aaagacttttgctgatttgaggactttgaagaacggtaagctttgttcaatagatctcgaaatgaacctattcagagaagcaagtctttctgccagcctctgagcaccttttcttaacttcggtagctccatccaaagtattgcttcgtttttgtgagggtttgcttctattccttttgtcgagataagacatcccaaaaatttgcccttcttaactctgaagacgcatttctcaggattcagctttaaacctgcccttcagaaattgcgaaggtttcttggagatcaaaatatgatcttgttgcttcgtacttctcacaatgatatcatcaacaaaagtaagatatttcttcccagctacgaactcagtacttttactgtgattctgctaaagtttcc

SEQ ID NO: 76345 - DNA, 422 bp, Zea Mays
gctggggcactccgagacaaactcgaagttaacatgtcccatggaggcagtgttattggaggccatacgatagccgatttgactatgacccatacctacaagggacaagaatacccgaatttacaaaaaatttgggtgaccagggcaaaaagcacacaggtcaattcttagtccaattaggggaactgaccgataaggagggcattctgtgtacgtttattttcattatccctaaccggcactgctttcgcacggtatgccacctaactctatttactattagggagacttagagcagaaatgtcatgaccagtttttctccagagattatgagttagacctggtcaatttagcagccctatgacaaggaaaggacgaatctgttaataattataaccagaggttatgggatactagaaact

SEQ ID NO: 76346 - DNA, 1260 bp, Zea Mays
aaaatccataatgcaatgttgtgggatcctgctttcttgcattgcactaaggaactccatataatcacgatcatgagttttgttgcattgcaattgcccttttcctgtatctttcttcaagaattcatgattatgctcatagtttaccagatcaattcagacggaaataacattctctttagcatcatcgtagatttttttaagtttcatcccagccttgcactatgttcgttttgaacatgtgttatgtatccctggatttccagctaccctttcagcattctttcctttcattgaacaattcaaccatttacaattcttccgctccctatatttcttcaacagaaatccaacctcatatgcatattgactataaaaattatacgcctcgtccacgttactaaatgtcataccgactttaggtatcaattttatatcaatattgtccagctgtgcacagaaatttaacatttatgattcaatagcgactaaatttaatgtaatataggtacaacattacaaaaagtatgtacgaaactaatattatcatatttgagagaacttacatggctttgaagaatatgaggtgtgtcatgttcatgcgccccaatatgtctcatggggatgtgtttatctgctcctaccacgtctgccgatcttgtgttctcatcaatatgtccaggtgccctcaatgccgccgggggagtaacagatacaccctctgtgtaaccggtgatcgcagacgctacaggatgcatgtccattgaagtagacgtacctattgatctatgcacagacgctacaggttgcatgtcatcaccagcaccggtgttggacattccctcgccgttaatcgccgccaaaacacgcccggtgttgtcccttccgccgccgttaaccgtcgccaataacacacagatacgaacgtggatctactgcggctgtaaattaaaattgattttcttgtactaatgctcctcaaaccgtaactatcccttattttcgcgattgtgcagccatctttccttatctcaaaccgatcaagatttatatattgcatggtttatgctatcaagttacacatctttatgcagtcgtaaacggtgtgcacatggtaatattcgttccccgtgattcgtgatacaaaagattccttctatgcatgatttatgcacattactccatatatttatgcgttcgtatattgcctgacgcgtatcatctaggattcgtggctatcgtctgcatggctgacgcaag

SEQ ID NO: 76347 - DNA, 378 bp, Zea Mays
ttaaaatcactcttcgtgcgtggccatattgatgggacaccaatttcgcgcatgatgattgatggtggtgcgactatcaacatgatgccttactctctataccaaaagataaacaaacaagacaatgaactgatcaggatgaacatgactctttgcagagttagtaccaatagtctgatcgaggccaagggtgtcacatccgttgagctgaccatcgtgactaagaccctagtctttgcattcctcatcaccaaactagaaggaaatacaatgttatattagagggagattggatacatgacaatcagtgtctgacttgtactttacaccaaatgttgatacaatggatagatgacgaagttgaaactgtacatagag

SEQ ID NO: 76348 - DNA, 548 bp, Zea Mays
gcaagatgcaatatgcagccctcgaggaatttgtgagaattacttgggggtttaccgggttaagtctacagtttaggggctgacccttgctgcagtggtcatcgtgcgctgagcatgggtccatttgttagtgtcttgctttctacttgtgaccaatgtacggtgcacgcaagcgtgtctgctagatgtaggccccaaggaatttgtgaggattgctcgggggtttactgggttaagtctacagtttaggggttgacccttgatgtggtggtcgtcacgcgctgagcgtgggtccatttgtatagtcttgcttcctgcttatgatcgatgtatggggcgtgcgaacgtgctcgtgtgacttcttttgcttacacatccccctcaaagagagtttttccgaaccttcttctgtggggagggacccccttcaacctagtcggcataccgaggggagccgtcgagctataagcgggttatcaagtgagatccgaccaccccctttccgggtgcggtctcgacgagtggtcccactgggaggctcgactcgc

SEQ ID NO: 76349 - DNA, 380 bp, Zea Mays
gacagtagtaacaccttgacagagtaagcttgacaattgtaacatggacagtagtaacataagcttgacagagtaagcttgacaggttacacaatttacacttggttctttgatacaacaaataagactagcctcagctttcattgaccacattctttgcattctaggttagcatcataggcatataccaacttgacagcttgaaaaatatacacaatttaccatcttgatagcttgacaaagatagtaacatggacaaagatagcaacatggacaacttgatagcttgattgaaggtgtcacaatttaccatcttaacagcttgacagagtaagcttgacagtagtaacagctactttctacacaatttacacttgttt

SEQ ID NO: 76350 - DNA, 764 bp, Zea Mays
ctctgttagtggggtatagtggtcaccgtgagtcaagtaagcgtgagcatgttgcaccgtcttaagtcattgccgacttaagccgattgctccgttagtagggtatagtggtcaccctgagttaagtaagcgtgagcatgttgcaccgtcttaagtcattgccgacttaagctgattgctccgttagtagggtatagtggtcaccctgagttaagtaagcgtcagcatgttgcgccgtcttaagtcattgccaacttaagccgattgctccattagtagggtatagtggtcaccctgagttgagtaagaacgcaagacgaataattcccgaagccttttttattgatgatgcatttcccggtttacagagtacattgccgccccaatagctttttgaatatggttaaggataaaacttcctgagatgttctatattccatgagttcccgacttccgtgccatccatctgtgtgagtcgatatgatccaggccgagtgacttcagccacaatgaatggtccttcccatagaggtgacaatttgtgccgcccctcccccgttagaattcggcggaggatgaggtctcccaatgcgaaggatcgacgccgtatggccttatcgtgatagcgcctcagagtttgctgataccgtgctgattgaatcaccgtgtttagtcgttcttcttcgagtatgtcgacatcctccaacctagtagcctcagctcctgctatgttttcaaagatcaaccttggtgctccaaacttt

SEQ ID NO: 76351 - DNA, 533 bp, Zea Mays
ggactttgctgacgtagtagactggcttctggatggtttggacccctgcggttggtcctgagccctcaaactcttgaccttccatcaccatcgtggtggtcggaccaccaccttcttctagggtaactttctgacttccctggggatgttgtgctgtcctttcgacgaccagaaccatgctcaccacctgtgtagccgctgcaatgtataagtacaacggctcccctggctctggagctacaagtattggtagggacacaaggtgctgtttcaactcttgaaaggctcgttctgcttcctcagtccaagagaatgggctagacttccgtaatagcttgaagaaaggtagcgccctctcagcaagtcttgagatgaagcggctaagggcggccaaggaccccgtaagcttctggacgtccttgattcgggccggaggcctcattgtctcaattgctttgatcttctctgggtttgcttcaatgccccggtgcaaaaccaggaatcccagcaacttccctgcggagacaccaaag

SEQ ID NO: 76352 - DNA, 406 bp, Zea Mays
ttatacttagaaaaccgttccaacgtcttagggttgtacatgccctaatacaattgcgatagagttgagatttttatcagaaaggaggtcccccatttcattaagaaataggaacaaacaattttttacactgcatccaaaactcttctgaacgaacgacaagctaggcaagagaccccaacaaccgcgctcctatatagaaacctatctgaacaagacagaacacaaggacggacaattacaaaacatgggtctctcaccttcaaacatagagcttagaacaactcaacaaatagacggaaactatgacgtaatcaaagcaataagacaatactaagaccctactaaataaagacacacttccaccaggagcagccgtagccgactctccttgcctttagccttt

SEQ ID NO: 76353 - DNA, 393 bp, Zea Mays
gtaaggaggccaacctatttgaggctatcagaattgtgttggagttttcccgatgtgtttcctgaggacttactaggcatgccacccgaacgtaaagttgagtttgccatcgagcttgaacctagaaccgcccctatttccaagagagcctacagagtgtctggatcggaattggtggaactcaagaagtagatcgacaaagtattagagaaaggatacatcataccaagtactttgccttgagccgccacagtattgttcgtggagaagaaagatgtgaaaaagtggatgtgcattgattaccgagctctgaatgaagtcactatcaagaacaagtaccctttgccaagaatagaagatctataagttgagaggaggcagagtattctcaaa

SEQ ID NO: 76354 - DNA, 968 bp, Zea Mays
aacaactagaaatggcccaagggcacattcccctttcatgcaccacaccaggagcgaccacaaccatagtcaccacgattgcgaccaagggaggacccccacgaataacatagctcgtcagggcccattgttgagttggagcatcacctagtgttatagttggtgttggagcgaaggccgcccgctaccatcgatcggatttctttaacaccaattgaacatgttttatcgtagatacaggaagtggagggtaccatgatcggtatcggaatcgaggtcttcggccagcgctaccgatggcatcgaagcgaagggatgcaccatttaaatggggactccttttagtttcacgaaggcatcctcaccagctcggatagttttggacaacaacagtgtcggcgaggttgaagacccgacttcatagggcgaagggtgtcacacgcaggagaaggccgcaccgcccaacggcgggcctaggtcgcgtcccactgtcattctggcccatttgtaagccccaccagggggtaggatctgtagtgcatttaatcaaactgtacctacatcaatgcaatgaccccataagggggaatattctggggctgtggcaggtaaccgggggcataacagtacttaggggggtacaaccacctactcagttacctataaatactctcgcactctacattgatgggataggttgaacaagacactacagttccatgcttatcattttgttgagcacttgtgtcgccttttctcgagtgtttgggcccaccagaccacgtgttagttaaccccaacagttggatagcttcaaacgctatagtgtgtgcacacataattaagatatagaggctcactctgtcacactcagattcaaggacaaatctagatgcatctcatatgtgtgttaggatcaaatttacaaatataatgacttagtgtatagaatcagtgttacaaacttt

SEQ ID NO: 76355 - DNA, 743 bp, Zea Mays
gggctctttaagaaaaggggcgcgacgaaggggtaaactcccatcacggccatgcgatccgagatggacgcatgcgattagatccaaaccaaccaactcacccgagccatcgatcccgagatcaacggccagaatcaatcgcccgaagggttttgtgccatttaatcctggctgtctacgcggagatcaacagccagcaccagtcgatccccaacttccaatcgcagcagttcagatcagatcctacagttgtcgcccgtcttcaacctccagccaccagggcatgacggcaccccaccaagtcgcaacccgctggagcaccatcgcactgatgcgcaagtccatgaatccgacgcacaagcactgctacaaatggtgaaaaacactacggggagcagggagagtattctagagctagcttaccagtaaatcgggtagcgtagaaccccaatccacggcgtcgtgatgaccagcgatatttcttgaagtccggtgagggttcctgagcgacctaactaccaatagattaaggtgaggccacgggtatccttggtaagccataatgatgcaaatttggcccgcaccagaggtccccacggtgacacaaccgagttcttatacggcgatgagttttctctccctctgtgttcttcagcgtgccaatggtttagggaagaccgaaggagcgggtttatatgccagcggttgatagaatctgctaccgagaagctcgggcatgcgcg

SEQ ID NO: 76356 - DNA, 370 bp, Zea Mays
tagtggtgtgaccgaacctcgggataaatcttgtgtctcttgtgttcttgctcattgtgtttgtttgtgttcttcgttctctcaccattgcgtggaagattggtttatatctttttggtgtgtggattttgagaagtgcccttcttagatctactaccttgaaccctgtggatcatttagaacatctcatttccaaagttaactgggtggatttcgagatcaattcagttttatatctcattctttagttgagctcgtgcaaaccggttgaaccagttttgaaaccggtcgaaccggttttacccagttcgtttctagttttgttgaaaaagttttaacttgtttattcacccccctctaggcaattttc

SEQ ID NO: 76357 - DNA, 978 bp, Zea Mays
ccgtggtgttcattttgcatagagatccctggtcttttgaaaaattgtttaatagtcccgcgcattatttctatgtgtcactgacatttgcgccgaggcccttcactttctaattcttcacaacctgtgatccccgaccgtggatggcgaagcagcggctccagcgagccaagaccggccggaaaacgcaatgactagggttctggtgcggctgacacccaattctacccctaatgaccctttcccctcaatcaattgcaagattgtagctcctaatcactctgtccacggtgacagcgcgaccaacggacaaaccgaggcgttcccggtgatctaacgcggtctagttcaattggccgggtcgagaagcatcaagagcatacgagagtgctaaaacaagagctaggagggcgtgatcggaactgtgaagagctgaccgcggcgagctcacacagtacgatattcttgatagatttgggggaaatcccatattagagctctctggtggataatccgagacatgagtgggtgcgctggatgcttgactacctagcggagttgatggcacgctcaatttatagggcctgagggcggtggctcgtgaatttggaatcgcgctggcggccagataggaagaaagttactggcgcaaggatgcgtggccttcaccatggcgatcactggttgaggagctacggttgttaccagtaagctactacggctagcagtgacgtggtaaaagggtcacggcatggcacgaccgaggaaaacggcggtggccacggtaatggccgtgcggccacgtcgctggcaagtgaatgggtgacagagcggctacagggttctgagttcatctagggcgaagatttttccatggtcgatcgtaatccatgccacagagggcacgagtcacggtgtcggcgcgaatccgggcgcgcgagtctgtgatctttgttaggtactgtaccatcatgttct

SEQ ID NO: 76358 - DNA, 666 bp, Zea Mays
ctcaacccccatcgatacaacaagtgtcgcgacatggagaagaatggggggatgtcctgttctgcctaacctccatacatattatgtcttaaccaactatgagctctcaccccgctcgtacaagggtgaaaaataattgtttagatgtactacgtgggtatggcgatctgacagatatgggggtacgaacgaacccatcgatacactagcccataccggaggtgagaatcaccgccacaggtggcactatgctaccagctctacgataaggcagatgacagacgttcgtacatatcactatgctcaccacgaactgcacctagccccttcggtcaagagaagtcagcaatgtcatggctacagaggaacgaatgacgaggaagaaggacatcattagagtaaaacacaaccatccttcccatagatgtcgtatgtccttcttcacaattgtaacagacccctcacttagcatatagggagggcttgggccatgactccatcatttgagccggatcacactcaatccaatacgccaaaaccagggacttgggagctcctccctccctcgctcgacacaagccaccgaagactggagtagggacatttcgcccaaacaagtataaactcttgcatcctactaactcaccattcggcactaaaacgcgc

SEQ ID NO: 76359 - DNA, 387 bp, Zea Mays
taaatggaacaccactcaactccctattacaatgatgttgtaaataagagggggagaagtatggtcacaaattctaggattaagatgcttgcaagctactgaaggctagaccttctgggatagtaaatgcagaacatatattcgttgtaaccaacatagttttggtagacatctagaggatatggattatcctgtgaatggaagacattcacaatttagctcagtgtgcactgatgaggctaggttatcggaagcccttgattcttgttttgggatttaacgagaaatcataagggtgtatgagaaaatgacttcatgtcaattggagaattgtgttatttgaaagctacaagtgtcgacacatacatctcagcaattgtatatgct

SEQ ID NO: 76360 - DNA, 470 bp, Zea Mays
tctgttgcttgttttgagctggtgcactggaattccccgccgggcaagcatttgcataatgcccaacctgactgcactcgaagcatgtggggcatgtcttttgtcttgtaggcctcgccggggtgctagtgggggcagcctgacgagtgtggggtgtcagtggagtcccctgtggagcgtactgagctgggtgtggtcctcctcctggatgagttggtgtaccctagggcggaacgtagcgagggaaaatactgctgctaccctgcccctgggcaatggccttcctcttcaagtctcccagttgaacatacttgtgttcaatggctagagctttatcaagcagcctctgaaatgatgggaaggtacttgcaaccaatgcatattgtagtggcccattgagtccttctgtgaagtgctcttgctttctctcatcattagccacctcatcaggagcatatcttgatagttaa

SEQ ID NO: 76361 - DNA, 364 bp, Zea Mays
attatatttctggaatttaaattcgaaaggcaggaggaggggttgggtatgcttacgtaccaatttccttaggtaggcaatcggggaagttggatcgcaagaattcctcagtctcccaagtagcctcttcctctgagtgattactccactggaccttctacatcttgatcgatttagctcgagttgatctttctttgcaattagaatcttggaagggtactcttggtacaatagctctggctctatctccaattctggctctgctatgatctcggtcggcaatcgaacacacttcttcagctgagatacatggaacacattgtggatggcagacattcttggagataacttcaatttatatgcc

SEQ ID NO: 76362 - DNA, 519 bp, Zea Mays
cagtaagatgtgaatcactagattggactattagataaaaaagattcataataataatatttacggtggctaagtgataataatagaagtgttctaaaatgacatgaatatcaaaaaaccctttttggtcatcctaaatgagagttggagagggcaaagaggcaagccggtggtggaggtgtgctggggcagagcggccgcttcggtgcgttagtgtggcgtgtcacgtatcattgagtccaatgtgaaacggtgacgatgagatgacaacgggcgaggtttagcgagggcaggcgggggttaataaggtcaagcgatgatgtggtggtacatggcggcgacagcaagtggcagccattgccgcgttgcaaaggcatagtgagacccaatgagatagtgatcgtaggtggcatcatggtgccaaggcaagatcctaccgatagcctacccatctactggtgcagactaaaagggaaggtagcgacactgcgtgcaagatcttgatgaggctttattttg

SEQ ID NO: 76363 - DNA, 577 bp, Zea Mays
tgtgtgcatcacaaggatcaagcgactaaaggcgaccaacttgagggtctagtccccataactacgcccagttatggcattaacatggacttacactcagcgtgtgatgaccaacacaggaaaagtctgcccctaaactgcacatacgccgaatgaaccccgaaacaattcacatgaattactcggtgcctcgagggctacatctagcagatgcgcttgcgtgcacctaagaattcggacctcaacaagagctaggtaaccatgggctcatgctcagcgtgtgacgaccatcataggaagggtctgctcctaaactacacatacgccgaatgaacccccaagcaatccacataaattactcgggggctcgggggctatatctagcagatgcccttacgcacacccaagaattcggtcctcaacaaaagtatggtaaccatgggctcacgctcagtgcgtgacgaacatcgctggaagggtctctccctaaactgcacatacgccaaatgaacccccaagcaatccacatggattactcgggggttcgggactacatctagcagatgcgcttgcacgc

SEQ ID NO: 76364 - DNA, 492 bp, Zea Mays
cggggtagttaagattggccttagcccaaggaagggtacgacagtcgaccaactgtagcagacaaaattttaatgcagatcagaactatatgcaagatttcaacccaaatcatttcctagtcaaacatttggggagtcatagcaggttgcttgttattttcttttaagttgtcagaattttttgtatttaattgtacgaaaataatttatttcagttgcatcaagtaatacaagttagttagtagtttcatacaaaagtggtcaaccatccctcttctgttttgtacaaaagattagccagaacggatacaaattcaagtgtttgtcgttagtatgtaagcttctatgaggtgggggaaatgtcaaaagtttgtgaaacatgtggcctgcggaaggcggagagaaaaggaacgcccaacaagttttaatataagagatgtagaaaaataacttagttgttctcaatggagaaggggagaaaatttgtacaaa

SEQ ID NO: 76365 - DNA, 922 bp, Zea Mays
agtaggggttacaagcggttgagagagggaggagaggctgccaagtctctttattggggtggaagtggagcttagaagctgtagggtggagtcctagctaagtattgcctcgatggggctccggcttcctggtcctcgtcggcgcttctcctcctgttcgtccttgtgcgttcctgtccgtctgaaggcgtctggttgccccaatagctctctcattttgatcccctttccctaaggccagcctctcccttttataggctgggagaggggttgaccagcagtggattccatgggaaggagccgtaaggcaagggtacaacaaacgttttatcccgggtggagccatgcgtacttgtggggcccgaggctgctagtctgtctcatatttaccgcgacagatgatgtggggacaatgatggtcctaggcgtcatcattttggctacgccgacccctggcctctatagactgggactcggcgcagcccgtcgtgtagtgcccagcgggtggtctgcgcactcaggcctaatctgatatgccataagtgcatcgtatgctaaggggtgcacgggccattaatgcaccacagtacaaggggctcgtaggtcatgagtctatgcgacccgaggtgcttgtatgtcataagtgggaagcagaccgacgatcatgagtgggaagcggacaggcgtcccgctgtggcacgatgccaagcgtggttaaatgtggtcggctatttatggcaagtcagtctggggctgggcaagggattcactcgagtggttcccttccgacacgctcgaccttccctgttaggttctgccacgccaacctcggtttcggttccgcgggattcgaccaagggcagactcttttaggtttgacacatctgcctctcctaactgaccggcgggccctagcgaccag

SEQ ID NO: 76366 - DNA, 825 bp, Zea Mays
cttttattgaggtataatttattttaaacatgtcccctaatgattcttatgaatgagaaggcattacacataattttatttctctctcttataaaccaaaattgggtattacaaaatgggacaaacgcaaggaaatagtgaagtcgggttatactaagaagtggtcatcatcaaacaagttggattctctgcgtcgatatcgacgtgctagaggtttttgtgccaaatgtgctgagaaatggagtactgggcataagtgtgcagctcctgcacaattacatgccatggaagaggtgtggaatttgttatctgaagatctagaagatgagccagagacagaatcgtctgagccaatacaagaacaaattttcatttctttatcctagtctgcctggaagggttttgagggagttcacacttttaaattggaaggatctattaaggtaaatctatagttattctcattgacagtggtacttctcatacctttctacatgagaaagagcagcctgtgttacagggagtttcagtttgaccttctgcgttaagggtacaagtggctaatggtcagatggctaagggtacaagtggcaaatttagagttgcagggaattcctcatgcagtgcctacttgtaccattgtggaactctggttattacagaattcggatccggccctagcacagtctaccatccatcctagcattcagactctactacagcagttcactcctctctttgaaaatctcacagggttaccacctagtagagattgtgaccacactatacctttggtggagggtgcttagcctgtatctgtcagag

SEQ ID NO: 76367 - DNA, 933 bp, Zea Mays
tgtttttcgatgtcttccgtgagttcgtttccaggttttatcctccttattacaatacggcccatcaggcctacacagtccactctagcccagataccctcacgttacaatgctttactcgttgtggacgtgtagccgctccatcctcgtacttgccatccgcttcattgtccacttgtccgatgtcctggccgccggagctgacattcccttgttcttgaaacgctgcttgtccccaagctggcgcgtgtggaaacctgtcctgtagcgccttcaagtcttcccaggttgccaaggactcatccatgtcggaccatattactttgacttgcgccaccgttgctcctcccttttggatcagccgactttgtaacagctgaataggtatctggagagcgtcagtatgaaccggaagggaggcagccaccacctggttgcggctgactgcagctttgagccacgagatgtgaaaaactggatgaatttgagctgaatcaggcagttgcagcttgtacgcggtgtcaccaactcgctgtataatggtatatgggccgaaatatctgaaggctagcttttgattggcgcgccttgtcactgatgactggacataaggttgcagtttgagatacactcgagcacccatagtgaaaatcctctcagatcggtgcttgttagcatacttcttcattcaacattgagctctgagcatatgctgttgtatgagtttggaaaccacttcccttttctgcatccactgttctagatctgtcacaagaatagctgaattttgatgcagaccgaagtgtttaggaggatgcccatataacacctcaaatggagatcgatccagcgaggaatgagaattggtgttgtaccagaattcagctacaggaagccactgaatccattagcttgggcatgcatgaacgaaac

SEQ ID NO: 76368 - DNA, 479 bp, Zea Mays
actgacaactctttttcttttctgcccttcggtgcccttgttcaaccgctcgtaatcaggatattcaaaatgtagagcatccattacccaattcaatcttcgcttcggtcgggagccgaaggctgcagttagcaactgatcttctttttcgtatagttccctaaaatctcattacacataacttcgatcgtgtccaaccattcttggcaaggttccttgaagtgttttttgaacttaaagtgataaggcagccgaacgagttcaccctctttcttctcttcttcaagcttcggcataccccacttcctcaacgttgggaatactctgttggctaagtattcctggactagatccctagtcccaatatgttcagacacaattctaaactcatacacagcatcttggcatggatcccctggtgtcatgttgcactgaggcctagtcagcccgaagattagctccagcgggctctgaactag

SEQ ID NO: 76369 - DNA, 429 bp, Zea Mays
atcttgaccggtttgatataaggaaagacatgctgcataatcgcgtaaataaagggacagttacggttcgaggagcattagtagaaggaaataaattttaatttacagccgcagttcgcgggttctgctcgggcggattccagcgtaaaacgtgagctaaaacatcgtaaatgagtacaaaatttagcgtaaatcatatatttgttttgtaacagcaaacgaagcccaaaattacggcgtgaaaatcgcgtgcacccaatcgtgcgtgggttctggctagggcagattccggcgtaaaacgtgagctaaaacatcgtaaatgaatacgaaatttagcgtaaatcctatattagctaaaacagcgtagattgatcacgttcgatcgtgcacggattttggcttggtcaaatttcagcgtaaaacgtgaac

SEQ ID NO: 76370 - DNA, 474 bp, Zea Mays
ttcgctttgaccgtcagtttgcggatgataggcagttgaaaacagcaacttgacatccataagttgaaataggtgcttccaaaaagagctaatgaaaatcttgtctctgtctgatacaatggatttgggaggtccatgtaacttcaccacctggtccaagaatacttaagccactccttgggcagtgaaagggtgtttgagtggaagaaaatgcccatattttgtgaatctgtccacgactaccatgatagtgtcataaccttcagactttggcagcccttcgataaaatccattgtgacatctgcccaaattccatgtggaataggaagaggctgtaacagtcctgttggatgagtcctttctggttttgcatgttgacaggtcaggcactggtgcacaaactgagttacatccaccttaagtcccttccaccagaaaagtttcttgaccctctgataagttgcatgtatgcc

SEQ ID NO: 76371 - DNA, 672 bp, Zea Mays
caaaagtctctgttactatctaacacattttcagtttcagtgaacaaactgtctcatagctaaccaaattcaattttcagtttcagtgtaattgcacaaattgtcttagtgtaactgcatagtctaacacattttcagtttcagtgaacaaactaatttttcagtttcattgaacaaactgacaaactgtttttcagtttcattgaactgcacaaaccaaattcaatttcagtgaactgcacaaaccaaattcagccaaattcaatttttagtttcagtgtaacagcacaaattgtcttagtgtaactgcattgtctaacacattttcagtttaatgcaaactaaattttcagtttcagtgaacaaactgacaaactgtttttttagtttcattgaactgcacaaaccaaatttcaatttcaatgaactgcacaaaccaaactcagtttcagtgaactgcacaaagtgcagaaggtttagtgtaatgtctactgtaatatgccgtgtaatgtgtgctgtaatgtgggctgaaggtaactgaaggtgcagtgctggactggaatgatgtgtttactgagtacttcatttgctaaactactcaaacaatcttcacatagtgcaatggtgtgtctttccttattgtttcattgtgtgctaggttcaattcctgac

SEQ ID NO: 76372 - DNA, 867 bp, Zea Mays
caaactctttttcttagatggatatgtcatataatacacctgctcgcattggtgggcaaggattatagtgtcgtggtcttgtaatcgatcgttgtgtttgacttccaccatgccatattggttttgtcatgttgtatttggagaaaaccaatcacaatcgaagaacaccactttgagttgtttatctccgaaaaacttgtactcgagtatatcattaatgactccataataattagtcaccttcccttcatcatcgatagctctagttacaacttcggaatttgttgtggctgctagaggatgagcatcttcgaaccttgtagaacggaaacggaaaccattgacatcatactgaccataacgtctggcagttactgctcctagggacaattgtcgaaggtccaggtgtatattgtcatttatatctacataatctcgaaactaacacaaaaattaggtcccccatcttttccctctcgacgaatctgatcacgttcacaggcagacatccaattttgagaatcaaattcactgttagtacaaggaaacaaaccttttaggataagaaaaacaaggatagcggcaatgactaaaacttaagtttacacttacaggagaaactgactcatctcttccatgttgttatacatgtagagtaaagtagtcttccattcgtcattggtgaaacaatatgctgtgttgggtcctacagttttgcccctccattgaaaaatttcaagatcactgatagggggctcgtcgacatgataccgcaactcaggggcattgacattatgttcctctgtaaagtacaggcccgtgaacgatgctatctctttgtatttgaattcttcagcaatgcaccct

SEQ ID NO: 76373 - DNA, 498 bp, Zea Mays
gagacttgtatgtgaatgaacaatcgtgttttaagacttatgtgttatgtgttaaaatttaagagtggacatgtacgagtgtaagaccaattatatgtggacaagattgtgttttgtgtacttttgtgaatgagacttgtatgtggatgtgaatgaacatctgtgtggttaggatttgtttattgtgagcttttccgattacagttaccgtttctcgatcaatttcgagctattttgctcggatttatccgttttcgatataccggaatttaccgtccgttatccatttccgactttcccgtttatcgattccgaccgaacaaaaatttatgtgggtgaaaacggtgagaggttttttccgaccgttaccggccgttttcaccttatagccagtaccacacccatgacccacctatctatggttatatacttcgggggaagaagcgaagaaccgccttgcgggacctttacgaaacagttgtattttggcagggccgt

SEQ ID NO: 76374 - DNA, 1608 bp, Zea Mays
caattatgaagatttgcaacccaaaccttgagatttggacttatttgcaaaagagccacacttgaaccctattggctaagtctgaaatcagtgtaattagctcaactttgaagtcctatatctgtcaaattataaggtttttgccctaggtcaccacatcaactttgtagatctatggaaggagaataactttgctatagaaatcatgccttggtaccatgaagaattctgagataaatgagcctgaagttagactgtcagactgcttgaaatttgaaatttagattaacagtggaatggcatggagttagggctcgaatttaagcatgaaccagtaagaatttggttagggatgctatagcaaagatgaagagggattattgctctacaacttttctaaagagagattaacaaggcatcatatgaaaaatcgagattcgggcactataaaatggtttgggaggaaaactgattgtgttgcgccatggtacagtgcaccggggggatcaggttcagaacctcgccgtcgacgaccgatctacgccgtgatttgcgccggggtcaggctgagctatcgacaggcatctcctcgcgacgatattcttgaagcaggataagatcttcgcggtaggggggtgattattccggccgccacgcggtcactgatctttccggccatgcttggtcaccggtgccgctctcctctattcgtccacgccatcaccgatttgactgctttacggtcgcggtttaacgtggcaagctctaagagaagtaccacgcttggtgtcgtcgttgatcgccagcagggtccggtgatggttatcaccgtgatcgtcgcgatgctcatggagcctataaatccaccctgctctcacttcgtttgtctcaaatcaaccaagcctagctcttcattcctcagttgctaatccaacaagccactagccatcatgttctgtcccccatcctctgtgatcaacggaattccccagaaccagtttcttctgccgccgtgaagaactcttccgtggccagcactcctcgggttagtgcatacccaattgattcgagttatttcttgtttttagccccctgttgctctcggagccagccaattggagtttacctgagtctcatcaccggaacacccctctgctctgtagaacgccgccgcgacgccctctctatcgacccgcttttctactcttgcccaacccaaattctagcgtgtatataaactctggtgaacccatgaagcttacccaagcttcaatttagtcaaccatgctttctgttatccagaacgcattgatccattcgaccatccgcactgtcgccatgaactggttgattcaaagccccgttagtaaaattgattgaggggaaatgcgcgggaggagttcaatctggtgtctaccgctcgggagcactagtctttgcgccatccggccagtctaacctcgctggtgttcaaagctccgccgtgcgatgtcatggtcctggcgcggtgaagaattagaagtgcaggggcttttctgcgaatgtcagtgagacgttaaatagtagctaagggttcttaacggatattcaaagcagcagggacctcgg

SEQ ID NO: 76375 - DNA, 840 bp, Zea Mays
aaagaagagatctcacacgggagacactcctgaagggtcgccacttcctcttccccacatctaattgggtacacactgcttttttggatgttggttttcagcctagaagcttttccaaaaatctctaaaattttgagaaccagttgaatatcagattcttttggatgcaaaaacatgatcacatcatcagcatacaaggacactctgtgttgcaaaggtctagaagccaatggatgcagcagattttcgagatcagcttttgaaattaaccatcctagcacgtccatgacaagtatgaacagcataggtgagagggggtctccctgtcttaagccctttttgagctgaattttttcgccagcaacaccattaagcagtacttgtgtggacgaagtagatagcagtccacacagaacattcatccaaatctgcccaaaccccagtttttgaagaacttcaaggaggaaaggccaagatactgagtcaaaagctttagtaatgtcgagcttcaaaaggattcttgcttgtctttgctgatggagaagtatggcagtttgttgcacaatcataaaattgtcttggatgaatcgacctttgatgaaagcactctgcctttgggagaccataaattgcagcttattccccagtctgttagctaggattttagtgactagcttggccatgctatgcactaaactaataggccgaaagtccttgacttggtcagcaccctccttttttggaataagggtgatgagagctgaatttaatttgtgaaagtgaccaaacttcctatcccaaatggctgccaaaacttgcatcacattttctttaatgata

SEQ ID NO: 76376 - DNA, 453 bp, Zea Mays
aattgtccactgtatttacctacaagtctagttgcatctattccaacatatggcttacaaccatttaagaacccatctatgcatgaacttgttgcgtagctagcttcatcccttcccaagctttagaatacttcaacttaatctcatattgttcttccaatttctccttagcatcttttgctcccttgtctgaattctttttcaaccaatcagcaagtcggtctgcgacccagtcctgagttgccatcttcccttcacataacttggtgtttgcacaattatggtcaaatggcaattctttattctacaaagaacaagatgaaccaatttgattgatttacaatactctctgctcttgtcacactgagaaccccccttgatcgatttacagtattctctgctccatttaacacctcatagcacttgaattagtgcacacgaacgctgagcaca

SEQ ID NO: 76377 - DNA, 315 bp, Zea Mays
tggcatctacatgtggtgcgctgcgtagatcgacgtctcttgcgtcaaatgtgattggtatgtgagaccattttgtctgaaccactgacccagtgagggatacgtgattgactctgcggtagtgatccttcttctgtgtttggtgtcgaagtatgcacttgatcctccggtaatcatgtggatgaccccatagaagggttgttcagcgaagtcctcttgtttaggtgctagtgggggtggagatttttggtggtgtggaggtgaagggaggacttggatctcttgttgctggtacatatgtttgggctggttggg

SEQ ID NO: 76378 - DNA, 753 bp, Zea Mays
attagagcaagtcgacattgacctcatcaacgacaagattccgtagcatcatccagctcagtagtactgacgactctcttaggtcaaagcattgttgtaaagctcaacaagaccaacttcgctctttgaattcatgagctctgaggtgcgcaactacaaggctccctagatggcatgattgtagcgtccgacaagatctccgtcaagcaagatggcaagatgattgacgatgtcaacccagagtacatccaatgggtcgcgcttcagcagcaagtccttagcttattcatgacattcataactcaagaaagtcatgggtcgggttgccatctacgagacaccccatgaggtgtggtcagaactgcaaaagacctacgcgtcgtagtcatgagcccggaccgcgaacacacggattgccctgaccacaagaaaatgtaatatgataatggctgaatacattaccaagatgaagtcttttgcatatgagctgacatttgcaaagacgaatgttgatgatgaagaacttgtacaaaccactcaacacctcaaagttctacaaatcatgtctctaatgcgcctgatcaccatgctgctgcagcatcgagcttttggtccctcaagcagcgagaaagcagtgcagtggaaccttcacatgacttgcatcatcagagtgctcggtttcatcaagacctgcaactccatcacctcaatgacgtcatgttcccattgtttacatagatcagcgtcctcaga

SEQ ID NO: 76379 - DNA, 551 bp, Zea Mays
atcagctatccgggccaacactcctccgacttcactcggcgtgttcattgcacgagcaacgttagggttcaggtttcgagcgaagagagggttctctcggtgtaacctcgcatcctgctcagcttgttctcgatctgggtcttgagcttgccggtggtcacatcggcgagaattcctcctcactttgaagactcgtccgtcaggagtttctcctacttctgagacttcatcccgggatatgggctgcgctgggtcccgctccccagcctcgtgatgtcgccgaatattccggcgactattcctccatcgtcgagcttctcactggggaggttcttcccttggcatggtaggctcgtcgtcggagatgggagatgactccaatctcccccccaatgaagaggatgtcggggtagaaaggagttgctgcggtgatggattcctttccatccttcattgagggcgaaggtgctggaaagacgactcggcggagctccgttccaggaacgcttgcttccttctttcttgtaatccgtgtccactcctttgtgggc

SEQ ID NO: 76380 - DNA, 532 bp, Zea Mays
gccgcatgtggtttggaacttaagaactcaacctagttaagctctgcatggaaatactcctttcttcatggtctatggttcggaggcagtgctacctgccgacctcaggtttagggcaccaaggctggtcttcgaaaacatagctgaagcagaagctaccagactagaggatattgacgtattggaagaagagcgattgaatacaataattcagtcagctagataccagtaaaccttaaggcgctatcatgataaggctatacgacatcgatctttcacagtggaagacttggtccttcgccgaattctaacgggggaaggacgacacaaattgtcaccactatgggaagggccatttgtggtagaggaagtcactcggccaggatcatatcggcttactcggatgggtggcacggaagtagggaattcatggaatatagagcatctcaggaagttttacccttagcaagatttcaaaagctatcgaggcagcattgtattctgtaattggaaaatacatcatcaataaaaa

SEQ ID NO: 76381 - DNA, 485 bp, Zea Mays
ctacgatggagaggccaatgacgaggttgttacaacgacacaggcaacgaacttcaggtaattttattttgacgatgagttctattttttgttggattgatattattaccagtgcacaatttacaattttgtaggtttcggcggtcccttagagttccatcgacacaacccttggaccaacgtagggtcataaaccctacaggagagaggagctgggtggaggtggcatggagtggcaaaggtcaccggacactagttaacacagtgctgggatctatagctcgttttcactatccaggggtggtacaattcaacggggcagagataggggcgtatcactggactcactggggcctcaaaccatatggacccgaccgtactcaccaagacgcagtgtggtcatcgttttgggtgagtttattatgtcttttaaatttacttaccgtgggcgtctataaatgaatttaattgcttcttcattttgc

SEQ ID NO: 76382 - DNA, 401 bp, Zea Mays
cttaatgctagtataaaggataaggccatactcctaattcacttaagcctaaattggtgacttagatcaactcggccaactcgaccatataccaacgacctacacattcttgataaattgcctaatctatctataaaaagggagagagagattctaatctaccagcctgacctagatgtttccaatgatatacatcattttaccaagtccaacctaacacaaagccacccaactagaatttgacataacacactcaacttatactaatatatatcttattcaatctaatgtgagtcacttaacaagttaagagtagtgaaataaactggatcctacacatataaaccttgttctcccctcatgcacttaaacctaaactagtgcattagaccaactcaacc

SEQ ID NO: 76383 - DNA, 302 bp, Zea Mays
gaggtagtggcggcatatgcaactattataaggatggtgccatgtgccatccaaagatcaacatttcaaactacaatgggaaattggatcctcggccttcgctcatcaagtgcgagagatacttctgtgggatgcacaccctaatggatgaatgggtgtgggttacatccattcaccttgataatgttgctaatgagtggtttcatgccatctaactagaggtcaacatcttgacatggtcccagtttttggagtatatcaacacgtgctttggtcctcccttacgcaccaataggtccgtt

SEQ ID NO: 76384 - DNA, 407 bp, Zea Mays
ctattaggaaggttcagccaagactcatagtaaaaccctatctagtcggatcaacccttaccagataccaaagacgacacacgcttgaatctctcatccatggtatacaccatatagtagtggcaccaagtgtctagtttacacataagcatgtccacactattcatcacatcagtagatatcacaaatagtagtaaaagtaattagcaagtgtcggtgtttcgaaccagctccaacaagtaaatttgtttgtgtgctttctaggtccggatggtgtgctcagtgggcgcaagatatatactggttcaggcataacgtccatacatccaatcttcgttggctcacgctaccagcaccttattgctcaatgctcatagtaggggttacaagccggcaagagagggagg

SEQ ID NO: 76385 - DNA, 360 bp, Zea Mays
gcgtcttcctcattgtctctgccgcctaggaacccggagccacctgcgctgtctgggcttcctgcgctgcctgcgccgcctggaaccgacggacctgctcctctagtgtccgctctttctcctccagtttcttctccttctcctccgcctcgagctcgtgctcggccagcaacttgtcccgcctttcccacatctcctccctccaggcgaggtccttcccctgtcggatgagatccgtcgcccgctcctccagggaggcatccttcgccttgaggttttcttcggcgagagagatgttgctagccctatcatcaagctcctgttgtagcttctgcagtgccgcctcagtcgcggtctgct

SEQ ID NO: 76386 - DNA, 374 bp, Zea Mays
atcaaaatggcaccctttgaagctttgtacggacgacggtgtcgtactccgttaaactggtctgaaccaggtgaaagaagttttttcaggccagatatggtaaaggaaacagaagagaaagttcaacgaataattcataatttgaaagaagcccaagctcgacagaagagttatgcagacaagcgatgtcaacccttacactttcaagttgaagattatgtctacctgaaagtctcactaatgaagggtatatcacgattcggggtaaaagggaagcttgcacctcagtacattggtccttttcctatccttgaaagatatggaccagtggcataccgactccagttacccgaaaccttgtctgcagtacataa

SEQ ID NO: 76387 - DNA, 432 bp, Zea Mays
agaaattgtagcaatgcacaagcatctaactagttcatcatatgagcctgagtctgacacgtgcgggcggtactaatgggtctgtcctcaacgtcgatcggttcggccagtctgttggtccgatcggttcaattgtgtcggagtcgaaaccaatcagtatcgactcgtgcactggagaattggacggtaccagtgtcggtgtttggtaccgacagtgcaccatggaatatgtcgcaaggtgctttttgtagtcaacgagatcgattgtagctcaatggttcaggtggaacgagacgtgacacaagaattatataggtttaggcggctagagtaaaacactgtgtaatgtgtattgcttgagctcgagattacaattgtgtgctgctagggttagctatcgaatgggatatactctcctggattagatgaatt

SEQ ID NO: 76388 - DNA, 900 bp, Zea Mays
gcgtctttgccaatgggtaatagtggaggatgtcctcatcagattttgcccaaattcgcttggatttttgacctatgagcacttgaaactgactaaaccaagcgggccccatgttcgatggcttgtctggccggccgagcgcggaatgcatgtccccgcacactgtcggcccgaccacgtgctctctaccgcgcctggctataaaggccaccatgcggcctcagttggacgctactcgtcccctgctacagcgcccaaaggattgtcggtggtgatcgcctaatccgagcctgctctggcgcccgccatcaccgtcgagccacttcttgcgtggccaagccccaacgaccactctcccactagcccaagcacccagtcgctcccccacgccttgccaaagctcatcgaccccctcatctgagctctactatgccgaggatctcgccaccccacgtcgaccgatgtccgcccgccagaccatgtgaatcggtgagttcacaccaccatcgtcaaattcgagctactactagcttcaccgagccctcatgaatctctcgtgcccttccccgagcacactactgcaccgaggcctccgattgaggcttgctagcgacatccacctgcatatgctcatggactagctagctccactcatcgccggccaacccttgccgtcttcatgttcgccaaattagcccaaagctccccgactaggtcctcagcacgctactgcaccaagtaaccgacaattgctcgccatagtttacctattattaggacaagggaaggacggagcgtgtgttgggatccttaaaaatccaagggccttcacgcattgtcagtctctcaatgctatagtagaccaaggacccggatgaagcattttacatagataaagac

SEQ ID NO: 76389 - DNA, 293 bp, Zea Mays
cgcatctgatgtgttgggatcatcaacccccggctccctcaatgcaatgctgctggtggagtaattgcccctcctgtagtttctgtttgcccgtgtccatctgcatccgagccaaactggtttcctcctggttgatcttcctgcaccattgatacgatctccaagcatggatttgatcgatgaacacttgccagcgttgtgtactctctgatgggctctttaccccatggcgccgccattatccagctccggttacttccttttgccagttgcaccctaacgcacgattcttg

SEQ ID NO: 76390 - DNA, 440 bp, Zea Mays
ccggaccgccggtatcaccatggtactccgacgaccacaattatgccacgttgtggctctttactgcgtagtagtaactgtggcacgcctaggcctaccattttagaaccgctacaccgatgaacaccacgactgagccaccattaactttccttctctccggccgccaacacgccatgccaaaattaggagtcaccgcccttgtactctataaattgagcataccactagctcagttaggtaatcacgaagccagagcacccgctcctgcctccgattagtcaccatagctctccaatttctcttcccccaaattggatttccgcgcctccgtgaacgccgcgccgtggccagccttctgcaggtccgttcacgccctcttcgctcttgtttcagcactcttgtgtgctcttgatgcttctcgacccggccaattgagc

SEQ ID NO: 76391 - DNA, 954 bp, Zea Mays
ttttttccccaataagaggcagacggtgaagccgaataccaccatgagattgcgccagcagcttcataaatctgatgagcccagtagcatgtgcaagttggggtttgggcttgtaaagtgtgacttgaatgttggacacatttgcattgggcctactgcattcattttttttcttcttcttctagtactcccttctatacctccctcccattctttcggaggtcttgagcgccatcacatcatcatttaaaaaaaaaaacaagacggaaggagcgccaacccaaggaatcgacgaaccaggaaacgaatcaccaagtagagagagatatcagcagtctttaccttctggcgtctgtgctcaacgccaaaaatgcagcaggggataagcagattgtgaggagagaatcggttcctcctttcatcctttgttcgtactgtcatactgtgtgtacctcgctctcgttttcggcgtactgtgcgtacctcctgctttcaagctacggaaacttgcgaggattcttgctgcccttccgttgcttgcatagggtggctgggcaattctggggtcgctagcttgggctggcaaaagaaccaagcaaccccgaaccggccgcagcaacacacacaaccctattgtattcttaactctgcctacttcgaaattcaagtccaaatgcctaatactgcatttgcaatggtagatctgtccaggggttcatataggcaagatccctcagccataacttggaggatttggtacatcaaaaccataagtaaattcatcataatttcaaggccaacacagcggaaatatgaagcgatatcccattcagttaggttaattaggtactagtactactgaccattccttgtgcgcattgactagcagatgagttagcaacttagcatacatttctggtagttcccccgcgataaatgcctttcaaattttcc

SEQ ID NO: 76392 - DNA, 689 bp, Zea Mays
agagatcctatgacttagacaaatatatctagtggatttccaactagtctaaatcatggatcttggccattttaattctctaactcatatttcttcttttgctcaaactagcttcaaaatagtgaatttgttggttctgagctttccaacctctctagatgtattgaataggttcctcggggtatttagaacttatccaaatagtagaactgttgatagttcatctattccatattttaccactatatggttggatctgagctgattctgacttagaaactaaaatgatgaacttatgaacctgtgaatcaagactaggcaaactagttagtccgaatggttgtgatagtcatcaagcaccaaaatgaatataagaaacggtttaaggccatttcctttttagggaccactgaagccattcaaggcttaagcctagcgggtggagcacttagctggtgggaattccttgccagactctggaacattgtcgtcgtccgcacctcaccaaagatagggctctgcatgagccaataactggtaataactcctctgaaccattcgcctgggtttcctatacatgtagcattcctagattcgatgttttgtgcgcggggttgaagattggctgtctccggtgatgtctgccaccgtagcatcgggcgacaccgccaggctcttggcctatgcgg

SEQ ID NO: 76393 - DNA, 675 bp, Zea Mays
aggttactaattaactagggttagttaatactgattaaatagattagtcaatttgggcttcgctaacctaactcactctaccccaaaattagtgccttaaaccaactcggccatgaacaaatgacctaaccaatatgttcatgatgaccattcattctaacctaacttcaaactaaagctgacctacttaatgtagtctattctactcatggctatcttagccatatgtcccttactcggatggagacgccaagaccgaaaaagggatagatcaacctcgtcatggaaggacagaagccatacaagatctccaaataagacaagatccaccatataggatagaagtttttctagcctaagccttctctcatcctaaatcttctataatctaacctagtaactaaaacataatatgcccatgtctatgcaagccacacctgttaatgaacggaaacttttgggagtgttaaaactaattagaaccaaaagttaaactacacacaactttccacgtctctttcttactaacctcgaggacaagattatttttaaggggtagaatttgtaacacatcaaaatgctattttgggaatctagtaaaactctctgtagactttgaattggaataccttttaatcataattttcttaactttgaagttacatcttctaaaag

SEQ ID NO: 76394 - DNA, 384 bp, Zea Mays
ccagaggttaaggtcaaagaaatattgaagaagtgctctagcaatgatgggttaaagaaagttgaacccaagtacaagtccttgaagcccaacaatgggagaaaggggcttgggtacaacccacataaggtaaaccctagcatagagcataaggggtggagatcccccaagttcatagagggagccaccctatatgatgccttggggaggattcactcctcaaatgacaagtcaactcaagcaaaggtaaacttgagttacacaaagaacaagatgaaggatgcggtctccacaagtggcgaaaagtttagagctcccatttcgcattcttacctttgtgattatatgttgacttgggattcaggaaaattggttgtaaaatat

SEQ ID NO: 76395 - DNA, 836 bp, Zea Mays
ctctgcagtttcggttgtggctcggtcctagagctatctggtttctctagttaagcagtggcatcttcgactaccgcaacaggtattacctccaaagctaagaaggtagcttcagaagattcaacaacctccgtcttttttgaagtaggcagtgcaacatccttctccaaaaaataagacttcgaccgatgagttacaaccttcattctttttggtttcggcacagtagaagcggtagttgatgcaatccttttcttcagtccttgctttcggaccaaaaagtagtaatcaagatagacaaaacaaataacatcaaaaactttgttcagtcttttcttcccgcgggcaccgaaggcagtattcatggtttcgtcttcagcctttgtacaaacccccaacaaaccattagtcgtcgcctcaatagcctcgagccattcatcatctggctcctcaaactgacttgtgtagcggtatgtatatttcaaataaacaaggctgccttcaatgcaactagtagtggtttccttcggcatctccaaatcattaacaaggggccaaaccttgaaagctatgtgctcctaaactaaatctctggtaccaatgtatatgcacactatgttgaaggccatcagacattcttgagctttattactacctgcgatcgaaggtcttctaatgtcgaagcacaatcgaatggggcgctggattacgtccttcacatcctccctctcactcaaatcatttttaacataaaaccattgcttcatccatgaacccggccatttttccgaaaggttggcacatgacacctcacatcagatcggtacacgaaattg

SEQ ID NO: 76396 - DNA, 1162 bp, Zea Mays
gcagagggagtcatgtcaagcttccactttttagagattgtcgctttcggctcatgagctgattttgccttcttcaaaatattctcatcctcctttactagactggcagcttgcctatttaggatgctgacaatccttttccttttcatcccttcggcacctttgtcaggcctttcatagtctgtgtattcgaaatttaacgtgtccatcactcgattcagccttcgctttggccgggtgccgaaggcagcagtcattaactggtcctccttcttggtgtagttgccaagaatttcattgcacattgtttcaatcatttctaaccactcttggcatggcttcttgaattctttctcaaatttaaatcggtaagggagccgaacaagttcatgctttttgcccccatccttcttcttaggcattccccagccactagaggtaggaaatattatatttgccaagtattcttgcactagatctctagtgctgacttcggccactaccactctgaattctacttcggctacctggcatggggagccaagttgcatgtggcacagaggccttgtcatcccgaagctcaaattcaatggactcatgaccatagtcatcagcttctcccttcttttctagtaagcctttatgtaaaaccattcactcttctaaccagtcggccacttagtacgatagctgagaactggggccttcgtatcctttcgatatgcaaagttgtagcagctgaagttatcatgaagaccatctgctctggccttcgtttggtagtgcagctcgtgcacccggtagaaagctttggcattgggactcatgccctggcttcggaggggccatatgtagacactaagtctaacgattgcattaggtgtcaactgatgaaagtctatctcaaaaattttcaaaacttctccaatcatctcgtgcagtggaaaacaaagtcctgccctgaagaagcttttaaaaattatgacttcattgtcttttggatctaaaatcacctcttcgccagcaaatcagacaagtttgctctcggcctccccaaagtagccctatttcttaatcataaccatgtcgtctaccgtcacagtagattaaccaaattcaatgtggctgggtttcgctgggcttagattagtgtaatcctctt

SEQ ID NO: 76397 - DNA, 2007 bp, Zea Mays
atgagaaatctgtatagcactcaggttgtcacataatagaggtgtatgagtgtcacaagaaacaccaagatcagccaatagccaacgcagtcaaataatttcagcagtggtagtagcaagagcccgaagttcagcttcagcactagaacgagatatggccgtttgcttcttggatttccaggcaataggagaggatccaagaagaatacagtaacatgtagtagaacaacggtcaatagggtcacttgcccaagtggcatcagaatacgcatgtagctgaagtggactatcagaagcatagagtaaacatatggatcgtgtcccgcgtaagtatcgaagcacacgaagcaaatgaccataatgaactgaggttggtgtggatacaaattggctcaacatatgaatagcatgagcaatatcaggtctggtgatggtgagataaacaagactacccacaatatgacgatagtggggtctgctagaggtgtcccatcctgcggacgaagttttaaatgaatatccattggtgttgcaactgtccgtgtatcagtaattccagagcgatcaagaagatcttgtatatacttggactgagacagatataaaccttttgaagtctgctgaacttcaatacccaagaaatagctaagtggacccaaatcagacatttaaaattccttactaagttgcttgacatgagagatatgttctgagttgtcacctgtaatcaacatatcatccacatataatagaagtaaagtgcgcccttttggagagacatgaacaaacaatgcaggatcatgttcactagaagagaaaccagcagctgtgatgatagagatgaatcgctcaaaccaagcacgaggagcttgtttcagcccatacaatgcgcgacggagacgacaaacgtgccctgagggagtatcaacccccggaggaggatgcatataaacttcttcacgtagatcaccattgagaaaagcattcttgacatccatctaggagatagtccaagaagatgaggctgcaactgcaatcaaggttcgaacagtagtcatatgtgcaacaggtgcaaaagtctcatcataatcaagtccttgagtctgttgaaaaccacgagccacaagacgagctttatacctctcaatggaaccatctgattttgtcttaattttgaagacccatttgcatgtgataggaacaacatgcgagggtaaaggaacgatatcccatgtaccagtgcgttcaagagcagccaattcatcaatcatagctagctgccactcaagaatcccagaagcttcctggtaagtagtgggttcaacaattgccacaccagctcgtgggaaaccatagcgatctggaggttcaatggtatcatgatcacgaagacgatatccctgattaaaaacatcgttagactcataattgttagtacaagaatcaggtacaggatcactatcaggaccagccgcaggaatagaccgggaacgacgaatgtaggtttggaacagtaagtagaggatgacgtggaggtggaaggtggtgttatggaaatgagaacatcagatgtggatgtagaagatgatggttcaacgataggaatggaaggaagacacatgaagtagattatgtgggataatatgaggagtgagtagattggttgtgaaagaagggacaattttcattgaaactctcatctctagaaattcgaatatgacgagtagatggatcataacaactatatcctgtgttcaggactgtatccaaggaatagacactctacagattgagcaatcaatttagtccgctcacgaggtggtaacaagacataacatatacatccaaacacacgaagatgatcatatcatagagaagtcccaaaaagaacttcacccgatgatttgtcagaaagtttagatgatggttgtctattaatgagatacacggcaatggaaacaacttcactccaaaagtgtgaaggaacaaaagaagataacaaaagag

SEQ ID NO: 76398 - DNA, 430 bp, Zea Mays
agggcaaatgggctgaccaactacctgaagtggtctgggccctaaacacgatagaatgtcgggcaaccggattcacaccatttcgcctattgtatgaatccgaggccatgacgccgcaagagataaaacatgggtcgccccggacaagcacatcagcagttcttgatgtcgacgaaccaacgtccaaagatctcatcgacggagaccgcgtcctcgccctacaggccatcaacaaatatcaggctcaaaccaaggcctggcgcgacaacgcagtttttttttagtgagttcaacaaaggagacctcgtactcgtccggaccgcccggatagaatcacggggcaagctggagttgagacgggagggcccattcatcgtcaagtcgaaggcatcccccagcgcatacaggctagtaacgccttccggcgaag

SEQ ID NO: 76399 - DNA, 917 bp, Zea Mays
caattggaatgtctcatatctcttgcattatggcttcaaaagctcgtccggtcgtcttgactgggatagatacagggacagataacctaacttcttcttgtccatgacttagctaaacagtcttttgatttgcattgataacaaccttattttgggctaaccatttcatacccagaatcacatctacgtcttgcccttttataactatcatattggtggggaagtcatatcctgctaacttcacgggtacgtggaagactacttccttagtaaaatttgacccccaggtgattgaataataagacccttctttgattcaacactaggtatacaatgcttctcaacaaaagctttgctcattaaagtaaggatacaccataatcaaaaagaatgatggcgggatgattggcaacggaaaacgtacccatcatcacaggctctccttccggggtggtagccacttgagtatagtagaccaatctagttttcctttcacctttgcctaactgagtgcttagcacaattcccctgccttgagatgtacttccaaaggccttttggaagtttgatttattttgcttcggatagggacaatccttgatgaaatgtccagacttcccacagttgaagcagctgttagatgaactgggtagggctgggaaacgagtaccaggggcactcggctgaatattttgagtaggggcagcagttggacggatgaagaccggttgcttgaaaggataggaggatggacgaggaaaagagcgatttgggttaaagggacggaccactagccttgaccgcttttcggatccctgagaggatccctcacccccttcacatccaaaccattttgtctttccctgccccgaattatttgcctccaccgagagtgttgtgctcacgaccctactgaa

SEQ ID NO: 76400 - DNA, 757 bp, Zea Mays
gcggaactaagcacatccctggagaatctgcatgcatattgtaacactctgcatgaggaagtgcacgtgttatacgaccggttgcatccgaatgtaccacaagaggttgcagcaatgggagccggaccatctggagcatctagtggaggacctgatggggagttggatctttttggagcccctccttccatgaacctcgcagatgaacgttctcccaaagctggcagtggagcgggagtggccaaggacgaagataattagagtagtgtaatataagtggtgtccttatgtaaattaaataaggaagttgagttctactaatgagcatgtataattagtactagttggcataatgtaataaaggtggtttactttcgacatgtaataattcagtatatttttcttcctcagatgccatcaagaacgcgtgctcaagacggggcaggaacttcctatgacggggaggaaactccaaacccgccacatgtacctcctatattggctgaggctatcactgccttagttaatgctaccgctaacaacacacgtttcctgcgtgaattggcggggaatcagtttcagcaacatggaggcagaggtcaacctcacgggccccaagacaccacgtacttggaattttctgaaactcgtccaccgttttttgtcaaagcaaaagaaccattggaagtagatgaatgggtacgggtatggagcaaaattttggactggtctgatgtactgaaacccagaagcctct

SEQ ID NO: 76401 - DNA, 307 bp, Zea Mays
atctgcatgacgttctggtgtgccaatccacgggccgggacttagtgtgcgatgaagtatttgacttctccaacctgaagaatcggatgccggaaaccttcagatttagatgcggcaacctgcaactttaaatagacacctgcggtgaacattggagaccactcgacgcctgccaactgaactcaacatcaacggtgaatagtgggtagaacttgacacccgcaacctgaagattgtcacactactgcgacagctaggtggtgtacggtgctgtcgataatcggatgtctagaagctgaaagctgcc

SEQ ID NO: 76402 - DNA, 564 bp, Zea Mays
aggatgtggagttcaggattcatcagggcgcagcgacgacttctgccattgcgcaattacactctagtggccgccttcatgatattgttggcctacctgccggaacaacatcaatagacttggatctcctacaagcgactttgatgtcgcggcgaacgctatgcttggggtgttgtcagtggaggaaataatctgtgatctcccatagctttgttttgtggcccaatttttcttgcaacgcatatggtccttgggtccctcagaccctagtttgtcctaggatcattctcggtccgaggggtgctattcgtgtgactttctcccattcaccataccagtgtgaggcgagtcctgagcctctgctagaagtagagatccgtctggtgaggtcatcccatcattttgttcaactctcccccacgcatcccttccgcgatgatgtgggaaggtgagccaaaccatgctttcctcgatgagctagcagtgacgctcgatgagtttcaaatgggtaatccgagtgaggccctagttccttttgtaggatccaagcgcgaggtccactag

SEQ ID NO: 76403 - DNA, 406 bp, Zea Mays
aataaccaagaaatacacacaaggaagagcggggacatagtttgtgggtggtggtagcggtgagattaggatagcatttgcaaccgaaaacacgaaagtgctcgtaggagggtggttttcctaggagaacgaagtgaggtgtctgaaagtctagagtcttggttggtaaaatgttaaggagataggtggaagttcctaggacaacaacccaaaagatgggagaaatgctggcctggaagagtaaggagcaaacaactggtctgagcggaagtgtagggacatggcatgcaaagatgaactttgtgggagggaaaaaaaaatgtgcgggcgttgaggttattgaactcgcgaccattgtcgtactgatttccttggatggtgacgccgaactgtgtgtggacataag

SEQ ID NO: 76404 - DNA, 436 bp, Zea Mays
cggatttgggtgcaatttgtgtgaaatttcttatggaaaattggtgctaggacatatgtaaacaagcctagggtaattccctaacaaatacctcacttgagcaccgcaaattttgatttctcccaaatttccccatttccttagggtttctggaatgtctgtaattcgtggtaagtatttttgttgaatttcatggtgatgcactctcttggatgtgctgctggtgcacacaaatttgcttgcagtcggtgttgatttcaatctcctttggaaagttcttgtggagttcaagctgctctgtttgttctgttaacagtcgggcacatactgctatttccgtttgcaaaggttctttccgtttttctgcttcttcaacagcaaccttgctatttgcttttctatggagctgttacagattgtccgcattagaagcagc

SEQ ID NO: 76405 - DNA, 428 bp, Zea Mays
catcttcctctccttagagttggtggacagaaattgccttgtgaaggttgttgtctgccttatggttgtggcaaatcttcggactgagtgtgttgctcttgagattgatctgacttgtcttcatgttggcttgagttttggatatttcagtctagggtgaaatcttcttgtgaagcccctagtcgcctctaaatacttttgtctcttgccggtgctaccaaaagtcattatctgccctgatgtattctccatcttttgcagtagcttctctagagaatgaagtggtttccttgcaaaatactattttgtgggacctgaacgaagcccctttatgattacttcaatgacaatgtcgtgacagggctcaaagccgaagaaattttcgtatataggcttaaagatattcatcatggccatgggcacattgg

SEQ ID NO: 76406 - DNA, 495 bp, Zea Mays
gcgatctcctattattggtcagacaggtggcaagaaggttgggtgcccgcccatggcatgcttttggcgatccgttgtcaactgcaggtggcaatacgaagatatcctttctttatataaaaacatcatatgtgcacgctgtgccggcatggtcttaattagtttggatcgaggtgtgtgtgtgccttacattttgatgtttgattggagtaagtcgcaatagatcaagctctttcaaaactaggaaaatcacgaagcctgaattatatttagctggagtgtttcgtaaccgattgatttattggttttatttgaattcatgtttgttgcagagagcaaatttaacttgagtttggagatcatgtatatacagtcctttgcttctgagggcgtgctgaggtccacttgcgcgtggcttaaactttgacactactgcctcgctggagagaaagtagagatggaccaaacatcggttatgttacttatgtaatgcct

SEQ ID NO: 76407 - DNA, 350 bp, Zea Mays
ctcacaagtaacgagagacgcgtaggacatgagacccgtcacgatagacgggagcaactctagctcatcttgcaaccaccccagaaagtgggtccccacctaccccctcgattcgtcaaaggggacggtctgcgcgccaaggtcacggtacgcatccacgaaaagcgtgtgcgcccgttcaacccagcacgggtggaagactccgttctttcacagtggtcacgcatattcttcaactccggctccaatttggcagtacgcttgcgggtagcctgagcctccacacgggcagcatgagcctccgcacaggcttttcccccatcctctttttcattagtaagtcagcgacc

SEQ ID NO: 76408 - DNA, 479 bp, Zea Mays
atagggtgctctgaatatgtcaagtctggttctagggcaacatccgttacttcaacggttcgatcgggaacccgaagacacttcttcaattgagatacatggaacacattatgtacggcagacaatgtttcgggtaactggagtcggtatgccactgctccatattgttcaagaacaggaaaaggaccaatataccagggtgcaagcttccctttaaccccaaaacgtgacacacccttcatcggtgaaactttcaggtagacataatctccaactagaaagtacaagggttgtagtcgcttgtctgcataactcttctgacgagcttgagcttctttcaaattatgaattattcgttgaactttttctttggtctcctttaccatatcaggtctgaagaaacttctttcacctggttcagaccaatttaacggagtacgacatcgtcgtccatataaagcttcgaagggtgccatctt

SEQ ID NO: 76409 - DNA, 484 bp, Zea Mays
gtcgaaacacagtgtgggtgaattttcgtgaagtggtaggcgtcgtcgtatggggatggagcatggccgtcttcgagtagaccggattggtaagcgagaattgttatccacgcctattggggcgagcataggtgaaggtgatttgcgaaatcttttcgagggtgaggaattgaggataatgttgttcaattacagggagatgggtatcatcccgaaggttgagccgatgtaatatatgatgccctcgccgagtgtatgtaactgtaatttgtatgatgtggcctgttggttgtattcgtatgcttgtgctgatccggctgcacccgtgggtcacttttgcgcggagtgtcttcttaatgagagacttcgattaacacacttgttgcactattccggctgcacccttaggcgacttttgcgcggagtgtcttttaagtaaaagacttcgattcacgcacttgttgtgctattccggctacaccct

SEQ ID NO: 76410 - DNA, 967 bp, Zea Mays
ttcacacaattggtgcgccaatctatcagaagtaagcatcaacatgaaagaagcagagagctacctaataaccaaggatccttcatcaacctccaaatgtggtgctagggatgccgcaatatcattagcagacacaacatccaacaacatccaagtttctgaataccgtgatgacaaccgtcgtagcaagatcttcctccgcccgcgccaaattctggttccgaccaatgatacaagggaaggaaggggggaagaatccactagcacaagtgaagtagaaccttagggtggagatgattctggcgccaactgaccgtccacatgattaaggggcaccaagggtcgtttccttggtcggcgacgatgcttcttagccagacgaacctctccatcaatagacggaccaccaatagaagaaacagctggaacaacaggatctgcatgctacaaaacatcactgacaggagtgattctcctccaaactaggatccttgacacggttcttcgcataggcgccaccttcgcagaagacgaaaacctcggcagggaggtcctttcacctaggaggtcaaaccgatcatgatacgtcatccccgtgcctagcggatctgagatcgacttcttggacacaggtgcaacaacaggcgtaagccttcgccaaaccggtcgtcgtggctcaacatgcttaggagcagagcacctgtaagagagatgtcccagggcaccacagtagaagaaaataggtctcccagcaatcctaggcaaggtgatgagtcgagaggcagttgaagcagcggcctacaaggtctgctggcacacggcgggaccgaggctcctccttcgaacttaaacgctttcttctatcaagattgcaccaaatgccacccgttgacatcaatagatgaagaagggcaactgggactttctctgcgtctagaggtgatcgtcgcataaaattccttccgag

SEQ ID NO: 76411 - DNA, 697 bp, Zea Mays
ctccgttagtagggtatagtggtcaccctaagttaagtaggcatgcagatcgataacaaatagttcgagagcttttgagaacgaagtctttttattgatgacgtacttttccaattacagaatacaatgctgccccaatagcttttgaaatctagctaggggtaaaacttcttgagatgctctatattccatgaattccctatttccgtgccatccatttgagtaagtcgatatgatcctggccgagtgacttctgctaccatgaatggcccttcccatagtggcgacaatttgtgtcgtccttcccctgttagaattcggtggaggaccagatctcccactgcgaaggatcgatgtcgtatggccttgtcatgatagcgccttagagtttgctggtacctggctgactgaattactgcattcaatcgttcttcttccagcatatcaatatcctccagtctagtagcttcagcttcagctatgttttcgaagatcagccttggtgccccaaacctaaaatcagcaggtagtactgcctccgaaccatagaccataaagaagggagtatttccatgcaaagctcggctaggttgagttcttaagctccagaccacatacgacaattctctgatccacttccctgcgaacttttcattcttgtcgaagactttcttccttagtgcttccaatatcactc

SEQ ID NO: 76412 - DNA, 446 bp, Zea Mays
caactataaataaatagcagaaatgattttaacttataaatacatgtctttcacaaactatctaacaaactgtagttatcatatgaaccatatatcctaggaatcataactaatagcaatatgcgcaccaatcaaaactaattaatcgaaacatacaacgcaataaacgtaacaaacgaatcagtgagacagtataccttggtcttcaagatataatgatcaaatcaaagttttccaactcgaatacgaagattggagtacttctcggcggtatggaagtacattgaaactaggaattcaaatggtcgggcgtagctctcggccatgaaacgaccaatttataggatttcctagctcggcgccaagatctgtggcgtcgagctaggagccacgtcggcctccgcgtcagtcttcgtcgctagcgagacacgtacctcggtaccata

SEQ ID NO: 76413 - DNA, 764 bp, Zea Mays
ctcatattgatatgcttctaagttatgttaataaattcaatatgaagaagtaaaattcctatgattcattagaaatgttaaaaggtgcatattccccttttctaatgatgtgcactaatattaaggattttacttcatgtctgtgtgacttgtggatgatgaattatttatatctcttatctaaagaaatcatcatttatctcccttgtgctgctaatatccctttttgagtatttttataagcttgaaaagaaaaggggacaactacaaagggaggacactcaaatgaaaaaaagacatcaagaacaataacacctacttagacagtaagatcttcaaatggtcaatggtgtggttgtaagtattctaaaccttttgatttttgaagaataccaggcataagttgattattggaaatactacatgccttgatcaagatgttcatagaattcccctatttttcgttaaaagagatgagcattcaaattcttgaggcatacctttagggggagctccatttctatatcttgatcatattgagactaacattttgtcttagtaatctcataaagtctcaagtatgagaataagtttctcatgaagtatgctgcttcaattcaatccaatttggtaaagtaatatcacttttatcaaggattgtagcttttattgttaaagtagcgtatttactggattctcctattttaagcttatttgatatccttatgttgttcgtttgatcgcatctattatttgtttgatca

SEQ ID NO: 76414 - DNA, 513 bp, Zea Mays
caaggatgggctgtcagactgcttggagtatgaatttagactgacagtggaattgcatgaacttagggctcgaattcaatcatgatccagtgggaatttgactagggatgttataggaaaagtgaaaatggtttgtagggctacaactttgctgcagagcattggttgtgttgccatggaaaattgggagaaaatctgccctaaacatcgactgtcatgctgactgaagaaggttgcgatggtacactgactgaaatagattgcagatgcatcccccttgtcgtcggtgatctttacgccgtgatttatgccatcgccgcgattcgtgctcgctggtgaggggataaccacgacggagtaaaaatcttggcactggatcagctcgggctcgggcgcggatgagattcaccgtacccacttgctcgtcgtgcggccaggatagacttcatcgccgttgatcgctcaccgttgtgcgccacgttcttaagcgctagcccacatcgcggtgaatca

SEQ ID NO: 76415 - DNA, 580 bp, Zea Mays
caggagctggtgtaactatgactaaggcgcagcacccttgtggttgttatagtcagatagcacaacgtcgacctccaccccaaatcataattatcaggagacggtgtacttgacactcaaggcgccacaccatattggttgtggtagtcgggcagcaaactttgttctccaacaagatttccacctccatcatctctcatcgaaagatcgggcacccttctacccgttgggtttatcaagtggcatcagattttaggttgctcggtgagagatctccatcttccttgttttatttacctacaatccacttttgcccaaagatatatttagagtagaaattcacctaaaacattttgagcctttgctttactacttagtttttgacttgttgaattcacggttgctgcatttgggtcgagttgctggtctaaagttttcttaccgctagagttttgagttcgcgccaccttgtttcaatcaccagtttagacctcttgctgcaattcaaccaaaaagaagagaaagcaaaaggcgagtgcataaaaaagccgcactaatcagcaaaacaaaaaaagacatg

SEQ ID NO: 76416 - DNA, 424 bp, Zea Mays
gggtctttttctgtgatttttagcacagagacctattatcacctatgaattttagcaaaaatacattttagtccagaaacctcacctaaatcagagctatagtgtaaagtgcccttttacccttacttttgttatttttgcacaagaagtatctgaataaattttcaacctcaaattttcagaataaaccacataggtcaatgtttacccactgtaatttttgtaacatttttggaaaattctaaattgccatggtagttcaaaagcactcaataaggaacacaatagaaagtaaaaagagaattatgggggaaattagtggtgtgcaaattaaatcctccaagggcccaaagcaaacatccaaaggataactaaaatgttaagttcattcaagaccctaaaataagtgtatgaaacccttaag

SEQ ID NO: 76417 - DNA, 288 bp, Zea Mays
tggaattctgtacagccggccagttgtcccttcatcaccctggataggaagctcaaggtgacagccaagagtttacgcagctggagtgataagcaggtagggcatattgtctctcagctttatctggcaaaggagttgctgcataaactcgaaatcgctcaagatcacatgaccctatctccggctgaatgctggcttaaaaatagactcaagaaacagtccctgatgttggcctccttcaagcgtaccatggcaagattaagatcaagaataacaaggattaaggag

SEQ ID NO: 76418 - DNA, 842 bp, Zea Mays
ggggtatagaaggagaatttaggggaaaccgctgaggaagggagaaaagtaaagggtgaaatgtggatgatgtggctgcatagtgcggtatggagggaaacatttagaggacaccgttgcggttagccttaaactggttgtagcacttcccggcgggctgcccctcttctacatgtaatggctacaggagcttgcagcggtgccccctagcagccctccctcccacacgacagattccttctctccccctgctgttgtggtaccctctatacactgtgtagtcttgttttctgtgcatgttagtaattgtttgttgagaaaaatatgataatgggtgataagtaggtacggaaaatggtattctatggtcgtagaggggtataagaggaatttagaggaaaccgttgcgggggatgaaaattagaggcaaaatcttgacgacgtggcgcaaaagtgggatatagggagataaatgtagagggagctgatacagactagagcttctataagcaatcaaatgattatcagtaatttttatttacctccttccacctcagttttgatggtaatttttcatttatcctctcacatcttaatgttgaattgctcacaaacctaccatatttaaagtgctaatgctatatccagtatctctcctatcatattttctattctacattctatttcaaactatgctctcccctcgagagctcgagggttactgtcgggaaaataatacttgggtcccctagggcccattgatcagtaggaggacgtgggaaatgtccaccccggaaggacccgctcccggataagcccgagacctagagacaagggacgag

SEQ ID NO: 76419 - DNA, 471 bp, Zea Mays
aaaaaatgttggcattactcattatgtctcatgtccccatgctcatcaacaaaatggtgcagccgagcgtaaacatcgtcatatagttgagatgggcatcacccttcttgcccatgcatctatgcccttgaaattttgggatgaagccttcctcacttctgtttttttgatcaatcgattaccatccaaagtacttgataatcaatcccctattgaatggctttatggacatgcaccagattacacttttcttcgcacttttggatgtgcagtatggccaaatcttaggccatacaactcacggaaactagaatttcgctccaaacaatgtgtgttcattggttacagcaactctcacaaaggattcaaatgcttggatccaaaagaaggtcgggtttacatctcaagagatgttgtgtttgatgagaatgtcttcccctttgcatcccttcacaaaaatgctggtgcacg

SEQ ID NO: 76420 - DNA, 536 bp, Zea Mays
gtggccttgttcttgttggtttacattctgggtgcctgggtccagttcattccaaaccctggcgctggcgggcgtgcagccggccgggaggcgtaccagcacagcacgacgacccattggcatgcggattacgtatcgcgatttggaaagggtagtagtggtagtaggtgtagcctgtagggcaaaggaaatggtcagcgaaaataaataaataatggtctgttcgtgctgccacacacacaccatagtcaaactggcggcatgcatagcccgacaacgcatgcccatataatcatttaaaacaatattttatattgtctaacagtgtatttatatgatctattgtactgtttattaaaataggagataagagcaactccaaaaggatgttaaaaagtttacccaaaaaatgattattaagagcaggctaaaaaaatttaagagcatctccaaaaggatgctaaaatcaatccttaaacgtgtttaggggtggaaaaacgaaatttctccgtccaacagacctcccttccttcccc

SEQ ID NO: 76421 - DNA, 502 bp, Zea Mays
aaaggcgctcggtggtggtgtcttttggtcccttggcacggtgcgacttgatggataggttaccgagggagatccgtgcccacgctttatggaccagagagtccgcgccgagaggggagggttcgttgcggcctacatggcttacacggggaggtagttcagcagtgcatgcgaggtaggagatgactagtgggggccagcagtcagcgagagaggtagcgcgggcacaagcgacggcggatgacacacaggtcccacccagcggtgactcagggcgcgccggtggtatttggattacagtcaggatccacgtgctagtgtcagcagggtgatcgaacccgcgtgatggacaaggttgggccgcgcgtgtcatctgggtgggccgtccgggaagaaagagcacgacccagccatggcttttgtctttttattttttagaatttatgtttattttctttttatttttaaatctcaaatttgaattcaatttttttgtgaattt

SEQ ID NO: 76422 - DNA, 421 bp, Zea Mays
gaaaggaggagtaggcaacggccgcaagagcggatgaagattgagaagatcaggcctttgccgcctgcagattcatcaattgttgataccagtgatagtgaaccagaagtcactcagatcgatgttaaggaagtgggcaatgagggtacattggagaaagaagagaaagctactgatggccttaagactgatgggtctgggattgttaataccatggttgaagttcaactgatggagaaaaactctaacaatgccactctggatggtgttatacatgccaattcagagattgccgttgaaagctattttttagttctggatgcaaaaagtgagtcgagcagcagtaaccagactaccgagattggttcagtgattaatttggaggagagagactattatggctgttatccaggacacaaat

SEQ ID NO: 76423 - DNA, 292 bp, Zea Mays
aagcttgtattggccttgtcctcttccttcatgtagatttgatgatatccaaaaagcaatcaaggagtgacatgacttcgcatcctatcatggagttgactattttgtctatcctaggcatgggtaagttgtccttgggatagactttattgtggctagtgaagtctatgcacgatctccacatgacattcttcttctttaccattatgacatcagcgagccaagttgggtagtctattggctcgataaatttggcctctataagtcattgaacttcggcctttgctgcctc

SEQ ID NO: 76424 - DNA, 295 bp, Zea Mays
gccgagctccggcgagcttgtaccggccgatttactcgatgaccggcgtcctactttggcagagaccgaattcaagtcctaaggagagtttcccctcaactaatttcactaatggcgctctaacgcgttctgtccacggtgacagcggacacgacgaacattcacacgcgttcccggcgatctaaggtagcttagctcaattgagttggtcgaggagtatcaggggcacacaagaacactaaaatgagagggcagagggtatgagcggacctgagacgagctgaccacggtgaga

SEQ ID NO: 76425 - DNA, 642 bp, Zea Mays
gcagaaacccaaggagactccgcagtccaacagaacatgtattaggcctttgcaactagactcagctcagcaagaccatgcccaatcacaaatacacaatatcgcaaattagcaacaaacatgacataacccccctcgtcatcaagattacccctcgcaagaaggccgcggtggaaacgcgaccaggggtagaggcagggactgaggacctcaacaacaacgaagattctactatcttttccacagtgaaaactcaacacacccaaccagggactgcctagagactaaagcaacgaaggattgaatggccagaaccctgccagccaataaccaaagagtcatcgctcacacctaccaaccccaacaatataaccagcatcaatttcaaaacgaacaccactattacccccaacagtagaaccacaacccatttccacatcaacaacgccttcaacaacaagaaatcctagtgctatcgcctccaccgtcctagcatccaaaccaacccctaccacctcccccaccactactaaagcaagaagacttcatagatccacccttcaggggattaatccacatgatctccgaagggtccaactcttagtttgaaacaaaatgacaaaataaagatcactaccgaag

SEQ ID NO: 76426 - DNA, 566 bp, Zea Mays
gtcattgcctcggatccgtacatcaagcggaagggtgtgaatccggttgctcggcattctgttgtatttagcgcccatatgacttcgggtagttggtctgcccatttgccctttttgttgtcgaggagccttttcttgatagcgctgaagatcttgccgttggcgcgttcgacgatagcattggactgtggatggtagatagatgcgaacactgccttggtgccaatggaactgcagaattctcggaagtcctgtttgtcaaactgcttgccgttgtcgactgttagcttggacggggctcctaaccgacagatgatgttttgctagaagaatttctgcgtggtcttcgcagttattgtggatactgctttgccctcgatccatttggtaaaatattcgacggcgacgaaggtgaattttaggttcccttgtgttgtagacagtggtctgacaatgtccagcccccatcactgaagtggccaagtgtgggcgatgagcttggtaaattgcaaaagggcgcctgagtgaggagagaatttttggcatgctttgcatgatctggtgac

SEQ ID NO: 76427 - DNA, 957 bp, Zea Mays
cggttccatggtcgtaattttataaaaaaacacttctcaaatttgcttcaatcaacccatagtcctttatcctctgcccctccccgctcctaccattgtactgccgataaggtgtgtcgtctcaacacatgtgtattggactagtctttcataatggaagatttggtgttaaattgttttgtttctccatagatgatgatatgggtgggtaaatttttttctcctagcgtattctgtgatgattaacatggaggctctcattggatgtttctaattattactaattttgaagattaagatgtcatggtgtatatcaatatatataatttaaattcaatgtggaaatgtactatgtaatatcctccttgattgcgtcagtattgcttcagtaagcatgtagaaacatgccacgatcaagctcagctgccctgttgccagtcagatgatggccaatagcccaacacacgatgatttagtggtgatgtggtcgacttcttatatgggctaaaaagaagcatttgtaccagttgcgattatggtaccagaggccctcaccgttcataaataagtcttttctaaaacttgtggtaagtgacaacacacttgttgctgcaagcctgcaatgaattacttggtcacctgcaacaagttttgctctgaggtttatgagaattcagaccctgactagtgtaaattagtagtgctggactttggtcttaaaattaatagccattgaactaaatttctctgttctatatgtaaggacattaagcttgctgcacatggtcccatacttcacccctacatgcctccatgctcgggttatcatctctagttccgttacttgttccattgatcaccactaacaacaacccattggaggagagttcagtgctacatgggtggcttcaacatgtcactagcttgttgggattgggcgacatcagcaaaacttcg

SEQ ID NO: 76428 - DNA, 406 bp, Zea Mays
cagagtttggtttggctaaagacgagttcaatgtgacattgctacaggatcatttaaggaaaggggaggatgatgaccttaccatcagatgtttcttccttatcttattcaaccgtctgttgtttccaaccgctagctggggcataacaaaccatgaagtgcttctgatagaagaaatgcaccatttccatgagaccgattggtgccagcttatatttaatgacctttgtgaagcggtgaagaagtggcataactgaagcaccacaaacgtctccacgacgatatacaaatgctcaattgttgaccttgtaagtatagagttcatcttctgtacatatattgcaaatttttagctcactgtttctttgtggggcatgatatatcatattttataatgtttgttatg

SEQ ID NO: 76429 - DNA, 1231 bp, Zea Mays
aaacaatgaaatgtcgaaggtgggtgatatgtggtccaccacttggctagaaaaacaatgactatagaatagtttgcctaaactctcgcttttgccaagaagctagggtatccctcaggggcaataaattttggagcagggcaagatgactacctttacccttgcctagataggctggagactgatgtttatcgctacatggacaacattgggtttccaaagctcaaagctaggctaggaacgaaattctttactgatatttggaatgctagagaaagggagttgtgcaccaaagcatctaagaaaaaaaggaaaaggtctttgcttagcaatttaacttgctttgccactcattggtttgtcctatacgtttctttgtcttgtagatggaaaaggctgcgaaggaggtcatgacgattagggaggcacgaagaataaagaaacttgaagatattgctttcgtcatgtagccaaagctcctatcatttttatatgtgctactcactttgtttttaaaagatgctctcccataggaggtgattaaaactatcagccgaaggacgacccaaagctgaagattgcactagccgccatcaatcaagtggagaaaaccgtggacgaagttgttctcaagatatgtgaagacatttatgatgaagtcatgaaggaaggttgatttgtaaaaaacatggtccctttgagcgtcggcatggatggtaatggtgggtttccatgcagctaggtcaccatgttggcgaacatgtaaagcacttgcttttggtccttgctcaggaggatgatccgacgagcacattcgcgcagtctgggagtgcctcaacatggggtggggcggagcacccctatcccttcgtcatgatgatttaggtgatctccataagccaaagattgcccatgccataaatgagggtgtcaatgggtaaggtggagtcagcgaggcggagttcgctggtggccgtggcacaaaagtcgagggagccaatggtgatgtggctccttggtgcgaaagtctcaccaccggtgaaagtgaatgtctaagccatcagagtggaaatgtctcttagcacggtaacatccccctacttggcgtgccaactattgtggttttggaaactggggacacaatagaatttgtgttcgattgtggaggctagcatggactcactgcggatggtgagtcaggtgactcgaaggggtttatactggtttagtc

SEQ ID NO: 76430 - DNA, 392 bp, Zea Mays
gccgggaacacttctgtttatccgtagttcgcactgtctccgtggacagggcaatttagggctcagattgtgcaattgaccgaggggaaacgattattaggtgttgaattaggtgacagccaagttagggcaccggccattgcttatcttggctggtacaggttcgccggagctcggttcatcgccgttcgccgtcgaggactgcgggctgtgaagaaatagaagcgcgagggcttatttacaaacgtcagtgagccagtcaaatagtgcgtaggattcttccctagttattcaaacccctgagggctttggtgcaaaaccgccgcgcgggcgcgtttacctgttctcgggctgacttgggccagtttcggcccagtactattcatgttttt

SEQ ID NO: 76431 - DNA, 609 bp, Zea Mays
tttcctctccgacaggggtctagacccattcctaggcgcatcctaacagattactacgtgattagttggataagcatgcgcggtataaggactctcgtccgagttaatctaattgaggtccgtccaggctacactcgtggacttttcgaggcacatgccgtctggaccacatggtcggaccttctggccgtgctcaagtgccaagtctagtactcaacacatgcccctactttttaaggaaactaagcaaaccaaaagcacatggtacaagttgtaagcaactcgatgtgaaaccatcgatttttaagcatcttgcatacaatagcatgatattgcttcataaaacatccattcaataccttatgtagctcatcaccctgtaatgtttataacatatatgcattaccagggatcacgtatgtaactctttaaggctcttcctagcttggggcccgctttgccaaacttctggtccttactccttaatggcaagaaagccttccagacaagatctccaacctaaaatgacttagtctttatatccttgttgtaggccttagtaactatgatcttgtctttctcaatctcccttagagccaccaacctcat

SEQ ID NO: 76432 - DNA, 576 bp, Zea Mays
cacaagaaattaagtcccccatcttttccctctcgacgaatctggtcacgttcacagccagagatgcaattttgagaatcaaattccctgttagtacaaggaaacaaacattttagtctcacaacaaatattctagcggcaatgactaaaataaagtttacacttacaggagaaactgactcatctcttccatgttgttatacatgtagagtaaagcagtcttccattcgtcgttggtgaaatagtatgttgtgctgggtcctacaattttgcccctccattgaaaaatttcaatatcactgatagggggctcgtcgacatgataccgcaacgtatgggcattgacattgtgttcctctgcaaagtacaggcccgtgaacgatgatatctctttagagcaactccaaaagaacactaaaaatttgtttgctaaaacgtcttattggggctgatgaaaaaatattctcgctaaaaacaatttaaatctacatcagactgctaataactaatccctaataattttgaaacagatctcgtaggtcatggcttgcctatttgggccagctcgtttgcgtc

SEQ ID NO: 76433 - DNA, 515 bp, Zea Mays
tttagcagagccatcagatgcttgtttctaagcagattgaactatctaagatctttggtgaaatgatcgatgaagttctaagggctgccacgtagcgtgatactcagcaagaaggtattaatagttatgtttattttttaaaaaattaattaagctcacggataattaaaactaaagttgtatttagctatacgatttcaaatactttattttatgcaacatagtatatattacttatgcattcatttgcactaatacataaccaacacctttcagttgattttattttgaaaactctcatttattttatgcaccccgatagtatattgatgtagtttgtgctaatatgtatgtttaaccattatttttattactctacatttatatttctggttcatttcagcaacaactaatttattattttattgtccaaatgtagatatcccacccactacctcaatgccccagacaaatgctcatgtatccactcctcctgttcgaacccctgatcatca

SEQ ID NO: 76434 - DNA, 421 bp, Zea Mays
aattttctatgcattttacaagttcctagaattgtttttgtattaaaaactaaattctataatcatttctcggtttttattatcctctcgactgggcgtcaattttcagaaagtccaggggcctctgcgtaactagacctaagactcagaacacttccgcggtggacggcgggttaatttattaagtccctagggtttcttttgcaattttggacggccgaaggggtatcatgcattgtgagccgcacgatcctacatctacgattaagattagatcttcgttattatacaccagtgcacagtttttaaccctcggatgcctaatcaatggaccggatctctaattgaccgaggcgctcgacgcccgcccgatcaccatccgacggcccacaatgcccccgcgaatcggtatccccgtgtt

SEQ ID NO: 76435 - DNA, 508 bp, Zea Mays
tcatcatatgtccaacatgtttgacacaaatatgcagtgcttacacatacaaatgtttttattgcaaatactacttgaactggaaaaatggaaatagttctctgacggagaacaaactcaaacgacgaacagttctgcaaaacttaaatgactcacagttttgaacacacataaacaacgaacaggactccaaccgacaactcgaaacagtgaccaaccatgataccgctaagacaaacttcagctccatcccaccactaagacctaactcgacttctcttgcttctcgtaagcccagcatagccaagcgttccttccttctttggtcttaagggttgcaaagacatcttgatgacatttgtctattaacaattgagtcgcaaagaaatgcaagttgcttcctttgattgcaccatcttctatgacttgttgtaattgagcagcaacctctttgcgcactgggtcgtcgtcaaaggaggtaattgacttgtttgatctaaaggtcctg

SEQ ID NO: 76436 - DNA, 443 bp, Zea Mays
gtttcgtataccctgattattgctatccctcgtgaaagcagggaaagaaaaggaaaattgccgcttcggccatctctgctttgccgaagggcaaaaggattaaggtcttaactcaccggctgagaaacattgagacggccatagtgccgaagcttggtgaagggacatccttcgctgctgccgaagcagagcaacctgctcccaccatccctggggaaacctaactaagttgccgaagattcctgaagccggtctagccgaaacaacagaacatgatgccgaagccaaagataaggcggtcaaagagctagagccaaagctgccaaaaatcttgagcccgccagcagaggcggaattgccgaatgttgcaaaggctcccacaacaactcccaagaggagaagaatggctagcgtactagacgctgtcatggagacaacaaggg

SEQ ID NO: 76437 - DNA, 657 bp, Zea Mays
actaagatgtactaggacctaaaggaaaagtattggtggtacggtttgaaaagagatgtggctactcatgttgcactacgtgatgtgtgtcaatgggttaaagccaaacaccaaagaccagcagtattgctacaacctctcaaggtactggaatggaaatgggaataaatcagtatggatttcatagttggactaccccgtaatcgggatggctatgattcaatatgggttatagtggacaggttgactaaaatgccacactttatacatgtgaagacaacctactaaggagcccaattagtagagttatacatgtcaaggattgtttgtctgcatggagtaccgaagaagatcgtatcagattgaggaacccagtttatctcgcgcttttggaaaatactacatgagtccatggataccaagctaaactttagctcggcttatcatccgcaaatggatgggcaaacggaaagaacaaaccaagtattggaaaatatgtaagagcttgcgctctaaagcatggtagaagctgggataagagtttgccttatacagaattctcatataacaatagttaccaggcaagtcttaaaatggcacagtatgaagcactttatggtcgaaagtgtagaaccccactttattggaatcagaccg

SEQ ID NO: 76438 - DNA, 888 bp, Zea Mays
gcccaacacatattttaggcacatttttataatctgccttagttgggatctttatctttgcggccattgcctcagccttttttgtagactcctcgtgctcggccaaatcaacagtatgtgacgtgaggtcccgtgcaatccctttcaaaaattgagttgtgccagtagtcttctttttatcgaacgtggacaccaattttggtatagggaacttagatttctttgatggctgtggatcccttgatggctgtggagaaggtggatcccttgctggtggtgtagacaacggtctccaagaggatgaggaggagaaggtggtggagccctaaatggcgatgcttgtggtggagacggtgggtcagaaagaggatgaggagcagcatgtgaagattgaaggggtgatgatggatgtacaataggaactaaagtttgaggaggcagagatggttggggatgcgatggcgacagcggtggtggatcaaccaatttgacatcccttcgagaccaaaggatgaaattttttatggcctgtccaagtgtctcaataccttcgggcccagggatgtctaccatgttgtcctcggatccttagacgaccattgacacttcttccctgcaataatcatctggaatgtcgcttccatgaaacttgcgtcctgggatcgcaatgtttgtgcctactttcttcatacgatgattgttaataccatatcttataaccactgtgcacgccataggccttgtgatattttatatttttttatgggtctagacctttctttgcaaacttagtattcatctcagacctccagtttgggaaattgattgcaagctgcttcatcgtgtattccttcatgtgttcttctgaaccccgaggcagaacgatac

SEQ ID NO: 76439 - DNA, 449 bp, Zea Mays
ctttctcccttttgtggggtgcaaagaatgtgagattacatgattatcttttcatgatggcaagaacaaggtttaggaagattaggagttttgtttcaacagaactacttgttttgtggtgctttgaggtgaggtgtttgatcttcttatacattcatctggtgtggatgtttcaccattgaaataaaatgaattgttgaagatggtaagggttatgcttagtgcatattaccccttcataaaagagtgttgttttaatacattgatgttgatgtatagctgcatccaaattcgatggtgtgaaatcgtagtgttgattgcacctatgacttgctttgagcttcattgcatgttgtttcatgatggatatcgggttgtgtagtttccttagacaattagtccgaggtagaagttcttgtgttaattaagatcattaatggacccatgtt

SEQ ID NO: 76440 - DNA, 492 bp, Zea Mays
ggcagacctgcgccttggcccaaaaacaccctggtcggcccatttatgcttttccccgctcaaccccacaattacctggtcgggcgcgcgcagtggatgcatggtgggacccagtggtcagccacacaccccctgaacgtgcgcgtcggtcaatgtcatgtgggcccctgatgacagtcgtttcttccacaacggatcatgccaacatacgcaatcctaccagcctcggtcgccgcaaattacgggttcctcagccatggattctgctggttgaggtaccgagcatcctcctggtgatccgatagtgatctcaggactcttgtgaacaaccaagcgattgcgcggaacaaaataacggtggcggcggattcctctcccatgccgttgccgcgccactcctccactgaaatcgggcgggcgtaacaactttcctccccttcggaatccgctttcctcggcttcaaggtataaagccggggcacctcgctctcc

SEQ ID NO: 76441 - DNA, 365 bp, Zea Mays
tgaaaggtcaaaaactgaagaagtaacaaagatgtcagggattttaagtccttcaacagaagcaacagcgctgaagtcactaaagagttctgccacaactcctaagagaaggaggatggtaaatgtgttagatgttgtattagaaacagcaaaaaccttgaatcctgctcctgccagaaaaattgccgaagcttctaaggcgcaacccgaagttgaaacgaaacaggcagaagtcgaagctacaataattcaaactgaaaccaaagctgggccttcagagcccgctgagataaagcctgtcgaaattgaagaaaaggcaatagaagaaaaggccaccgagcaattttcgtctgaaaaggttgcaa

SEQ ID NO: 76442 - DNA, 637 bp, Zea Mays
tgaaccaacagtgaggagcaggccaagacgtgaaaagaggcccaactcaaggttgagtgggctggaatggacccactagggtgtgtgcgttctgtttgccagtgagattggagaggggattaaaaagagaacaggggaaccttgagcgtgtgtggaggattttggagaacccttggccggctgcgtccggatggtgggctaatcagccctgtaatctccaccatactctatatttctgagatcttcgtgagaggagaagtgtgccgggagcggtgcacatcccaccccaatttagtgttctcacaactggtatcagattcatctgtccgatcctggcggaaccaccaagctacgtgctgcgtccgcagtacaaaacccgcgcccagaagcaatccgacgccatggagcaaggcatcgctgaattatccaagctacttcaagcgatgcagtcccagaatgaatcaatcaagacagctctggaagaaaatactgcagcagttcgtgatctgtcctcttggagacctcacatcgaggcggatgtgggcgatctacgggtggagatgagtcagctctctgcccaggtgaaagaaatggcggctattcaaggggattactatgctgcacgcaaggtgttcga

SEQ ID NO: 76443 - DNA, 717 bp, Zea Mays
aaagatgggagattcttggagtatagtacatgtaggtaacactttgcgcggaattaggaaatatttaaacctgaatggcagagcggcaagttgccaggcctcggaaacacagagtgtattaggtgtccgtgccgttgcgacggcatataaattgttgagagagatctatggctactcgtacagttcaatgacagactatcgttgttgttaggcaccatcatccggataaggatagaagtatctaggatagaaatgagcgtgaagttctacacaaaaccgaacagtgctttggtggctcccatcttacaaaacacaatggagatcctcttgcatggacgacaaagataacattaaaaaaactccaagattgattaagctaaagtaaatgcttaacatccacaaacaagtattgtagtgcagtgcactataatacgcaaacacttcactgctcacctccgcctgcagttcaccgcatgcaaattcatcccctatcaaagaacgtgctgaagtaaaaaaagtatcgtatgattcatcatcgttgactgatcagttttcataactacagtgaaattgtaggctcacgccacaccatctgtgatagcatcatcgcttggtcattcacacaagtggaaattggaatcgcgagagcaataaaaatagaagtgagcagccatccatttcattgaaggcttcattttaccaacaaaatagtggtat

SEQ ID NO: 76444 - DNA, 543 bp, Zea Mays
aattttataagttctagcactcatttatatattaaaaatccatttaaaatttaatttccctgattttacaatgctctggactgggcccacaattaaacaggaacgcaggggctcaagcgcaataaaacccaagactcagtctaacccgagaagtactgcgggttgaatctatagtaatctagggactctttagaaagaaagccagggccgaaggggtatggggaattaccagccatccgatcacaatccagcgtcctagatccgcagtggcgaaagggtatgcgcgatctaatcggaaccgtccaaactacgatcaacggtcgacagcttcatctaggcaaaggggtagcactttctaatctaaggcgtttatcaccaatcggacggcccgtgttcatctcctacccagagcaccccggtcgcacggcgcggtgacccgccgcagcagcgccatgggcgaccaccgtgcggagctcgcgcccgagtacgaacccgaatactattgcgtaaaaacaaaatttgggtcacataggaacggacggg

SEQ ID NO: 76445 - DNA, 937 bp, Zea Mays
gtcgttcaagcccttgaagtcacattatgcgcaaccttcacaaacaattttgtttggctctgtattttatttgattgtgttgtgtggcatcatatatttatatatatcgccaaatggccataacaactatatcaagctctatagtgctaggaaatctgggaaattaaattgaaatacaatgaaacacatataagttaattctttgctctctcctcatgcataaagttttacctgaagtaacccaaagatatataatataatgcatgaaagtatttttggcataaaagacatcataaattgggattatattagtaagcaaaaagaccttaccaaatgatttaagaccggaaatctcagtcatacattgctcaaccagatgttagcacattgctctctttgtcgttgaatgacatgaagcaaactatgagataaaaggacatgtaactgctagcaatacgaagttgcgagtataccgagaggttattctaagaaaatttgcactatgtcagtgtgaaaaccgttgtgtgttcccgtcgaaccaccttgctcatcctatctaggaccttttatgctggtgttgcatacatctctcaaaattgtaaatacccctagttgttgaattaactcgagatagtcctttgatgaatatagtatatactgtaaccaaaatggtaaaggtcaaatctggagggacatataaatgaggtttatgtagcagaactacattggatttcaccccatggcatgcttaccataacctatatctgatctaccagaagtaagaagagtagaaaaatagccatgaaatcccacatcaccacagagcttgaagctaaattgggcattaatatgtccttggtccttggcaccagaagagccataagtcttgaccacgagattgtaagtggtgataatttgtgataaaaatataaaaatc

SEQ ID NO: 76446 - DNA, 436 bp, Zea Mays
tgaacctgcctctcgtcattgggaatttcaccaagcgaaacaaccaaattttcaacctcttcgggagagggtcgcactctaaggcccaaaccactgtcaccagcaggaggatttgacacaaaactgatgaaagtcttggaaggaggcagattccaggcagaatatgcaacaggagcaccgatattcgacaccttgcctctaagaatcattttgttggtaacccgggttgagtcagtgataccatgatacagataagctgggtacgctctgtccttcagtggctgaatgttcttaaaaacaaaatcggctaccacagcctcagcagtcagacctttctccttcaacaagccaacctcggcaagcagaaccctagcctcggctatctccaagtctatgggggattcagtccaaattggagcgcaaacatccgactgtc

SEQ ID NO: 76447 - DNA, 337 bp, Zea Mays
aaaacatcccacacccatgcccctgttgtgggggatagatatccccggatccactagaaggcaagaaggcctcacgaaaggcctcgggcccattatttcgcaaggtcctcccttcgtgggccaggggaggaatgtctggcagaatggatcaacatgagatcgaatcgactcgagcccgtgcggctcactgaattcaaacgttatccacaacagtgatccgattctcccgcatagcgccctcagacgtcggaactgaatgatgataagtcggcaggattataggaagataagcttagtcggttcactattacttaggcgcacgttgttatcatatccg

SEQ ID NO: 76448 - DNA, 332 bp, Zea Mays
aggctgttgtccaccggatgatccctttgaatggtatgatggactctaggatgaggcactgatggttgcctttgtatttgctcctctcatcattcacttgatcaagaggcacttcaccattaacactttcgtgttcatcttctaccacagttggcatcctttgggattgattttcttcaagacttggatgacttgaggttgatgggtttgcttgggtggaggatttgtcacccaccacctttgcacccacatcaacaacctcattggtcatccacaaagttccttcctcatcatctttttcttgaggtctcacttcacctattgcaagtttc

SEQ ID NO: 76449 - DNA, 938 bp, Zea Mays
tcggaacctcgttcagtgtcggtaaggtttccttgcaatagtatgagcaatttccgagttcaattccaacaccattgtatgtggtttcgcagataacccgatttgaaacggttcgtagtgacctcgcacaagccattgcaaagatgcatgtagttgggaacgagttgttagatttggccggaaacgagataatggattcgccaaatacggccaaagaggtgtcagtgaacttctcaatgtggcgcgtgtatgaacttgctcagtcactgttggaggaagcacaacgtttagaagatctcgaagctggtccttcgccaccattatctgaatgtttcgataaccaatttgctgaagatgaagatatgggtggcggggaatgggcactggatgatgtgaattctgaagagattgtggatcgtcagatgaagtagagtagtatgtgtggtgtggaatggttatctgtgtaagagttagctgtgttcaagttatctgtgtaaggttagcttgtgtaagagttatctgagtatggttagcttgtgtaaggttatatgtgtaatagttagcttgtgaacctgggttatgactgatgctgaacttgtcctttcagtttgccattgagtattgaagttgccattcagtttggcattgtgaagctgtccattctgttttcttttgtaggttatttgttcagaatgttcagtttgccagttcagctgttaggccctgcagcagctgtccattgtaggttattttcacaatgcagaaaacagaaaatagctgttaggccctgcagcagctgccctgcagcagctgtttgccagttcagtttgccagttcagctggcattctgatgttcacaatgcaggttcaagaaaatgttcagtttgccattgtaggttattttcagtttgccattcagctgtccattttcagtttgc

SEQ ID NO: 76450 - DNA, 577 bp, Zea Mays
ttacggggtgcgtcatctccattgtttttatgacgttgggaagtcctatgtcatagatatcgaggtaagagctgagctcgggcgaggcggaggtccgtccgaggttgtgaccgagccttgtcttgagacttgatgatgcacgccacagtcgacggaaggggagcaggtagccgaggcctagttcgggtgaggcagagtttgcgcccgaggtcgagtttagtgtcgggtgagatggaactcgcgtccgaggtcttggtccacgtcttatcgtattacgtgtcccgttaggagctgtgaggaggcgtgcgctcgcgtaatgatgaaggtgaatctttgacaagaccaccgtcctattgaaagacctgcagcccgacgtgaggtagctgcgcacattaatacgattgtctcccaatagccctcgggcaagctttgtctttaccgcctgaggcaggctcggacgagacggacgtggccgccctggggtgagggagcctcgaccgggacggagagtcacctgagcttccgtcctgcccgagacaggcctcggacgaggcagtgttttagtaagacccatgag

SEQ ID NO: 76451 - DNA, 617 bp, Zea Mays
gggaagataacctcatgaatctgtggcatgagcggtcctgtcagccagatgccctagctaaggccctagaggttaataagaaaagaaaacttcgacattcatcgaacatgcagccagtgattgcctaggctgagtcgagcgacgatgatgatgtggtggatgctggtttagtggatgatgtggaaggtggaggcgtggtgaagacagccaggtatgttgtggaggcaatggaggaggaggagaaggtgctccccttggtctagcgcgagcaacattctaaggctcagagtgatacttcatgtcttgttgcctcaacgaggatggtggacatctaaggtttgtctatgtcgactattgactgtatactagaggaggccattctggaggtgtttcaacatgagttacgtgaaatgaatgttatcgatgttcacatagttcactcggatgaagcatcctctgctggtttgttggttgggccagaggtaagcattctagtcccccggggagctcctgcattagtcggtcatgtcgccgtccaacagaaccttcttgacctggctttcttggatcacaagatcgacatgtagagggtacttgctgggatgatcaaagttaag

SEQ ID NO: 76452 - DNA, 664 bp, Zea Mays
gttgaagtggtgaaacatgagatatgcaaaattgaaagatcaagagcgtaaaagaatgtcgatgagcttcgtgccgccaaagaaaagtgttatgaaatatccttggaatgcgctaagaatttaaggaacaactttgctaaggttggagcctattcctccgggcagaaatttattcgtggaaatcctgatgagatcattcaatggataaatggcaaagttgaagctttcaaagaagttcttagtgatcgaggagatttttgtgcctttgctggtgcctgtggggccacgtccatcttggagaaggctggttgcgatcatgctaaagctgtagctcaaccaaatttcaccttctcagctgatgatgtcagaaacccttcagtcgaagctactacccttggtgggaaattttactccgaagtatggctaaagggcggacgagaaatcgtcgatgaagccatcaaaagaaatgaaaaggaatctcatgatgcttcagaagaggcaaaaagggttgaaaaagctgccgagcgggctagacttataggtatgcattttttaatttattttcataagtttttcagcttcgatactgatagatatttgtgcctcaactcatctaagctttctccacctcccgaaccatacaatcctaaagatgacccgtccg

SEQ ID NO: 76453 - DNA, 332 bp, Zea Mays
cttgacatgggggttgtggctaggtagaggaagaaggttgttgattttgcacttgtggctcttgcggtggtaggtacgtctctaattatcatattccttagtgtgcttgtaggtgcttcctcgttatttagttcatcaaagtcaacttgctctctttgtcagtcgttagtttcatcaaacacaatgtttcaaatttctaacctgtttgtatattcaaattcaaaaacggtttatgtgaatctcaactgagaaaccgtgtttcttagctggtttctggttttatcgattaaaacagtttgttccgggcccgggccccgggaaatggactggtt

SEQ ID NO: 76454 - DNA, 1411 bp, Zea Mays
gtgcagccggacaagcacaataagtgcgcgacatcacccatagggtgcaaagtcttcgtagaaagacacatccgagaaaaagccgcctaagggtgcagccggacaagcgcaataagtgtgcaacatcacccatagggtgtgaagacgtcaaagaaacacacgtccaagcgaaaaaccgcctaacgatgcagcagggaaaagcgtaagtgcacgtcactacctattaaaagtgtcacgcaaacacgatcgcaaatcaaagcaatctcgcaataagcacatcatgcaacgcgccatcatagatcacatacgtaaaacaaagggctcaacggcaacatcgtacaataatacaaatcacgactattaccctcacaattctattgcgaagagggggagggcagcattttcactcactattgcaacaagagcagtgaggctagcaaaaatgtcacataggctccacctttggaataagacccgcctcccaaaaattaaataacatcatccttagctcttcacccttaaacagatcccgcaagtccccctccccaatacacgtttcggacgttgaagacagtagctcatgttgactacccccatctagtcgaagacgggaccgctccatacccattcggcgatgtctcccacttcgtgacaactcatcgatgctctgtttcgacaccactcctcggtcctcgccccggccgaggtggccggcgcttcgcgcgtatcaggtcgcagcggagactccgacgtagccaaatccaacgcagcgaagtagtctaagtccttagaagattccttgatccatgaaaaaggactcccaaattcatccccgcccgaagaccacgacccagtgtcagacccctcaaacatattttcattaaaaggcattgctttcgcagccgtcaaggagttagtatcaacatcatcgaggtttgcctacgcaggcccagacatcggaacctgcacagcaaatgacttttagtaccacaaaaagagagacccaaaacgcaaaatccctaacgtatcccttccacctgcgccagagcagacgccgccgcagggtcctcaccagaaccagcctaaggcgctgagcacttcagctcccacctcctccgcgccacccgtccatgtcatcaagctctcaagaccggcgaggtcctcgacttcttcctcattcatcatctgcaaaggcaacaaagaaattcagttaaaaaacatatgccaatgttcgatcagccctctaccggacagtgtcacgaccgtgacgaccccacatcctatcataaagcgccctagtggaccgctttagcacatcatcttcgacctggaagattctacggtcaaagtcctcgtttgcatggtcgaagaccttgaaatgcctacatccctcgcgggacaaggcattcgc

SEQ ID NO: 76455 - DNA, 824 bp, Zea Mays
ctcaggtctatgatgatgttgttgggtatcccgaatctgaacattatttcttgaatgaactgcactacttttgctgaagtcagagaggcgattggtttgtactctatccactttgtaaacttgtcgatagcggcgagcatgtgagtatatcctccttgagcctttttgaacggcccgatcatttctaggccctagcatgcaaagggccagattacaatgatagtttgcagatgttgggcgggaactggcacgcttcgcacttctggaccaggtctgttgcatccctcttcattgttggccaataaaaaccagacccgaaagcctttcctaccaatgtttttgatgctgcatgtattctgcattgccctacgtggatttcatccagcagctgcctccctgtagccgagtgaatacatttcataaggacccctgtcgcacctcttctatagagaaggccccctatgatggtatagtgagaagactgccttgcaatgcgctccgtgacaaccttgtcatctggttcttccttattttttatgtacctgataattgactctctccagtcgttgggatctacctctgtctcgtctaccgcgttgcattcttcagcatgtcttgttgcgatgcttggccactgcacctcctggacaaaaactccgggcgaaacctgggcccgactagaccctagtttcgataatgcgtctgctgctgcattgcgatccctttccacgtgatggaattccaagccctcgaatttatcttccagcttccgcactgcggcgcaattgctgttcattgagtcggtctagcaatcccagtcctta

SEQ ID NO: 76456 - DNA, 342 bp, Zea Mays
ggttaatgtaaccatcctcttagcacaggatattactccatcatacttggtcaagtagtctattccaagtatcacatcgattccacttgactccaaaattaacagctctactagaaagcttaggcctctcatttcaatcttagtctgagggcatgagtgagtggctctaagttcacctcctggtgatcgaattaatagtttcttcttcaagggatagtttgctatattatgtttttccataaatgactttgttacgaaggagtgagatgctccagaatcaaataaaacggatgcaagaatggagttaataagaaacataccatacaccacgtcggcatcctt

SEQ ID NO: 76457 - DNA, 654 bp, Zea Mays
gtttttgcgggggatttttgcaggtatattacatggctccgcctcgttaaaaacctcaccccccccggaggaaaagagtgtgggccggcataataccgtttggtggattacaagggctcctgggccctgagggtttaaacaaaaaatttgcagagattgtcaatattccaggaatgctctaggtcttcgcaggatggcgttgttagcctgcatgcgctgggggacgccttcaacttgacgatgaatggaccctcccactttggctccagcttgccccgtgactctgtccgggtggttcggacgagtacgaggtctccttcgttgaactctcttgggacgactgcgtggtcgcgctaggccttcgtttgagcttggtatttgttgagggcctgcagggcgaatacgcggtctccatcgatgaggtctttggacgttggttcgtctacgtcggggacggctgatgcacttattcggggtgacccatgctttatttcctgcggggtcatggcctccgatccatatagtagacgaaaaggagtgaatccagttgcccggcattcagtcgtgtttagtgcccagactacttcaggtagctggtcggcccatttacccttcttgtcatcaagaagccttttcttgatggcagtgaaaatc

SEQ ID NO: 76458 - DNA, 442 bp, Zea Mays
gatcatgacttagggcaggcgccattggtgggggtggtggtaattgagcccaagaagcttgagagtgacttgctgaagctacagaagccgtcggctgttggttgcctacgtattccgagatgtatagagtagcacaaaacagtatggaggacttgcttcggctgattctgtcgtgcctcggcttcagcaatttccttttgcttttggatcgtgacctggcacgtcctcgttgtgtgacccttgtcctcgccatagaaaaggcagaacaacttcctaggctgattactaatccttcctccactgaagcttcttcctcctctacctctcggagctggcggtctgtaagaagtttgctgcatgctcgaagactgtgagctatgatgactgctctgagcattgttggccctttcatcgttggcattgtaattatggattgacctgg

SEQ ID NO: 76459 - DNA, 350 bp, Zea Mays
cacgacctccacacttgaagcactgaataccactactcttggctgttgaacccactgatgttgaagtggatgttgctggtttataacctgtgcttggagcagcatcgttctttccgctagaattgccttgaatattagatcccaagcctccagttgaatcttttgtcgctgaggatgcaacagtaaaccttgagattgatttgcttcctctagtcatggttcgtgtaccatatgacaagggcttggtgctcttagaatcttgttgcagccggcgttcagctttggtggcttgatgtaccaaatcaataagacattggtgcgactgaaactcaacaatacgctgaatgtcg

SEQ ID NO: 76460 - DNA, 510 bp, Zea Mays
tcttatcgggttcgttctatccattcgccgtgggatattttggagacctcgtgacgcaagccctgcttgcttctacactcgatcccttcattttttttttattaaaggaaaaggaagcaaaaacttggcgcgtcaacgcgcgtggtacaccgtacactacgcaaggcacaaatcagggggcggggcggagggggatataccagcggagcacccttcagttttgtacggcggaaactggatgaaatcccaggtcggccgtcggcgacctagctagggtagttgtttaacaacaagtccactgcaaaccgaccgcgcgatcctctcagtctcgaactctcgatcaaccgtccagtccacgcgcgcacgacgcacacgccggccttcatagactggtggcagcctgctggcccatgtatagctcggacggacgtggcacaaacttagggcctaagctaaccctacatccattaatacgattgagtccgtatatttaattatagtatttttgcg

SEQ ID NO: 76461 - DNA, 422 bp, Zea Mays
cttcaattgatcccaccatgacaggcttgtaagggtttcataagtgtaactcccttctggcatattactaaacttgctttgtaggaatccctgagaacccatccatgccatgaacttgtccttccagcgaagaaagctctctaagaaatcataatttgttccaaacctagtggcattccaatgaagcaaatcaccaccaattgcctccttcatcatggaatgtagcttgttatggttgtaaagaaaccatgatacccgcctagcactttcaatcacaacatcatgctcaggaaaatttccaatctccttcaacatcaaatttatggtatgagcgacacatggctaccacacaatagtaggatgcttcgcgactaccatacggcatgcctttttgtagttcgcaccattatcaatgataatct

SEQ ID NO: 76462 - DNA, 495 bp, Zea Mays
gagcatgttgcactgccttaagtcattgccgacttaagccgattgctccgttggcagggcatagtggtcaccctgagttaagtaggcgcgagcatgttgcaccaccttaagtcgttgccgacttaagctgattgctccgttggtagggcatagtggtcaccctgagttaagtaagcgcgagcatgttgcaccgccttaagtcgttgccgacttaagacgattgctccgttggcagggcatagtggtcaccctaagttaagtaagcgcgagcatgttgcaccgccttaagtcgttgccgacttaagccgattgctccgttagcagggcatagtggtcaccctgggttaagtaagcgtgagcatgttgcaccgccttaagtcgttgccgacataagccgattgctccgttagcagggcatagtggtcaccctgggttaagtaagaatgcagattgacaatgaacaaattgagcgctctcgaagtcttcttattgatg

SEQ ID NO: 76463 - DNA, 481 bp, Zea Mays
cggtacataaagacatcttcttcctcgtcgtcgtccgctgcggctgtgccgtcgagcgtgttgtcgtcggagaagacagttagcgattcagcggcggtagtggagttgttgagggggcacacggtggagtctgggacgtcaaggatttactcgggccgcgtgctttagatgcagtgcttggggtattttgaggatagtgtggggtgcccttcgggagccgaggaggtcccagagtcaaagggggaactggttgttgtttttgaggagttcttcattgttggccttcgctttcctatgcattgatttgtcatcaaagtgttgtagcgtttcaaagttcaaattcaccagatcacgccgaactccatggtggcgctggcaaagtttgtgggcagcgactacgtatggtggagagccctcagttgaagtcttcgctaagaattattgcctccattggtagaagaaggttgctggcagaaagatt

SEQ ID NO: 76464 - DNA, 703 bp, Zea Mays
cccaatttcactaatctggaccggagcacgtctgttcacgataacggcgaaaaccaagaagaagctacggtgttcagggcaatctagtatggtctagtttaatcgatcgagcctacaagcaataggagaccctagagaggctagaacattcaacagaggggcatgaatcaaccttaggcaggctgatcacgtgagagaccttcacgacggaattctgactgatttgggggaaattcaaaattggagcgctctggtggacgatctgaggcacgggcgggtgttctggttttgtgacaacctaatggagctagcggcaccctcaatttatagtgtccgagagcggtggctatgaatttcgaaggagaaagctagcggccggagagagggacgagtcaccaaagctgcataacgtggcatttaccggggcagtgtcccaggcaatgaacaagctacctaaagcggtctactacgacgtggtaatgctttgaggcaagtagccaggacatataacggcgaaatccggcgatgccatcgcgattaaccgcggcgggacacgatggccggtccggccagcgaccggattcatcccgcacaggatattttcaccatgccctgacgttatctactctttccgtggcacgaatcatggcgaccggcgtgaatccaggcgcaaggtcaccggcagcgaggggtcatgcatctg

SEQ ID NO: 76465 - DNA, 805 bp, Zea Mays
aaactcgactttacgctcgggtggcaggcctggtaactccataggaatcacgttgggaaactccgacacaactctgatggcctcaagcaggttggcctctttaccatctatagacatatggtggcatgctccttcttctagatcgggcatgatcaaatcagttactatctcttcccagatggggacactaaccttactatcctcttgtcacagctgacagtcacttggtttctgtgtagccaattcatccctaggatgacatctaacccttgagtacccattactactaggttagcggggaaatctatcccccttatttcaatccttagatttgagcacatcttatctgactgaacttttccccccaactgaattaacccttagaggtcgaatcattggttctacggggatgttatgtgcttctacccatgatgtagcaacaaaagaatgtgtggcaccagtatcaaatagtacttttgttgtatgggattcgattggaaacatacgtactgccacatctggtgcatcttggattgcttcggcctccaagtggttcaccttcccacggttgtaggcctgaccacagcctcttgttgcttgttgtggtgcttcttgtcttgctggggtgttggaaactggctgctgctgggctgcttcgggcattgcatcgcctagtgaccttgctctccataatggaagcatcctcgacctcctccttgtgctggggctgtctggctgttctgattggtcgttgtggcaggaaggcaaggtgtctaacttctttgcctctgatactaactttttc

SEQ ID NO: 76466 - DNA, 329 bp, Zea Mays
acacttcttcatttgggacacatggaacacattgtgcactgcagacaatgtttcgggtagttggagtcggtacgccactggtccacatctttcaaggataggaaatggaccaatgtactggggtgcaagctttccttttatcccaaaacgagatacaccattcattggtgatactttcaaatacacatagtcttcaacttgaaagtacaagggttggcgtcgtttgtctgcataactcttttgtcgagcttgtgcttctttcaaattatgtataattcgttgaactttttcttccatctcttttaccatatcaggcctgaaaaaccacc

SEQ ID NO: 76467 - DNA, 604 bp, Zea Mays
aacgacccaccacaatccacgcgagtacaagctctatcgtatctggcgtcaacgcgtgtgtggccatctgggctacgacaacgcaacaagcctctataacaagcgcaacaggcgcagttgtggctcggtaattggggtacacgacaagtccacacaacgtgcgcaatcgacgcaattgtggctcggtgataacgacagacgaacaggtcctaccgggcatgcggaaaatacgtgactcggcgatgccggtccaactcaacaggagtggtccgattaagcgagagtacaacatagcaattacatgacgcaaccaagttattacgacacaaataatgtgtcgtgttgccagggcgcagccaatgccatagcttagccaattaaaaatgtagtctgatcgacgtgtctgagtaccaactatatcatttaatcgctcgacgtgagcccaaaagctcaacgcaacacaaatatttagagcgatttgagtatacacaatataatcttcacatgcattttaataattttctgctaattatttactacgggaaataattattaatgcagaaaaaatgaacaccataattaatacatgaacataacacatcag

SEQ ID NO: 76468 - DNA, 460 bp, Zea Mays
gtagtagtggggttccttctcctgccttgtccgcccttattggtctgcaagaactgtccatggccaattttgatcaagctctagaggatatggtccctgagaacttgttgttggaacctgcagatgctgatgcaacagaaacttgtgcagccgtgccagatgctgggttgaggtcatcccgtgcctcgtcgaccttagagcatgatctcgagggtcgggatgctgacctggatcgtcctgatcctatggaggtagctgagggcccgtcaaccttagaggtggtcacggcagagagcttggatcccttgaatagtgctgacatgtgcccagcccccgaggatgtcgccggggaggactcagctcgggtgaggagtgtaggccactacccagcccccgagggtgttgccggggatgacccggctcgagtgggcagtgccaaccttgacccagcccccgaggg

SEQ ID NO: 76469 - DNA, 673 bp, Zea Mays
atcaaattgagcaaaagaaaacaaaaacttgggaacacaaattcaactaagtctttttatcttaagaatcatgcctaaatcatatcatgcactcaaagtgggggaaaaatgtctaaaccctagaataaccttaaaagggccatttaagtaaaaaggaacaaataggtaaaaagaccatgaaaaacatggaatcatggcttaggccaattataaaagttgaagtacactaattaggctacaatatctattagaaaagtttggcgaaaataagtaattaaaatccccaaaaggccatccaagtggagctctctagggaaatctgaaaatttagagttcatttcagccctcacctagaacttgagcacgttcaccttgatccctagctcaaatccatctgcccccattgacaaagttgtgctaaattaacccctctgcaacgtgtgtgaagatggcatcgagattcgttgcataggcacatcaaatctaggatttcatctcgggtttcagcaatgagacaaaccaaacttcatcactccatatatttggctccattcaacaaaacccataaacctccacacagaaacgacaaaggaatgtcatgtgaagagatctctcaatgggatcatggccataatcgcgaatatttggagccaatccgcgcttgaacttgacc

SEQ ID NO: 76470 - DNA, 554 bp, Zea Mays
gaagtccttaaaaattctgcagggagatcatcagggcctggggcactattgtgtttaaagttgactactacctgtttaacctcagtctctgtaaaaggggcagtgagaaaatatttgtcctcctcgccaatcttatccatgtttctatcttccatgtaaattgaagagatagaggatggaccaaacaagtttttatagaagttagtagcaatccgattcttctcttcctcctcttcaactaagttctcgttatccatgagagtatggatcctgattctccttctattgaggttggctttgaggtgaacaagtaacgtttgcatgtagcaactcaacgcaacgggcaatgttcgcatgcagctatttaactcccacacggcgagaccaaagcaatgaaaaggccacttacgtttttcactaccgaaatccgggtctttgtcgagtgctcggtgctttgcctaattctttttgtcgggcactcggcaaagtcctgcactcgggaatccaaagcagttggcgataaagatatctgaaaatttgattttcactcccgc

SEQ ID NO: 76471 - DNA, 1230 bp, Zea Mays
ggtttctattcctttacaccgcccggtccccgacggcgatgaatgcggcagagctccgacgagctccaggaccggccaaatggggcaacgactagtgcttccgagcgatcgatccaaattcaagtcctatcaacgggttccccttgatcaatttcaaaattggtggtctatcctgctctgtccacggtgacagtgctgagaatcaaaggaacagcgtgttcccgacgacccatggcagtctagttcaattggacggttcggtgagcatcaagaacacgagagggtggtggaacaataacacagagggcgagatcagacctgagttgagctagccgcggcgaggtgttcttcgcggtggcggaaaccgatttggggagaattcaaaattcgtgagctctcgcgaacgattgagggtgggattttgggctttggtttcgtgattatatagcgcagctgccctggccttaaatttatagagggcttaggcggtggcgcgcaattcgaccgagcaatgctggcggccggagatagggaagaacactggtgcagcggattcgtgtctaccatcgtggcgacttcaccggtgacgattagacagctattagagagttacggcgacgcgacggaggtaccagagcatgtggcacaagaccaacagacgaccatcactagtgaacttatccaaacccgccacagagagctcggtacggcggccggagttgtttactggccggggcttatccacggcggcgatatttaggtgaccccgagcattatccagacactggtgagcgcgaatcacctcatcggcgggaatcgtggcatgagggtcgtcggcggtgagggtcactgaacctgattcgatcggctactgtaccatgggatgcttcttcagtatgcctgacagtcatagtttagggccaattctctctccatttcctatggcatctcacccgaagatctgcagcaaagctatagagctacaaaccagctacatttccactataggaactgaactcagttgagcactagatcatgcttgaattcctgtccaaagtcactgcagttgcactgtcagtctaagtttcagacattaaacaacctgacagtctgactttgagtgtgattatctccaatttcttcataacaaccttgcttacactcttaagcaaaattgttctcctttgttaggtctacaagtttgatgtggtgacctaaggaaaaaaccct

SEQ ID NO: 76472 - DNA, 664 bp, Zea Mays
gtggtttatagttgacaattatggaaattctctcccctcccggtcaggaagacagccagacgttcgtactccgagttggactgagtctcccacagatcaggaagtggccgaggcaggcgtactgcttactgaagtcggattattgaaagaaagaggtctgactgccgaagctgtggtcacagattttgttttcaagaacattcagccattgaaagacagggcctatccggcatatctgtatcgagggctggccgactcaacccgggttaccagtaggagaattccctctgctgacttggtaagccggcttgagatgatcctcaggggtaaagtttcaaatgttggtgctccagtggcatactcggcttggaacctacctcctcccaaagctttcaccctttttgtgtccaatccgcccatgaccgataacaatttgggtcttagagtgcgaccttctgctgaagaagtctgtgctttggttgcttcgctcggggagattcctgataatgaacggcaggtttattttgaagtgcccctgaaccctagtgatgcagacataaatgacatgctcgatctgctggctgaggattcatctgatgctgctcctgatggtacgttggcagtagtgccccttccagaggttgatacaactttggatgtcccg

SEQ ID NO: 76473 - DNA, 684 bp, Zea Mays
aacttttttagcgaaaactgaacaacaattttgatgtgggttcgttcaagcaggacgagtgggagcaatatgaggagagcaatatgaggggggcaagattggtgacagtgatagcaccaattcagaaaactcggacgaggaggatcatgctgaaaggataaaagtgatcatggagaagctatctcaaaagaaggtaattattacacatgaccggatgacgagagaggagtcagagatgtgcctattattactcttgtagaggaggccactaggtatggctcatgggtgaggataaacgaatcacaatagtgccatggagccttacacaacattggcatggtgcaactaaggtcgatcaatgtacatattcctagcattccccattatagaaacattagcatgattgataatgctatttgtgacacttggttacagttgtgtatgaaatcatcatgcgaccctcagaatgagatcattagcccggtgatggcattcaatgcattgtttgatttgaagctcgttctttagaactacacgatgcatcatcataagccttacactgttatgcatttggattaaaacaagaggtactatgtaatatggaagtaaggttgtctttatagggtatgagcacacaagaagaccaacaatgacaactagatgatacaaaaatggttcaacccc

SEQ ID NO: 76474 - DNA, 580 bp, Zea Mays
gtaactattgttatacgagaattctgcataagacaaacttttatcccaacttctaccatgctttagagcgcaagctcttaacatatcttccaacacttggtttgttctttccgtttagcttggtatccatggactcatgtaatcttttccaaaagcgtgaggtaaattgggttcctcgatccgatatgatcttctttggtactctatgtagacaaacaattcttgacatgtataactctgctaactgggctcctgattaagctttcttcactggtataaagtgtgccactttagtcaacctgtccactataacccatattgaatcatagccatctcgagtacggggtagtccaactatgaaatccatactgatttcttcccatttccattccggtactctaagaggttgtagcaatcctgctggtctttggtgttcggctttaactcgctgacacacgtcacatagtgcaacatgagtagccacatctcttttcaaactgtaccaccaatacttttccttaagatcctggtacatcttagtacttctagggtgaatagaataagctgaatcatgggcttc

SEQ ID NO: 76475 - DNA, 333 bp, Zea Mays
atttgttggtacccatagaaggttttttttcacgtgaacatgctaattattgcagaacttacaatttcctcctctcatcgatcttcctctctgatatatattagcaggcgtagccaagggacatagatatatacatccatttattacgccattacatcaactgtagcacgtcgtctttttaccactccattaagcattattattactggtcacgcgatttggttcagcttctgggacgacaaggtttctatcgcatcgcctagcggccatgctgcgtcgacgtagtattctccgtacttcacctttgtcaccagcgtgaactccttggtcggc

SEQ ID NO: 76476 - DNA, 493 bp, Zea Mays
ttttatatatgcaaagttgtagcagccaaagttcttatgaagaccatccgctctggccttcgtctgatagtgcagttcatgcacccggcaaaaagctatggcattagcgctcataccctggcttcagagagcccatataaaaacactaagcctaacaatggcattgggtgtcaattgatgaaggtctacctcaaagttctttaaaacttctcatatcatgtcatttaaggggaaccaaagtcccgctctgaagaagcttttgaaaacgacaacttcgtcctctcttggctccggaactatttcctccctagaaaacgggacaagcttgctctcagcctccccgaaatagccaagttttctcttcataaccatgtcatcctctgttacagtagatttcctaaattcaaagtggctaggctttgttaggctcagaatactgttatcttcttcactttcattgtcactctcgcctccagctacaatctgttcagct

SEQ ID NO: 76477 - DNA, 564 bp, Zea Mays
agtgcatacctaggatccctgagcgaaggcgagctcggccacacgtgaacgaagtcccgccccgatgacgaaatccgtgctccactcgttgtcgccagtcccatccaatcccgcccacagggaccacgcaatccatccggtgagtcggtgaagcgcctgggactggtatgggagcctcgacgccagcccacgacggcggaacttcgcccacccccatggtccctacagcggcgagaaattaacctctccccatcgcccgattcgccccgccgagtccccgaacagctccaccacgccacggcgatgcgccaccacccgtctacacgcctagatcagcgagggggaacccgattgctctgggcggcggaacgcggtccctacggctaaggcggagctcggtttggttagagttgttcacgcgtggatgaagcaaagaggaggataaggatccggttctggtcttcttatagccgcccgaagtccgttcgcggcccacaccaacgaactccaccatttgcgccatggcagagctcgtccgagtcaagcggcgaaggaaggggaggt

SEQ ID NO: 76478 - DNA, 277 bp, Zea Mays
gcgtgttggtggatttcacatttcagagaggatagagaaagctccacgtcgcttttttgaatggcttccgggaggataagctggtgtagaaggttgtggtggaggtcctgcctttttggcttgcaagcgaagggcgcaataacgagcaaccaagcattttgtagcagccaatccttcccgttgagcacagggaggtgagtgggtgtgtgctgctggagggctatgtcctatgtgtagtccctcttatgtctgaaattagtagtctctctggcagctt

SEQ ID NO: 76479 - DNA, 639 bp, Zea Mays
ttggcttcttgttcctttttgtttggacaatccgctatgaaatgaacggtttggccacattcataacatgccctcttctttccttttctttgatacttatcatttttccttacaaacttcttgaaggttttgatgaacatagctgtgtcttcatcacttgaactttcttcatcacttgatgtttcgaccactttctttgacttgtggtctctattcttcttggaggaatcttgttcatttgaaatcaaggcatgagagtctcttgtcttgattggggcttcttcggactcatgttgttgaattttagcaaatagttgatgaggagtcatttcctcatagtcatcacggtcccttatcattcttgctagactcttatccttttctttatatgctctcataaatagcctagtgaccttggagtcactccaatcttcacttccaagcactcttattttattgaccaacaccattaaccggtcaaagagtgattgaagtgactcacccttagtccaatcgtatcgtgcaagctcactctccaaaacttcaattctatgtctcttagctttggggtctccttcgtgtgacattttgagaatgttccaaatgtcacaagcgtcctctcttccttggactttccgg

SEQ ID NO: 76480 - DNA, 711 bp, Zea Mays
aaaatatgactttttcttgaaaatcctcatttcctttatatatacatgtgtccaatggagaataattaaagtttattggagcgaagacagaacgccccctcgacccctttacttttgcacactaacttactgccaaagggacggttacatgaccatgaccgtagggaagaagagaaggctaagcaatggaccccgaaggtgatgggatccacccctttgcccgagcagcaaatacaaccggatggactcacctatgaaggggatggtcttcgtttagcacacgaaggtttaacgagatcgggggcagtccacaagaatgcgggttgccaagtcctcgcaccatgtggtcactaagcgacgacattctgctgatccgagtccacctgtctgggaccgaagagggtacaaagtctggtgtaatagggtggtctgtacttacgaccctgtgattaccccgttgtacagtgcatgtcgagaatatagttggtaactggagacaacaatatttaggtccaccaaccctcggctacctctataaatactccatcctgtagccgcacaagacacgcttgacaagacatttgcgctcctagcctgctgtttttgtcgtgccacctgtctctttgctcccgagtgttaaacccgtgatttttcgtgccaacatttgacgcccatagtttatgctccgaacatcaatacccacgatgactc

SEQ ID NO: 76481 - DNA, 678 bp, Zea Mays
gaggagccaaggattagagccagatgctaggtggttctgcaatatgcacgagctattatatcagacgaaggcaactggaaaagagcaatatcacaacaattttggctgctacagcttcgtgcatcgcgccgaggccagctatcctgtgccaacatttcgaaaaaagtggccaggctcctggatgcaagaatggttttatgtgaaggttgatctgagtgagagggaatatataaaagggttcattcaacgccctatatggtctcgcttcggcatcaggagaccgactattgcagttggaaacgacgtgcaagcgtgccagacaatttttaatacaatgtgtacttacattggcacaagagacttggtgcaggagcacattgcttacagagtgtggccacttgcttgtggatgggaaatgccgaaggaaactgccactggctccagccaaaatggtttggtgtatctgaagtatacctttcgatacaggagccagtttgatgaaccaaatgatgactggctatatgccatagaggcgactagtgatgagctgcttggagcatattcgaaagccaaagatgaagccatgacaactgccttcggagctcgaggcaaaaagagattaaatagggtgtttgatgtaatcgggtttgtgtacctggactattgttatccttcgtg

SEQ ID NO: 76482 - DNA, 272 bp, Zea Mays
aacctacctgataagttacctaaatgcatctgccccaaaagcaaagtaaatcatgttgggcctttccatcacaagcaccgacaactatcttaaccataagaccttagcagagatcgaaactctaaggatgagggccaaagaagaccaacctcgtcaaggaaggagaagcaccaactcaagtcttcaaagagcaggagctggatcaccaaatgagtcaagatccaccatcgataagggaatcttctttaccataatccttattaccgcaacct

SEQ ID NO: 76483 - DNA, 1209 bp, Zea Mays
gtcataaattcctcaaaatgaagccagaagttctcaaacctaaatatcttaggcctggggaccttagacttgaaagaaatcagacaaggaacatgatccgagaaatccctaggtagcgtctttgcgtgggtgtcagggtaaaaaaccgaccattcttgcgagatgaaaaaccagtcaagtctctgtaggaggggctccctttgcctgttcgaccaggtaaaggaaagcccatggagggggatttccagcaggtcgagcgcactaatggcctcattaaatttcaacatcagattaatatccccccccccccgcaacgtttctgtttttaggcctacgaatgaggttgaagtccccaacaatcagccatagcttttccgagggcatgttgatattagagaaccagttaagaaatttgattttcccatgcggagtacagggcgcgtaaatattagtgacaatccaggattcattggacgaattagcaaagaattcaaccgaaagggcataatcattctgaaaaatcacagtgcccaccaacttagagctattccaaacagtaatgaagccccctgaatttcccaccgagggaacaaaagcgaacgtatccaaagaattgggacagaattttctaaggtcggccctgtcaaaaaattccttcttagtctcctgcaagcaaacaatatcacatctggagtccctaatcgcgcaacgagtaccattccctttaacgaccgagttgatccctcgaacattaaaacttaaaacggaccaatcagaaaaagtagcagagttgtaactattcatcgtgggaatgatctggtttgtcaacgaaaagaaacccaaacccatcagcagggtgggtgaaatagtgtttgttagaaccaaacatagcgcagccagaaatcacaaagtttgttgccacaacaactagccaaaagcgccagggccgaaacagccaaaaagcctggcgaagggaagtcctgcaaaatccccaaaactggagcaacaccatcaagttagttgtcttcatctatgggatcttgattctgatccccgctgtcttcattttcgggcttatctgagcccacacaaccaaagggattcttcttcttcttcttcagagcaatatcggacaggtcctcttctgacaggttacaaaatctttcccctaggcgtctgatgttcttggcagaaagggaggggggccct

SEQ ID NO: 76484 - DNA, 612 bp, Zea Mays
gtacgctgcacctcgccgccggtgaccctcgcgctcggattcgtgccggcgatgcgattcgtgccgttggcacacaaataacgactcagggtgaaaagatcttcaccgtggatgagaccgggtgctagccgtcgtacccacttgcctcacggccgatccagatagcctcgccgaagttcgtcgcctgccgcgcgatggccatgtgccttgaagctttaccacgtcgctgtaagccgctttaggtagctggttcatcgcctgagacattgccatggtgaaagccgcggtatcacctccactagtgacttcccctctctctgcccgccgcgggtcttctcaaaattagccgcaaccgccaatggaacctataaatttccgccccggtgaactccgctaggtatttacgcatccaacgcaccagcccgtgcctcggattatccaccaaagcctcccaatttcccatttcccccaaatcagtcagaacactgccgcgtgacatctcgtcatggccagacgtctacaggttagctcatgctcttctgtgtgatgttctagcctccctcatgtcccctgttgctcacagacccattcgattgaactagaccgccttga

SEQ ID NO: 76485 - DNA, 462 bp, Zea Mays
gagtacatcagggcatggagaacatgtatacggtgtcgagggtgccagggtcgaccgggacgccagtgaattcctcgtcggatttcaacagtcgtcaccaagccgcctcgcacgtggtcacgagtcttcgtgtagtaatctccggtaagaatactcctagttaatctttgacgccatcctcgttgtgtagaaccctctcggtgggtggtcggggcacctgtacgctcggtcgcttggcgccgatgtgcctcaccgtcatatgggggcgccgccgtcgtctgggacaacggatgatgatggaagcacactcgccattgatccctaaatggacgacttagattagacatctgcatacccctttgtgaagagatctaggtcgcgtatctgtagatcgacggttaggattggatcggccactataaaatcataaccgtggggttcgaatcctacgatctgcatcgc

SEQ ID NO: 76486 - DNA, 378 bp, Zea Mays
gtgcctgatacaaagggcgaagccttgaagaaatctagcgaagctggcatggcacaggccgctgctgaggctggaccctcatcttcaactgaggcaagaccttcggaagttgcaccactagtcttgggaaaagaaggtgctgctgaagaatctaagtctcctgcccttggagtacctaccgaataattggaattcattgtgcgacatgcttcaaggaaacaattgtcgaaggagcaaattgccgaagcgcaacattatgccagggatctaaagtaccctcaagggtccttggtgtatggtggcgatgacgaagatgacttcctttattgtctgccaaacaataaagagatacatgtctgccggcagatggcagacaat

SEQ ID NO: 76487 - DNA, 312 bp, Zea Mays
gtgaggaggttcggaagctgttgcacgctggcttcatcgaagaggttcatcaccccgtgtggctggccaacccagtcatcgtgccaaaagcaaatggaactccgaatgtgcatcgactacaccagcctgaataaggcatgccccaaggacccatatccacttccacgtatagatcagatcatggactcccgcccacgtcaaggacatccagaaacttgtgggatctctggctgtgcccttagccgcttcattttgaggttggctgagagagcactgcccttcttcaagctcctatggaaatctggccccttt

SEQ ID NO: 76488 - DNA, 785 bp, Zea Mays
ctacgaacccttcggaccgcgacacatttatggcccgcacaccccagcatgtggcgcactcatgacctatctgaataggcttgagtgcacagaccgctggtagggcgcaacatgacaagccgcactcgagccccaggctacgaaggccaggggtcgacatagcccaaataatggcgcttgggctccacgctgctcgcggtgtccgccataaataatacgagacaaccaggcgacctcggggcccacgagcacgtgtggcttcaccccgggtagaacacttggttttaccattgcacggtgcctccttcctagggaagccgccgttagccgatccttccctcgacctataaaaggaaggggttgaacagagggcacactcgcacggacaaaccctagacgagaagacacccaaacgaaccgacgaaaaggaggacgcaccgacgaggacctagaggttggagctccgccgccaagccaagacttagctaggactccactctgtaacctttagctccgcttccaccccgataagagacttgggagcctctccccctctctcacccgcttgtaaaccgtaatatgagctttgatcatcaatgatgtcggtagcgcaagccgccgatgactagaagtggggactttctgcccgaactagtataaatcttgagcccaccgcgcacactgtctggagctcggaacgagcacaataaatttacttgtcagagcgaggttcaaaacatcgacatatatcttttatgcaagtttcttgcacataaatgaacaac

SEQ ID NO: 76489 - DNA, 477 bp, Zea Mays
cactgttacaaaagcggtatgcttcctatcttccctagacatctggatttgatggaaactagaataagcatctaagaaggacaagaggtcgcacccggaggtaaaatccatgatttgatctatacgtggaagtggatacgggtccttgggacaagctttattaaggctggtgtagtcgatgcacatccaaagcttcttgtttgcctttggaatgatgacaggattggctagccacactgggtgatgaacctcttcgatgaagccggcatccaatagcttctggacctccttttggatgaagtcctgccgctcaacagactgtctttgaggcttctgactcaccggtttggcgtcagggttgatcttcagatggtgctcgatcacctccatagggatcccaggcatctgtgacggctcccatgcgaacatgtaggcattttcctggaggaatgcgacgagcgcgagttcctatttttc

SEQ ID NO: 76490 - DNA, 588 bp, Zea Mays
aaatctatctgctgaaggagagaggtctgaccaccgaggctgtggttgctgactttgtttttaagaatatccagcccttgaaggacagagcatacccagcatacttgtaccgtggtgttaccaacttgactcgggttaccaataggagaattcctgccgcggatctggtgagccgactagacatgatcttgagaggcaaagtatcaaatgttggtgctcctgttgcctactctgcttggaatctgccacctcctaagtcctttttcaatttcgtgtccaatcctcctgctggtgacagtggtctgggtcttagagtgcgaccctctcctgaagatattgaagtcctggttgcttctctttgtgatcttcccaatgatgagaggcaagttcattttgatatgccagcgagtccagatggtgcgaaaatagatgttgtactcgatatgttggctggagaatcttctgactcggcccctgctgaaacgaaggccgttacggttataccagagctcgacaatacagtgaacacccaaaagcctgagggtacacgcccgaagcgtcttcgccaggtcagccgcccaactgcgc

SEQ ID NO: 76491 - DNA, 689 bp, Zea Mays
cgcttcgaagcgcttccgttgaggtgggattgagatttgatttcttcctcattcttactattcagttcaagttagggtttcaaactttttaagctgcatttgcgatacgattggaatcttttcctgacgacatatcggcgtacagtaccagcactttcttctccacaacacgttcttgtttctctattctgcgacttccaaatcttcgcctcacccccaacgccgccatggtggtccggctacgatatcgtacgatgtggcgacatttgcttcttcgttgctgtgggcagtgctatagtactaacacagtaggagggaggtagggagtagccatgcttttgccaccagccgctaccgccctgccattgttgggcttctcgcctcttccagcacgagaatggaagtggagtggggccaatggatgtgcggttgctagcctttcatttcctttctttgttcaaattcgtgagatttgaaaattgaatgcgaggtttgagggaaggaagttgcaatgatttgggtaaatgcagagaatttgccatatgctcatggacagaaaaaagcaactatcagaaggttttgacatctccactacaccttaagggtacaatgagggtgtccacagcatcaccgtgcccccgccgccccgcacgcgtcttcctccttgcatccgacatgccgcacacgcg

SEQ ID NO: 76492 - DNA, 498 bp, Zea Mays
ttcacatccagttatggtgttatgctcatcctacaacataaaatttgcttagtacattgattttatatattcattatatacaatacttcatgcaatattatatatttatcttttacataccattttttggcatgtaattgtattgtcatcttccatcccatcgccagcattattattatttaattctccttcctggttcaaataatatgttaccatgcatactatatgttacaaataatataacatttaaacaactggaatattattaccttgttttttcctcatcatcactaacatcatatgactcattacatccaatatctggctctaatcggcatagaacgccatcgagctcatccaacacatccattgccttatcgtaccctacttttgacatacacgcctggcgaaccactttcattgttttcgttagcaacattttctgtctgtatgatttagtaactccatcctttcccctgaagctcttatcaattcttt

SEQ ID NO: 76493 - DNA, 290 bp, Zea Mays
ttaggttctaaactttataaaagatcgatcccaggaaggctgagttaaaaatcttgataaaacagaacccaggaagatcgatcccaggtacattgatggctaaaacatcaaaagagaaaagaaactaacctaggtctagtcaggaattttgacttggactaagtaacttggacagggacccctagacttggaagaccgactcagacttagctaggttcaagaaagtttggtccacacatcatgatcagaacaagtggcgccttcactaaaaatacaagtctaaaactaaa

SEQ ID NO: 76494 - DNA, 296 bp, Zea Mays
gagcgctctgcggcatcgtgagcgggttagctttgcattgcaactcaatttcaggttcagccatggattggtttagctcgatcggtcggtatctgacggtggtggctgagtttgcagctgcgttcccggctgggcgtacaaggacagctgcccgtacatcgagctgccggaggcggacctcacgacgtcggcgttgctgccggtgcagctacagttctaccacgtcagtagatgcgccatctatctcatcctgcaaactttaaatggattcgttttttctttcaagtctccttcac

SEQ ID NO: 76495 - DNA, 784 bp, Zea Mays
ggacgagattcctttaaggggggaaggctgtgacaccccagtgtcacctagggtttcttccttaagctaacccaaaccattatcacatgtgaaccaaatgaagggatgaacatcaaaacaaaaaaaattaataacaaatgttgaaataagtcttttatcttaaggaattctccttaatcatgtcatgaacctcaaggtaagaagaactttcaaaccctaattaatcttaagtggaccatttaagcacataaagggtatttgggaaaagacttgggagaaaaatacaaattttggtaaaaaccaaataacaaagttttagtacactaaataaccaacaaaatatagtaagaaagttttgccatttgattttttcaaaatccctaaatcagcccctgaactaatgcacttgggaaaaattcagaaattctgaaatatgaatttcagccccgttccaaagatcaaccgcgttctctgtttttcaaaacttaaatcaaacaagtccaaatagcaaagtggcaccaaatttcctggaacacaccatgataatgtttggaaacctctctccaccatttgacacgatcttgacatggatttaccttgggactcgaccttgtgacactgccaccttagcgacgtgacaactctctgtacacagccccaaaccgctcgacttccacacataaacaacaaagctctgtcgggagagcaaatcttgtgcagtgatcatgcccaaatatgtgaagatatccaacctatgagcgtttgaactcgggcagaagcaaag

SEQ ID NO: 76496 - DNA, 740 bp, Zea Mays
ccgtcccctcgaacagtccccctttcggagccactctagtccataagcttaggaaagcaccagctagcgaggacttctgtggatgggggcgcttgatttctctctctctagatcacttttaaaggaggagggtacccggacgagcccgcatagagagaagagggaaaagactcgatggccccacaacacttgaaatcaaagagaagaagtcatatatatatattattgatacagggagacagcgtcgaggcgttgtacaccatgtttagcggacaacacgaatgatgtcgtcaccctaagcacgacatgactggccacatcgtcgtagcgttccagcaggtcctctatcctctcatctgaaagggatgaaggaggactgatgatgtcctaaaggcggcggccagtgcatatcttcgccatgagcaacaccaccgtagccccccaatgaacgccaaagtcggcaatgtcgtgcacatgacatggagcattgtccaggcgctcgatcaaggaggtgtcgcgggtcccaacatagtcaaggagttagcttgagcaatgacgcaacatctcgagttcaacctccaaggctgccaagagagaaaagcagggtacgaaaaaagatgaaaaaccatagagaggacaaagaacaaatgacttaccaacgactcgacagttggcctcggaagctgcacattcagcaggtcggcctctgtctcatctgcctcctacgtgagaggcactgc

SEQ ID NO: 76497 - DNA, 703 bp, Zea Mays
aaaaacttaagataactgaactgaagccaacacgattagactaggactaactgaagctaactaaaaataactgaagccaactgaattggactgaattggactgaagcagccataccaaactgaaattgcagatgtgctagaactggcagctgtccgaaaatctggcagccataccaaactgggcttctaaaaacactgatatcgccaactgcattttcactagcacatctgcagctgtagcaaactagcacaactgccatttgcattttcatctgcattttcacaagcagactagcacatgtgcatttgcattttcactagcagactagcacaactgccatacctgaaaatcagtgagaccagcagactagcacatctgcatgctagcatgctagcaactgcccattttcactagcttcgtcggggagagcaaggatataaggtttggaatttcagactctacatgctagcaactgcccatttccatgtcggggagagcaaggagctcgacgaagctaacagatttagcttcagaaggagcgctcgaggagaggaggagctcgacgacgaggccgtgcagacgagcgccgtcgctcctgcacgggcgccggctcggcagctgtgggagagcaacacgctcgtcagggagaggagcgctgggggagaggatccgttgtaagaaacggattgccgtaacacctgg

SEQ ID NO: 76498 - DNA, 380 bp, Zea Mays
cgaattcatcgaagatgagttatagctaatctagaaccaacaatgaatcctcctccgaatcccccgcctgttgatgacgtgactgctgctcaaatgcgattattataacaaatggccaacacgatgacagaaatgcatgcacagattcgtcaagaacgacaggaaatgaggcaagaacgccaaaaaatgtgccaagaacggtaggaacgacagcaactaccacctccaccaccaccagctccgccagggataagcaccacctagtttatgagccataagccaccaatattctctaactcctcagacccactacaagctgatgactggttaaagtccgtggacaagatgctcaacatagctcagtgctccgacagggagaa

SEQ ID NO: 76499 - DNA, 2446 bp, Zea Mays
gccaataccttatcttatggacctacctaaaagacgtgaagctcgaatcaatgaactgatgcagtgctgtcaagacatagtccatgttaccagaataatgggttggttttccttcagagaagtccttccaaagtgtattcacttgctgtgataatatcttgctaataaactccaaagagtccaagtatgtgaccaaagatgtattatcatgtgggcatcgtgctaatgtgccaagacccttctctaaggcatgtagatacttttgatccttgggaatacccaccgataaatagggtggtatttcactttctgcttgctgggcactcaagtataacccagtcgcataaagaagaagcattgaggcagtaggagaggaaacctatacatcacatgaatttacataaatcaaaacgaatgtgcactaacatggtatgcttaatgagaattcagtgcttaaaaaataatacagcaatgtacctcagagaaataaccaccttgtttataaagtagttctgaagcgccaacagataaatccctattggcagaaagaatgaaccggcaaaaatacgccacaaataccagaagctcatttacagattttggtaaatcatcctgaaaatggtttgcattgcattacaacaggtaataatgtcttgatgataaaagacccattagcccattatttatatcttgatgaacttattactgtgatacgatcaagagcagagaacattaaataggcggtgagctcaatacaactaataaatggggtacataagcacatcagaaatatacaccataataccatattactcacaatgacccatctcatcagaaattcggaatcataaaatataataagacaaaaggaaaccaacattacttaaacagcacctatagtacatgaaggccaaattaagtctagactctcgacactataaaaattaactaattaagtactgaattctaacactaagctcatggcactataatatggtatatttggaacaaagtaatcctacaactatacagaggagtctaactcaaagtatacaagatggtgaaaaacaggtctccttaagattgtttacaaattgaatctatgcacaagctgaactaaaattccagagcattccacaacatctgcacatctctcccactcgcacatctccaaaactactgaaccgctatatccaaaattttgaaactaatgacctacacatctagttttgcacaagcaatatatcattttttatttttaagtttggcaattcattacatgtccttttggtgtttgccattaatcactgaactgttaaatttaacatgatgcatgatgtaacatgcttctgaagtttgatgaaattcaatatttttcactgggtgcatttgtaccgtatgaatacatactttacacaaaatttgttatgttatgagcaaaaaatatataccatttgtcccacatgtgcaaaagccaatctatattaagccttattaatgaccgattatatcttcatgtcgagtatttcctagtataaggaggaggttttcgcatgtattcagtattcggccctatagcccttgtaatgagtaactgtgctactcataacaattgaaaggtccacgtagagaaattacaacagacttccagtagcatgagtaaaagaagattacctttaaacgtacaacagaatcagtgacagtttttagcacatggagcaaaagctgtgtgctccctccccaagtcaaatctacagaagagcaaatcttgcgagcaatctgcagatggggaaaaacagtatccaaattaaccaaacaatctaaggctcctatttgttaaggcccgtgattaaggcaatcaatttcataatggcacatactgctggcaaaagctcaatcatcccctcccccacacactcttgcatcgtgtaacgacagaatccatgcactagatcagtattgaaaagggaagactcagaaaccagaaaaagggtacaccggctcatggcattcataagcaacgggagatacttcctgctgacttcattagtaagaatactgcacacaaacataaattcctgataagcccactcagtatctctcttatttgatgaatactatcacaaaattggtaatctcaccgaagccatggttttagctgtttgaaaaggctgatgagtcgttcataaggggtaggttccttcaccttgcccttgctggaacaattagcaaggcaaacagtgagctcaaccgcaaggagggtgacttcaggatccgtgccagcctccccagcgctgccggggtccggaaggaggacgggatcaacgcctgcagcaccacgtcgcgacttggtgctcgtggtgggtggagagagcgcggagcggagggcgtcgagggtagcggcagcctccgcactggcgcgtgcgaagtgaccgcgcgactcgag

SEQ ID NO: 76500 - DNA, 798 bp, Zea Mays
gtctggttgtcatttgtacagtgaatctagatgctactgatgagattaattttagcagttacctgtaatggtcatgttaatgtctaggtcatcatcattatcgacaattctatatagttgcattatagccttggcgaggcaagaaagcacataagatgaaagatattagaatattcattgaagatttacaaaaaatcatgcaatagtccaagacacaagataaaagaagatcatacaaagagacgtgaagaaaggaaaaacacggagctcaacatcacgaggcatgattggtaggcattggataactcaccgaataggagtggcggtgacgtgctgtactaaagaaatgggtatagaaatagaatacgttggacaagcaagagtgcactagatgtcgcaccgtatgaggaatcaaatatgcactcaaagaggtctgcaacatgtttagagagatatacaaggcaccaaacatgtctggtgtatcataggataccccatcgaataggatactcagagaggttgcagagcaacccaaaagaggatataacgcaccagacatgtccaatggtacactagtcattgcaccagatgcaacgtggttgggcaccagaatcttcgctgactacatcggattgtctagtgagtacgcagaaattctactttgattgtgacgactagttttggatttggtggctatataccaccccaaccggtcatttaagatgtgtgggagctaagaaacattattataaagttaagactccatttctatagctctaggcaaccaagtgctcaaac

SEQ ID NO: 76501 - DNA, 423 bp, Zea Mays
ctttgtccttaatcttagttgcttaagacctatattcaagacaatgtatggaaatattttgcacaatagagagttctacaactagtgatccttctccaggtcattgttagcatatattaaatggatcacaaactgcataaatgtatcatgaattctcctttgaacttagtgcatatcaagagatatcgattgatagtatatgcggcactaagaaacataaatgtttattcactgatcaaacaattaacagatgtggttaaaagaacaacatatgcattggataatcaattaagcttagaataggagaatccagtaaatatgctactttagcaatgaaggataagaattgaaaaacagtagcatacttcatgagaaacttattcttatgcaagagactatatgagattactaagataaagcgat

SEQ ID NO: 76502 - DNA, 448 bp, Zea Mays
cttatccagagatcccagggaatcgggcgcaggtaatccgcgcgccacggccggtggttacggagagttccgcttcctaggcaggcgatccggaggggatatatctcacaactcggtccaaggacgcagcgacccagggggttgtgtacgcgagggagccactgttcacggggtccaccacacagaagctggtgcgagataaacgcacgcgtggcgttagtactggcaggcgggcccggcccacgtggctgtgaacttgagtctggcaagtggggcatgtcggtcagcccagggctaagggcgcgcacggtagacgggatgggccgcgtagggtttgcttctggtgggccgaaataggtgccccgagcccaggtagagtttattccttcctctttttccttttatgttttctttttcttttcttccttttaaattttagatttcaaat

SEQ ID NO: 76503 - DNA, 278 bp, Zea Mays
gttgggggaagctctgggattatatagcatggagaaaagggcaggcaaagtccgatcgatagcaaccggaaacccacgacttcggcacaagatccgcccgcaatggtcggagatcgatgaggggttgttggcaggttctacggtgctcgcaaggatctccacggacatgatgaatccgacatagcgggcccacccatcagcggttcaggccatgccagcccaatgccatgcggcttcctggcgggacccacatgtaagtgagaacaggcgcggcaatg

SEQ ID NO: 76504 - DNA, 438 bp, Zea Mays
tttaagcaatactaaaatatgtataagatatttgagggtacgataaatatgcatatacaaaaaattaaaacaaaatgtgtccttaatatgtggctcaaacacatagagaacaagatatagagcatactgttggagaggaatatgatgtagaggagggaataatttaaaagagtttgtaaagaacagatatagtgcctaccgctggagacaatcttagggcctgtttgatttagtagtagattcctgaaaatctgattctagtcgtgagctgtgggaaaactgctgtgagcggacaattgtgaaaaaacttcaatttgtttggttgaaacaattgtcaactataaattctataagtgcatgacagccagtaacatggatgatgtgaatctagaaatctggggtaggaggtgattctgaattgaactagagaaatctatg

SEQ ID NO: 76505 - DNA, 490 bp, Zea Mays
cgcgggaccacttgtgttttcatgaggtgcattgacacatcaagggcaaacatttaatggaagagatacactcgagagactatgggtccacatagcatccaagacattagtgggaaaagctttgagagcagaattctactgaccaaccaccaagaaggacgtcatcgacttggttcagggatgcaaagcatgttagtttttggctaatcaacaacatttgtcggcacaacaaatatagaccattccagtttcctagaccttcacatgctagggttggatatgatcgggccattaaaacaagcacagggaggatacatatatgtgctgacagccattgataagttcactaaatggattgaatacaaaccaatagcctcactaacaacatccaaagcgacatagttcattcaggagattatcttcatgtttagggtaccgaacaatatctttaccgaccttggatccaacttcacgggatcagagttctttg

SEQ ID NO: 76506 - DNA, 562 bp, Zea Mays
tagctcctcagggtttgctggtatctagctgaccgaatgaaaacatttagacgttcctcctgtagcacatcgatttcctctagccgggttgcttctgcctctgcaatgttttcaaagactaatctgggtgctccgaaggtcaggtctgctggtaacactgcctttgatccatataccataaataaaggagtattcccatgcaaggctcggctgggctgagttcgcaaactccagactacattaggctgttctctgatccaatttcctgcgagtttttcgtttttgtcaaatactttctttctgagcacctctaatatcatcctgttcgctctcttcgcttgcccattagctcttgggtgtgctactgacgcatatttgacttggatacatttctgctcacagaagtcgaataattctgcgctggtgaagtttgatcctaggtctgtgatgatactgttgggtatcccaaatctgaagatgatttcctggaggaacttcactaccttggctgaggtcagggttgcaatcgtcttgtactctatccactttgtaaatttatcga

SEQ ID NO: 76507 - DNA, 531 bp, Zea Mays
cgagtggcttattatagccagaaactagcagattgacatgtgaagcttgcagcttataaaagggaaataattgggttatcgaaggctattcgccattggcaaccatatttgtggggacacccctttgttgttagcactgatcatgcaagtgaaatttttacttgatcaatcttgggtgactccaccgcaacaacactggctcaacaagttaatggggtttgattttttggtggaatacaaaccaggataggctaatgtggtcgcagatgcgttgtctcgcatccatgacccactgggaacgtgtgctgctattcagtccctactgtgctgcatgggaggtgtggaatcaaaattgaggaaggattcaaccatttagcattgtgctgctcagctgctcaccacaaacatgagtcttcagggagtgcccaatgatagtatctggtcaatctgtgggggtcttgtcttctgcaaagatcgattgtttattccagcaacctcacctatttggtcccaagtggtggttgcttgtca

SEQ ID NO: 76508 - DNA, 523 bp, Zea Mays
gtcggagatcactcggccaggatcatatcagcttactcaaatggatggcatggaagtggggaattcatggaatatagagcacctcaggaagttttacccttagcgagagctatcggagcaatgttgtactctgtaattggaaaatacgtcatcaataaaatatttcactctcgaaggcattcaaactattggttatcaattgacttcgacttgattagacttggaatcaacacacttactcaacttagggtgaccactataccctactaacgaagcaatcggcttaagtcggaaatgacttaaggcggtgcaacatgctcgcgcttactcgacttagggtgaccactataccctactaacagagcaatcggcttaagtcgacaatgacttaagacggtgcaacatgcccgcgcttactcaacttagggtgaccactataccctactaacggagcaatcggcttaagtcagcaatgacttaagacggtgcaacatgctcgcgcttactcgacttagggtgacca

SEQ ID NO: 76509 - DNA, 361 bp, Zea Mays
cagaaatattgtggtatggattgaaaagagatgtggctgcacatgtggctatgtgcgatgtatgtcaacgagttaaggctgaacaccagaggccagctggactactgcatccattgaagatacccgagtggaagtgggtagagattggtatggatttcattactagattgcctcgcacccagaaaggatatgatgctatatgggtgattgtggatagattgactaaagtggctcactttattcctgtaaagactacttaattataaaggttctcagctggcagaattatatatggctcagattgtgtgtttacacggagtaccgaagaagatcgtgtctgatcgaggttcacagtttacct

SEQ ID NO: 76510 - DNA, 803 bp, Zea Mays
caacactaggttggttaccaacaaatagatggtctgcatttactatcttagaaggtctagccttcagctgcttgcaagcatcttaatcccaatttgtgaccatacttctccccctcttatttacaacatcattgtaatagggagttaagtggttttccatgtaaccactctttctggcacttcctcataggattaatttgagtgacacctcatagtaaatgcacatggcagttaatttgcaacttcttgaaatcattcgaacccaaaaggttcagttttagtacatgatcctgagcctgaatgcttactgcattcattataatttcctggcattctttttggtactcgaaatctccccctaatgcctggaaaagctcatgattcaaggaagtgtacggccataaatagattctcatgaagagattctaaaacttaatgatcgacggagaatgaattctcacatagatccccagctttctgtgtgcccatacatgtacgctgcggtggtgagattgggaaaacatacccaatgtacgcatgggaaatctttcatggattcccacgtactaaaacaataggggaacttgtacatatagtatatgcagttcatcacaagtcagaagcatgcaaaacttcatgactccaaccataactagttggaagtgacaattcattactgatggtcattaacgatttgaaatttttgaatctatcatagattcgtcatatccattatggatatcattttgaataccaagacaaacaatcatcattgtaagaacattttggtaaattcagtagtg

SEQ ID NO: 76511 - DNA, 431 bp, Zea Mays
gttgggttcgttcagtggtacagcggatgtggttgctgcggtgcagatcgagcagttgagctgctaaaactgaaagatccaaacgaggagcctggttcatgttcgatgaatctgtaagaacagtataacaccgtgagattgcttcgtcctgcagattacggtgctctattttatggcacaagatgctggtctacactctattaggagtaaaatattaggacataggctataggttcagatcacactgttgcggatcagcacatcatgtgaattataactgtgtgtactattgtatcatgtggaccaactattttgttcacagaccaacatgcagagtggggatgtggatttgaactgacttggatggtcctacctagacacgcacaccatggttacatgtgaagtagtgtctgtttctgacttagttttcg

SEQ ID NO: 76512 - DNA, 1601 bp, Zea Mays
ggcgggtggttgggcctgacaggaaactgcttttccttggcggtcggtgagaaggacggtcttacttgcacaacttatgatgcccttatgcttagttagccaatccattcctaggatcacatcaatcccttgggatggcaagacagttaagactgccaggaacactaccccacttaaaagaattctgacctaggagcatttgagctggcatagaaggtctgaccccggggttcgggtgaacaaaggaatttctaggggtgtagaggcgatgccatgcttttccacaaaactagtggctataaatgaatgggatgctcctgaatcaaaaagcacagtagcgggagtaaattcaacaaggaactcaccgagcactactcccggagcttgctgggcctcctgagcgtcgacgtgattaactcgtgctctgccctggtactgggtcctgctctgctgactgttggaggggggtgccttggaggcaggtgccaagggaatcttggggccattcaccaagttggagtaggtaggtccgggtgccttcagctgggggcagttattcttgaagtgactagggtctccacagtgccaacaggcatttgctggcggttggttgcttgcaaccgagggggcctgaaaggaactctgactctgctggctgtaacgtgacggagtgggtccaactggtctattgaagtttggtcccttgggtggatgtccgaaggatcgagctctctggtgacggtcttgctgctgagctcggagaacctggaatttcctcttgaggtgccctttttcttcctcttttgccctttccacttggatggctttgttggagaggtgtgagaagctgaggaaatcttggctggcgaggatggtcttgagttctggtcttagcccttttagaaaacgggccatcttactggcctcggtgctgacatcatcaggcgcgtaacgagccaactctgtgaacttgtgcacgtactcactgacagatcttccaccttgagttagttcccggaattcctcttccttgagttgaacgatcccctggggtacatggtgctcgcagaaagcagtttcaaattcggcctaggtagcatccctgatggcctcgctgaagatatcccaccatgctagggccatcccagaaagttgatcagcagccaattgaacccgctgatttttggggcatccgatggcttccagtttcctcttgatcgtgcgcagccagtcgtctacgtcgaggggattgctagatccagtgaacgtgggaggcttgagtctcagaaattctcccatcctgtcctgtggtttcccaccacctgggcgctgattttccagacttctagtgaggacttcaatgagtcgggtctgattggctagaacttgggccaaatctagtggtagttccggaggtgcggggacgtgggtctcactcccttctccgccagcttctccttctactcctaggggaaatcctgctccaatctcggaggcggcaggcatggttttatccgaagccatctgccaggggaaaagagttactaccatgcacatgccacatttttttcaacaagttactttatttattacaccagttc

SEQ ID NO: 76513 - DNA, 521 bp, Zea Mays
gtcgagtagagaatattcagcatcagcgtggaaataaaacctagctgattggttgctgcttgcatactacttttcatccctgattactcttgttactttatacaagaggatcaacaagttcatttgcatgttcaacatatctcattttcacgttcactgcatccgtgctcaaagcctcaaatataaaccgagtgagtgagcaattgatgagcatgagcctccttagttaatatgtcttcacaacgattatgtgcttcgttactttatgcttgattatggttttgatggccctttttgtcagataacttagtttgcacaattaggagggtttctgttgtctgcaaatataacaagaattatttaaatttatatgagatcgggctattatgtgatagaataattttgtacctatactttttgcttgatattattgcttttccactaaagttacatgatagtatttttactcgatattattcctttctcactaaaattgtgtgatcatatttttttacttgaca

SEQ ID NO: 76514 - DNA, 361 bp, Zea Mays
gggacccgggagggagaggatgacatgtctcggctgcataacaaagaaaatcctcatgcagccggtcagtcctgcgacggcgcacagactcctcgaccgcctgggtgcggcacatggcgaagacaccaagaaggcccttggccggacgaatgaaaagtccccggcctcgaccccgtccctggcccggaccacttcctctcccgctgcggtccattggacgtgaggcagcggcggcgcgagaggaggatgggtgatgtggaggctgaggaggtggctcatcagaagaagcagggcctccagaccctgagggagcccgctttgtacgagcagctgggttggtggaatcaacccaatagggtac

SEQ ID NO: 76515 - DNA, 405 bp, Zea Mays
gtttagtgcgacgtgacatgattttattggccgaaaacaggccacacagagtcacaaggttgcggccacagaagatcccacagactagaaaggccaatgaaaggttgacacatggccacggttatgcatggggctggttttcctctttagtccatgcgggcagggatttcatcgtgcggaaaaagtacgacatgcagatgggaaattgtaaaggcgtgatgcatgtaagtggggtctactgcacgacgtgcttaccgtgggagccgcgcgcatgggaaagtgcatgcgaacatgcgggtggggtccacactgcggttctctctcctctctgtagctttttccttcctgcatgcacgcacgacggacgaacatggtggtttcttcttcgtagcggctatggcaggg

SEQ ID NO: 76516 - DNA, 795 bp, Zea Mays
ttttggaagaaattacataagagcttggatacaaagttgaattttagctcagcctaccatccccagactgatggacagacagagaggactaatcaagtgctggaagatatgttaagagcttgtgctctcaagcatggtggcagttgggagaagagcttaccctatgctgtgttttcttataataatagctaccaggccagtttgaagatgtcaccatttgaggctctgtatggcaggaagtgcagcactccactgtattgggatcaaactggagaaagacagttctttgggcctgaacttattcaagaggcagaagaacaagttcgaatgataagagaaaatttgagaattgcacaatccaggaaaaagagctatgctgataataggagaagactactggagtttaaggagggtgatcacgtgtatctgaaggtgtcaccaatccggggtatgaggagatttaaagttaaaggaaagttgtcccctcgcttcattggacccttcttgattttaaagcgagtgggtgaagttgcatatcaactggagttacccgatcatctatcagatgtacatgatgtattccatgtgtcccagctaaagaagtgcctcagggtacctgaggagcaactaccaatggaagaccttagtgttcaagatgatctgacttatgctgagtaccctatcaagatattggacactttgactcgtgttacaagaaataaggtgataaaaatgtgcaaggtacaatggagtcaccacgaagaagatgaagctacttgggagagagaagaagag

SEQ ID NO: 76517 - DNA, 643 bp, Zea Mays
agatgccttcggaatcgaaccgaggccaaggttgttaggaccttctcaaagagcgttggtctgccgaagattgaagcggacctctgcaggtaccagcgacagcatatcgccggtagcttgctctatgctaatttcaaggtacaatcgccggtagcttttttttttaattaaaatgttttctgacgaaggttgttttggcagagtatactgctaagtaaagtgttgaggatgcaacaagatcttgaggacgagaaaaacgaagctaccatcaaagatctagaaaacaaagtcgaaagttacgaagctgctttgaagaaaaaggacttagtcattcaagaccttgaaaacaaagttaaagatcacgaagctgctttggaaaagaaagacttcatcatccactgtgtggaaggttcactggccgaagctcaagccgaaactgataaattgaacagcgaattacttataaaatcagaaaaatctaagcaagaaaagaagaatctcgaaacaaatctcaagaccgaaattgagaagaattcaattttgcagaaatcattgaaggagcttcagaaaaaatgtttagattttggcaaccgctgcatgcagcggctgaaggctgtgtttcactcaattggagccagctctg

SEQ ID NO: 76518 - DNA, 565 bp, Zea Mays
tacatcttagtgcttcccggatgaatagaatagcgactaagatgtgcttcatctaaaatttgctggcggatctcttcattctttggcaccactatgcggttgttaaaccatatcacaccttgatcgtcttctttgatacattgggcttttccaacccttatcttctcacgtatgtgtttcataccctcatcatccttttgtgcgtcaattatcctttgtaagatgaatgactccagcttcaaatgttttgaagtcccatgttgaatcattcccaggtttaatttctccatctcctggcataatgtaatgtcagaagtcctcactgttagacaatggcaggaagccttacgactgagtgcatctgccactacatttgctttgcctaggtgataatggatttctaattcataatccttgatcagctcgagccatcgcctttgtctcattcaattcagactgggtgaagatatacttcaagcttttatggtctgtataaatatgacagacattacccagcagataatgacgccagatatttagggaaccaccgcagctagctccagat

SEQ ID NO: 76519 - DNA, 590 bp, Zea Mays
gaaattgatgaaagaaccagactcagaaatgaatatgtgagagctagaattgcttgcagggatgtcacggctgttcctggagttgtggaaagttctcttggattgtttttgtatgattttttctttgaaagggaaatacactcggaagaggatgaacaatctttagagactaggattagagttgatgactcttaccagaaagctgcaaaaagatccaaatatgaaggtaaaatgcagaaagataagaaagtggattatgggaatcttgatgatggaagcattaaacagcatgatgactgtagcaaaaaaactcaaagctttacatatcaaatgcaagggcttgacaagaatacaaacaaaggaaagaatgtgggagttgaagaaattaaaactggtaaatcttattccagttgttctggtgaagagaagaacaaagtgcatataaccgatagtgaggatgatgatgatagtgaccttcttggagaggaactcatggcaatgaaaaatcgtggatctggatcaaacagccatactatgtggaatatgcaggctgacccaatagataatctgaattcttgggatataaacca

SEQ ID NO: 76520 - DNA, 646 bp, Zea Mays
ttggggctgtttgggaaggggagattcattgcaactaaatcgctaggaggatccctggggcaatctcttcttttcgtgtaccaggtgttcagataatggcgcagaatgcagacaatatatcttaagatattttggtgtctggccttagaagttgatagtaattgcttataaactttgcaaattgacatgatagctccgaaggaagtaaacaaaagaggttttttacaaggtatatgtgctgtgggctaaattagtaaattttgactcctattcctttttttgtacccatgaatggagtcaattggcggctaaatttgcctttccttttctatcgccggggtgacactcacctcatgtgtatcccgaccaccaaatgtgaagcaatgtctctcaaagtagggcagcagtttagtgttcatgcttcctgaactgttcccatctttactccctattggccctggctctattggtaaggttgtctccagcagcttacccatcctatctcccattccatcccatattttaaacttcactaaacaatgttttatgcgaccatatgcataatttgctagagacaacctaaggacacaaaggagatctgctttgacctacacagcggccaacctctttctgtaatgatgtgctg

SEQ ID NO: 76521 - DNA, 497 bp, Zea Mays
caaaactcatctattttatcttcaactcttcttgtctgatttttggtctatcagaaggttctaatgagaagcattgcaagatgatcaagctaggattgcggaacttgaagcgaagtttgctagaagaaaccctttcgaagctatcgacgatgccctattctctgtcttatccccacttcacaagaagttttgctatggattccctagatctattatttgacttcttggctaggttgataggatgttcttcagtattaagattttcgactagatcggtaagggcgatattatactatattatagtggttttctaatccctaatattgatatataacccttgacttcttatacttttgttttcttgccattgtattgccatccttgcacaatatctaccttgatatattaaacctttgtctctctacttttctccttgataatactttctccctaactcacttcatatccttggttgtagcatttatcctcactttaat

SEQ ID NO: 76522 - DNA, 315 bp, Zea Mays
gccatactctaacatggcatataactcgaatgaccatacaagagcaggtacgagagagcatgaatgccatacgtcacaatgtgtgctaacactggcttaagctctcctacactaggaagtcaaatgtgaacaccgaccaacccgatgtgggacgtgatggaacataatgacaggatttgggatggctcgagcatggctacaatacccgaacgaaagaggtagatgtcatccacgacgttgcttgactaacaggtaacctgatggaccacagattacacgacatcaccctaccctcatttgctctgccaaacctcg

SEQ ID NO: 76523 - DNA, 351 bp, Zea Mays
gttccttgactaatcttatcttggaaatcaaaaagttgtgttcgctcttcatcttaatgtcatacaagcctcttatgcagtctgtctcactaactcttttaccctctgactagatgatgaaccctaatggaaatgaagtaaatggtgccaacgacaatattcctaccttaataactatgaacgagaaaaatgagtcacagagatattcgatgaatggaatgaagaacaacaaaaggaatagaaaaatgtttggatacatgattagaccacctcaaccacaagcaaaagtcacgaaacacacggatacccaaacagaaaatcaagtcaggctcagctatataagatacagac

SEQ ID NO: 76524 - DNA, 952 bp, Zea Mays
cttctcttgagaaggaaactgcataaggaatctggcatgacacttggtggctttccaagtcttgccccagggaaagtgaaacccgaagtctttctcaagatcttcagcagaaatcaaaccctccataacagtcaccaaaccgatgaaacttcttttaggttttctggacaggggtttagcaaaatgggaagagtaaaaccctaatccatcagccgccatacccacaataggcatacaaggtttgttctgtttaggcaacacacagcgggcagtcttgtgggtttctttgtgacaaatgtcacaccacaaggaccgaaagcaatcacgagcatggtggccatcaaccccacatttttgacaaaaaggacgacgcacaacctcaacctcttttttcagagccgcgagaggggttttgaggatacttgtgtgacctccctcgccagcagacgaagcgccaatgtcttccttgacgtctgattttcccataatcggcttcaatctccagctgggattccggatcttgttccacgattgggaaccttgaggagtctctttctgattccaccggtcccagttagggtttcgccccttcggatccatctttgacaccgacaccgcgcgagacagcgccgaccactcctcgtccacaagcgggggacgaatcggggattcaaaccacccaccgcggaagctagcacgaaacgacgacggcagcgaccaaagtcgcgagagcgaggaagcaagatgcggaaaagagtgcgagccaacaaagtccgacggaaaccctaagacggaacaagaagactttacctcacctcgatgagaaggcagcgaggagttctgggtcgcggcaaaagggcttccatccgtcgcgtgatttcccaccgcgagcgacccgagccggacattgtgagcgcgcggagaagacggcccagaaagtttccggtccacg

SEQ ID NO: 76525 - DNA, 809 bp, Zea Mays
cggcggcgagtgagctattcctatcgtatcactcgatcggtcaggtttccatctcgcagatctatctgtctctcgatgtctcctctcctcacattctcccgatgctcagctgatgaattcaagccgtcggaaagcgatgcatcaaacgataggccaccaattgcgtttgcaatccagccaaacgtacgtagattgtacacagtggagggggggggggggggggggtgagcgagagaggccgccatctcccattctccttagagcgaccgaccgaccggcactgtaggtttggtctctttccgctctcgcaggtgtcgtcgtcgtcgtagccctctttccgtcgtcgtcatcccttgcagcagataagctgtcagcgggcgttggagtgacagaagctacacggaaaacagagaatggctggtggtttatttcggacacacacgcggattgtttttccccgtccgaaaccgaaaaggttgttagtgaggcgacgagacgcacacggatgaaccacagctgagctagctagctagtagtctagagcatggaggaggagcaggtggtggtgccccagaatgggagttaggttttctgtgcatggcggggccagaatcctctctggtttgcctccactgacatcattcgatctccttctcctcctatccaatccaatcacccttttggcggacgaatcctcgatcgataggcaaggatgcacacaccgcacaggacgcctcatcatcctacttgaagacgctagcacgcaactgcatgcaagacggcaaagaggctttgggccgggctgctgt

SEQ ID NO: 76526 - DNA, 670 bp, Zea Mays
gaggacacccaccattcgcagagaggaatttgagagagaagggtccgccgcctgggcaatcctgctgcctgctgagtccagatacgaactcccagctgggtgattccctctattctccacgtcgtgtttcgctggtaggcatggaatagttcatcggtgcatcgggctgggactcgtcggtgcgttgccgcccagcatcgtttgctgctgctctacttcaagtgcaggtatggccccatgcgatgctccacgacctattaaaccatatagattgaagcttggtcgccgggtcgatgggtggggtagtcctagctatagcgccgccgtggggaggaagtgcgatcgccggggtagttagtgagtgggataagaaagagatagaaatgggtgctgctctggtgccgtcagtcttgagataaacggtcaggattaggcgagcacatcccacgtgggcgaccgtcgatctgtgaagtaatggtcaggatcagatcgatcttacctcttcgctatgttaaatcgtgatcgtatatttcacatccgatggtcgtcttggcgtaccggttcataaagaggattgtgtaatctacgtcgttgatcctgcatccagcggtgctcgttggccgataccccttcggccgagacactttctagtaaagcccctctgttttta

SEQ ID NO: 76527 - DNA, 456 bp, Zea Mays
cgtcagcgtccacacaaagcaaggaaagagacgcaaggacaaagccaacatgacgcacatggtcggctggtaaaagacggccctactttcgatcaattgctagccaaatatgatggcaagaagactgttctatgtgatcggccaacaaagaaaccccggtcacccactaaaacaaaacggcccagtaaaacggcccgtaagacgacgcaacatgcatcgcacatcctgtcatgccaggatgctttccacccacctgctcatcgtcgatatattgtcctgttcaaatatggaatggtacgatgatgaacccatggtacatgcgtactccctttgtctattcaggctgggggcacctccattctattccttttgatccattggtcaaatggtcacgaccgagaaagatgcaatcctaaacggcctttatgcattggggctctattgaatgatcaccat

SEQ ID NO: 76528 - DNA, 712 bp, Zea Mays
cttttgatgactcttctttcagtataaaacatatatcctagctacagtgttgtttattagtctggacatgtatttaaatgtttgacacagtctaagatccttaattttgcacacacacacactctctctctgcatatatatacccggcctcaaccacctatatatatagatgagctgccaatcaagctgaattatataaacaaaggcatgcaaataattaattccccgggcatctgccgggaacaaatctcccttgtagttaatagcaggcaatgcaaataaacaagtggatcttgcttgtgtggcacaaacactacaaaagcatctgttgtttaattagccagcatttgacaagacctgtttgtcgtccagtccaggtgtaggcgtatgtgtacgacgatccacgtgccctaaaataagaacacagcaatcagtgcattctttttctgatcctccggcctacaagctagccattttattttatgtcgatcggtatatatctgctgccagtttcggcgattaattacacatgcatggttaagatgatgggcaggaaatagtttacagccaccgtgatggtgatccggccagttcgttgttaggtttttccataaagaacgctttattaaactcaagagttatcgtcatgccgatacaacattgaagagttcgttattagtttaatttgatctaagggtgtatttgtttagac

SEQ ID NO: 76529 - DNA, 1032 bp, Zea Mays
cccggatctccacctgctcctctagagtcatgatgcgctggttcaactgttccacctgtaggtcttttcccaccaactctaaagacaagtcgaccttgaagtcctcccgattgtcaagggtgatcttagtagtctgagctagcccagtgaggtgtgccatggcgtcactctgcatggcctgtaggcggtacagtgtgctcatacactggacgatgatcctcccaacctggtcgggatgcatagcccatatgtccttcacgtggctcactctattgcacctcattgggtaattcctcttctcagcgggaagagtcccagtaggtgcatcatcatctccaagggatgatatccatagaaggtcatcagagcttttaacgatgcggcttcagtggtgtcgtctgccctgaacccgacagtcacgaaaacaagggaacgccacccaggctgcagagggtgagactccagggtcagccaaaccttgcaacgtggcacccaatgctcctcgtatagctgcaccgtatacagagggggtgtagggtatttggcggagcagagtacctcccacaagatagaggggaagccctcgtgggaaaggtagtcaaaactgaagcgagtgtctcctccattggcgggggtggatgaagacatctgagaaagagggttagatgtaagtgttaaggtaacggtaaggagataagtgtgcttatgttttaaaggaggtggatcgaattagatttatctgttccaactcatttcctgctacaaatttttaacgaatgtttgttaggggtcatgattcgatgcattttccttaacctttatttatttctatcctataatgcatgcatgcttgaatgaacgtcctctcattgatcagaggggtgctcctagggcatccctactatcctagtgttggcctatatggcctacttatatagccacctattttcccccactattcttaaggcctttcatcctaggtctagcattctagtcctgacgatccaatactggtttctaagaaatttttac

SEQ ID NO: 76530 - DNA, 953 bp, Zea Mays
tttctcttgtgtgaaaggggcgctagctagctcccctgccgctccgcccgatcgctgattcgctgtctccgcgctgcgttcgaattgatcgatgttctgttggctcggttgtctcgcctcgccgggtgatcggccggcctgcttgcctgccccatctaatctaggttccgcagttgctgtctcctcaatcgctagcctgtgtgtcgatattagggttctctgtgcatgtacgcgctcatgtctgtttgtttggggagctatctcggtcgtagtggatgctgttcggtcgtgtcgcccacatggattatttccctttcctagaaacgagaagataatgtgctttgggaatggactttgaacataaaaacagctttaaactttggctcatcaaacatgcgactcaaaccaaaccctggcttgtagtcatcgcgaggaagcttggacatgatgtacaacacatgctgcagaataaaatgccaatttcctagattgcatacactccatggtcgcggcttagtgtgatttgtaatgtctgccagtagtagaatctctgtgcacaatcgtgaatccagataatgatggaacaatctgccctgccctttcgtagacctgcacattttgaagcaatgaaagaatccactgccatctcttggtttcaattccttcattcacgaagtcagagagactcatgggtgcatgcattcacagaagcaaacgaccaagcactacttgattaaaatactctagaagtaggatccatagtttcagcaaatatatactaacagctgtgctgttgcagatctttttctctccctgtcacatagtattgcgcataattcaagaatattttttttggatggctcattgggttgtgctgcacgctgctgcaaatattttcttctccccactttgcatctcatattctcgttctgacaacttaccggcaattactt

SEQ ID NO: 76531 - DNA, 799 bp, Zea Mays
gccaaaacgtgctgggtgatcgctgtctcttgctgcgggtgttggacgactcctcgggtaaggcggtcaactagggtcgtgggaattcctcgccggtgtccgatttgccgccgtgaacccgcatgtctccgtgggcggcgagtcctgctacacgattcacggtaaaatcgctcccatttggttcgacatcccttcctcttccgtttgcaccatttagcgctcgagttagggctatgggggtcggtcggccatgttgccggtgggcgcaccgccgggtggcttctccgccgcagtggctaggattgaattgaggaagacggcgcctcggccgttgatcagcaagggaagggcccagattagatcggcgaaaattgattgtgggccatagatcctgaggcgtgcggcttagatgtaatacgtacttacctcttcgtttcatttaatccgggcggtcgatccaagatcttgcggttagcattgtataccgcttcgggacaagccctagttaatccatgcccttgatatcaaatcctgcggccggggtcgcgtaccctttcatgatctaatcctgaccgcagatcatgatccaacggctagggcttatccataccccttcgcatggcgttcttacttaagagcccctaccctttgccacaattaacccgccatcccgcgcggtgttctctgtgtctggggaatctttcaagttagcccctgatctttttggtatttggtgcgcagtccagaagatagtgaaaatagaaaattaattatagaaattggtttttaatacaaaaat

SEQ ID NO: 76532 - DNA, 281 bp, Zea Mays
catgcatgatgcgggctgggaccacgggtgggcggtgggcggcgggcggcggacgtatcattaaaaaggtgtttactgtactgtacagtgtacacattcaagttcagaaaatgaaaacatactacatgagatttgtcattagaaatatttaattttggtaagttaactaacacacacgcacacagagaaatcatttgctttgctgaatagactattaatagcgttaggtaatcatacgctaccgaactcgcgttctctctccagtatctcagacactcggc

SEQ ID NO: 76533 - DNA, 661 bp, Zea Mays
gctggctccaaccaaaatggttttgtgtatctgaagtatacctttcaatacaggagccagtttgatgaaccaaatgatgactggctagatgccatagaggcgactagtggcaagctggttggggcatattcaaaggccaaagatgaagccatgacaattgccttaggagctcagggcaaaaagagattaaatagggtgtttgatgttatcgggtttgtgtacccggactactgttatccttcacgaaagcaagggaagaagaggaaagctgctacctcggcgacttatagtgcatcgaggtcaaaaaaggttaaagttttaacgcgccgaccaaggcgtattgaaacagccatcgtgccaaaattaattgaggggaccgctcctatcatagagccaagtagctttgtgccagtcgaagctaggagaaatgtgactgaagagccagaactagagaaaacgacagaacagttgaaggcaccgagtccaccatgtgcaatggaactgccaaagccatcaaacatccccgcagctactccgaggaaaaggagaatggccagtgtgctagatgttgttatggagtctatgaaaacatcaactccttcttctgccaaagcacttagaacggaggctaaagttctagaaaaaatgacgccgccagcat

SEQ ID NO: 76534 - DNA, 683 bp, Zea Mays
aaacaaaacctatgttacacctttgccttcacctgatccacaaccaatgcttataattctccaagactttccattctctgtggtccaacctgcattcttatttctccaagaattgttagtccacattggttgtcattaattactaaaacatcaataaggggcctaggtgattcacaatcgctccctctcttgaccacctcgcacaagcatcacgtcggcatcgagcgagggactgagaagagcgcagagagagaacaaagagagagaagtgtggatgtgggtgtcggttcgtgccgacgaagactcttgggggacagaaggtcatcgagggtagcctctagggcatgatgaagccgttcgtgacatcatatggcgagatgtggtcacagtttgttgttgattctgcaccggagatggagagctaccgcgaaacagcatcgtgtcgtggactgatcagtcttcatcttcaacaccggtgagaaatctcccatgtagttcgcagggttcttctctacgtgttgcaccagttggggatgtgttcgggcgttgggacgtcgtgttgtcgtgccaggccaatggcgccaccgacgaccgagcaagcaccgcctctgcttgggtctaggtggggaggatggacgacgaccattcgacccgattcagactgttggggtgacactttggcg

SEQ ID NO: 76535 - DNA, 308 bp, Zea Mays
ccgggcgcgagtactgggtataggcggcaaagggcggtggcgaaacagagagtgagtggattggcgcgaagcggtaggcatcatcatagtgagatggagagtggttgtctttgcgtggacatgactagtaagcgaggattgttgtccacgccgattggggtgagtgtaggtgagggggagctgcgaaatctttttgagggtgaggaattgaggataatgctgtttaactatagggagatgggtattatcccgaaggttgaaccaatgtaatatgtgatgccctcgctgtatgtaaccgtaatttatat

SEQ ID NO: 76536 - DNA, 485 bp, Zea Mays
ctcagacggacgggaacggattcgctgccattgaattggctctggaactggaagcagaggacgaggacgcctggagtcgggacggacagaggaaattccaggcaggcaccgtcagattctcatcgaggggaggccctgatcactgcacgtgcaagtcatggacgaaacgtgaatacaaatgtaaaaaatgaatagcgatgattcatggtcttaccaagatcgctccacaactcacttgcgtagttgcatgtcgtatcgtccctcccctcccgtgtcgcagtcgcagctcgcaccccagccagaagctctgtgccgtttcgtggagcaacaaacagcaagtggcttccgttactggacggccaaacacggacggacgaaccctcttggcgatggcgaaaccggacaccctaggttttaggaggtcaaatgtcttgtctctctcggaccagcacacgatgctggtcacaacaacgtaaccatagttc

SEQ ID NO: 76537 - DNA, 750 bp, Zea Mays
cgtgcatatttcggataacttttttctaaagagaatttttgataatttggattcctagataatctagctattaggagaatatagacatcgtggggcttgcgtgcagaggaagatgaaggggtctacattgtttaggatttagaaaatagtggatttctatcgttgtgacgactcagtggattatgcattcacattgatttgggatattttcacagaagcaattcttacagaagcatgctaagaatcgaagcatttgactgctagaagatgattctgatgaccaaaatccggcaagaagccaaaacaaaataaggcccacgtatcctagtgtctatccatgatgaaaactaatagatgttgttaatgagtatatcatgagatttgccattgccttgctctaggatgccattgtcatggatctctccctcagtcgtcattgtcgttctctagggtgtagttgttgtggatcttgatagcactcactatttatgtcttgcttgatgtgttgacttgaatcatgtttgattcattgttgccatgcttctagatgccactatcattgaactaagtagctaattcacgtggtcaaggtcgtccttgacatgaattcatggtagatttgaggagctcagctacatggatggcttgatagatagatagcgtgagaaacaaagtgacaaaagatgggggatatcaatcgatacaactcacctttgaaaactccaatgaccatgctcgtgaagcatgaaa

SEQ ID NO: 76538 - DNA, 416 bp, Zea Mays
ctttaatagaaacaagtgcaccatcaacaacaaacaaacctctataggagcgtctagctcctccagaggctcaggggtgaataccataggtatgatatgtggtgtgggttcaataagaggtgacaagttttcaatcagttcaataccacctagtctttgtgaggtcgatctgggtctgatccctatccactaggaacatacaatattttttgtctcgctcgaccccggccccttttggggacagacgacttcacctcgtagctttgctttatgttgcccgacctctgaccccaaccaccaagggtccaagaaggagaatgactatattgtagaattttgcttcatccgacctccgacatttgagggaaaagggtctaagagtcgagaaaccttaacccaaagctctgccttgcccg

SEQ ID NO: 76539 - DNA, 358 bp, Zea Mays
ctgcctgttgttaaacctttttctacattgcacggctgcaaactgtgctctacttatttgtgtggctaaagtcttttggcaacctagaaatgcattttattccatgactaacttatatgctaccaatgccgtatttttttgcacctctagaggttggtaaaaaaactccctcatctcttcccttctctccgactccccaaactttgaggagcatgtaagtacctgttgttttcacctcattttctttaaaactggctttcagaatgcttgtcgttgtgtacccaggttttgaatgtagcgtctggtggtagtgtatatttcatttgtgattcttgtatccgattaattagtgcaccca

SEQ ID NO: 76540 - DNA, 671 bp, Zea Mays
cttgaacgaaacgacttatggttcattggaggagatgttcccttgagccaagtctttaatgtacttggagttcctcaccatcatctcatggtaaaggaacttctcaagcacttccccgggaggcattttcttgtacctaggattctcacgaaccaaagatacaagagtaacattgcgtgaagtaaaagatcttaacatgtgttttagcacttcatggtccgtccatttcttgctcccaaagttgcagaattaatttactaggcttttaaggcaaatgtacatctcttgtatgccttctcctttaggcatggcaaatctcccaagctcccattctaggagctctatcttggtaatattggtgatcttgtcaccttcatgtggcgcctttagagtgtcccatatatctttgacgctttccaagccattcacctagttgtattctttcctgcatagagaagtaagtaatattgtggtggcttgggagttgcagtgcatgattttctctacctcggggatctccattcccatctcaacaatatcccaaatactagggtggagtgagcataattgaattttcattttatgactccaccatgaataatccacaccatcgaagtgaggttatttaccaagaggaacagaaagtaattagatatttaaattttgagaaa

SEQ ID NO: 76541 - DNA, 1359 bp, Zea Mays
cgaagccaaactggaaacatggggcccaaatggcaagatgcaaaccctgcagactccagcctgaatggttggatccaatctgcatccagtacaacactcaaattattgaaagacaggtgaattttctttaggttcatcagacctacaaagtgctcctccgtgattactccaccgaagttgttattgcttagatccaaagaggtcaaatttgtaagggtaccaatttcagtaggaacacttcctctgagattgttattgttgagctcaaggatgcttaagctcctgaagtgacctatcgaacttgtcagggtccctgtgaaactattgtactccagatggagctcctgtaactgtaagttttcccttgtgcacaatggtaatctgtccatcaattctgctatatctctatttatcctattggcgctaaggtcaaggatttccaaaccacaaaggttcttcaagccttgtgttatcgtgatgttcgcattacctgataaatcaaggacaacaagggatgtcaggtttcctagtgcatcaggcaattcaccaaacagtccggtgtccttcagaacaaggtgcttgagacttgtcgctctccagaaccaactcgatatatatgtgtgatggaagttgttgaacgagagatcaagcttctcaagttttgtgagattaaaaaatgcgagtgattggtttgcactgccaagccaacagaaagagagactaatgacccttaaagatggtagcatattcagtatatgaggccaatgaccagctatccctgagagattgacagaacccatgccaaggtactgcagcagaggtaggtttgttaaccaagtaatgtcctttgagtatatgccatatcctaaatatgaactgccaagatcaaggtactgcaacctagataggttgcctaactgaggaggcacgctacctttgaatggtactccagagagattgaggtatctcaagttcttcatggagcccaggaatgaaggcatacgcccctttgggcctatcaagcagttccagcttaggtccatgtgctctagatgtctcagaaagagtagagagcgacttatctcaccaaacaaagttgtgtaatcgtcgcatacatctgtgtagtacaagtcatcatctggattcatcgggtaggcaagatggagcatgaggacgttgccggtgaggttgctgcaggtgacacctctccaccggcagcaatcttggccgtgccatgagcccaggcgactggtgttgtcgctcgtgatgcccttcttgaaggacagcaaagcagccctctcagatgggatgcagccgccgccgctgctgttgtcgccgccggtgtcggtgccagtgcca

SEQ ID NO: 76542 - DNA, 465 bp, Zea Mays
cgagcacccaacaagtgggcccagtaatctaatactaagtatatagaagatggagcgatgaatcttgacagaccaatatctcgctcgtagtcatcaaatatcttcgcttggtcttcgtgtgaatctcctagcacgttagtacattacgccctcgtcttgtcttgttggagctcaggatcaagctttgatgtaggttgcggcgtagcctgatacgatgtcgtgcatatgagagtatggacggtgtcgaagtatggacggtgtcgccctgtccccttcgcctctcactgtaacgggtgtcatgatgacggtttcccatgcacagcgcagagagtcaatggtctctgcttcggtaacacgcaggtaacagtgtagcccgtgcattgtgggctaggcgcgccgcttgccaccagagtagacaggtgcacgtcttatctgtatttaatgcagggacgccttatgctagag

SEQ ID NO: 76543 - DNA, 1147 bp, Zea Mays
ttgtggtgcctatacgaagctaagtcaggtctcaagattaacttttctaaagacgaggtgattatggttagccaagatgatagcaataagtatggtgatttccggtacgttcaattgctctattggaaattggtcgattaattacctttgggttcttgtctcaagatataggcttcatatagctgactggttccccattacgaaaaatttattgaaaagactagatggatggaaggatagttctatgagctatgtgggaagatcggtgcttattaattcttgtctaagtaatctccccatgtatgctatgttcatgtatctttttcctttgtcaacaatttaaaatacggacacttctagaaggattttctggcttggtggaagatacaacatacacattagagtaatacgtataactttcggttgtcaaatgccgacaaaaattagagtataccgacgaaaattagatccatctccaagcatatcatctatattccttctttatagactcctctaaaagattccctcatttatatcttatttctcttccataatgttatctgtatctcgtcgtctatacattaaatatatactcatattagagacatattttttctctacacttttgtatgtacgtatttatcataccctcagatatcttatacatattttaattagttttgtttaatcctttttttaaaatataaaaatgtatagataagaggatatagaggatgattgagcattttctatatttataggatggtttagaggttagttggagatatagaggaggaaatttctctattagagctagtttgagaaccctattttttaaaaagaattttattttccaaaagagaaagaaaaatagaaatcctttaaaaaaaatgaggttaccaagctagctcgaccgacgacagttaggcgattgaaatgataaaatttggctaatttttgtgtgtgtggatgatatgtcgtgacaccatctcgatcaatgcatggtatcatgcagccaaagatacgtgtgttgtacatatgtcatgtcaccaccgatctgcatggcatggcatacggatatggataacggatttacgacggagcaggcaccagcaggtgtttcgcccatcacccaacttgctcagag

SEQ ID NO: 76544 - DNA, 580 bp, Zea Mays
gcctgacaaagatcgtcagatacatcgcacctcgccgccggtgatccccactcgtggattcgcgccggctgtcacgattcgtgctcggcacaaagtggataactacaggggataaaagatctcgcggggagatggattgggtcgtggacagtagcttatcggagggcttgggggctgtgcgacgtggccaaacggtcgtggttgtcagaggtcgccagtggtcctttaccacatagtcgtaaccgtggcatgctcagaattactctccctgcgtttgtaggccgtcgagcgccacggcgtgctcgccagtgcaatgccttgtcaccaccgccctccaaatcccttccaaattcggagtaaccatggccaacctctataaattcagcacctcccttgcttcgactcatcataacgaacccaatgcaactctaacctcgcccggtcatccaccatagcccgagcaattccgttttcccccaaatcggttctccgtgccgcctttagcatctcgccgtggccaaccatccacaagttggttcatgcttctctgcttggtgttctagcatcccttgagtcccct

SEQ ID NO: 76545 - DNA, 1134 bp, Zea Mays
ggctagcgacccagaagaaatgcagggttgaacacgggccagagaaaggggcgatccaagcctagctgatttctgcgtctcattcctcatggactgaggcgaaaccggcctggctggggtcagcgacccgagcggcccaagcctagacatcactgggaggggcgaactcagccctgtcatttctagcgacccagtcactttggaccgaggcaaaaacagctgggtggagttcagcgacccaatagtgcatgtctagctatcaataggggcctcatcaaggagactgtttggcttctctataggcaactcattaaggagtatcatcccattatccgaggccatctgttgtaactccggtgtgtcaaagagtggttgttcatgtcccctagatgtatgtgaagtccttccatgtccagacggcgggggaggcccaaggcaaaggtgaacagaccgttggtggggcaagggactgcccaaacgccgaggctcatcattcctctgatcatccatgtcgtctgaaccatcaaactgatcgccatcctccgatggagtgagcagcaaggaacctctaagaccatcatggcagattgcaagtacccttacacttatattataggctaagcatctccgttcatagctttgtgggcctggctctagaatatgcagaatcatatcacggtgcagctgtttcggttggaagcaccaagccctcgctacaaaggatggaagagttttctgcaatagagtgtccagatgaacctcctcaataatacaagaatctcccaatatgaattcagctgttgagcggcaccaagcatgcaccgggattccgataatctcaacttccaccaagttcgacatgattgaggaagaggcatgagaaaatctggaccatcttttgaaaaccaagttgaaccaaggtcctcggagcactttaccaccattaagaaccctcattgcagtttcttcattaggaaagaatagaagaaaatcctcaggctttgcagattggattgtcatgtcttctaacttaatgctgaaacaatgtgccacttcttctaatacctctgatccaaggacctctggcctagtaccagtaacggtgacaagcaaggcccttctcaagtttaattc

SEQ ID NO: 76546 - DNA, 387 bp, Zea Mays
ttttattttattatataattaaggcctcgcctcgccttacgctttaccacctaaaaggtaaaaagggggtcgggcgccttatgttgccttacttccttaataactatgaatgtgatcgaggttaaggttcggccttcgccccaacaggatggattagtcccctcctttagaggtgtttggattggagacactacgtgctatacctccatgatgcgggcttgctttatccctccaaattcggcggataacacaacccgttcctcgttccagatccatgtgatgcatacgagacattcagtgcagtaacatgacacatgtgctgtccctttcacccctccccttgtaggttgtagcgctggtgagtaatgctggggacgagtagtggca

SEQ ID NO: 76547 - DNA, 372 bp, Zea Mays
ggggccttagggcgagggagcctcgggcgaggcagagatgctctcgagcatgtgacctacttgagacctagctcgggtgagctagagatttcagaagaccctcgtggggggctcgttgggaacaaagttttggggaaggccctcgacgtggacttcgggcgaggtggagctgtgactcctcattcttgggagatgtacctgggtagagttctttaagcgcgttttaagggcataatcccggtttcaataattattgtcctcgacagtagcccccgagtcttccaaggaagtgttttgacacttgctttgaggctcttacactttttgtgtggtgcgctattttttcttgaggagtggaaggctcagtcttcg

SEQ ID NO: 76548 - DNA, 414 bp, Zea Mays
caagattatgcagttgatccattcagcggaggacagggagtacatgctagctgctcttccagggctgaacagtgaagctaccatggagcacaacatccaggtggaaactgtgcaggtgatagggcctgccccttcggtggcgtccatgtaggaggaaatcaggcctaattcagaggtacacggcattgatgatttcctgatttccatatctaaacctatcccagtaccattgcttacagagcaaccaccaggtgacaattctagaaatgctgaacacatcaatgattttcctaaccacactccaaacagccagagccacatgcatcataacatagacaatactaatcacagctctcccatgcaaaagcagcgtagaagctccaagctagctaaaaaagctgaaagcagaaccgg

SEQ ID NO: 76549 - DNA, 399 bp, Zea Mays
gtgattatgtgtatctgaaggtgtcaccgatccggggtatgaggagatttaaagttaaaggaaagttgtcccctcgcttcattggacctttcttgatcttaaagcgagtgggagaagttgcatatcagctagaactaccgatcacctgtcagatgtacatgatgtatttcatgtgtctcagctaaagaagtgcctcagggtacctgaggagcagttaccaatggaagaccttagtgttcaagatgacctaacttatgcggagtaccctatcaagattctggacactttgactcgagttacaagaaataaggtgattaagatgtgcaaggtacaatggagtcaccatggtgaagatgaagctacttgggagagagaagaagagcttcgcatagattttcc

SEQ ID NO: 76550 - DNA, 1618 bp, Zea Mays
ctcaactgttcaaagagaacctcaatacggggtagcgaatatttattcttgattgtcacttgattcaaagaacgataatctacacataacctcttgcttttatccttcttctccacaaacaatactagggaagcccatggcgacctgctaggcctaatgaaacccttagccagcagatcatccaattgtcgcttcaattcaacctgctcctttggagccatccgatacggggccttatgaatagactgcgtacccggaatcagtttaatttcaaaagctgcatcgcgctctagaggaatgcctagaagctctgctggaaacacgtcggcaaagtcacacaccacacggatgtcctgcacccgcaaggcagcctcaccctccaccaccatggagaaaaaaattcctgacttccttgaccgacaatccagaagcaattgcgacaaccaggataacgtggactttggagaacttcccaagaatatcacctccctacccaacggcgcctgtaataacactgtcttccaaaaacaggatataaccgcgcgatactgagataaccaatccatacccaagataacatcgaattcccccaaggaaatcacaactagattagctgaaaagacctcatcagcaagaatgacggaacaagcctgacaaactaaacagctactaatggagccactagcagaactaaccataattgggtgacaaacgaatagctagcgccggagtcaaaaagagcatgggccacaaacgaatcaactgaaatcatacctgtcaccacgtctccttgctctctgccatccatagagggtagcaagtatgctccggaaatacccacagaagaggaagctcccggagtgaagttaacagaagaaccccactgagtcaaaggatgaggcaaacgcggagctccaaactgaggtggtataggagtagtcgatgcaggagtaggcgcggccaaatactgaggaaaaccctgcttaggcacaaactgaggagtcccgggcacatagaactgctgctcaacgcttgacatcatgttgacagtgccctgagaagaggaggaagccactggctcccatctgagcttcccattgggattcctcctacacacctcatccttgtgatcttggctacagatagagcacctgccactccactgacactcggcacggcgacgcgcatcaccacaacagaaacacaccagctctagcccgggcttaggaacagcccgatacctctgagtacttcctcctgaagtacccaattcagaggatttgccacggtaggggtggtggcactggtgctgagacttgccgctcttgtgggctggacccccagtgttgcccctcctcgcgtcttggccacgaggctgatcaacacccgaagacttctgagactccatggtgtactggtgttgcatctccacacccaatgcctgcttcaccgtagtacgaaaatccaccaacggaaaggcgcctagagcatgcctgatagaagtggaccatcttgttaaaacccacttcatactctatgacggacttcttctcttgcttgaaggacttcaaatcaaacttcattttctccaggaaggtgaccgggtagaacctcctct

SEQ ID NO: 76551 - DNA, 537 bp, Zea Mays
tccaatcaatccaaccaacaagcttgaactttgtttgactaatggtctgccaactctaattatttgtagaaatgtttcttccgccccaacacaacatcatatcacgacggagccttcgaaaacaggtgacctggcaatgagaaaacggcgcaacacaacatcatatcacgactgaagaaacacggtctgccttgctagatagaatgtaggtagagaacgcaaaaggacagaatggttagttgcagccacacagctgaaaccgaataaaacaaagctatcctccaatggaataagctgcatcaatacagagtgcacgacagagaaatcggcaggccccctcaaacaacgacggtagccccacacacaaagcatatctagagtcatcacggtcgagcttaacataagggacgaacagctccgatttcctaaaacgagctgcatacagccaaggaactcgacaacacctaaacccaagcaccgacacacgaggaagaccacattgcgtcatcgctgctaagccttaacacaccccacccg

SEQ ID NO: 76552 - DNA, 506 bp, Zea Mays
gcgatttctatcttcatcttagtccaccaataatgatgtttcaaatcttggtacattttattacttctaggatgaatagaataccgactaagatgggcctcatccaagatttgttgacagagttcagcatacttaggcaccattatgcagtcttcaaaccataacactccttgatcatccttcctaaaacaagtagctttgtcggcttccattttctcacagatatacttcatatcctctgagtgtcaataatcctttgttgaataactgactcaagcttgaagtgcatcaaggctccttgttgcactatccccatatttaatctttccatttcctgacataaggtagtgccaggcaatcccatagtgaggcaatgacaaaatgctttatgacttaaagcatcagccatcacattagcctttcctagatgatagttgttgggggtcttcttctccgccaaaggtccacaagatataaaccatcgacaaagtggtactgaggatttc

SEQ ID NO: 76553 - DNA, 1054 bp, Zea Mays
cccagattggggaagaaaggtgcacgcgaaaatataaggcaagggaggagctcgatgcgggtcgccaatattttggggtgaagaagaggcgtctgttggatcagaaaaaaaggattttttcctaatatcgattttcaggttggtttaagggttcttctggagatgctctgagcccgtgatcagatgtaaccaccacagacgaaataactggaactttgccacacgaaacgttctcgatttgcgcagcaccaagccacaccaactgatctctttccccgtcgacgtgcaggcggagggggcacattccaccgaggttggggctgtcaaaatcaggtgcccttccagatcccagaggagagagaggccccggcgagtccgccgcccgtccagatcctgccgatccagtcacgggttcatcgccttgccggctttgtctactggtaagcacaacacatacgactcgcatgccccagcgcccacccgcctagctcccttatcatcctcctcgcggacaccgacgcgcgcctgactgttttgacgtttgcttgctggcaaggagccgtcttcttcctcgccgggaaatctccttcgctgcctcgcttgcgtccctgggcttcttgttccacaccatcgcctggcttcgtcccctgcaaattttgaaactgtcagaagcctaggtaatgcatgtggtttggggatctatgagctgtcagtgagctgggattagggcttgttaatcggccttgtaagggagaatcactcctataaatacctgtacttggtgattgagaaggaataacagaaataatacaaccaaataccaaaatcgaagtccacttgcctaactgactcacctggtgacgtctcggctcatcgctgcagtgacctcaccgtcgctggaaatctcacgctgtagtggaaatccccttcccacggccagggggtcatcacatctggtatcaaagccatcggagccggcgatcgttgaagagaagacgcaacggctccctctgcaaaaccatccgtgcagacccggtttctactggaagccagg

SEQ ID NO: 76554 - DNA, 513 bp, Zea Mays
cgataatgagagcaagggcgggatctgccacacacaggtggaggatagcgacaaccacctcgccaaccgtggacaggggcatggcatgcgacgtggtggaggtggaggcaaggggaagagaagctgggaagaagggaaggaagggaacgatggactcataggataaaaggttgttggcgaagatgacgactaaaggggtcctgcggttggcgtcgccgtcgttgcttccacacccacgcgttgggaggagttccacacctgttaattagtggatcaattccaaccgcaactcagggttttggcgaggattgagcctagtttccaaccatggtgggctaaatgaatgaacatttcatcacaggctggtattgaatccatacggggtgatgcccattgatcaggccgtgatctaggtcattccagacccagtcgaacaaaaccttagtaaatattataatgcatatttaaaaattaaaacaaatccaaataaaaaagttcaaactaaaatagttt

SEQ ID NO: 76555 - DNA, 662 bp, Zea Mays
ctacgcccaggatgtaatccacaccttcgatttcgtcatccacgatcagtacgccttcttctatctcccgtgggaaaactgggcagcggggcccggtacctgtgctgaccacggcggcgccattgccgcagcgcccagcggccagcacccgtgacccgagctacaattccttgatcctatcggtgctacgcctagcgagcgaaggttgaagcgagtctgtaggagaggatttcgcggagggtttcttactggcatttggagagaccgcagaggtctacgacggcgcaagcaggggcagggatagcggggacccatcgctcctccggccagactccgcggcaaaacgacggtgcacgcatctccctgcgacttagtcttcccttcctctctcctggatcctctcggtcgcggtgtacctgacgtatgctcgtctcttcaattcgtggtgacacaagacagatgaggatcgggctcagactttatagccgtgagggataggctagctggcgtaacaaactttcgctcgttacggaaggcggttcatcgatcagcgtttgagaggaatacgtcgcgaggttgttacgctacgcaggaggcagtgactatcgaggcaagaattgggttacgtcatgatgcttagcatcacgtgggtttgtggcaag

SEQ ID NO: 76556 - DNA, 482 bp, Zea Mays
gattggtgacagaaaacgtacccattagcacagactctccatccggggttgtagctacttgcgtgtaataaacccgtccagtcctcctttcacctttgcctgtctggttgcttgctgcagtattcttgctctggtttgaattggtatttctcgttgccctttgaaagttctgctggttttgcttgggataggggcaatccttaataaagtggccagtcttcccacaattgaaacaggcagttgatgaactgggtagggccggaagacgagtaccaggggcacccggctgagcagtcttagtgggaacagtagatgggcgaataaaaactggctatttaaatggatatgagggtggacgaggagaagcacgattctgattgaagggacggataacaaatcttgttcgcttctcaggggcccgagacgatccttctccaccttcacgtccaaatctctttgtttttccttgtcctgagttcttg

SEQ ID NO: 76557 - DNA, 414 bp, Zea Mays
cgagcagttcaccaatccatcgcggatctcgcggcgtgctccgattcggaatttgggtgtcgtcaggggaaggcttgtgccgcggatcacgggaagagtccgggtcctcgcaacctccgcgtctctttcccctgcatataagtagcggagccatctcgccttctcatgccgcggctacaccccgtgctcccatcgctagcatagggaggaaatcggaccaccactcccacatctcacgctcgtcgtgatttggagtcgcggggaactaccagacaacgtggatctcgggcgcgtgaatccttggtcggggaaacctcgcgagcttaggcaatcgctcgttggagttcgaccttcaccctgatccgccccacgtcgcggtcagacctcaccgttgttcaatcaccggtaaaaacc

SEQ ID NO: 76558 - DNA, 833 bp, Zea Mays
ccgactttcaccattttaatgtttaagctattaaaaatagattactcacaacacctatgttgccattagttattttcatgaccaagctcagtaatagagtaagaatagtatcttggctatgcttatttggttttgtgatgacgtttgttctcttagaacaaggactacaagaaggatcttgttatttgtgtcagaacacctctgctgcctttatttctgtaccatggattttgcatgtatttttcatagttgaatcttgaatcttccaccggaaaattttcttctttattgttaaggtacttattgtgaacagccattaaccacctggagaggctgcaatggttgaatatcttggtaatatgcaagaattagctatgtgacagtttgttggaatacatatctctgattctgttgattttggatcctatatttattcctgagttattgatattcctgatatgaggcctgtccaggatgtttattaagatttgaccattgttggttgatccagaattccagatattgtatttcacctttgaactgttgatttttttggggatggggctacattgggcatcgaacaagacacaagtctttttttgttctggatggtttctagctggagctatggtttatggcttcacaccactaaaacatgcattgtttggttgaatttaccaaacatgcttgcattgacatatcaggattccaggacctgaaacatagctgcaacccttttattaggttcctgaatataggaatgtaacatttgtggtatccctgacctgtctgctgcttaacactgcaattaaaaagtatatgtgaaccttgac

SEQ ID NO: 76559 - DNA, 613 bp, Zea Mays
cgccgtcgaccaccttgttgctcggactggccatgaccggcgttggctgcccaaattaactaatgggcaagcattaccgacccaaggcgaacctagaacaagccttaattgagttaatccggccctggattcacctacccacgatgacggcggtcaccgaggtcaaaccgaggcgttcctgacgagtaagcacagtctagctcatttaattgagccgacaagcatcacaagcatgcgagggtgctaaaacatgaataaggagggtgagtgcggacctgagagcggctagccccgacggggtgattcacggcggcgcatatgatcaatttgggggaaaacccaaattctacggctatggtggctaattggagatgagagttagtgtcctgggttcgtaataacttggcgaactagagtggggcatcaatttatagaagctttaggcgacggctccaaatttgggaggagagtggtgcttatctccctggtgaggcaatcaccgaggctaccatggagcgcctgtgttcaccttgcgcctgtcactatctcggggatgccacaatcacggcaatgtggtgaatcaggcgactacgtgtcccttgctgcgatcacg

SEQ ID NO: 76560 - DNA, 1218 bp, Zea Mays
gtgctcgcttacacatgggccccgcaggtcagggccgtcaacaaccttccgttcgaggcgcggctcgtacggtcctgctcgaatcttcctccgcgatgtgcgccgatgaccgagaccaaccaggggattaaaaccccaatcgaccccgccgcaaccctattctctaacaccttagcacctcaccgccctcttcactggtccgtgcgcgccgtgtgctcgacaccataaggagagagagagtgaaattggggcgccgtgtggccaaccgggtgcctgcgtcgctggtgattcggatccgggtcggtgggcatcgcgggagcttggtggtgctgctcgcgggcgtgtcgaggaggatcgaacgtcggggcacgggaattcgtcgccggagtcccaggatccgccgcgggccgcactgcttgtggtcgggtgctctccacgccacgacaatcggtgagacctccttctttgcgcttgcaatcgccagtacttcgtgtattcgttatcggggtaggaaatagcgcagcgggaccgtggatggcttggctccggcgagtgcgccaccgtgctctgtgggttgcgccgccgtctcgggttaaggtgagagagaggtgcgatggccgtcggatgtggagcggacggtcccgattagatcaggcttacctcttcgtcccagtgaaccctggccgtccatccgcgaacgagcggatacagttcaatgtcagttatttaaaatccgagccgttgatgcgagatcctgcggctgtgtgagcgtaccgattcggtattaagtagatctaatcctggccactgaagtctaatccaacggccagaacggcccgataccccttcgcgggtactctttacaaaagaaaccttatgtttttaggatttagaacccgccgtccctagcgactgtgctctgtgtcttggtgttcttacgcccgagacccctgcacttctcatattttagcgcccagtccagaggagtttaaaaacgaagaaataatatcagaaattcatttttaatacaaaaacaaatctagaaacttgtgaaattcatagaaatcccattcttgatccaaatttaaccattccaatttctaaaattttgtaacaatattctctatcacttagtatctctgttttggcataaaaacagtaagaacattaatttaacatttaatcctattataatcaccttaaatcttaggaaattca

SEQ ID NO: 76561 - DNA, 649 bp, Zea Mays
ccgcgctcgtagaatgaggcgagcaccacgaccttgccattacgtggtaccagagtgccgtcttcttcctccagccgctagccagagatcgacttaggtgggaggaactctttcctctctagatcgtcgagatggctccgggtggtcgagcacaaagggaaggtgtccatgagcgtaagagaaagtggtgaacaaacacgtggaggggaggctactaagtgaaggaggaggcgaattctcggacgcaagaatgtggtaagcgtaaccgaccccaggtacttctcccattctatttatacgtaggcaccagaaagcaagcgacatctgaaggatgggcccccgcgaccgacatgggaggatccgtcgttctggaccacaactgcctcgagcgccaagtgaaaaatgttcatcctataggtaccacgccgcatgggacagagagccagaggggcacgcggtaggggaggcaccagtaacgggcaagacgattaaccaccccatcacgccacatgtgcatgatacagtggaacgagccatttcgtgtcccatcaaagccgcccacgctgggcagcatcatgatggccacctctttttaccgggtcgccgcagtaactacctcatgcgaccaggtaaaaaaaccaatactcac

SEQ ID NO: 76562 - DNA, 783 bp, Zea Mays
tcagtattcagttgcaaacacatatggttagaaataaataagactatcagaagaacgaacacaagtattgtatatcagaacaataaattgttgttgcaaccgtgctgctgaaaagtcatggtagtaaaatgtgatactgcggctttgctagcagggttggccagaatggtgaatatagcaatagaaattagcaggttaagtagttgagaggctcacggaagataggggaattctacacatttttttttgcttatttttaccggaaagtggagagattatacatggcaaaatatacgctcaaagcgatggtagaacgatagaagctgatgctttatagcaataaaaacttctttctgtgattatcaccagataatggctgaaatgttttgctctgatagaatatcaccagatatcaacaatttaaataaataaattttaatttgaagtaatttttacattacagtgaactgtagtacatttgactacatttctatgatttcatcatatctttattgctctattatgagagcaaaaatactggaaggagctataaggatgaatgttttgctctgatagaatatcaccagatatcaacaatttaaataaataaattttaatttgaagtaatttttacattacagtgaactgtagtacatttgactacatttctgtgatttcatcatatctttattgctctattatgagagcaaaaatactggaaggagctataaggatgaattactgaactgatgaatagagaattatggatttcagaagttctct

SEQ ID NO: 76563 - DNA, 1120 bp, Zea Mays
caacttaacgatcacctttgagaaggcaaataatttccacacaaaaccctcacctttgaggtcaaagactttcttaacgcataccatgccatcatagggtgtgatgctacacgaagttcatggtcatcccaaactacatgtacctaaagataagatgtcaggaaaacattgtcatcaccataggcacatgcttctaggtgacgttcaactacaagcaggacaactgcgagtctaccatgaaggcggttgtgtctgtcaacctcatttctatcaagcagtgtctccctaaggtcacccttgatgccacctgacccagaggaaactcgatcaagaccatagatgacatcaagtcgctataggtcaatctagatatctagctaaattggtcctaataggggccacattcttccccaagttggaatgagtgctcttaaacttgttctatgccaaatgagacactattgcatggaaaccaatgaacatgtagggcatcccgagggaagtcattgagcactccttaaacgtgagcactggctcaagatcggtcgccaacgccttcaatgatttgacggggagcaatatagggccatagaagagaaattggcaaactcatgaaggtaggcttcatcaaagaagttcgccactccaagtggttggctaaccttgcacttgttaataaaattaatgggaaattgaggatgtgtgtcgactacacaagcctcgacaaggcctagccaaatgatccattttcttgccctaggatcggctaggtggttgactccaccgccgggtgcgagtacatgtccttcttggatgcttactctttataccactagatcattatgaaagaactcgactagctagtgacatgtatcataaccccttcaagactttttgctacatgatcatggcattcaggctcaagaatgcaggcgccacatactaacggtgcatgcatggcttgttccacacctagattggtcacaacatggaggtctatgttgatgacatcatgttgaagattaggagaactatcggtcacttgttttcagttgcttcatggcatcaaaaacaagggacacaagttgagaagtttggaccttcgtccttaagttatcac

SEQ ID NO: 76564 - DNA, 353 bp, Zea Mays
cgatattgataggaccaaacaactatatgaattatgtttactatgcatattttgtgcactaacacggatatattttctacgctttcttttgaagacaccagcgggctactccaacagaatgcacaactaagaaatcaaactcacatgctctcagttgttcttgaccagaggacatgcaaccacatgtaagtgcgagacgacactgttttttaccgcaaaattttaattgttcaatctgtcaatcactagttatattatcaatttaaactatgaagatacatcatcttagtattacctttgcaggagagcttccaaactatgtcaaggaaactaccgaggctgctgcgcccaag

SEQ ID NO: 76565 - DNA, 623 bp, Zea Mays
catttttgcacaaactttgttgtgtccaaagctgcctttagccagtaaaaaccttaacgaaagacttttcctagtaaagccttggggccaatatgcaatccacatagtccataatgaatttctctcattaaatcttgacctttgtctctggagatgcactgtagcaaaggtgagcagacaccctctttgtacaattccccttctatgattttatatggccttgctcttacttgcattctcttgatgtatgtttcatcatcaactggatgatttcctcaaaggaatgttatgatttatattctccaatcttcactatgtgtaggggagacagttaggatagctcttcccatcaagtcaactaagggtgcctttaacacttcgaagaacagttcagggggtagggggagcccttgagcgacagacttggctagcatatcagcaagtttgttgtctagcctcaaaatattttttactgaaaacccctcgaaggaagattccatccttcagaccatatcaaaatacttctccaatcctaggctcttcactttgcttgatttgtccacttgacctgtgatgacttgagagtttgatttcaaaactgcccttttgatgtaggattacgg

SEQ ID NO: 76566 - DNA, 732 bp, Zea Mays
agacgaggagctccaaactgaggtggtaaaggagcagtcggtgcaggagtaggtgctgccaagtactgaggaaaacttggtacagacaagtactgaggagtcccggacatataaaatgcagctgagggggcggtacagaaaattgttgctcagtggttgccatcatgttgatagtgccctgcgaagaggaagtagtcactggctcccatttaagtttcccatttggattcctcctacacaccacatccttgtgatcctgatcagatagagcacctgccactccactgacactcagcacgacgatgcgcttcaccacaacggaaacacaccaaccccaacctaggcttaggaacaacccgatacctctgagtactccctcctgaagtacccgatttggaggacttgccacaataggggtggtggcgctattgttgagactttcccttcttgtgggctagacccccagtgtagtctctcctcccctcttggccacgaggctagtcaacacctagagacttctgggattcaattgtgtactaatgctgcatctccacgcccaaagcctgctccaccgtagttcgaaaatccaccagcggaaaggcgcccagagcatgcctgatagagggtttcaggccctgacggaactggcttgccttttccaattcgttgtaggccacatgaggaacaaagcgaaccatcttgttaaagcccacttcatattatgtaatcgac

SEQ ID NO: 76567 - DNA, 357 bp, Zea Mays
cctttcatcggtgagcagttggcttctctgctctacctggagccagatagtgaacttacggtaggctatgcatttattgcctatttatcttgtttccaacgttcccattacccttctgatctcatttgcttgaagtgtctatttcctgtgtctgatatttttggatatgggttcaggctatgctaatcgcagcagaggccaaacgacaggaggaaaaagcaaaaggagtcagtgccgacgaggcagctgataatcaagatactgtgatgttcgacgataatgaagaagacgaggaagaggaaagcgaagaggaggaagaaggcgccgaccgagagcctcaagggaggggaggaagag

SEQ ID NO: 76568 - DNA, 1123 bp, Zea Mays
ggcgaacggcgatgaaccgagctccggcgaacctgtaccggccaagataagcaattgtcagtgccctaacttggctgtcacctaattcaacatctaataattgtttcccctcgctcaattgcacaatccgagctctaaatcgtcctgtccacagagacagtgcaaacttcggaggaacataagtgttcccggcgatctagcgcggtctagcttaattgaatgggtcgaggagcatcagtggcatgtaagagtgctgaaacaagatagcatagggcaatatcggacctgaaggccacggtgagagcttgttcaaggtggcgaaaaactgatttgggggaactgagcgattcaggggctctggtgagtaattggaggcacgagtgggtgtgttgagtgcacaagtacatagctgagtcgagggtgtgctcattttatagggcccttgagcggtggcccgtgaatttgtgattgcgcgttggcgatcggagggaaggggatgcactagcgcaagcgattagtggctttcaccgtggcgagctcaccggcgatcaccggatatgcataacgcgagctactgcgacgtggtaagatgccagggcacgtggcgcaagttcgcgaggtggctaactccggcgaacctatccacagcggctgtgactcaggcgggtacggcggccggagtagaaaagtggccggagttcatccatggcgcaatatttccttacccctctgcgttatccaactgcaccgagcatgaatcactgtggcgggcgcgaatccagggcgcacggtcgccgacggtgagttctctgagttagcgttctgatctggtcactgtaccattgaaacccgatttagagcgcctgacagaccgaattgcaatgtctagatctcgaatttttgtgcaacaacttgccaatacatttgtagcccttcttaccagctacaattctgctatagcaactaccctcaatcgagcaatagatcttactctaattagtcccaaaagtctggccaatgtcactggtgaccaaaattcagtcagtagagtgactgacagcacaactttgagcttatttttctccaaactttgtatgtgatcaatgcttagttacttaagcaa

SEQ ID NO: 76569 - DNA, 515 bp, Zea Mays
ttgaggtggttgtaggctgacagtaaagggcccagtattggagtgttgtggtagataagggccgacgacggtcgatagtgtattctgtagtgtagtcggaagttgatgtggcaaatgttatagatcgccagtgctgcaaccgaccttaggttaggtatgtccatgtcgatcagtgacatgggggcataggttatcgatatcggttgacctagtcccaacaccggtcggttcagttggtaccaatcgtgttggaactggatcgatcggtaccgacccacacgttggagatctagtctgtaccgacctcgaccaattatcgatcgtctattgctacgtgctagttcttgtttggttcatgttattttgaatttcaaaagattaaaaaaaacttcaaaaaatatcctaaaatccaatctataaatagacgattagtggttaagttcattcacctctactctccaaattgctcttactatttcttattgcacttctctaatccattctcgacatatctt

SEQ ID NO: 76570 - DNA, 638 bp, Zea Mays
gcgtgttcctgtgttccatccgagaggagcatgtagtgagattattagggataaccttcaccgtttgtttcctgtttttgtgtttcgatggcaggcgacgacgaagaagcaaggatccctacagacttcgatgaatgtgttagccgccaagatcttgaggcaaacaacaagctcctgaaggagcaaatggaggagacaatccacaagtcagtgcatgatgccttcatcaacatggaccttggcaggacttacgagaggccggatcaacgattgtcccagatcgtcgacagacttgctgtgttggagacgcaacaacaagcactgccaccaccacctcctcgtccacgtcttcccgatgatgcggtgattgatgaagaaggtaattatgatgaagcggccaccaaacatttgcgcctccgtcgtcgtcttcatcaaaacacagaaggtatgccacaccgccagcaaggtaataacaatcgtgctcctgacaacccttatgctaagattaaattttctataccatctttttcgggtcattatgatgctgagggatatcttgattgggagatgacgatagaacagaaatttgctacccaccttgtacctaaacgacatcaagttagtcaagccactagtga

SEQ ID NO: 76571 - DNA, 342 bp, Zea Mays
aacttcagctaaggcagtggaattcatacaagacataatattcaggtttggaataccgaatagcatcataaccgacctgggatccaacttcacaagttcagagttcttcgatttctgcgagcaaaagagcattcagatcaaatatgcctcggtggcgcacccaagagccaacgggcaggtagaaagagccaacgggatgatattagaggcgctcagaaagaaagctttcgacaagaatgaaaagttcgcaggaaaatagatcagagagatgtcgtatgttgtttggagcctgagaactcaacctagtcgagctctgcatggaaacacacctttctttatggt

SEQ ID NO: 76572 - DNA, 740 bp, Zea Mays
gtcggtttcatcatgaccccgacactcttaaattaagagtatcggtgcagcaaaacccacacttttacttagattaagagtgtcggccccgacactctttaattaactgacactccttcaacgttttcttgtagtgacactgcaagcctggctgttcaattcggacgtcgccatgtcagacagatggaaccgtacgggtgggttagctaaaaggtattatctgaaagattgcaaggtaggactatggagcagcaagatgcaactatcacaagagcgcagctgagggggatagtttcttcttcataacttatcgtgcatgtgtgcagaccaatagtccgggttcatggggatagacccaccgggttgtcgtacacgtatgtgttatgtagttacagaaaagaaggaaacagactcgaccccttagtcttgctctatagatagaacttacagaggtatttggcatcagggtaaggtactcctccggtcgtagctagatggttccccttgggtcggtgtactcccgttaccttgaagggtccttcccagctgggggagagttgtggagcccctcttgatatggtatctgtcgtggggctaagccccgacccagggttcccatctgtattcgacgcgggagccctcatctctggtagtgatcacttctgcatatacctgtctgtagcccggacccgtgggggtccggaagggcctccagaggaaaggcgtgcttcagctccgta

SEQ ID NO: 76573 - DNA, 501 bp, Zea Mays
gtggttaccagcaaacggaagttggctatttggatcgattggcaggataattggaacaacaacactctgtctcttcctcttgggagccatcacaatctctgaagcaaggcgggtgggctcaagaactcaggaatcagagaagcggcggaagaaaaaaagcaagaattagggttcggaactcaaggggctacgtcagcataaatatgagttggctcgataagtcgggcacaaaggtgccaggtcataactcagaaaagcgaaaatcacaagcgtcacttgggcattacctaaaatgccagcgagctgtcaaatgcgcaaacaaaagcatgcatcattgggccagcaaaagaactgcactttattcaccgggggcgatcgtcacaaacttgagattgactcattatgagtcagcctccttcaccccttggtcattacattacactgctctactacttacactacgctatactaatactactctaatctaatactgcttactac

SEQ ID NO: 76574 - DNA, 590 bp, Zea Mays
atttctacagacaacaaacaaatagatgagaacttcagtgtgtgcaacctcaaatgggtccaaagaccaatattttctgttgtagtaactcgagctctagagcccttgtttcttacccaaagttatctcagtttgagcacaaagtggagtacaacagatatgtagggatattttcctcccctatccagttgctcacaacagtccaacttgatattttccaatagagctgaggtcactagatcctttatacacttcgaccttatctccacccaaatacgcaaggagaccaacagggagaggagatcttttcttcacccccaaatctgatccaaggtttagttaactgatttactctctccactatccccaaaacagtacaaaattggatatttcagtggggagttgaggtccttagaccctcaagtctataccccacccttatctctccatgacacacacaatgaaacattacaagacactgaaccagatgcaaactgataagaagctacaccacaaacagttttggatccctttccaacctggataccttcactaggttccacactgtcaggaattctcaagcccatctc

SEQ ID NO: 76575 - DNA, 321 bp, Zea Mays
ctcgaatagggtgctcagaatatgtcaagtctggttctaggacaatatctgttacttcaatggttcgatctggaacccgaagacacttctttagttgagacacgtggaacacattatgtactgcagacaaggtttcaggtaactgaagtcggtatgccactggtccacattgttcaagtataggaaaaggaccaatgtactgaggtgcaagcttccctttaatcccgaaacgtgatacccccttcatcggggagaccttcagataaacataatctccaacccgaaaatacaagggcattcgtcgtttgtctgcataacttt

SEQ ID NO: 76576 - DNA, 501 bp, Zea Mays
cagaaatatcaccaatcatccgttgaggagggtcatcgggctgaaaatgctatggagctatcctcaaatgggtggcctccccctcaatagcagcctcaaatcctccagtctcagcaagcactggctagattggacctcaagtggtggatgaagtgggattgggtccattagccgaagtagtgatagagttggctcgagatcaccccaatcggcgtcgtcgtgctccccctccacaaagatggtatgtctcatctgatctggacttgtaggctcaaagataggggatgaacaaggcaaagtttcatcaaaagttacctcacatgtatccatgatgcggttcgcctctaggttaataacacgataagtgcaagaatgtaatgcataacccagaaaaatcccatcagaagaccgtgactcaaacttgtcaaaatttccctgcttcaacacaaagcatctgcaaccaaacaccctgaaatgactaaccttaggtggctgtccaaa

SEQ ID NO: 76577 - DNA, 309 bp, Zea Mays
ctggacgccagcctgcgccatttatgcataggatagccacgtatcccggcttacacgcgacatgcgatatacgcacccataaatgtgtacaaatgtgcataactcatgcataaatggaatctttgcatgccaggaatcgcgggaacgaatatttgcatgtgcttgccggttacgactgcataacgttgtgatacatgatagcgtaaaccatgcaaacgtttaaaatctaccaccggttttgagataaggcaagacgtgatcttcgtgcgcgtaaataaaggcgcagttacgggaggaaactaatacaac

SEQ ID NO: 76578 - DNA, 549 bp, Zea Mays
tgtagttgtgaattggttaataacactgcacactacacatgtttgtcatgcatgatggtgatctacgtttttccattagctttgaaaatgggtgatgaccgaagaagggatatgtatgatggtttcaatagtgacaccttgggacactctgatgcattggttaaggttgttgacgaattcgtggcgcgcgcatttgctggtgagccacgtgtgacgaaatgcccgtgtactaggtgttgaaacctgatccgactggacaactttgacctctccatttatattcgcaaatatggctttaagacatactatttggtgtggcacaagcatggagaggtggatgctcctacgaagtcgaacacagacgaagacgtagactgaatggaggacatgctagatgacattcgacatgagtatctatcgctggagaccgaccgaccccgccggaggaagtgcaacaaatttacaaattcttgaagccgcggatgcaaaagtgcacgagggcaccaaagtggcgtacttcaggttgtaacacgacttatggtgatgaag

SEQ ID NO: 76579 - DNA, 811 bp, Zea Mays
agcaagatcatccttcgacataaccgaaaggccttcttcaagctttggaaatcccatacttttagctatctcccagcaaacggatatttctttgttgtccgggagacagtataggaaatcatcttcgttagtgccattaaacactaaggctcctttcgaatatttcagtctttgggcataatgtcttgcttccatgatttcttcttcggataattttttccccgaagcatgtcgaaaaatgtaatcaatatcttcaactaaggcttcggggacaaaagattttgctttttctgccatgtcttgccttgctgccttgccggtatctgaagtttgttgatcagctttatcttcaggcgcgacaacctttgtctcaacgggcgctgaaggcccagcttcggcctcatcttggactgtggcagcttcaacatttctcttggtaggtccagggctcaaggcctttgtggtctccaagacagcatccagcacgctggccatcctgttccttttgggagttgcagcaggagccttttgcaccttcggcaactttgcctcagctagtgggcttagaatttctggcattttcactattttttccacctgtggctcttcggccttatcatcttcagctttggctggcccgactgtaggcacctttggcactacaatcggctctttaacgctctacccaataggagcagcttgtcttgcttcggcagttgaagaggccccttcgccaaattcaggcactacggccggttcaatataccgcaaccggtgggtcagaaccttcactttttttgcccttcggcac

SEQ ID NO: 76580 - DNA, 599 bp, Zea Mays
aaaagattaaacagtaatgggctcaaaccaacccaactcagcccacggacggggaaaacgcgcccgcgctggcgacttcgcgcagaggaccttggttgttcaaataactagtaaagaatccctagccactattcattgtctctctgacattctcacttagtcccctgcacttctgtttcttcggagacccaggtccccgacggcgaacgacggtgagcacgccctctgacgagcctgtaccggccgggatacgcaacgactgatgcccttacttggtagatacctatttccatccttggctactctaatccgaccattaattacacaatttcagcctggagtctttctgcccacgacaacagcgaaacccgaggggaaatcgaggtgttcccagcgatctagcgtggtctagttcaattggttgggccgataagcatccttagcatgcaagggtgcagaaacaagggtaaggaggatgtgaacggacctgaagacggcggtccacgacgcggtggttcacggcggcgcggagaaccgaattgggggaaaactcaaattcacgagctacagtggctaatcggaggcgagggttgttgcac

SEQ ID NO: 76581 - DNA, 762 bp, Zea Mays
agaggctggaacttctgagacaacccccattttagagatgatgaagcgttctgggttggttgtccaagaagagaaagaaccaattccaacataagatgttgttgatgccaaagctgatagtgaaaatgaaaatgatgatgatggtattttaagcccgagcaaatctagccatattgaattcaggaaatccacagttaaggcaggggatctgattttaatgaaaaaacaaggatactttggagagaatgatgacggactagttccttttgttgggaaagaggtgattccagagccaaaagatgacgaagtcgtagtcttcaaaagcttcttcagagcaagactatggttccccccatacgagatgatcggtgaggttctgaagaagtttgaaatttaccttcatcagctgacccccgatgccatagttagacttagtatgtacattttggctcttcgaagcaaagggaagagtgccaatgctgaaggattttgtcaggtgcacgaactccattatcagacggatgctagagccgatggtatgcacaacaacattgggtgctacaactttgcatatcaaaaggacaccaaggctcctgtaattggttaccgcactaagtggccaaccaggtggacaaatgaatggttttacgtgaaggctgaggagaagaagagggagaagcttatgagtatggtgatgagtcccttaagactaagcttcgacatgactcgacccttgtgcaacatgcagctggggtccccttg

SEQ ID NO: 76582 - DNA, 360 bp, Zea Mays
gtttgtactttgtttccacttgcgatcgaaggtcttatgattctgaagcgtgatcgtatagggcgctggattatgcccctcacatcctccctgttactcagatcattcttgacataaaaccattgcttcatccaagagcctgaccattttttccgaaacgttggcacaagacacctcacatcagaccggtacacaaagttgtagcatccgaagtggttgtgatattgctctttcccaactgccttcgtctggtaggataacccgtgaatgttgcagaagcagttggcatctggctccagcccttggctcctcatagcccaaatgaaaactccaactttaatcagagcttcgggagtaagc

SEQ ID NO: 76583 - DNA, 531 bp, Zea Mays
gtgtatagtaggcaagcttgaagcgccctagtgtaggactaggcgttaaacttagagcctatttagattctaaggtgggctatactttagctttgatgtctaaaatttagacggatgaattcgaacatgccaaggctgaccctttaactgcgacggagacgctggtaccagctgtgaactgtgcaactgatctagagtagcatccagcagtgccgaccacagaatcctgtgtagcaatcgtccaacagacgtacacgtactagtaatgcgttaaatattcaacctcatacgtgcgtctggtggtggtttcagcccagtccaagattcccaatctgtgtatatatcctgggcagaatggggaagggaaccggtccggtggcggtgggagcaattagtgactaacctcatttggcgtgacaagacggacctccattgtacatgtgcccccacacgaatctggagtggagtggagtggagaggtggtgccacagggaaggccgcacgcggggcgcgtacagtggatgatgcccc

SEQ ID NO: 76584 - DNA, 693 bp, Zea Mays
ctagatttagtcgtgccatgattgggcaatgatggagaatgtaaaccatggacatatgaggtcagtggtcgtgcaaccatgaagtaactccatatatgtgcgggtttagtctggtaaaagaatcttacattttatgtgcctgattggatgtttccactgcaatagcaacacactcctcgtcaaaacaacgattgtaacggagattcaatggataaaagtgtcactacttctacttgggcgcgtagagaatacttgctttttagtaacgaaagcaaatctatgttactatctataatataaaacatacacgagcatgatagtttcacgtacattcatgcgacagagaatcgttggcgatgtgtgtgtgtatgcatgtgcatgattatgcgtaaaagttgtttctagatttagatgttgatggcaatcgttttttggcaaaaaaaatagatggattacgatagatcctccatgactatagttgttgctatagttgtaatggatgatccttattcatcatagaaatgctagtgagcatttatgaaaccatgaagctaccatggtacattcacaataatgaactaaaaccatctttgctataacaaacatgttttaaaaaataattcaattattaccatttctataaattggtaaactaaaaatcattgtatatatacattaccggctattataagt

SEQ ID NO: 76585 - DNA, 655 bp, Zea Mays
ggaccgaccaaggtgttctcgatgattcaatggattctagttcaattggatggttcagagagtatcaggagcatccaaggatactgaaatgaggaactagagggcatgaacggacctgagatacgttggccacggtgaggtctttttcacggtggcggaaaccgatttgggggaactttggaattggcacgctctggtgggcaatcggaggcacgagttgctggattagatgcttgactacctaatggagccaagggtgtgctcaatttatagcatgcttgagcggtggctagtgaattggacggagacgcgcggcggccggagaggaggagggcactagcacacacgattggtggccataaccgtggcaacctcaccgacgatcactggataagttagtatgagtcacgacgatgtggttagagtgccgaggcatgtggcacaagtccgcgaggtgtctaactccaaagagggtagattcaaagcgaccggggcagagtggacacggcggccggacggaacagtgcctcaagctcatccgtggtggagatcttttcaccacgagacgttatctaggcaccagtgagcacgaatcaccttgccggcgtgaatccaggcgcaggggtcgccggcgacaaggtgcactgcacctgcg

SEQ ID NO: 76586 - DNA, 418 bp, Zea Mays
acatcattatatctgaaattcctatacaggatgtgtataattaattgaggattatgcctatcttgagtcgttatattaataatctgaatactaaagcctgttgtaccttatagcacttgagtttaattgtcatgttaataatctgaatgcttatgatttatcagatcactactttcactgacttagttgaatttaattgtatcctctctatctacacgaaactagccatttccaaaagtatctatgaggtttatgcccctttggttgaactaatccgagctcccccttgttctatttagagctccaacaaacttgaggcctaataatttgttattatttctgctggttgaactgatctgagatttcctccccttgttttgtcctatgctctgttcgtccgtccatcaaccacttgtcc

SEQ ID NO: 76587 - DNA, 376 bp, Zea Mays
ctaagcatgaagtaaccttcaggatctatcacactgtactatctaagagatgctgcaaaactgctacttacagagaactcacccgatcacggtatctacagtgtatggaggttatcaagacaaacctgtacagcattagcttctaatgcgatatccttgggtagtaaagctcagcgaatgggcccagtagctcctacctctcccttccaagaattgatcaggcatatcagggcaagattgggcaccaagtttttgtcaggaagtcgcgccttcgtcaatggtgacacatcattctcattaagccacatctcaatcgcaacccgttcatacgagtacccatcagacgcaatgcatggatcctgcattaccctctgca

SEQ ID NO: 76588 - DNA, 597 bp, Zea Mays
gttagctaagaaaaactttgatcccggttggtggatcttgactcatctgatgatctgatttgactcttatcctttgttgatgaggttcatcttatcttctttctccggtcttgatgtctccatgtggggtcttagttttagataggtagatggtcgtgacatatgggatagctcaaacagggtttactttgtttttttggttgggatagatggattaggcaacccatcaggtagaccaggtagttgtgcatggccgagttggtctaagccaccaattttaggattaagtgaaataggtgggaaaagcgtttctgcgtgtaggtttaatctattaactaatctaggttaatttgctctacccttcaaattgttgcaagaaatatgagttgtaacagaacctctcaaggaccttagacagtcatgcagatgcactcaatagctcaacaagacctgcttcctgcatcttcttccacatctcccaagagagtacatcccatatcacagacattacataacatcggagtaaaagcggaaagggttacaataacttaatttacattaacaggtataatatagaaagagtgattattacaaaat

SEQ ID NO: 76589 - DNA, 342 bp, Zea Mays
gctatgtttgacatgtgcaccatgcaactatcatgcctcgtcccattggtcactatcgatgccctaataaactcaagttctctaagcgcagtctctaattcattcctctcacaaaaacatgcttaaacaatttgtcctagctaagaaaagtggaattcaaagtggcaatctcatcagtgaaaagtgatatcttggggtcagagtcatcctcgctctcatagtcatagccattcccgcttgtcatcttgttatccactgtcatggtgtagagtcctcccttagcaatgtcaacaaagaagtagattccatttagcttatccttcaccttactctaagcctcgt

SEQ ID NO: 76590 - DNA, 497 bp, Zea Mays
gccagggcgagcagactatttaaagagcccgggaggcaaccgttcacttcctacccgctcaccgaacagtcacaagaattcaatagtgattcaaacctcctggaaatgagtcaggcgtctggcaccgtttcgcgtaacacgacactagatggaatcaaagccaactgctcaggcagagtattacacctctccgtcgtgtcaagttactgttttagtgctacacgatggacatcttttactgggcagacacccgttgggcacacccaatgggtgtaccgcccgaattctctgagattttctgaagcagtgagacctaaaacatatacgcaatgaatataccacgacaaaggggaagatcgactgaaatgggagaaagtccagatgcggtcaccaagcgcaagtctaatctgcagaggcattgaagttcatggccgagtggcatcgagccaggacctctctgttccgactggccggactccaactcatcaccgatcaaa

SEQ ID NO: 76591 - DNA, 556 bp, Zea Mays
aacaagtctaagtctctgcatcaaaattgtagtgctacataccagctacaactttgctacatggtgttgtcacaaaaaatcactggatcccattcaaattcgagctcaaagttcatctcataacactgttattctgaaattcaaacctcaaacagtctgacagcccattttttattgggtttttctccaaatttcacataagaccatggcttgaatccttaaacaaagttgttcccctatgattggtcttcaaacttgttgtggtcactttgggcaaattccctatattttaaaagatacagggctccaaagttgaaccaatacactgaatctcagacttggtatagaactcaattgaggtccattttgcatttaagtccaaaacttagggtttggctttcaagtccacatatttgtgaaccaatttacttcaaatacttatttggcttgatttttgcactttagtccaaaagtggaccaatttttgcatataagcccctagggtttggtttcagggtttgccagggttccaattagggtttctggtatcccaggg

SEQ ID NO: 76592 - DNA, 637 bp, Zea Mays
cttttatattgaatatttgaatgtcctgttctactattacagtttgaacatgtcttgttatgtcatgtctattaccaaattgtaaaagcacatgcattgtattgaagacaaattaaaattaaaattcaaactaatatatatggacatgacaaacttgtgtgtattgggggtatttattggggtataaagtttatatacatgcatgcttccggtatatagaggttgatgctaaaatgatagttgaaaggattagctggtagtatgctttctatacggtgcacttgcacctgcccaaaattttctctctcacccgcttctcttcgttcttcttcgcttctcttcattcttctttctgggtctacagttcaacacaaagcaaaacacccttaagtgagagtacttgttagttcggtatctttttcctacgctccttttattgatttcctttgagtttgattcctacttgttcaaccacataagatgagtaaaccatggaacatctcattttcatgaaaatgatctctaccaataccttctgcatgcttctaagtcaccatccagaattgtaatatttgaaccattgcttcagttgcttgtcacatccacccatgatcttgaatacaactccttgccttcc

SEQ ID NO: 76593 - DNA, 635 bp, Zea Mays
aggagggggctccggtgctctgcgtgaagaagagaaggtcgtcatgcgtgagccaccgtgcgcgaggaagagaagcatgaagaagaggaggcagctgtgcgtgagctgccgtgcgcaaggaagaggagggaccgagcgacagtgggtgcgcgattgcaagggagaagaggcagtggacggcggcgggttcgagaggggagacaattgccattatgaaacaaaagagatgcggtttcgacgaaatggaggtgttggggatgacttatatgttttggagacgcacccatcatacctactccaaaatggacaagtgataggcatttagggctgcgcaaacagaaaccagggttcctttcaccattaccgtcgccgtgctcagacgccgtctgtcgtcgtcttctccccttcgcggctaagcggattggatagttgtcgcggctgagtcttctccccttcgcttggacagttctcggtgcttggagatctcgcggcggtgagttctcgtcgcccttcttacccatccatctctctcccttctgttcttcctctgactggcactggatttgcgtttaggctttgtctgagttcggttcgatggatttagatccacccgaaatctctgcagtatgcatcac

SEQ ID NO: 76594 - DNA, 2063 bp, Zea Mays
gttgttgctccataatctgaatgcatatgtgtaaccgtaaatgttgatattgacccctcattctgtaacagtttacaagaatactcgaactgttttttaaattctgtttcgaactctgtatacatcctcctagtatatgattctaaggcggacttcaacaatggtaattctgggacataaataactggcacctttgaaagtgatttaaaatcttcatccaactcattctcacgtagggaagcagaaaccttgtcacactctacaaggagttcagaaagaccaagtttcctacgaaatcttttcttaaaggcattattcataccttcactcctttgggttgtagtcatatcagctgtaaaagagttacgataaacagctgcccactttcttctcaaaccatatagctgatccatccatgagttctcttctagaccatatttagtcaacaattcattccacttctttgtgaaatactcctctgatctatcttcataaacacatcttttaaaagcatataaaaactcaggatacttatgaattacatgaccaagatgtttagcagcattaaggtagatgtgccacaaacaaaggcgatgacatgtatttgggaatacataagcaattgctcctgccatggctgcatcttggtcagtgaaaattgtgcttggatgcttgcctgacattgcttttaaaaaagtttgaaacagccaaacaaatgattcaatggtttcattaaacaacaatgctgccccaaaaattattgtttgcttgtgatggttggttccaaggagtggagcaaaaggcatttcaaacttatttgtctgaaatgtggtgtcaaacggtattgcatcaccgaagcatgcataatccatgatagactgactatcagcccaaaaaaattagctatccttccatcttgcctatcaatttccatggcataaaaaaaatgcaggatcctctatctgcttgttcttcaagtattccaacaacgtttgtgcatcattggattctaggtacttcttccgctcgcgtccaatctcattattgcaatccattcgcaagaagggaactttgtcagccccgccgtaaaactgcttcatgaactcatacacttgagtcggcttcattccggcttctcgtatctgagcaatcagatgtctgtctgcatctataacatgtcgttgtgacctcagcatgtgcttcttttttggtgtcgctaaaatatgattgtgatcaagttcaaccttttgcaatgtccaaattccctctctgctgacattaaactttaccagagctttgcaacctgtccttgtagtggcatttgacgatcccatttttgcatgtccttggctgctacaaactataactctgttgtatatagttttatctgcacgacgctttataacgctctttctaatgctgaacccgacaatgccagcataggtgttgtacatctcataagcatcattctccgaagcaaaagacatcccaactttaggaacgatcacaactggtccatctttatcaacaacctgttgtaaaaatatgttttagaataaaacacacaatgtcataatataatttattttattatagtaccatgttggcatcgccttcggcgtttgcgccgtcagataaggatgatgtgtgcggaatcactggtccaatggtgatggactcgttctgtgtcatctaacatatgcggtgaatcaaatcaataataagtataatacagattgattgtaattataatacgtataaaagagaattttattacctgtgcaatttgctgcccgtcggttgctatggagtttatattccctgtttcctccattgtcgcgaagagaggaagcagcaaggacagaaggaggaggaagattgtcgaacgatcggcgacggcaaagatggctgtgtagattgtaccgccaaagatggctgtgtagattgtaccgccaaagatggctgtgtagatcactgatctgatcagcactagggaaaggcggcgatgccttctgtattcagcgacgcgatgagtatatctggaagtccatcggtcacaagcc

SEQ ID NO: 76595 - DNA, 1777 bp, Zea Mays
tgctgccccccgtattcttcattttcgggactatataatttcattgccagattagctgtaacaatgctgaggtcctaatttggcaggcgtctcttgtgctgccttttgtgtcgtgtgggcatgccacaatctgattccctttgccttttggtgtttcgagttagctatactcactgctgtgattatttggggaatcattcgcaaccgcgtcacatttcgcgtaactaacaaaatttggttcacatggattacatgcgattggaatttttttacgctgcattgtagtattgtttcccaaactatgttttcgttgttttgttaggagatttcacaattttgagtccgcatactaagcttttttttaaacgatggtgcacatttattgatatatggtaacgttgtttccaacttctttactacaagtaggaagcaatgcttccaatttaccttgtcgtaaagattcccaagtgttgatgatggttaatgggaatttaatggaaacgaaaaacttggttgattattgatagaaaggattttcataaggtggtgttgtcaaacttgcttgatttgcttgattttgtcgaccttaatggtgaggtttctattcaaaggcattttttctgtaatccatgaatccatcactaatgtgagcgcctgtggtctgttccttgtaagccataggatgcccagatctatcttgttagcattctattcaagtagttttagctccatctgtcatagtttgcagttaagtgcagagggtggttcaagactaattattcagctctgcacatgtccagttggcagcattgcgtgttagtagctttgaattatttggccagctcattcagttcatccttgcctgcattgttaggtttgtacaattggcattagttcggggtgggttgtggttgatcagcccactatgggactgagagttgttggctaatttagacaagaggacagctagtctttactgctggtttctcttttcttaaatgctgaaaatatgctgtttccttaaaagttactctttacagttgtctcctataatattattgattcaataagattgttatttttaaaatccagtaatactttttttgaggaacatctgtgtaacacagttttacaaattctttttcaagaaaaaatgacttatgtatgcattaagtgatagtatgtggttatgtttcttggctatttgtgtactgcgggttatggacaagggtttgcctaccttttattagaattagaaatctagagaagtaaaatttggaaggaggctgtgtgccgtgttggtcacacaacaattcagacctaaccaactacaaagatggacacaagtgtgattttagttatttaaatatgtgacaacttatttggaggatttcttcatgttaaacacacattaaattgtttcatgcttgctgaggatctggtataatagaagaaactgtgctttaacaaccaaactattgtaaactttgtgaatactggtgcaacatcagtgattctaacttgtaaacaaggaacgagtagtgtaaattcaaatttgtcactagtagagatttgttccttattacattgaggtacttttgctttatgatctagaagttcctttttgatgtacagaaacagtttccataactagaacttcattgtgctattctctgtattcacacagttactattggatgtgatgtgtgcattagttgccctgtaaaactgcatctgttcaccagtttatgcttggagctttctattttgttttgat

SEQ ID NO: 76596 - DNA, 409 bp, Zea Mays
aacaagaaaagaaaataaaaagaaaatgggaaaacccatgtgggtcgaattccaccatcagcccaggactcctaccactctatctagcccaactccttcgtttcctctcaccccacgcggtccaggaaaccataacaccagatatgcctctatcgtgtggcctcgatcgtgagctccatcttctaccgcacccgtaaacaaaccagactccgttgaactgagcgtgtgattcgggcggatcccaggctcgaactccgtccaccgtgccctcaatcccaacaagcttccatatctgccgctcagtgctcgggttgttgggggcgggcatcggaatccccttcttctatataaaccccgacacctcacatctaatgtcatgtatcaccaccattggggagcaccaccgatg

SEQ ID NO: 76597 - DNA, 870 bp, Zea Mays
gcaatttgatagccaagatttcagggacttctgcttctccattggcaccaagcttgccttcgcctcagtatatcacccacaatccaacggcgtcgtggagcgcgccaacggcaagatcttcacggcgatcaagaaaatgctcctcgacgacaagaagggtaaatgggccgacctactacctaaagcagtctgggcgctgaacacgaccgagtgtcgggcaaccggatttactccctttcgtttgctgtacggtttggaggccatgaccccgcaggaaatcaagcatgggtccccaaagacaagcgcttcggcctcacccgatgtagacgagctaacctccaaagacctcatcgatgcagaccgtgtcttcgccctacaggccctcaataaatatcaagcccaaacgaagacctagcgcgaccacgcagtcatcccgagggaattcaacgaaggggacctcgtactcgtccgaacaacccggaccgagtcacgaggtaagctggagccgaagtgggaaggaccattcatcgtcaagacgaagtcgtcccccggcacgtacaagctaacaacacaatctagcaaagacctagagcattcttggaacatagataatctccgcaaattttttgtttaactcctcagggccatcatgcccttgtaattaaccaaacattatcattctagcccgtactcttttcctcccgggggtgaggttattaatgaggcggagccttgtaatataccaacaaaagcccccacaaaaacagaagctcagacgcaacgtgtcgaaaaagaccgcatcgacggtcttcggcattcgaccactccgaagtcaccgcgacaggtagcgtagactaccctcgcgtgtga

SEQ ID NO: 76598 - DNA, 439 bp, Zea Mays
attggtgatgcatggtttagtaaaaactaggttactgagccaattgtaggagtttatgttattgagtaagttcttatgggagctggcactttaagggtctaattccaggtttgactttagggaggggttacttaagactcaaattactttctcaaagatttagttgaggtatagatggtcttttcttaagtcacttaattaacccgagtttatcccttaatccccttttcttcttaattaaggttagaagggtgaattgaactgcaccttggtcccttaatccccttttcttctcaaaattttgttaaaattacaattgctttcgaatggctattctaggttatcacatgaatttggggtcaaaatagatggagacaattatgattataccctactccgacattgcaattgtgatttcacccctcgtttatgaactttg

SEQ ID NO: 76599 - DNA, 1292 bp, Zea Mays
acaagtgaatataaatcaagaacttggggatagataggaaaaacaaactgtagaaaaataaggaacacaagatgcaacaatgtgcttgaccgaggttcagctctgaagaacttacgtccctgttgcggtgtcctaaaggatggggttgcacccaaccctctcaagtgatccaaagatcaagcttgaggccatagttttcagtttttcacttatatccgtctcctcacaaggatctccacagaatggagactcttgctatccttgcacaagttgataagagctagaactccaatagaagcaagagagaggaagaaacacacaagagcgcaatcacaccaccaacagatcgaagaacgcaagcgcaaaaactgaaatagagctctcttgcgaatactggtgcttagaccactttgctgtgtttctctaatgttaggaatgaaagcacttgctcttgagtgaattggtgtgttgagggggctggtttgtgggtctatttatatacccaagccaacaaagagccgttggaatggcctgtccagatctactgtgcgtgggtgccatagttgttaaggcgtcagttaagcggtaaggcgaggattaaggctaaggcgcccgcctcgccttgctatctagaataaagcgtccgccttaggcttcaaggcgttgccctggcgcctgaaacacaggtaaggcgtcaccctgaagacgcctcagcggcgcgcagggcgcaggtctgcgacgacagagacgacggcggcgcgcaaggcacaggtcgtggcggctgttggtatttggtaccgacgacacactatagggtgtaccacatgagaacgacgaggttcgatggttcgtgctatccacgatggaacacagaggattatacaggttcgtgccgctcgttcgcgtaaatcctacgtcctttgagtttgtggagatgtattgcactgtgttcctggttacatatggttcatgaggtagaagatggctattctactgagtggcgcctccttttcataggggcccctcttccgccttattcccggcggaagaggagttacacgcacgaccggtacacgatctccgtccacgcgcctctgctagagtcgtgccgactttcccggtggtcagcgaatcttcataaaatttgcacgtcctctgcatgcgcggagcgtggcccaggagtcttcacgcccacacaaccgtcttccttgctcgctcccagttgcgcctaatgggtgtgcttgtctttttcagtaaacagttccatgagttcaaatggcgtcatgatgcga

SEQ ID NO: 76600 - DNA, 632 bp, Zea Mays
ggccttcgtatccttgcgatacgcaaaattgtaacatccaaaattttcatgaagaccgtctgccttgaccttcgtctggtagtgcaactcgtgcactcgacagaacgcttcagcatctaggcttatcccatggcttcggagggcccagatgaagacgctaagcctaacaatggcgttaggggtcagctgatgaagatatatttcgaaatttttcaacacttcccctatcatctcgctcagaggaaatcgcagtcctactctaaagaagctcttgaaaaccactacttcatcattcttcgacgctggggtggtctcttctccggtaaatagcacaagtttgctttcagcttccccaaagtagtcgagcttcatcatcatgggcatgtcaacctcgaacacagtagatttcccaaaatctagatgactgggttttgttgggatcaaaatactataatcttcttcatcttcgacaacattttcttcctcagtagcggtctgttcagcttcggcggcaggagcaccttcgtcagtagtcccctctatcacaactagacctgattgtttcataacttcgaaaattggtgctatctcagtgacctcggtttcttctccctcacgagacacccttgcag

SEQ ID NO: 76601 - DNA, 480 bp, Zea Mays
ccgggataacttgaggatagcacagactcagcagaagagttatgatgataaccggagaagaccactagaattcgaagagggtgaccacgttcacctcaaggtgtcaccaattcgtggaatgagaagattcaaagttaaaggcaagctatcccctcgctttattggaccctttagaatctttaggcgagttggggagatggcctaccagcttgagctactgatcatctatctaatgtacatgatgtattccacgtatctcaactcaagaagtgtctctgtgtcctagaggaacagttaccaatggaagaactcagtgttcaagatgattttacttatactgagtaccctatcaagatccttgatactttgactcgtgttacaaggaataaagtgatcaaaatgtgcaaagtgcaatggtgtcatcatggtgaagatgaagctacttgggaaagagaagaagagctacgagtagattttccc

SEQ ID NO: 76602 - DNA, 1355 bp, Zea Mays
aaagaaatcatcaacatctactgaagaaaagaagttgtcaaggataagatttgatggtgtgctctgtaactcttcatcaaggtacactatgtaactcttcatcaatttactcttcaaaacgttttagtagagatggacctgacaaatactcatcgtcgctatcatcatcttcgccgctatggattgttctttctccattatcactagcatattggaggaatgtttcatcttcaaatagatcttccggttcatcttccccttgtctctgaaggtcttcaactatacttgcgtgaacagtaaaagaattttcaccgaccaacgcgtcaatgtccatgttgacatcataatcttgaatctgaaaatcaacacactcatcatcttggtatgacagctccacaccctttgatatttcattgcttgaaatttcagccacattccacaaatgcctatgtgagaatttttgaacaactcgccagtctccacgatatttggtgtcttccaattaaaatacctttgtcgcctgtgtggatagaataaaaggatcatccttgtagcaaatacatgcttggttgatgcttctaaaaaatctgtcatctttcatccttgccctgttactacatgtatcaatccaatcacaacgaaatagaaccactgaccgatgtcgctagagtctgcattgtactgcagctgaattatttctttcaaacggccataaaattcaatatcttctccattatgtgtgccatcaaccataactccactattctgtgtccttctatttttctcacgctcgatagtgtggaaccttacaccaccaacaatacatgctgaaaatattcttactcgcagatctggttgacatgacaaagcatataggtcaccacttacatcttcaccattcacaaaccgtagggttgcaatctgtacacgtaattccccaatatggttaaaacatcatcaaccactacaaatggttaaagaaaatatgcaacaccaactcatatggttcttaaaccaggtagtaaattgtttctcaacggttttttcaatatcttgaattccttcattctctagctcttttctatataacctgaaaagcggttttaaataaaccattagcacataaaattagtaggttttatagacaaatgaagaaaaattgtggatacgaagacatactctatatattgttcaacctccgaacaattgtttaacacataccaaaccatcttgtcatacatattttcttggtatgaaatcctatgagctccgagtaaatcgactccatgttggaaaactgataaatcacccttgctcatatcaacacgctctctgttccttccctcctgattatg

SEQ ID NO: 76603 - DNA, 291 bp, Zea Mays
tttggggtcgtcggtgtgggttaccggcgagttgatgttcagcgtatgtgcagtttccccaaacaactaccatagtcaaattgtcggtaccccctgtgatcgctgcatattttgtgaagtcagggctcatttaattgagattcggagcacctggccgccgcatcgccgccgtgctttctgctcagtagggaagaaaagcaatggcctttgatcctgtgatgggtggctaggattagttgataacataccccttcgtcccagtgaaccctggccgtccatctgcgaacgagc

SEQ ID NO: 76604 - DNA, 598 bp, Zea Mays
gatgatattggaagcgctcagaaagaaagttttcgacaataatgagaagttcgcaggaaagtggattagagaattgctttatgttgtttggagcctgagaactcaacctagccgagctctgtatggaaatactcctttcttcatggtctacggatcggaggcagtgctacctgctgatctcaagtttggggcaccgaggttgatctttgaaaacatagcagaagctgaggctaccagactggaggttattgatatactagaagaagaacgattgaacatcgtgatttagtcagcacggtatcagcaaactctgaggcgctatcacgacaaggccatacgacatcgatccttcgcagtgggagacctcgtcctccggtgaattcttacgggggaagggcggcacaaactgtcaccactatgggaaggaccattcatagtagcagaagtcactcggcctggatcatatcgtctcactcaaacggacggcacggaaattgggaactcatggaacatagaacatctcaggaagttttacccctagctatatctcaaaagctattgggacgacaatgtattctgtaaactgggaaatatatca

SEQ ID NO: 76605 - DNA, 929 bp, Zea Mays
cgcggcatcctgaactgatgtctgcaaatgagagagagtgactaagcacagagcgaaaatgtccgatagattagcaaaggatgagatgactacctggaatgctcacacgagaggtgacgatccaggcaggacgggagacggcacacgggcaatcaaggtcattgaaatgacagaagaggtgagcacatattagtcacatagtcataagtatatgaaatgtgaataaatacatacacagagagagatatggcacagaaaacacgagacgagacgatcgaaaggtcaaacggcgtgaaaaacgacgtttgaacgataaatagtgccataggaggtttggaattcgaattgaggcacaaaacgacatggaattgagccgatacttcacgaataggtttatataggtgaatatgagtgaagtgtgtgcttggtttgaatttaggcgaagaaaaagagattagggcactcggctcggaaacgatcgctcgaaacggggaatttggtgaaatttaagcctggaatctcggattggcgtgaaatttggcaagagtgttactggaagtgttgtgaaggtgcctgaaaaatttgggttcaattggagcatttttggctggtttgggcatttcaccgagcacatgacgtgcggagatctagggtttcggtgaaacggttatttgaggtgggaaaaccctcccgaaggagctagaaacctgcagggatgctcaatacacacagagacacacatactacaacatggatgcacaaaatttcacaggatttggagtttgggcaaaatgggtggaaatgggagcctctgctcaccagaacagagagggaggagaactgagggagagatggatgggctgctcaccgagagggatgaagagaagcacaaggtcgccgtgggatcgccgccggtgaagagatggacg

SEQ ID NO: 76606 - DNA, 499 bp, Zea Mays
ccaacgactcagatcattggataactttcctctctcttactcaagtagtcaagtccaatgatcaatattatttaaatcatcttttctctctcatccttcatacgcacattaaccccatgcctcctctcccccctccaacctcgttgtccctccccctcgctcacgtcgtcgctatcggcctctccctcgcacctctgtcgccggccccttccccctacatgtcccccttctgtgattgtagcattacgcatgggtattagactagtttgcataaaggggcgtttccatgcacaaagatgtcctagtgtagaatgcttgccttgtcttcattggcctattataagaaaacaagctagattagtcgtttatttagttggagaagcaatggttgtctgcttgatttgcctaggatggcatatcacaccggagggcaagcacaaagcggatggtaggtagtggttaatatattaggtcggttctagtggggtggtatctatcc

SEQ ID NO: 76607 - DNA, 463 bp, Zea Mays
gctatgctgataataggagaagactactggagtttaaggagggtgatcacgtgtatctgaaggtgtcaccacttcggggtatgaggagatttaaagttaaaataaagttgtcccctcgcttcattggacctttcttgatcttaaagcgagtgggagaagttgcatatcaactggagttacccgatcatctgtcagatgtacataatgtattccatgtgtcccagctaaagaagtgtctcagggttcctgaggagcagttaccaatggaggaccttagtgttcaagatgacctgacttatgcggagtaccctatcaagattctggacactttgactcgagttacaagaaataaggtgataaagatgtgcaaagtgcattggagtcaccatggagaagatgaagcaacttgggagagagaagaaaagcttcgcatagattttccccatcttttccctagtccttc

SEQ ID NO: 76608 - DNA, 664 bp, Zea Mays
ggtacacatttttgcctggatcaaactgccgttgtgctcattcattcacaggaattcacctcggcatattagcgatgtgtcaacgtcatgggtggatgcgcgtgcgatgaagccggaagagcaagcttgtaaaccattatggtccaatgaatccaaactgatgattagttgtagctttacaaactcccagtcaccaacagcaaactgctgttcagagcgatgcttatcggtttgctacttgaatgcatgctgctgaagcagacataggagtagcagaggcaatgaggccgataaccctcagtgccgaatgggctaactgatgatggacgtaaagttcatcagcattcaagtaccaaaacttaaaccaaattttgatatcaagagttagaagagaaaacttattttcctcctaatactaagaagcccatttaactttagcaccacgaaaatatcaatacttgagggcttcgtttattagcaggttgaagccgttcctccaacatgttaatgctagttctacgcatccgcaccttggagttgttccagggtggtgtgctgcagcagattagtatacaaacctcgttgatcatctaaggctgccattttctttgtaagaaatatgcaagaagttatgagaaagatggaggaattaggcaagaggatg

SEQ ID NO: 76609 - DNA, 1650 bp, Zea Mays
aaaatacaatcatatcctgctcttgccactgcagtttcgtcttgtattatgtgggcgcggattagttaatgaacagagcttagttcccactctacgcgatggatgtactaagcgcaatcaagcctcttaacttgttcgtaatcgtacctgtgccggcaattaattttaacacgccagtattactttaatccctcgttagatgtgctctcgcgccgtaacggcgacggtgcttcagacaacagaccccgcaataactgccaattagaaaatccttacagcttcggtattaccgctagggtttcgtccgtcgccgcatcgttattggcggtagacttcgaaagtctgcgtgccattaattgctaaacgccgattagccgaacctgtccatcaatgggcacattgatgggggtggaattaaaaagttgccgcgtacacttgacttggaatcccagttgcaaatgcagggtacggcagtacacacggggtttttttaaccgaacaggaataaccagcgcgtggaactgtcagtgtgaaacggtggggaagggggatttggtttcggtctttatagtggtggtatggtattaatgcgagtgggtggagggaattgaattggagaccacccgcacctaaccggggcatcgcaggtcaaatgccggtgggcccggtagtttagtggcaggcaggcccctcgcagtccaccacggggcaagggcagtgacagtgagaagggtggtgctggtgctggttgcgcctatgcgttgtatcttttcccgatacggtcaggtcagccatggggtgctgctagtgctaggggccagcttgctaccacaagtgcgcctccactccctagtgctttgattgctatccagcgtctgggctttggttggcttcgaattgatctgtggatgaatgggacaacgcgggtgtgtctgctggtactagtgtggagacgtcgctttgctccccgccttttaggcagggttcttggaatcttggtgcaggactgcgggccgagtgcgatggaggccttgttgaatggtgggtgttcttgtcggtctgccgtctgcgttctgcacagaggttgttctgtggaattttttgtgtttggattgtgacaacatgataaaaaagcagctactttttggccagaatttttaaaaaggctgatcaggaattgggtggcagagggggtctgattctgatttttttaattctttctgttcttacttggatttgtcgattaaaatgaggtggcttacagtgacatggtcctgtgttatcatgtaagttcagattggtcaccaagtagacaggttactatcgctggtcattgtatatttggatggtttttatgctgttagtactgactgctgagtagggtggtttctacaatcactttggacattgggtcaacaaaatgttaggcatagtcaatgattctcatagcggactatctttggtgtttgggggtggcggaggagggcgggatgggtttagaaaaagtttgtctggagtatcacagaaagtgattcacctggttggaggattgctgtttcactgggatgtgatcattgaaaaatatttagctcttctagatcgaaatcaaagaaagtgagaacttcatagacaatcacgctttggtatgtg

SEQ ID NO: 76610 - DNA, 778 bp, Zea Mays
tcacaacatcgagtttcggcctcgcacagcaataaagactcaagcactggttgacttcgtatcagaatggaccgagcaacaagtacctgacaacgcggaggctacaaaagtatggcagatgtatttcgatggctcgctaaaactgcagggattaggcgcaggaatcctcttcattgcccctggaggtgaacaactcaagtatgctcttcagttatcattcccagtatcaagtaatgcaacagaatatgaggctctaatccatggattagacattgccatatcactgggcattaagaggttgatgctatacagagattcactggtgatcataagtaagataaataaagactaggactgctcgactgattctatgggcaagtactatatagtcgtccgaaaattagaagacaaatttgaagggctagaattccatcacgtgaaaagagatcgcaatgcagtagcagacacgttgtcgaagctaggatccagttgagcccaggtcccacccggagttttcatccaggaggtgtcacgcccaagcattccctcagatcaggtggaaaagtgcaacgctttgagccaaccagagtcagactctaatgactagagagaacctatcatcgggtatataaagaacaaggaagaatcggatgataaggcagcaacagaacgcatcgcaagacaatcggcccactacaccctcatagggggcgcattgtacagaaggggtgcaataggagtcctgatgagattcatgccggacagtgtggaatacacg

SEQ ID NO: 76611 - DNA, 445 bp, Zea Mays
tcaaacggtggcggtagtgcttaaatcaaaaggcgtgtgagcatcaccatgacataaagaccaagaaacatgagccaaacaaacatgactaatcttagaaagtgttggccatggtgaggaaccactcggtggcactggtgataaccgacgggaaaaactcggtgttcttggctacatacggtcaaacgaagaaaacaaagtgtggcctgggtgcgtaatggagaggtgggactgagggcaagctcaatttaaagggcgctaccatgatagtggctaatttggccgagatagaatggcgatggtgatagaccactgacctccacgttcgcttccacggtgtcctatgaccggtaatgtggcgaatttaccgcaagcaggtttacatcagcttaaacaatttatgcacccaaccagctgcatggatggctggagtgcttggcggttg

SEQ ID NO: 76612 - DNA, 661 bp, Zea Mays
ataaatttcctagttgtgcattgaactttccttcaaaactttggcctcctctccctcctcttggagctggtgggaaaagttgcttttcgaggattgttgttgtgttcttgattcttgatgctgacttcgttgtccttaactagacttatctttattttggcttgggttatggatgctttggatgtgtcttggatgaaaccttcctccaaagcccctggctatcattgtgcatctttgtgcctcctcccttctttggcaaaaaattattgcctaccctgatgtactcatccattttttgtagcagcttctctaggaaatgcgggatatcctagagaagtactgagctgctgggcctaaacaaagccctttgatgattgcttatgtgacaatgtcatcttgcacaattggtgcttaggccctaagacaaaggaatcttcggacataggcttaaaggtactcatcttgctcttgagttcactaaaacagggcttaagaagttatgggcttcgtttgaaaaccctaaaaccattgaggagcatgtctttgagcttctgtcaagaggatataacggtctactaaagagaagaataacatgtgtgaacaacatttctaacagccatggcgaatgactttgccatcagcgttgagtaggtaccatatg

SEQ ID NO: 76613 - DNA, 408 bp, Zea Mays
gggtgccctgctgctgacgaacaaggacctggagtcggatctgctttactgcatatgttgaattcttggatgttgagcttgtcgggtcttctttactgcatatgtttgtgcttaggtacttctctttatctgttaaatccgggggttcttaacatatttgctttctaccgttcctatcagtgttaggcctatgcaacccattttctgctttctaacataacattgcatacttgtctagaacagatcacttattttctcacttgatctcttacataatttctcaattaaaactttgcttcctatttcttgttaggtgcatcgaaccaggcttaaactttcaaagtcaaatgtcgttttgtaatgcatttatggattctgtgaacaaccgtttgaaatctcatatttgtt

SEQ ID NO: 76614 - DNA, 471 bp, Zea Mays
ctgaggactccattgtttatggatctaatcatcccggagttggacaaaatggctagtaacaacaatgtgcacatttggaagccaccgcattttgatgggaataattatgactattggaaaataagaatgtcaatgcatcttagagcaatgggtggaaaaatttggccacttgtcaaggatgggtttgttgtgttgaaacaagatgaaccatcgactagtgacaatgaaaacattcttacaaatgatcaagccatgaatgtattctatgatgctcttgacataaatgagttcaaccatatcaagaatctcacaacaactcatgagatttggattaagctaatggaaattcatgaaggaactacaattgtgaagagtgcaaagctatatgtgtgcaaggaaaattttgagcaattcatcatgaaagaagaagaaagtgtatatgatatgttcaaccggttaaatgagatagtg

SEQ ID NO: 76615 - DNA, 492 bp, Zea Mays
tcattaggtcatatatacctttgctcggtggtgaggccttcatgccgatgcaaccctcgtttgccttcggtggctaaaccatctttcgggttgagggcaccttcaattcctacacttatgatcaagtctggtctggggttagttgttagtagtagagtgatcaaggtcaagttcagctctcatcccaacagtaggccctcgagggaatggttgaacttgatgagctggtctcgaagtctttctacaagaggggacgaacgctgccctcgatcgcaagttgggctatgctggggtgcagatgaaatgactattgcagcgtggtgacatgattggtgtgatgtttcattattcaccttttttattttttatgcgggttaggaatataaaatgagcaaaccgttgttgtagccttttacgctttcctgcctcatggttgtgatcaccatcgtttccattttcatcgctgctcattgaaagggaaatatacccttg

SEQ ID NO: 76616 - DNA, 729 bp, Zea Mays
ggggtaccctactttcagggtaccgacagtggcccctaggcccacctcaggggaggatgcgagcctgcaggtggggccaaaacttgtactttgcttcaacatggcttgattgatgattggcgcgccgttttagcgcatctgctgacgcacccaccgtcaatctaccttaggtcacaccaactcccatatctgtcctcgcggctgactgacccgcgacccccacgcctggtggtttcgatgggccacgcgtagggcgtctcgcagtttaaaatattaccttctgtcttctacagcggccccaaggcggcgcactacaggcgcgcgtgacggttcgctctttccgcacacgaagtccggcacacaaaccgtatgacttgtggacctaggcccccgtgtcatagactgggtttgtcttctgcagcggccccaaggaggcgcactacaggcgtgtgcggtggttcgttccttctacacccgaaattcgactcgcaaagtatatgacctgtggacccgggcccccgtgtcatagactgggctgtctagatctaggtgcccgttgcgcgtgatctcctgcgacaattgaggggcacgtggaagagtttccttgagcgaggactctggtttccttgaaaaagggttcacccccgcgtgcagcaattaccctttcgcattctcttccaatcgactgcgccctttcgcctttgtgttcctctgcgcccctttgcattc

SEQ ID NO: 76617 - DNA, 548 bp, Zea Mays
atcttgtgctgcattaaggtatgggttttaatttcgcagcaaaagaagaagaaaaggagaggagtgtgtatagctggcactggcaccagtggccgggggctcatgtagtcatgtcacagttacgcaatagcgcgcccaggacgatcgtgtgtgtggtggctttgctctgattaattaacaaagcttttttatatatgctatgcatgtgcagggctcgctgtggcattaactcacggtacagtttgacactgttgtttagtgatgatgatgcacatatactcatattcgtatcttccttgtctaatatatatgctgtttggagactagcatatgcatatgcttactttccgttgtcatgagactttaaatacatttatttgtttgtttggacgttgtaacaatactttagtttagttcctactcccatttgcattggctttaatcatgcgtgttcatgggaacggctgcggccggggagctagctgttttttagtgcctcatgctagcaggaatcgtcagccagcagcaagtgccgggtagctttcttt

SEQ ID NO: 76618 - DNA, 800 bp, Zea Mays
cggcgacgtggccgagcggccgtcaccggcatgtacgccattcaccatggtggcgccacgccttaggacatttatcgtgtcatcgcgagccatagtgactgcccaagtgaccgccatagctcattgctctatgatcgccacggtagatcaccgcggtgactcatctcctctctccggccaccagcatgccaatccaaattaatgagccatagctcatcaatcctataaattgagtgtgccatcggctccattatgtattcaagcctccagcgcacctattcgtgtctcggattgttcaccagagagctccaatttggggattcccccaaatcggccagaacaccgcgtgtgtgagctcatcgcggtcagcaatccacaggttcgatcatgcctttctcactcttgttttagcatccttgtgtgcttgtgatgcttctcgacccggccaattgagctagaactcataggatcactgggaacgtgtcgagttgtccgttgatcgcacgaccaccatgggcagagagattaagggctagaaccttgaaattggttgaggggaaaggattattagaggtcgaattaggtgtcaaccacttctgagcattggtcattgtgtatcttggccggtacaagctcgctagagctactgctccgctgttcagcgtcgtggacctagtgttgtgagggaatagaagtgcgagggtctcggtgcaattgtcagtgactcaggaaatagtgctttaggctcttttcaagttgtttaaaacgacaggggcatttgcacaaagtcatcagcgcgg

SEQ ID NO: 76619 - DNA, 415 bp, Zea Mays
gacctcccatagggcactacacgacaggctgtgtcgagcccgaggttacgggagccaggggttggcgtagccagaatgatggcgcctgggaccatcgccgccccctcgtcattccaccacgataaatacgcgacaaccaggcaaccctagaccccgcaagtacgcatggcctcacccggggtaaaacgctggttttacccctgccttacggctccttcctagggaagccaccactagccgacccctgttccaccctataaaaggaagcgatcgaccttcgggcaaggggatcaagaggagagctcttggagacagtcagacgccttcagacggagacgaacccacaaggacgaacaggaggaggagcatcgacgaggaccaggaggccgaagccccaccaagccaagacttagct

SEQ ID NO: 76620 - DNA, 450 bp, Zea Mays
attttccagtaaatcatcttgattaccttggtgtacaagttgcatgggtcactggtccatggttcctatctatttttatgaacatgcttccctgggaaagtggtgagccttattctgtattatttgaaacatctacattttcctttttgaaatgatgtttctctgcttgacttattttgtgttatttgaaacatttaccttttccttttcgaaatgatgttcctctgcttttgcaatataagataagtttattgagaaatgtatttcaaacattagggcctttaagagaccatgattgcttttgcaatactgtaaagtgacacttaacctgagtagttgtaatgtaaggtctattgtcattaactatttttatagctgatgtttccttggtctttgtgcaagtatgcttggagtaatattctgtttcttgagtagacaataagttattat

SEQ ID NO: 76621 - DNA, 539 bp, Zea Mays
gccacatctcttttcaaaccgtaccaccaataatttactttaggtcctggtacatcttagtacttccagggttaatagaataagccgaatcatgggcttcccttaaaataagttggcgtaggtgctcgatttttggtacacagattctctttttaaaccatattgtgccttgatcatcttctgtgaaatctggggctttacccaaactaatttgtgtcttaatttctttgattttctcatcagactcttgtcctttacgaatctcttcttccaaagtagattcaacttccataattgtcgcttccatattattgagcattccaaggttgagttgttctatttcccagcacaattcctatgacatcaaatgagtagtgatgttgttcacttgacctatagggctcaaagcatctgccactacatttgcttttcctgggtgatattgttttttccaaatcatagtctttgattaactcaagccatcttctccgtcttaggttgagttctttcttcgtgaagatgtatttcaagcttttgtg

SEQ ID NO: 76622 - DNA, 522 bp, Zea Mays
gttttatgaagccatggaaaaaccaacgcagagaagattgcaaacgagatgctagctaggatatctgagaactccagcgatagtcaaagttttgatgtagaaagtgggaatgaagatgccgaagatcggccctcaaggccaagccatgttgtcttcgggaagtcaactattaagcaagggcagattgatgcaatgagggggaggtagtttcacaacatctcaattgtgagggctggaggaaaaaataatgtccctctgcccgaagctgatgaagtggtagtttgcagaggcttcatgaaggcagggcttcagttccctctggataaattactggtcgaagtcctgaaaaccttcgaaatttaccttaatcaacttactcctgaagctatcattaagttagtgatctttatatgggccatgaggagctagggactggaaccaaatgcaaaatgtttctgcaacatccataagttgtcttatgagacaaaggctaccagaaaggagcaatatcacaacaacttc

SEQ ID NO: 76623 - DNA, 365 bp, Zea Mays
tgtgactttcgatttcgaaaatggtaaggagttcagtttgccatgcagccaatcatgtcctcgttcctaacagtcagtagctggaccatgtgatttcctttcgtcaaaaatcaaaaatcactaccgtcacttacatctttctatcaaaaggaacgaggtggagaatgaattttcttccttggatgctgccgtgacagcatgggagcataggaagatgtaacttcaattaagaaatgatactatacctgcatatttgcatgacatcgagatatatatccacatggtggtcttccagttcaagtcatactaccaactcagtatgtttgttctcttggtgccttgtgttgtttccagttgcagtctaa

SEQ ID NO: 76624 - DNA, 388 bp, Zea Mays
cgccgccggccagtagtgggaaagaaggtgggcgagttcgtgtgagccattagatcgtccagatgtgactcggattaggtgtaggataccggttcgggaggaataaaattaggggcgttgacggatgatcggaggaacgacgccgttcggatccgcataaaaatctggaccgttggatcgaatcctagacacacgatggcgtaccgtttcacggcggcattgatctaatctaaggcacacattttcgatccaacagcccaagattcgcgataccccttcgctgcgcgcttttttcacatgagcccctggaaaatttatgaatcaacccgcagtccatcagcagggagttctgagtcttaggaatttttatacggtagcccctgaactc

SEQ ID NO: 76625 - DNA, 532 bp, Zea Mays
attagctgatgaggcatagaggttgccttaagatgagtaaacgtaagcatgttacactaagtcaagtaagcgtgagcctgttgcaccgtcttaagtcattgccgacttaagccgattgctccattaatagggtatagtggtcaccctaagccgagtaagcgtgagcatgttgcaccgtcttaagtcattgtcgacttaagctgattgctccgttagtagggtatagtggtcaccctaagccgagtaagcatgagcatgttgcaccgtcttaagtcactgtcgacttaagccaattgctccattagtagggtatagtggtcaccctgagctgagtaagcgtgagcatgttgcaccatcttaagtcactgccgacttaagccgattgctccgttagtagggtatagtggtcaccctaagtcaagtaagcgtgagcatgttgcatcgtcttaagtcactgccgacttaagccgattgctccgttagtagggtatagtggtcaccctaagccaacagttcaagtgcccttgagaat

SEQ ID NO: 76626 - DNA, 400 bp, Zea Mays
cacatcttaagtccttaatattctaagtctgatttcagtgatattggctcaactttggagccttgtaacttttaaaatataggatctttgccctaggtcaccacatcaactatgtagatctatcttaggtgaacaactttgcttaagtgggcaagccatgttctagtgaaaaatttagagataatcatgctcaaactttggctgtcaggctgattaagttctgaacttcagacaagcagtgcaactgcaagcattttgggcatgaattaatgcatgatcgagcaagtatttgcctaggtttgctataacaatattgtagctagatcttaggactataactttgttaaagggtgtcgatcatgttactgcacaaaattggaagttattggctctgtaaatt

SEQ ID NO: 76627 - DNA, 1204 bp, Zea Mays
tatcgcaccgccttaagtcattgccgacttaagccgattgctccgtttgtagggtatagtggtcaccctgagtcgagtaagcatgagcatgtcgcaccgctttacgtcattgccgacttaagccgattgctccgtttgtagggtatagtggtcaccctcggttaagtaagcgtgagcatgtcgcaccgtcttaattcattgccaacttaagtcgattgctccgtttgtagggtatagtggtcaccctaagtcgagtaagcatgcagattgacaataaacacttcgagtgcctttgagaatgaagtctttctattgatggtgtatttcccaattacagaatacaatgccgtcccaatagcttttgaaatctagctaggggtaaaacttcctgagatgttctatattccatgagttccctatttccgtgccatccatttgagtaagacgaaatgatctaggccgagtgacttctgctactatgaatggtccttcccatagtggcgataatttatgccgcccctcccccgctagaattcggtggaggacaacatctcccactgcaaaggatcgatgccgtatagccttatcatgatagcgctttagagtttgctgatacctagctgactgaatcactgtattcaatcgttcttcttctagtatatcaacgtcctccagtctagtagcctcagcttcagatatgttttcaaagaccaatcttggtgccccaaacttgagatcagcaggtagcactgcctccgaaccataaaccatgaagaagggagtgtttccatgcaaagctcggctgggttgagttctcagactccagaccacatacgacaactctctgatccactttcctgcgaacttttcattcttgtcaaagaatttctttctgagtgcttccaatatcattccgttggctctttctacctgcccgttggctcttgggtgtgccactgatgcatatttgatctggatgcttttttgttcgcagaaatcaaagaactccgaactagtgaaattggatcccaggtcggttatgatgctattcggtattccaaacctgaatattatgtcttgtatgaattccactgccttagctgaagttagagaagcaatgggcttgtactctatccacttagtgaatttgtcaatggcaaccagtacatgagtgtatcctccttgagctttcttgaagggtcca

SEQ ID NO: 76628 - DNA, 495 bp, Zea Mays
tgaccgaagactggagggctccaatagccctgttcctacaggggtactaccacccaaccgacatcaacgaggccaagcgcctcaaacatcgaagccgggactacgcactgattgagggccaactctacatgaagggggtcagtcagccaatgcttaaatgtgtcatcgagaccgaaggcgtccaaatcctgcgcgaagtccatagtggtacttgcggatctcacgtaggaccaagggccctagccgcaaaggtgatccgccaaggtttctactggcccacaatgatctgcgccgcaaatcgggtcacaaggtcctgcgaagcctgccagaagttttcccctcgatcaggcaacccctcgcaattcacaaagctgatcgcccacacatggcctctccagcgctggggcctggacatcgtcggacccctgcccacagctcagggaaacctcaagttcaccttcgtcgatgtcgagtactttaccaaatggatcaagg

SEQ ID NO: 76629 - DNA, 1057 bp, Zea Mays
cctttatgtatgctcactatgtaaactttttttgcaagtgtccatatctaaatgtactccccttatttcggtctcaaatctggaaccgaccccgttaaacattactctatcggttgtcccttcattttatagtgcaagggaggggatatgttacataaacttcgggttttcactagctaagaccaactacactattcttatcctattcttggagtcataccgaagcccccgatcgtgacacaatatcgaagatatccttttttagatggttgtcatacctagtgcaggggcatgtataataagtcacatccataggtgtcaaggccatgttgtttagtatgatgtagcttttgtactcgataatacttcatggcgcacttcacgtgcatatgcgtggctataggattgatgcacatgccatatagtggtctcaagtaccacgtggtctaggtcctggcaacaacacgcttgttaggcctataatatcgcataccaaacatttaatgtgttgtgcccgagacttatttgataagctagtggtatggacttgccattagggctttagatgtggggccatgaccttggggttgtaatgccatcagtgggcctaggcacattctcctatcttgagataggattacacttagttgcattaagccccttgtgcgagggttttggggcccaacgattcttgcaatacgaggttgggcaccttaaggacctcgaggccaatataagcctcatactaactaagtgtcgttgattgttgaaagtcacctagaggggtgaataggtgaaacctaaagttataacttttaacacaaacttcaaccccgtttaggcattagaacaagaataagaacaatcagagtgagggagagagagagagagagagagagagttcttcttgcacaagttgctcaaatgattgcagaattactttgggagcaacttagttgatatagaatcaagcgcaagtaagagaactcgagagaggggagaggaagaaacaaatcataaacgaggatcaaacacatagaacacaggcgatttgttt

SEQ ID NO: 76630 - DNA, 429 bp, Zea Mays
cgggaggaggcaagttccaggccgagtacgccactggagcaccaacatttgacaccttgcccctgaggatcatttcaagtcggctcaccaaatctgcagaaggaattctcctattggtaacccgagttgagtcggctagccctcaatacagataagctggataggccctgtctttcagtggctgaatattcttgaaaacaaaatcagtaaccacagcttcagcagtcagacccctttctttcaacagtccaacttcagctagcaacacacttgcctcagctacctcctgatctgtgggagactcggtccagcttggggtgcgaacatccggttgtcttcccgaccgggaggggagagaattcccataattctcaactatgaaccactctaggtgccatcctttaatgctgtccttgagggggatctcga

SEQ ID NO: 76631 - DNA, 1778 bp, Zea Mays
ctgaaagcaagcatgcatgcatgcacaggtacatgagaaaagtggaattcatattaaagcaggaggggagggggagcttgttgatgattgagcacgtacgtaaaactccttgttctagctaactgctctttctctaaagctgcatgcagctctggcttggtcgatctatcaaggccaacaacgctggctttaatcggacccccccccccccccgtcccctcgaaacagatggcggcagctgcatcgtacacgtacgcatgggccagcacaaaaccaatgcggacacgtccgctccgcgccatgcatgagggaattgcagcactgcaccacctgctgcgtgcatgcgagctagtagtagtggtcctcctctacctcttggctttttgctcacccgtctctactactccctcactttccttcgattctagtagcgcggtacagtactcccctatgtatgttgtgtgaattgtgatgatgctccttcaccatatatatgcaacttgccatattattcactctctctacataaaactatatgtgcatgcgttctcaactgcctgtctgtccccactcccatgcacattttctcacacaaatctctcgatcactttggaagccaatcatatgggcataaaactacagctagtgctcttgaggatccatttcattggccacagctaagaatgcgcgcgcgcgtgtgtctattattattccactcaaagtgcggcacttaacatcatatccttgcatttgtcatctatcagtgacacacacacataaccccagctgctagctagtagtgttagtgtataaatctaacctatctagtagctagcctacccttttatctaataatcttggccgccgcctgatgatgtgtgaaagaaaatacgcagaccatgcatctctacatcatatagagacatagtttttgctagcttcagatctgatcgagtgaggtctgaggtaagctcaacggtagcatgacacagcaacttgttgcactagatcattgcgtcaaataaataaaaaaaacgatgactagggcgtgttggtcactacgtactagtggggtggggtcatttggtggaaaacttaacaagcatgcatgctacatgagataccttcgactcactctcatttcatattcttcttttctttatgggaaaccacagtagtagaaagttttgtttgagtagttatatacatgcttgtattattttgaacattaattttccgtgtctcagaactgtccgtagtgatggctagatgcccgtgtcgcattaatttcaggactaggcagcatctaggatagcaactaagggaaaaagagcatcaagctaatagagacaaagaagaaagtacaatccataagcatatactagaaagtggaggagccgtccggtgatgatttccagtacactactactcgattaaagcatgaatagatggaatcttttgatcagctaaggcctgtcacacttaagccctctcaccaatatcctaatacgaacggcaaggtcacattccatattctttgtgcattattattgttaattaaataatccacatgcatcacatccccctagctagctagtcatgctgccgtcctttcaccgctcacgattgacacatgctcaacctagcaaaacccggaacccactatttaatttggagaggagaactaaacctccagctgcctcaattattgttgataaaagtgtagatgatatatatacataactggtttctagacggacaagttgaccttagaaatg

SEQ ID NO: 76632 - DNA, 1126 bp, Zea Mays
cgacgggttgattactgctttcttcggggactctttaacaaaaagtacccgcgaaggggtacagtagcatcctggccgcacgattcaatatcgggggctgagattagatccaaaccagccaacccacccgagccaccgatcccgagatcaacgccacatattcagccagcgaagaggtaagtgcccaatctaatcgtatccgtctccggccagatcaacggctaaaatctccccacgcccggatctaatcataaccgttggcgtcaacatcagcggccagggaccttcttcaacctcacgacgccaggctgagacggcgttcaccccagcgaaccagcgccccggacccctggcagtacttcggtgctcgattcctagcgaatccaggtgctaatcatcgcggtaaccatgggaagacgcgagcgaggcctcaccgagacttggagcgcagatccactcgcccgcggtgatgcaagattccatgacgagtccgaccgatggtggcgctgaccctctcttccttgcggcagacctgcccacggtcagggcgagatcttggccagacacaacgcgacacgtgatgctctcagcggcgctcgacgacgatgggaagcagggtcgagttgcgtacgaggggaaggagtcactgccatacatatactctaaacgagaggcctagcctacagtatgaagttcggatccggagttgcaggggcggccggtgacttaccacggcggaaaccgcggacggcacgggagtttgttagcagcaagcgaacggatcccaaccattacgcccgagttccacggatccctcttccttcgcatacggcggcggcggcgatgaactaacctgctgacgtgcgggcccaggctgccagcggcacagggagggcagggtagtgggctggcataagtggaacatgggccggccagggtgattcggcccacgcggctgaagtggtttttttttctttattttctcctttttttctattttctcttttctttccaattttaaatctagaatttgaatgcaaacttttgtggcgaattcgtaatcaaatttttgaatatatgatttgaataaattattatggaataacttttattcatttataaattt

SEQ ID NO: 76633 - DNA, 276 bp, Zea Mays
gtcgaggaggactccccctttttcttgtcaccttagcaggcctcccactgctcccgagtgagatgtagcttcccgccgatggtgataggccttgagacgaccaatcgcttcttcgatcgtcatcgtggagaggtctagcagagactcgattgagcgagcaatctgcttgtacttctcggggatgcaacggaagagcttctcgacggctctctcctcatcgtaggtgtcgtcgtcgaactgcaccatcttctgcaacagagtgttgaggcgaagagc

SEQ ID NO: 76634 - DNA, 1023 bp, Zea Mays
gaaaaggaaaaagattaaacagtaatgggctcaaaccagcccaactcagcccacggacagggaaacgcgcgcgcgcccgcgcccacgatatcaactttgcacagaggacctcggctgttgaataaccggttaagaacccttgcgcactattcattgtctctctgacattcacagtttggccctcggagttctatttctttaccgcgccaagtccacgacggtgaacggtgacgagcacacctccggcgatcttgtactggccggaaaacacaatggctaggcttctcctttgtttgatacccaattccaatcctggcgaccctaatccctctaccaattgcatgattctagcctggaatccctctgtccgcgacgatggcgaaaaccgagaacaaccagatgtgttcttggtgattcagggcagtctagttcaattaaatgggtctacaagtagccagagacttaagggaggctagaacatcaagcagagaagcttgaactaacctgcagggagctgaccacggtgaagcgttcacggcggcgcggaaaacagaattggggggaaaaggaaattgggatgctatggtggacgatcaggggcgagagctagtgcactgcgtgcgtaataacctagcagacctagttgatcactcaatttatagaagccaacagcagtggcatccaatttggagaaggtgtgctggcggccggagagagggggagtttactgacgtgaactatcgtggcggtcactagctgaggagctacgacggtcattgctgagttattatggctagcaacgacgtggtggaagggtcacgacatggcgcaacactacgactggcgtacacctcggcgatggccgctcggccacatcgccggcaagtgggtacggcgtctgagcaaccacagtgccccgaccacatccacgatgagatcttttcacctggagtggttatccgcacgttactaggcacgaatcatagcgccagcgcgaatccgggcgcggggtcaccggcggcg

SEQ ID NO: 76635 - DNA, 1182 bp, Zea Mays
tcaatatgcgtaatatgagaatgatatggcttatggttaggtttgtcttcaataatactttcaaaagtttagatttatttgcgtatataataatatagtgatcaaaagtaagtagtcaaagtgatgtctcaaaaaacaataaaaacaacaagatggtgataaaggtcaaataagaaaccagaaagtattttgtgaacttgaattctccctctagtgaaaatgcattttatgagtaaaaggttggtctagtgttgaaatcttcattttggcctaggctcccctgtctttcctattttttgctaccaaactttgatacatcaacctcaactcatcgtttgtatgctgttgtggttccagaaggttcagactgctttggtgtcaattttttttaatctttagaggaacggaaaccatccatactgggtcatcctgtttcgtcactttctgactctccagcctttttcattttgctcctctgttgcctcaatttttttatattttatactccagtcattgcaactggttatacttgaatttgtttcacaataataccatattacatttacatgtacttgattacttttgagcaaagcattcattggatccttctttttgtgcaggctggggaattgcattcgtctctcagaactcgtgtttgcagttttgatatatttaacatgcttccctcaaaaattgtagcaacttcgatagaattgagtcccttatgctgcagctgttgagcatatcttattttggtaaagttaaacgagtttgtttgcaacatgctttgatctttaaagtctagaatttatccggaacaaacttataaatcctccatgtgcccagttcttcagttgacatgctagatttctgaatgcagttgctatcttctggtcccataaataatagtactcacatcacattcgctggaacccagaagcatcacatatgccccaaccacccaagagtactacagtgctgggtgctcctcaactaattgcggtggtacttcttctatttctcatgtgcgcctaggaccatgcatggacagccttcagagcaactggcggtgaccacaagaggtaatcttgtatagtccatctctgcagaaatggttagttcataacattctaggcaaggagcaagagaaattcaaaaaatagatctaacttattgacaatc

SEQ ID NO: 76636 - DNA, 637 bp, Zea Mays
cataacccgtttttaaaaaattcttccctgcccaggcccgaggcaggctcatttcactcagctcacttgtttgtctgccaggcgatttctcactgtccctcgccgccggtgacctccggctgcttttctcaggcgaggtgctcctgatcgtgatccctttcccctctctggtgagccccccaacttcttccctctctctgttctcttagctctgaacaacccactcactccacctttttgaaaacctgtgaatcaaagtgcatgagtgtgtgtctagtactctattaagttcccgtgcatgttttgagctccctagggaggatttcatccactaaaacagccatttcaccgtcgtgccaaaaccctacgcaccacgtgttcggtgaaatgcctaaactagtcaaaatagctcaaatcgaccccaactttttccagcacactcctgccactactagtacctcacacgctaaatttcacgtctctccaaacttcaaaccaagcacacaattcactcatattcactcatatatatctatccgtgaagtatcggctcaattccaagacatttcatgccccatttcgaacttgaaactctctatggcacaactcaccgtttaaacgtcgttctcgcgccgtt

SEQ ID NO: 76637 - DNA, 593 bp, Zea Mays
cttgtagagctataataggagtgcaactttgcttaagtaactaagctatgatcacatacaaagtttggagaaaaatgagctcaaagttgtgctgtcaatcacactgataacaaaattaaggtcaccagtgacattggcaagacttttgggtcaaattggaataggatctagtgctcgattgagggtagttactatagtcgatttgtagctggttggttgagctacaactttgttaaagacggattagtaagtattcacatgaaaatttgagatctaggctctgcaaactggtctgtcaggatgactcaatgagaaactgatggtacagtatcgaaaatatctcaggttcagttcatctcgccaccggtgaccacgcgctcggattcgctcctgacgctatgattcgtgctcaatggagtactgatagttgctcggggtagtaaatatcgccttgtggatgaacttgagccactgtttcactccggccgccgtgtccgcctaactcacggccaattcagatgaactcaccggagttagccactgatcaaccatgcgtcacgtgccttggtgccttaccacgtcgcagtagctca

SEQ ID NO: 76638 - DNA, 1219 bp, Zea Mays
gaaaagatcgcgagggggggttgaattggggctatgcgctgtcgtgcccacttgtcggcaacgtggccgagcgatcgtcaccttggtggctgtcggcttcctcggttgtgttacgccagggaccaattcaccacgtcgttgtgaccttgtcagatagcgagttaccctccatgagccattgcactaatgcgcgccacgaatcttaaaccagtgaaaaatctcgccaccgaggagttcagtcccatctcaaattcgcgaatcaggtggtcggtccctttaaattgagtgccctccccgctccacccttctattgtgaacccaacccaccctcagcccactcctctcgtgtacgctagctcccagtcactggaattccccgagcacggtcaccggcaccgacgagttgagccccgccgtggccatcccttcttaggttcattcatatcactttggtccccgttttagtacatctctggtctctagaaactcatggtcttgaccaattgaacgctaacacagtatagtctgggaacatcatgttgctgcccgggaactttgccgtggacacccctcacgtcgaccgatactctgatgcttacttcgcccgaattcgcataagaaaattaatcttggtgagacatggatgctctctccgctcttcaattgaatgctaccgaactgggtgcgtgggtacggctttaccggagccttggctccaccggtgttgcgagctgacaagaattaggggcgggttagtcaaattagtctcgataatgttctcgggcagtctctggggtggtgcttgctaccactggtaagggtcgccagcgatgagccccgcagccggagctaggtgttcgactggcgtgccttcggggtttgaacgtctgaagaaacagaactagaggggcttatgtgaaagtgtctgcgactctaggaaatagtatctcggactcttaaccagatatttaaatgaccaagggcctttacacaaagtcacgtgtgagagcgcgggcgcaggcatctttccctgtccgtgggccagttcgggctgaattcagcccaattctattcataattttcctttttctttttatttatagcctgtgaaacacattaaaaataatagaaaattgataaaatcatgggaccaattttactagactcctaaaatcagatattatttaacaaaaatacttccatgatatttattccaaac

SEQ ID NO: 76639 - DNA, 560 bp, Zea Mays
gggggcaaattggagggccgtcgatggctgaccgaatcatgctctcattccacaaccgcgccgcatcacaccctggctggagtcggcatcgcgaaattgttggtaatgccgccaccatggtccgtcatctccgcctccactcggtatccatggtggggtctgggagaatcgccggagcgcgtggattgtgatcgggcatgtgcttggccgcggtggccttcggagtccagtgaatcgctcgccggagtaccagcatcgccacggtgccgccgtataccgcgggcagggctaatctccatgccaaagacctgtaagtcatctgtcctcgtgctcttcgtgtcctctgcgtgattaagtagcactcgcattgggcttggaaacctgtagctcggtaagaccgcgccggcaatggcgccgccgctctgggcacttccgccgccactattccgtcgtgggggtacgagaactctgggggccactgattccgggttggacggttaggattaaatcgtccgcttaccctttcgtccattgaacgcagatcgtggatcgtccatccg

SEQ ID NO: 76640 - DNA, 773 bp, Zea Mays
caatgacccatcagagtacatcttccagacttccataggctcagggctcttagggacctgattttctgcccactctgagatgaaatcaactaaagcctatgttttgatagctgtgaggggccggaactcgatgtcatgagccaccagctcgtacgcccatttggctgtcttccctactttctcccggttattagtatgtctccgatcatgaaatcggtgaccgctttgactttgtggtcgccaaagtagtgacgcaatcacgcaacttgcgtgaagtgaggaggactgcgtagagcaacttctgaacttgaggataactgatcatggacggccccaagacttcgctgatgaagtagaccaggtactaagtcgcctgcacatgtcccttttcttttcactcgaccactagggccatgctcaccacttgagttgtgcacgaaatgtacaacaacaaatccttggacgactgatctgcagttgcttggttggatggcttgaggactgggggagtcgtcagaaagttcttgagtgcttcaaatgcttactgtgcctctagagtccactgaaatctgtccaccttcttgagtagcttatataatggcatgcccctttcgcggagtcgtgagatgaaacgactcagggctgccatgtagcctatcaacttttggaccttcttctgtgatgttggaggctccatccataggatagcgtcgatcttctcagggttcgcctcaatcccccagtgactgacgataagacctagcagcttcccc

SEQ ID NO: 76641 - DNA, 543 bp, Zea Mays
gttatatcaaccttttgggaagtatgctcacttagaagagctccaccagaggaaaatcaagtctcagcggaagcccaaggaaactccgcagtctagcagaacatgggtcataccttcacaaccagattcagctcagcaaaatcacgcccagtcacaagtacataatatcgcaaatcagcagcagacaggagaaaacaccccacgtcatcacgactaccctccacagcaagggcacaacagcaatgcaaccaaaggcagaggtagaggtcggggtcagcagcagcgaagattctattgtcttttccatggtgaatactttgcacacacgaccagggactaccccgagactaaagcaagaaagggccgaatggctagaaccccatcgactgacaaccaaagagtcgtcgcccatacctaccatccacatcaatacaaccaacatcaattccaaaatgaacatttttatcctcaacagcaaaaccacaacatatttccgcaaacaacaacgccttcaacaccaagaaatcctagcactaccaccgc

SEQ ID NO: 76642 - DNA, 449 bp, Zea Mays
gcaagacacaatatggttcaagaacatgatatgtgttcctgagattgatagccttcgtgagactatattgaaggaagcccatgattctgattactctatccaccctggtagcaccaagatgtatcaggatttgaagcagaaatactggcggtatggattgaagagagatgtggctgcacatgtggctatgtgcgatgtgtgtcaaagagttaaggctgaacaccagaggccagctggactactgcatccactgaagatacccgaatggaagtgggaagaaattggcatggatttcattactgcattgcccaccccgaggggatatgattccatatgggtgattgtggatagactgaccaaagtagcccattttattcctgtcaagactacttataaaggctcccagctggcagagttatatatggtttggattgtgacatggagtacca

SEQ ID NO: 76643 - DNA, 553 bp, Zea Mays
cgcaattgttaagtaagtaaagcgatgagctcagtccaaaccttttcaaatcctctaagaaaatattttactagatcatgaatgctcttggaaaaatcaccctcactctccactaaagtttcaccttggttcacctcagttttctcaaaatctgttcatcagtatcaaaaaccggttcaaccggacctaaaaccggttcaatcggtttctgcactgttccttctgtcactttctgacctgccagtctgccagtcaatcctgtcagaaaaagttgtgtgcagagttttttgaaaaccggttcaaccggatttgagtccggctcaaccgaatttggggccggtcgagtctcgagctgagtccctcagtgaaccaagaactccctggtggaaaccggttcaaccggttttgagtctacttttcccaacacctggcagcttttggggatcctttatatacccctcacactctctctcttcattcacttctgccctctccatgaattcttggctgaccaaccttcaaacaagagcattcaattcacctctcacacccg

SEQ ID NO: 76644 - DNA, 710 bp, Zea Mays
tatgtatatatgtatgtatgtatgtatgtatgttgggtggggtgctcacatgtatacccgcgagtagcggttatgggtagcatattgtaccgtcgctggtaacgagtacgggtttgtaaatgttctacccgcgggtttcaaacctgttgccatccctacctagatggttggacgattcggtcatttggctcggacggtccatgattagagtgattagattaatttaggctggagttatatcatgcatggttaatctaacaaaatcaagagaaactattggatctcgcctaggattgggtctagacctccaccctatatatatgaaggggtacgactgattgataacacacacaatccaatcgagccaatctatctacattatcatgccttaggagtagacgtagcgtagctttatttgtagcttccgaatctcaatcttcacctaccttcggctctacgtcatctagagccgctttaggtggcctgtcgaccccaaagtaactctatgatccctcctcctcaacgggtccctctcgagcgatgagatctagattctacgtgaagccctttacgccagagcagaggtagtggtgctaaatgaggtcaacaataggaaagctgcctaagctctttttcgtcacttacaaaggtacgtagtggtgctaaatccttgcaaaagaaaggaaaaaacttacatgtgccaaaatttt

SEQ ID NO: 76645 - DNA, 673 bp, Zea Mays
ttctacgtcaaatggcaatggaactaaagtagctaacgcaacaagggttgatccttcctactgcagataggttcaacccctaaatcgacgtagcagctgcgtgtccgcacaaaaccctgaaggacaatggttccctatggatgatgttgcccatccaatggcttgtgagctacatataggcataagaaacctgacaactaaggttgcttattgtatttcccgtccaccactcttaaggcgaacataccacatggccaacatttcagtcgattgctctatggtatatgttgatcagatatgtgatgaatacgatggtctggagctggacatcaaaagggtgacgatgaaagcatgcttttacatgccctacatatatatgttctttggctaaaaatacattaaaatagtcgatggccctccaccaactcaaaggatcccttcagttcctgcacctactaggagctcttcccctcttgcacatactagaagagtcccttcacctccagcacatacttgaaggagcttgtcacctcttgcacctcctcgaagaagcccttcacctcctcgaaggaacccttcacctccttcacctcctgcacctccttcacctccttaaccatctaaacccaactctaaaaggagcaatagcacacatagtgactctttacataag

SEQ ID NO: 76646 - DNA, 531 bp, Zea Mays
gttgcagaagacgttagaagcttgggcacaccagcctagtccagtgtgcaccaaaccaccagggtccaacgattatctcaggctccaacgggtggcacaacagctagctgacgaggcatgaggtccagtggtgcaccgaaccggtccggtgccagcattagatggaagacgcagtcaggatcctagagattggattacaggacccagtccgatggtgcacgagactggtccattacgcccatctagaggagacatgggttgcttcttccaatggctctttagaggtttgaggctataaatagacccacaaaccagccccgtcaacacaccaactcgcctaagactataatattcactcctaagcattagagaagcacaccaaagtgatccaagcacccatattcgcgagagagagctctgctacagttttgtgcttgtgttagttgatcttttggtgttggtctcgagatcttgtgtgtgtttcttcctcactcttgcttccattggatttctagctcccatcaacttgtg

SEQ ID NO: 76647 - DNA, 382 bp, Zea Mays
acaacagagtccaatggtagaccgtatggtgtaaactaactggttgatacaaaaacattaagtgaccgagtaatctaggacattcggtttccaaagttgtttatgtgttggttgttgttgctattgttagggaagaacaagtttttttgttgaaatattactctatggtaatctactgattattttttgtctattgcttaaggttagtcttgttggagctattgttatattgatttttctcactatatatctttttgggggtaagacgtcaaactgaagtatgaagtacttatgttatttataatacaaaaatcctttaatgatttatcatactaacaatatatgaagtgattttatgaagaatcttctgcattcaaggttg

SEQ ID NO: 76648 - DNA, 572 bp, Zea Mays
ataaataattaaactttataattcaccctttttaaaggtaaatgatcataataaaataacgatggttaaaataaatcataataatgattagacattggaaaaatgttcctatcaaaacaaagggagaatttttgaatatacctttaattcgactacacactccaataataatatattgctataatgtggtgtgtgtacttcatgttaaaaacattacctaattaatataataataaaataaatgaagaaatactatgtagaaattgtgcatcatgtggagtttttcttgtgcataaatttgaaatttagaatttaaaacttggtttgaattgaatttgaaaatggaaagaaatcaaatttggaatttaaaaactgaaaatagggaataggaaaccggcccaatcacaaagcccatctctcctttggagcatagcccacgtcccttccatttttatatgttttcttgccgcagatgatgtcatcgtgacaccagcatgacatcaagttagcaagcaacaatagccatcgttttgttcactccgtgaagacaacggctggtgggcccactggtc

SEQ ID NO: 76649 - DNA, 456 bp, Zea Mays
cacaagatatgagtttcacactttattgttcattgtcatatcattcattatggttttgttcgcatctctttctaaagaccttcgtcttcaaaccatcacttcaaagaagtgataacttaagaacgaaggttcagactttcaaagaagtggccaacaatatatatggtctcttatgaaatcttcaaaaaagaagagatatgacatcaagctgccgttgcacaggatcaatacaatatatatgcatgagggcggattagaatatgtgtcatctacagactacaacgaattagaatatgtgtcatcaactatacaaccaccatgagcgctttcttcgtcctcgctattgttgttttatattaacttctaacttttcatctcttttctcgtctccatcttcttcgcctagattctttcgcaccaccatagagggcatcgacattcctccgtcggcaagcg

SEQ ID NO: 76650 - DNA, 447 bp, Zea Mays
cttcctccgtgtgccagttccgttccgccccgccgcctgctgtttcgttcgccgcgagccgctcccgactccccgtcaacgatccactgcaacatggagttttcgctttatttactagttactactagatttatttactcctatatctgtctgtctgtctgtcagcatcaggatgggtccagtcaactcttattaaggcatctatcttccttcagtttcacttgtctgtcagcatcaggatggatccactccatcctcgttgagtagcgagaatgagaatatactctgtatctaaatcgaactgtttatatggacgcatgcacatgatatcgctgctacctgcattcgtccccagcgcctgctgccaccctatccctgctccattccaaccgcgattattgtttcctttgtttgggttgacggtgcagttacatacatgaatgtttt

SEQ ID NO: 76651 - DNA, 689 bp, Zea Mays
gtggttatgtgggtgacacgtatttataaaaacacgtcactaaaatagtttcgttagtaacgttttttacgagtcatttatcagattcaattagagacataaaatcttagatatgtttttgatcgtagtgaagactgaagacaggtcaataaaacgtgcattggacgccaattgcattcgactatctcaagtcagagatagcgacagcactaacattggacacacaacactgctattttagccccttgccgcacgggctgctactgctagctagctagcaacttctcaattcgtcctctccccttccttcaaacaaaacttcgttctcttctctctccggcggatcgacctctccccgctagctccggcatttatctccgccatgcatcgtctccgtcattttgctctccatgtgctccttctcgtcatagcgcatgcacccttgccctccgccgcggtagacacgctacggcccggccaagcacttgccggctggaagaagctcgtctctgccaacggcaagttcgcgctcggcttcttccagctccaaccagggagctcctactacctcggcatttggttcgacgaagtccccgtgctgactccagtgtggacagccaacagggacaacccggtatccaactccacctcgccggagctcaccatctccggcgacggcaacatggctg

SEQ ID NO: 76652 - DNA, 574 bp, Zea Mays
gtcgttggtagtggctgatgtcagcctcaagcttcaggaaaccaatactcttcgattgagtactgataaccttctctccagttcggtctcggaggcatcctaagctttcgtcgtcaataccgccgaagagcaatgctcctagttgatagccacatgatatagcataatctctcagctcctctttttcagccttagataacttttgacctattatgttttgaaaattgaagtccttttccttcgaagtatcttcgacgatttccttcccttttccaggcactgtggccagggtctcttcaacggctgcagtagcttcttctgcggccatattcagaagcattttatcaatatcagaaaatgtgctcttcagatttgtatcttcagccgttgcagcttcggcagttgcagcttcggtagctgtagcaccttcggcagcaggtgttatcttcgacgctgaggccggcggtggtgtttcttcaatggcttcgattacagtaataatcctccgccttttcgattacagtaataatcacgttgagggctccttcttctgtaaaagcttcatcagatgtgg

SEQ ID NO: 76653 - DNA, 2524 bp, Zea Mays
tgaaatgacgtgtcatgttcactggtccacacaaaaatggcatgtttctttaacagggctttagtggttgacaaataatcccaaaatggcggatgaactttctatagtaaccagccaacccgaggaagctgcgtaattctttgagagatgaaggaactggccactgagctattgcctgaatttttgttgggtcggtcacaatgccttgggaattgaccacatgccccaaatatgtgacctgatttgtagcatatgaacatttagacaactttatcttccagttgtcatggaccagcaagtccagcacttgacgtaagtgacacacatgggactccaaggaggtgttgtagaccagaatgtcgtcaaaaaacacaatagcacatttgcgtagtaagggagacattgtattattcattgctcgttggaatgttccgggagctccagtgaggccaaaggccataaccctgaactcatagtggccaacatgtgtctggaacacagtattatattcttcaccctccttcaacaggatttgatggaattcaacacgaaggtccagaatagagaaccaagaagcaccatataactcatccaatagttcatcaatgactggaactgggtatttggatttaagggtgagagcattaagatgccggtaatccacgcaaaaccgccaggactggtctttctttttgactaacagcatgggggaggaaaaagcactgttgttgtgttgtataacaccattgcttagcatttcttggacttgagactcgatctcatccttcatggctgtagagaatcgataggggcggattgacactggccttgctccctccactagtgggatcgagtgatcatagaaacgactgggtggtagggaggtagggggttggaatagctctgaatattgttggagaagtttgagtacaggtgcaggtgcagatatattttctagtacccaaacttgagctgaaggtggtaactcagttgccatttgtctgacttccaacagtgtcccagcaggtaagcttgatgaacagccgcgcaacaccactgactgacccatataagaaaaggataaccacttgttcttctagtcgacaaacatggggctaaacatttcaagccaatccattcccaatatgaggtcataaaatggcaggggcaagattttgaatgtagagcaaaaagacaacccttggagagtccagtcagtttgaggtaattcggtggtgcactgtaattgactcccattggtaaccttcacagacagtggacactccagcttgaccaatcctgacacaacagcttcatgtttggcatttaaaaatgaatgggaactgccagaatccaataaaatgagtaactcaatgccctgcaactagccttgaaatctgaatgctttggaatgtgatttgctgaacactgcttcttgggataataaaatagaaaattgctttgctgagtcttcatattcaccttcagaatcatgatgttcagtacccagcatgtcccacaactcctgaacagcatgcagttgcacatgagtgttgcacttgtgttccttggaccacttctcggcacagtactggcagagaccgcgtgcgcgacggtaagcccgtagggatgccactttgctatccatggaggatgttggtgtggtaatatgattcttctggttggccgtcagggatttgtcaggacgatgaggaggcttcagtgttgatcgttcatcgaatggcaccacactttggacagcctcgtggtgacgcgaagagtatgcctcctcctgcaataaggccaacgcacaggcaatatccaaatctctcggccgttgtacaagtataactgatttaatgtcatgacgcaaaccatcaatgaatctcatggtaaagtaaagagggcctgtggtgtgttcataagtaacaagcaaatcaactaattcacaaaaatgatccacataatcttggacagtgaatgtttgtttaacgtgaaaaagtttgcggataacaatctcatgctgttctcgaccaaatcggtcgtgtatggctcgacagaattggtgccaagatagttgtggaagttgtggttcaatggattgtagccaacgacccgctacaccagcaaaatgcatggtagcgaccttcacccacattcgctcttcagtagcgtacatgtcaaaataatcttcgcaacgcttttgccacagtttggggctagagccatcaaatgtggggaagttcaactttggcaaccctcccaggtttcggggtgtataatctctatggacgaaatcaccaggatgaggaaacgcaaactgcggggaagagtggtggtgccacatacccgtgaccgggtagtggaattaggcactggagtgaccgaaaccactttcccggtgaaaattgttgttgtggtggccaatttgggggccgtcggtgaccagggtcggggaaggtgggcgccccaacaccgagccttgtcctccaccggtggctacaggaatggagttgtcgacgcg

SEQ ID NO: 76654 - DNA, 426 bp, Zea Mays
gttcaagcgaaggtggcctagtttacctgaaatatttgtatcgctatagaagtcagttgagagagccagatgatgaatggattgaggccattgaagcgactagtgatgatttattgggggcttatatgaaagctgaagatgaagctatgaatatcgccttcgccgctcgcggaaagaaaaggttgaatagagtatttgatgtcatcgattttgtctatcctgattactactttccggctcggaagcaagggccaaaaaggaaaatcgcaccaacgaccccctctaccgagccaaaagcaaagaaaatgaaaattgtaactcaccgaccgaagtcatatttttggagagggctactttactgcctgctgcagagagttcgaagacagagattgttgagtctgccaaagatatcctcccaactttgga

SEQ ID NO: 76655 - DNA, 543 bp, Zea Mays
aggcggtggtgttcaatttcacgaagacgcgctggcggccggagagggagaaggctactggcgcgggtgaaaccgtggcactcaccagctgaggggctacggcggttatcagcgagctggtgcggctagaagcgacgtggttaaaggcatggggcatggcacaaccgcggtgaaagatgccaactccggttacggccgtaaagccacgtcgccggtgcaagcgattgaggaacaacgaggccacagtaacttgaacccatcctcgacgagatcttttcaccggtgaactcaatccacagaccagacgcacgaatcacggcgagcagcacaaatcaaagtgaagggtcaccggcggccagttcactgaatctgctgatcttttggttactgtatcattgcaaagctctatcagtcagtctgacataccatctcgtagggcttgaatctcaatttttcatgtggcgacttcctaatccatctttaagaaagttgttgctctactatctagcttcaattttactatagcagtcgctcccaaattct

SEQ ID NO: 76656 - DNA, 1087 bp, Zea Mays
gcttactgatcaatccgaagtgggtttagttactattacattgagtcgctgacggtttgcagaaaagcccttcacgttctatgccttcaccgcgccaggtccacgacggcgtcgagcgcggccgagctccgacgaactcgtagaccggtcaattggggcagagactagcgctctgctttggctgaaaccgaattcacgccctaactaacgtttcccctaacctaattccatcaatggctacatggtttgctctggccacggtgactgagaaccatgcggacgaaggaacgtgttcccggcgatgggtgatggtccaattcaattgaaagggtcgaggagcttgaggagggtctagggacactagaacaggcaatggagagacttgaactaacctgagttgagctggccgcggttgagttgttcttcacggtggcggagataagtttgggggaaatttgaaattccagagctcaggtgaatgatcggggctaattcttggtgattggatacttaactaccttacggagcttgcggcggggtcaatttatactacgggagggcggcggccgggaatttgatcggtgacgcgcggcggtcagagaaagggaaaatttactggcgcaatggcttggtgtccagcgtcgtggcaattgctccagcgatcaacggggagctagaatgagtcacggtgatgtggtagataagcagagacacgcggcggacaacggcgacggcataacggcggtgagaatccttatccgagggcggtgagcaaggggagaggtatcgcggctagccggagtggcttccagctcaccggcggcgatgatcttttaccccgcgacgttatcgactttccccgagtacgaattgggacgccggcggcacgaatcgtggcaaggagatcgtcggcggcgagggactgccgcgctagcgttctgatctgctcagacactgtaccatggcgagctccattcagtcaacctgacagccatagtttaggggtcgattttctctcatatttctatggcgtcttgcccaaagatctgcatcaaagttatagagctacaatccaactataactttg

SEQ ID NO: 76657 - DNA, 522 bp, Zea Mays
cctcggtccacaagccgtcacttggccttcaccttcgcttagttccttgaagccctttacttgctatcttcaccctatcaagacattcttgagtcacatcatattgagcatccattgagagaatcatttctttgataatgtgagccttgcttgaatgtcatctagatataaatgctaagatcaatcaagctctagtttgattctcatagattcatatatggactaatagtaatatggtcaagccaattcatgattcctcatatttcattcactttggcttgatcaatcatcttaatcacttcaacctctattctgatcatatttatgcatagtgatttctcaggtcttgtccatatattcaaaccaatatagaaccatattatatccatttgcattgtctcactggttatttaactttgtgttgaacatttgttcactgatcattatacattattcaagtatgttcatcatactgaatttcctgttcaacacttagcaaacttgttagacctttaaatgtgt

SEQ ID NO: 76658 - DNA, 489 bp, Zea Mays
attcaccaaagtggacggtgggttctatattctaataacataaggactcttttgaataaatgccgaggcgaaggggtacgggaggacatcagccgcacgatccagaatcgagggctaagattagatttctttctaaacgaaacggtacgcaatatcagccacacgatcatggatccgcggtccaggttagatcgcacaaagggataagtcatggctaaatttcggccacccgtgcacagatctacggtcacccagtgacatccccccaaatctaatcggggacgttgcacaaagatccaacggtcacgattttctctcctacctccgagctccgcacggcggcgacacctagaagcgcggtcaatccccgccggagttccgggttctggcgcaagagttcaccagcgccaaatgtgccagcgacaataggatgcagaggcaacggtgaactcgacacaagggtccttaccagtgatcacgttgtgaagc

SEQ ID NO: 76659 - DNA, 446 bp, Zea Mays
gatatatacatgccaaatattaagctttggttgtcaaaaaaatttgacgtctctatttttcaatgcctggcctcgaaatcttggctcgccactccatagagtacaccggtacatccataagcacagccatgggagctggagagcactgcccaggcttgccgatatgtgacgggaacaaacctccatatctctgggtgcttggatgatctagaagcattgtaacagttatgtttttgagtcagctaatccaaaccttggtgtcctgctctctgatctccaggtgcagcagcatctatagggctggggccaagggcctgcgtgagttaggttatcttagggtctgttggtctggctggtctgtccaagtatctctcttttttttcagcccgtctccttgggtcccaggggatgtggcgtggtgctttatgacccgccccgtttttttc

SEQ ID NO: 76660 - DNA, 281 bp, Zea Mays
tatggcacgagacgggacgatcaataagtcaaacgacgtgaaaacggcgtttgacagacaaatagagacataggatgattggaattcgaattgaggcacgaaacgatatgggattgagccgagacttcatgaatgggtttatataggtcatgatgagtgaagtgtgtgcttggttttaatttaggcgaagaaatagggatttgggcactcggctcggaaacgatcgctcaaaacgggaattttggtgaaatttaagcctgggatctcggattggcgtgaaa

SEQ ID NO: 76661 - DNA, 628 bp, Zea Mays
ggaggcttggtggaggtaagccaggcggcagatggagcagacgcacgatgagccatcgtgagttcctccaacaggagagtggcccggacgtcatggaacgtcggaaaggggcgaccgaggtgaagatgacggtcgatgtcggagaaacgatcgctaaggctgcgcagaacgttgaggaccaattttcagtcggagactggttcgccaaggcatctgccatggttttgaagcggcgatagtaatcagagataggtagatcaccttggatgaagtgccgaaactgagcgtcgaggtggggggcgcgagtctcccgattcccgagaaactggttctcgagagttagccaagtggtgcgggcactggcgcctcgctccatggccatttcagcaaggtccggggagatggaactggagatccaggacttgacaacgcagtccatgcgtgcccagtcggggaagtaaggcgcgggagtgtcgtcgaggatgtggctgtccagggagtatttgccaacgacgaggaggaactcatcgcgccagcgggtgtagttgttgttggcgaggtcgaggacgacgtgaacgagactccgtatgttctagacaacgacggtctgggagtggaggttgacgat

SEQ ID NO: 76662 - DNA, 284 bp, Zea Mays
tggtactcagtttgaagaaattcatgaaagacaacagcatattcagagagtattggagacttgtcctgatgaagcggacgttgatacaggacatcaggtaatatatccaaccccatgagctttttacacatcatacgtacattgtttgcatatttctttttagctggatatgaaccacactatttgtcaacatgatttctgctttgatgttcgaaacaatatgttgaggaacacaaatatcacacctcaactcacatcaacttgcacctttacgagatcaaata

SEQ ID NO: 76663 - DNA, 888 bp, Zea Mays
agctagcgctgcccctcgtggtgactttggtgtggtcgaatgctgaagaccgtcgatgcagtctttttcgacatattgtgtcttagtttttgcgggggatttttgcaggtatattacatggctctgcctcatttaaaacctcacccctcgggaggaaaagagtgcgggtcagaatgatactgtttggtgaataacaagggggtgttggccctgaggattcaaacaaaaaaattgcggagattatcgatattccaggaatgctctaggtcctcgctagatgtcgttgttagcctgtacgcgctgggggacgccttcgtcttgacgatgaatggaccctcccactttggctccaacttgccctgtgactctgtccgggttgttcggacgagtacgaggtcccctttgtcgaattctcttgggacgactgtgtggtcgcactaggccttcgtttgagcttggtatctgttgagggactgcatggcgaagacgcggtctccgtcgatgaggtctttggaggttggttcgtctacgtcggggacggctgaagtgcttgtccgtggtgacccatgttttatttcctacggggtcatggcctccgatccgtatagcaggcgaaagggagtgaatccagtcgcccggcactcgatcgtgttcagcgcctagactgcttcaggtagtaggtcggcccatttacccttcttgtcgtcgagaagcattttcttgatggcaatgaaaatcttgtcgttggcgcgctccacgacgtcgttagattgtgggtgatatactgaggcgaaggcaagcttggtgccaatggagaagcagaagtccctgaagtcctggctgtcaaactgtttgccattgtcgactgtgagctcggacgggactctg

SEQ ID NO: 76664 - DNA, 755 bp, Zea Mays
gcaaataccaaagtgatagaacaccacaaatcatgtgttttctatatttgaggatttgcaagtcaaatagtgggatttggacttatttgcaaaaagcaccccatgcactccatatggttaagtctgaattcagttgaataaggtcaactttggtactccatctctcagaattcttgaggattttgctcttggtcaacatagcaaacttgtagagctatgttaggagtacaagttttattaagtgactaagcattggtattgtacagaaattggaaataaaaggacttaaagtcgggctgacagtcagtctttgaactgaatattggctaacagtgaagttaggtgaactttgagatcggattcgaccatgatccagtgattgtttgactatgattactatagcaagattaaagctggagtatagatcaacaactttgttataggtgggttaacaagttatcacataaaaatttgagatcaagaccctgaaacttgctctgtcaggcgcctgaatgaagttcccatggtacagtgacctgacgaagatcgccagattcagtgtatcgccgtcggcgatcccgcgccgtgatcgtcgtcgccgttacgatttgtgctcagtgaagtgcagataactatgtagggtgaaaaatctagcgctggggatgagcttgggacactgttccgccctggccgctatacccacttgcctcacagtcggtccagataacttcgctggagttggccacctgccgctc

SEQ ID NO: 76665 - DNA, 1392 bp, Zea Mays
cgacatatgatagtgttaatgttcagcaccatcaacacactacagaatataccacgtaatgcttttgcggttggcgagattgacgatcagctcgatggttcgtgcaaagcacgaaacacaaagaattatacaggttcgggccactcaaatgtgtagcaccctacatgttgtgcgccgctgatatggaattgatcttgagtttgtggttacagagttgatgaagtctgagctctagctatgcctaacagaggatccaatcattttgtaggggtccctaacctgccttatatatccaacaaggttagggttacgagaggtcgaactgactaccactgccacgcctagattcgtggaaccaactttgactcatatgtacgcgtgcgattctgttggcatatcatctctgcatgtgcgagaatcagttacagaacatatatgcctacgttttcggacaccacatcattatcctttgccttgggccaaccaatcagcccaccaggcctgtcaatccgacctatcaaggtccttcagcggcatgtaggctgaatccagccatggagacccaaggggtatctatcctccacaagcccccgaggctaaagccaattttgaaaataattggcttgaggctccaagaatgaaaacatttctttgctcgaaaaccataccagcgatgtggtctaccaagctgcctctcttcgacatgtattttttctgatgccttttttccattgggtgcaccgcaaatgcacttaatgggtgtagcccccaagttttaagttgacttatataacaatcaactcgaaggtcccaaaaaatcttctcaagtgaatctctctttttttgttctatagcaattagagcatcaccaacagactggctaaacagcatcggctcggtaaagaaatgaaaaacatcctgatattatcttgcaacagtctcgccttcaaactcgccatcgtatccagctcgtcatttcctccccatcgctagccatatttgcctagcacttgagactcgccatctaccgatctcccgccctcctgctccctcccgcgctctcctgctactgctccctcccgcgctccagctctgtttccggcgcccgcaccctatgaggtcgccaccattgtacagatcgcgccatacattaattgatagactaaaatctgggttctgaaacttcttgtggccaataactcttatctgtaggtggctataatatagttcattacttgggcttgatttgtcagaccttttgaaatgagattacattattcatgctgagttgaatgagtttcagcaacataaatgcagttatattatcagagacagcttcaaaccggatccaaaagccagagtgtgagagcggagcatggaatgcagaaaaat

SEQ ID NO: 76666 - DNA, 1889 bp, Zea Mays
atgaacaagaatgttcttattgtaatatacaaggtcttattaattagttccattcctgttttgaaacatatgtatagtttatgggcgttcaatagtagggtatgatatgtataaaaactatttgaaataaaataattgtatggaaaagaaacgataaaatgaaaagggaagaaaagaaaatagtgacatttagtcttgattagtaataccaaccaggactaaaagtattcgccccatgcatgggctggagacccctccaagactaaaggtcacctttagttccgattgcctagcctaaggactaaatgaccggacctttagtcctggatatacagtcctgattaaaaaatcgggactaaaggggttttcaaccaggattgtagctcagttctgcactagtgctcagcatcagctatagagttttgtaacattgatggttcagaaataatgaataaaagagaaggtgcgtctgatccagctaatttgatattttcgtctgtctaagactattgtttttaggaagtcaaaaaagttaacacaggataatgtagattacctcgttggcccaatcaaacgtagatcccaaacagggccacataaaccaaggctaagtattctctcaagcctaaggagaaaaggttaatatgtctcatgggcaaattctcgataagaagaaatgagaaataagttatatatacataaaataggcactgatgtatatttaaaatagtttgctagtatctcacagaatttcatactatggttttagtcacctgaaattagcagaactccacaaatgaatagtgccatctgctgaacctgtagttatatatggagtgtccggaagggaaatgacagaaacaactggcgacatgaaaacatccattgtctggacgcattccttttccttcaaggcccatgcctcatttgacaaaaatatagcatggatcagtagcaattgttatgcgcggaactataatgtgtctatacacacagacaacatcgataccttggcagtacagtcttgagatccactaatcaaatattgctgaccatcatgtgtgacgaaatccaagcaattcactttgtccgaatggccgtgcagagtacactctgatgtgggagatttcaggcaccaaagctgatgtacatcaaagcatagcttattaatcacactatcgcacagtcattgtttcaaaggaaattaattacacttatcttggtatattttctttatcgaacttgcaggagaactgtgcatcttataaagagtaaaaaggcttacaaagcagcgaaacctgctaaatagaagcataaacagagggggggggggggactacattttggcaccaaccataacccaacacactaattcatccaagaagcttctctgcagccttgctaaggaaggaggttccccattaaaaaccaccttgttacgatgaaaaccatcttggtatattttgaatgttgtgttaattcaatataagaatcaaaacaagggagagaggctcaaacctttattgtgtgatcacttgaaacactggcaaaactgtcatttgggctaaatgccacttgaagtatggaatcagtgtgttccctaccaaatttttgtatgcacttccaatcatcgtcccagtcccaaagcttcatttcttcacaggtagagagcaaatatggctgggttggatgaacgataagcgctctggacgagcaaataccccagtctatgatcccagatgagtatgctgtataaatgagaaaatggtccattatgtaatactttttactatcattatttggagactagtttaaaacacccattattaattctcacgatgcatgttagaaaaaaggaaaaatttatgaaaatcaagattatctaatta

SEQ ID NO: 76667 - DNA, 836 bp, Zea Mays
gattatataaactataagctgaaacaaacatgcccttaatttcgtgatatcaatttgtaaggaaaaaaactgttccgcctgagtgatcacgagtcaagactccgatttcatactaaaaattcaggcgtgaccgcgtgagtcctgccacgcttgatacagcaagctagaccgagtccaaacgagaaacccgaaaaagatctagagcccattcgcttcagccagctcgtcgggtacggaacaggctgttaggggactcgtaatgacagcgcttgtgcggtacagcggtaggtgtccgcacactcttcttctattgtttgtctactcactccactcccgtcctcgctccttccacgaaactacgttcactagctcgggatgaacagagtcgcctctctctctgctagtcaggtctactgatcgtccaccacacggatcagtttgtaattaccgtgacttcattgccacagctacacaattgcacgagtcaaagtcttttggctggctcctagcacccacacaaaacaacctcgcccggaagcatgggcttcagtgcttcagattacaaatttgacttgctagcttgggcactaaaccaaacacacggagcgtaggcaaggcaaccccactagagatttatatacatgtaacaatcttaaccaggtttaggtttcaactttcaatctaagagcgtctcaagtttggtatagtttttttacttgctaaattggtaggtctagcaagttaacaaaaaatagaaagcctaaattgtatccttctcttacagtgtcctatatataatcactttccaaacgaatctgcattggaaaattatgaac

SEQ ID NO: 76668 - DNA, 2050 bp, Zea Mays
agtaaaatgaccatcagggtctgacgctcacaaagacattcactggttgcattgtgcttttaagcacataggaaaaatgtgtgtgtttatattggtagtgaagtgcacggcatcaggccaatgctgccaagcaacgatttttatatgcagagatgtatagtccaactcgtttttatcactgcccatggtttacccaattactcatactgctctaaaattggtatcgatttatgcaacatttttaggtattatacttttgagagagaactaataacaatagtcaattatttgtgatgctgccatcagggcaaacatttctcctcatattatataccaatttgttctataaagcattatttcgatctcttcgttgttcggcaaaaagagaagctttggaatagaacaaacaaggccaagaattcattttatctgggaaaatcaccatataactagcttttgatgaagcaaatgatgataactgcttggcaagaacgaaacaagactggtatccgcctaggatccatcttcaacaacagatagtactgctctcatacgaagaaatcatcaggagtagagaggatacaacaggtctctacaagatcttcatatttctatcacaaattatcaccactagtagtctagtggtcaagacatatgactcttctggctccgaggaccaagcacatgttaatgtccaattacacttcaagctctgtggtgatgtgggatttcatagttatttgtctactcttctcacttctggtagatcagaggtagataatggtaagcatgccaatgggtggaattcagtgtagttcggctacataaaccccaggtatatgtccattcaggaccgacctttaccatttagcttatagtgtataccaaacttgtcaaaggactatcccgagtcaattcagtgactataagtatttacaattctgagaggtgtatgcaacacaagcatagaggtcctagataggacgagtaaattggttcgatgggaacacacaatggtttttcacacaaacattgtgaaaaaattctcagaattacctttcgatgtactcgcaacttcgtgttgctaaggtactagctatttatctcaaagttcgcttcatgccgttcagcgacaaatagcaatgtgccaacatctggttgagcaatgtatgactgagattctagcatttattcatctgataaggtcttattgcttactaataaaatcccaatttgtgatatcttctatgccaaaaaggctttcatgcattatattatatatattcgggttacttcgggtaaaactttatgcatgaggagagaggagagaattaacttgtccatgttttgttgtatttcaatttaatttcccagattattcaagcactatagagcttgatatagttgttatggccacttggcaatataaataaatatatgatgccacacaacacaagcaaataaaatatagagctaaacaaaattgtttacgaaggttgcacataatgtgattttaggggcttgaacaacccaccacaatccacgcgagtacaagctctagcgtatctggcgtcaacgtgtgtgcgaccatcagggttacgacaacacaacaagccttcgtaataagtacaacaggcaaaattattgctcggtaattggggtacacgataaatccacgcaacgtgcgcaacaggcgtaatcgtggctcgatgatcacggcagacagacagtgcctacagggcatgcgaaaaatacgcgactccgcgatggcggttcgactcaacgggagttgtccgattaaacgagactgctatatagcaatcacatgacgcagccaagttcgtacgacatgaatactgcgtcgtgttgccagggcgcagccaatgccaaagctcagccgattattaatttagtccgatcggcatgtctaggtacccaccatacaatttaatcgctcgatgtgagttcaaaaagctcaacgcaacacagaaatttagagcgatttaaatattctgagtatatccttcacttatgttttaataattttctg

SEQ ID NO: 76669 - DNA, 484 bp, Zea Mays
ccagcaggaggatttgacacaaaactggtaaaggccttggaaggaggcagattccaggctgagtatgcaacaggagcgccgatgtttgacaccttgcctctaagcatcatctcgagccggctcaccaaatccacaacgggaattcttctattggtaacccaggttgaatcagcgaggcctcgatacaaataagctgggtatgctctgtctttcagtggctgaatgttcttgaatacgaagtcggcaaccacagcttctgcagtcaaacccctctctttcaaaaacccaacctcagcaagcagagccccggcctcagccacctccaggtctgtgggggactcggtccagctcggagtgcgaacatctagctgtctccctgatcgcggggggagggaattcccgtgattctccgcgataaaccactccaggcgccatcctttaatgctgtccttgagtgggatgtcgaggtagtcggtcttcctcc

SEQ ID NO: 76670 - DNA, 369 bp, Zea Mays
atccaacgaggcatatatattctccccaatgatcttccatgcttcccagaacttgtaggccacggatgacgaccagtcaaactaatcagtaacaaaaaaagttcggaagcgacggtgttaagaatccagaagagaatcagatgcggtattgttcagaataaatacactaccaaacctcctgaatcaaccagcgtatgactaccagattttcgggacaagcaaacatttatataggctcaatctgaagtgtcattaaacaaatcatcaagagcagcaacacacaaactagcacacaaactgctaggttgcacatggtcacgaacacacaacaccggaaacgagtcattttaatacatattttactgcctg

SEQ ID NO: 76671 - DNA, 305 bp, Zea Mays
cgaatgatcttttagtttgatccgtatttgttccgatcctagggacaaaatccaaatcgcacaggctagaatcacccgaattggccaaaagccgcactgaagatccaatgacatcccggccagcaacagatccttcaacaggatcaaacttcacggagtcaccaagaataggagagtctgatctctcccaccatcggctacccttgggataacccaaatcgatccaaaagtcttctctaaattgcgcatcaaaacatacctgggacacattcgtattcttcctatcttgcaggaaagcttgtgct

SEQ ID NO: 76672 - DNA, 621 bp, Zea Mays
tgcactctttagaattgaatcatatagagtatagagtctattttgtttaatgcttgaagttggtattgagatataggtggacctagagtggaggtagatagtataccttgaagcttgataacttgtagttggtcttgaaatattggcaggcattggattgttaagagatattgtataggatgagaagttgtaaatggatatgtgttctagttctaagatatattatagtctaatttaaatttgtatttgtcaaggactctcggaattgactattatatatgtacgccatcgtggtgtgttgttcctcatccaacagatcaagacgcaacacacatatacccaagtttagactatcgatgattcttctaagcacctgtgtacttttacatggtattcaaatccatggcaagttcatcttcatacctgcatgaatcctctcttggcctacctgtgttcgagaagtgatgaagtaccatgtgctatggcatgcataggtatgtatgttgccactacacaaagttgctcctcttcctggttggtgacaccaaggtgtcaccgaccaaaatctcccataaaggcgacaatgaaaaggagattaaggtgtacaatctaaagtatgaa

SEQ ID NO: 76673 - DNA, 1090 bp, Zea Mays
tagcgcttacagagttgagctatttcttctgacaactttgtggaaaagaattatcttggaccatgattgcagacttggaaagattgacacccgtgttactgtgtaagcttgagaagatatttccacccgacttcttcaatccaatgcaacattttattcttcatctcccatatgaggcatgaatggggggcgtgcagggacgttggtgctatccaatcgagagatgtctaaagactattcaaaataaatgtagaaataaatgcaaaatcgaggtttccattgcagaggcatacattctataggaggtgtcaaacttcacaacaacttactatggtgacaaactgccgagcgtgcataatccaccccctcgttacaatgatgatggaaatgaatcgaacctcagcatatttcgaggccaactcaaaagcgtaagtggttcgtccaccaagaccctgagacatgaagagtgccaccatatcatgctatatgtattgaccaactatgaagaggtgatgtcatacatggaacaatttcttcatgaattctggcgttgatcaagggaccgaactccacaggaatatgatacccttcttagaaagagtgcatgaaatggattgcccgatttcatttactggttcaaacataaggtacatgcatagtttgtcaaagagatcagtctatgaactcaatttagcatcttttaacttgcaaatacttgcagggtcaaagagatccgtctatgagtaccgagttgagacaagtaaccaatggctttgcttatagggcaagaaatattctgggtatgatgtcaatggataatgttttcacacaacaagctacgatcaaagtcgacccaatcgaaaaacaacttgttctggagtatttacgcccgaccttgacgaggtcgattattttggacaaatcgaagaaatatatgaactcaattttcatggttccaaacctcttactccagtgatattcaaatgtcatcggttttaccctcaagtgacgagacagacacattctaatcttgggatagtcgaaattcgacaagattccaccttaccaggagacgatgtctatatcgtgg

SEQ ID NO: 76674 - DNA, 315 bp, Zea Mays
gaagggtctgactgccgaggctgtggtcgccgattttgtttttaagaacattcagccgctgaaggacagagcgtacccagcttatctgtatcatggcatcactgattcaactcgggttaccaatagaaggattcctgctgtggacctggtaagccgacttgagatgattcttagaggcaaggtgtcgaatatcggtgctcctgttgcgtattcagcctggaatctgcctcctcccaagactttcatcagttttgtgtcaaatcctcctgctggtgacagtggtttgggccttagagtgcgaccctctcccaaaga

SEQ ID NO: 76675 - DNA, 981 bp, Zea Mays
gcctatcctatgcaacagcactgcgcctgtagcatccatgttgaatgggttacttgtcggcatattgttgttgctgcataagacaagaaaattggtcttgccctcgtgtttatccaactcgatttgatgtcaagagcttctctttctaggcccctgccataagggctccctgggggtagtcccagatgtgggggctaccttttgactagggagctatctccgagtatggtttaggaatagtgcctagcatcgtactctcaggatccttactttgttggactcaatctatcgaattatgcatccgagcctttgccgagcagagtttatgaggtccgttccttaattttgaactaggcgtaggcctttaggtacctggttcgaaaagtattaggttagctattctagggcagtggaaggtgtaggcttatggtacgagaccaggctaagcggctacccatctccggaccacccctgagaatgtggacttttcctttagaccaggtaatccagatttcatgataacaacaaagctgagaatcttgagagggggacagaaggagaaacatacctcggtccttggataaggatatgatgacggggccgattcactaggactgcaccgagagaaaaacctttcctaagtactctggatatgtgagatcttgcatagagatcatgagggaccaggtttataagggtggctcttaccaagctagaccacagaaggtgccagagatcaggtttatgcgagtgaccttaccagactgtgggtcttacattagcaaactaggtttacggggctagacccctaccaaacttttccttgtgtaagtgcctccaatcgtggtagccagttccttcctcttttttcttttaatttccttagagctctggtagctttggttgttcgaggctatcaccagactagaggttgatcttgaatgtgatccaagattgatgcttcacaacgttcccttaggg

SEQ ID NO: 76676 - DNA, 473 bp, Zea Mays
cgaagaagttataggatgcatccgtgatcgtgccggtgcaaagattataggcaccctgtcaaagagcatcggattcccgaagcttgaaagggatatcagctattacaagcgccaacatatcatagggagcctgttttatcccctaatgtgcctgcattagcttaaatattctaagtttagtcctgcaacaagacgacgaagacatgaaaaacaaagtcattatcaagggcttagaggataaagtcaaagagcttgaagactctttgaaggagaaagaaaaaatgttatgttcagtcgaaaggtctcttgccgaagtgcaaactcagaataaaaagctaagaaaagatctgtcaagtgctcaagcacttttgaaggaaaactctactcgacttgaacaagaaaacgaagctctaagagcaagacttaaggttgaatctgagaagagttcgaagctttgtgaagcggtcaaggct

SEQ ID NO: 76677 - DNA, 1102 bp, Zea Mays
gtctgaaaacagttgatcagggcaaactttggagctctgcagatcaagaaattcaaagaatttgccctgggtcgatgtagcaaagttgcagagccattgtagaggaacaactttgctataggtgtttggtcttggtaccatgaggaatttggagatattttgatccgaagatgggctatcaggcgaattttaactgaatctggcgcactattcatcggactacagaaaagatctcaccggcgataagaacgccaccgcggttggtgatgggtctgcagccacggtaaagatcatccacaatgtggcgttaaaatgctacggtggcaccacctggttaatcggcggtcaccggaccatcgccgtgactctgcccacgcggtgagctcaccagagcggttacagctccgcgattctcatccaattccggccatcggcctataaattgagcatggatcctgcttcttcaccacatcacacacacaagcccttgagcaatcgactcaatttcaccagaagaactcccaccgcccgcaaaaccattccgccctgctcttcgcgctgtcgtgaagaactcttccgtggccagcactccttgggtcagtaactccccaattgcttcctgttctagcttgtttatagcttcctattgctctcgggtcagtaacaccctctctgtcgacccacttttctgctcttgcccagcccaaattccagcatgtgcataacctctggtgaacccgtgaagcttccccaagcttcaatttgctcatccatgccgttggttgttcggaacgcgtttatccatccgatcatccgcattgtcgccgtgaaccaattgattcaaagccccgatggtgaaattgattggggggaaatgtgcgagaggggtccaatctggtgtctgccacacgggagccccagctgttgcggtatccggccggcgtaggctcatcggagttcggcctgtgctgttcaccgtcgtggacctcggcctgcgaagaattagaacatggggggggggtccttgtaaactgtcagcgactcatagaaataatgcagggcacccagttcgggttattcaaaacgataggtgtttattcgc

SEQ ID NO: 76678 - DNA, 334 bp, Zea Mays
ttgtatactcctatatctttatatatgcttatcttcataccctaatgtttgtttaagacatttcagttaacatgcccttgaccacccttgtttcttaatgatccaggagtagtcattttattttgcacatccttggtgatctcgttaattccttataacttcctttagtaatgaattctcacttcaactcttctgtcggaacctgtaatatccccaaaaaatgttgccaaaggttgatcttcggtgcgtggatgtgggaaaagggttgtgggtcgttggatgctaagtcagagtcatctgtggcgtcgtttcttttctcccgcaaaaaaaccct

SEQ ID NO: 76679 - DNA, 695 bp, Zea Mays
gctccatgcactcctttctagactgttactccgagtaccatcagatcagcctagctaaggaagaccatgagaagactgccttcatcacacctttggggtgttctgctatgtctccacgccttttggtttgaaaaacatcggggcgactaaccagtggaccatctagacatgcttagccgaccactagggcaagcgcgtggaagcctatgtcaacgatgttgtaatcaagacaaaggacccagagaacttcattgacgacctgcaaccagtcttcaatagtttgaggtggtaccgatggaaactcaacctagacaagtgtgtgttcggggtgccgacggggaagttgcttggcttagtcattagccaccagggaattgaagcaaaccccaagaaaattgacacaatcctgtagatggaacctcctagaactccaaagaaggtccaaaagctgatagaatgcatggcagctctgagccaattcatctctcggtttggagaaataggcatgccattctacaagtacatcaagaaggtgtatagatttgagtggactccggtgacactacaagcatttaacgcactcaagaagttcctaactacccctccggtcctcaagccacccaaccgagccactgcaaatcagtcagtcgatgacttgttcctatacatttcgtgcacaactcatgtggtcggta

SEQ ID NO: 76680 - DNA, 582 bp, Zea Mays
gggaggtcctttctcgcgggcggataatggaaggacagacctagataagatgacgcactgaagaccggcgaacaggaggaggagccagaggcgggagccccacctccaagccaagacttagctagaactccaccttgtaaccacctccaccacgaacaagagactaggaagcctctcctccctctctcgcctgcttgtaatccctactacgagctttgatcattaatggtgccgatagtgcaagtcgtcgatgactagatgtagggacattgtgcctgaaccagtataaatcttgtgcccactgcgcacatcctctggagctcgaaacacgcacaataaatttacttgtcgaagcgaggttagaaacatcgacaattggcacgccaggtatgggacttgtgcgttctgttacaaagttcttcaaagctatggatggttggcaacgacgttaatgcggtcagaacccccagaacaactgttcgtccttggagtttttgtttcatcgtcggcagcgaaaaatcaatggaccgagcccaagaagccctagttcccctgacgagcgattcactcggtgtcatcaaa

SEQ ID NO: 76681 - DNA, 540 bp, Zea Mays
gatagtaggtacgttctcagtcgaatctcacctttcagaagtgttatttgatattggagcaacacatgcatttattactacatcatgggtagaagtacataatctcctaataaccgccatgacaacaccaatccaaatttattcggctagtggagaagtctgaaccaatagaatatgcttgaatgtaagagtggaaataaggggtacagagttccctgctaacctgatagagatgggtactcagggaatagatgttatcctagggataaattggctagataagtaccaagcggttatcagttgtgataagagaactgtgaaattggtgtccccactaggagaaaaagtggtgactaagctagtctcacccgagtcaagagaaggaggttgccaccagatgactattgatagcaaggaggtcgatccagttgaggcaatcaaggttgtgtcagaatttccggatgtgttctctaaagatttactaggtatgccacctaagtgaaaagttgagtttgccatagagcttatttctgacaccgc

SEQ ID NO: 76682 - DNA, 549 bp, Zea Mays
cctcagatttcacagaagatgatcaaggcacaatatggtttaaaaagagaatctgtgtactagaaattgagcagctacgccaacttatcttaagagaagctcatgattcaacttattatattcaccctggaattactaagatgtacgaggacctaaaggaaaagaattggtggtacagtttgaaaagagatgtggctactcatgttgcattttgtgacgtgtgttaacgagttaaagccgaacaccaaagaccagcaagattgctgcaacctctcaaagtaccagaatggaaatgggaagaaatcagtatggatttcatagttggactaccccatactccagatggcaatgattcaatatgggttatagtggacaggttgactaaagtggcacactttatacctaggaagacaacttacttaggagcccagttagcagagttatacatgtcaagaattgtttgtctgcatggagtaccaaagaagatcgtattagattgaggaacccaaattacctcgcggttttggaaaagactacatgagtccatgg

SEQ ID NO: 76683 - DNA, 675 bp, Zea Mays
gtttcgtcgccaagccttaaccaacgccggaacctctggtgagagttttcctagccgcttctacattgttcatggcgtgtagtacttcgtaagctatgattctggggtctggtttgtccggggtgtcgtgcgctagtgggggggcatcgccgcagtacagcctcacttgtcgcgctgcctcgcgttgccgtgggctagctcgtcaccgcgtgtgcgcgtccctgtcgttgtcgttcgtctggaggtggaagaaggtgtctctggccgttggatctgtttaggacgggtaggattaggccatggggcgaggtcgtgtgggtcgtagatctcggtgtgtgtggctgtgatttaatcattcgtaccgattggggggcgccttgatttgtgtcgttggatgatgatcggtcgatcgggggacagtcgcagtcatctgatgtctccgccgttgatctcggatcgggcgaacacctgtgagtacctcttccggtggcttggatctaatccctgtcgtccatcttcaatcgtgcggtccagtgttcaccgtacccttttcgtcgtgttcttttgctaaagggcccctactgttttactaaattaacccgctctacagtagttctgaagtaattatcgtttggtccttttctttatggtttgacccctaggttttccaaaaat

SEQ ID NO: 76684 - DNA, 415 bp, Zea Mays
gctcggccgagcgcttgagcacgcgatcgaacacgtggaagtgtgattcttcccgagttcaaaagcccgttggccgaccaaaacgtgcatatcttaccaaggatcctgtgtagtgtctcttcaccgtgccaaggtcttcctgtcgtgtgtgagtcccgagtgaagatatggcctgggtgagaagatatggtggcctgaagatagctctgtcagcactgcccaaaccgagacaaaaccggtgtcaagtcatgtcaaacgatttgggtttgatctcaaacttctccatagtgttcctagagtattttggcgccactttgatatttggactttatggatttgagccttggaagatagggaacacttctgaactttgggaagggtttgaaattcagttttctgaatttctgaattttcc

SEQ ID NO: 76685 - DNA, 978 bp, Zea Mays
gtgcgtgtggccgccctctcgatcgaaaggattcgcatggtgcatgcatacatatgatatgctgcatgaatggatcgatcgtatggcgggccggagctctgcgctctgatgaacagtacgtgatgtgcacgactttctcgcagcggcagcagcgcgcagtgatcatcatccatcggtcatgatctctctgcgtcggcaagctgggagaccccccttgtatcgtagaaagcacgaccagcgatcatggttttgttctgtggcacatgcgcatgctggtactggtagcttcaagcggtctgaccctgtacgtggggcacatgaagagcagtcgtgcaatcctccagcagattttttttttctgaacaaaaaaatgtactaggacaatcatcacgggatagccaccatagatacctgccatgaattcacgacagcatatgctatacttgtcctgaatttttaaataccaagtcttatgcagttgatccatacacatatatctgtcgtgaattcgtagtaagtgtccacggttatccaaagagaccatttctgatgtttttctctctccaattttcccatgtttgatttcatcattagtttgtgtttgggcctgtattaaaagatggaccttgctacgattctatgagtacttcttgaaaggtactctctccatctgaataagaatgcaaatcctatgagagagatgtcgtgttgttggctccgatttagcgccaaacactggagtgaatcacctgacagtgtggaagcacggacagtccatggctcaggaccggacgatatgcgaccttgtgcgggagcggatcctctctgcatcgcaccagacggtggatatgcataggtaggtggatatcctgctagattcataggtgaatacggaggtgaggtgtccatgctggtgtgttgtgattagctaaacaatgtttcagactgatttattcagccttacctttctgatatgat

SEQ ID NO: 76686 - DNA, 383 bp, Zea Mays
cttattgagtgaggtgtggacaatacacaatctgcatattgctgagtgaaatatcatcaaggcccctaagtatgttttgacacattaatgacgatacaattaaaggtctaatgagatttgttaagtgtgtgaaagtcatatgtttagttttagtaattgagacaactagtggctaacttatactctattattgtcattgagatatgttaagtccacaccaaggttgaacaaggtaatgatggtgccgcaaggtgatcaagtgcttaattttttgcgaagaaggaagaaaaaactaaatgaatggatcaaggcaaatatataagctaggccttttggtttggtggtcaaaatataatagagtatgtgatggtgtttaggataaa

SEQ ID NO: 76687 - DNA, 786 bp, Zea Mays
gcgaaaggccactgaaaataaagaactcttgcaggaaggtggtagcggagaggactcccgattgaggtgagactcagaaggttaccatcactacctccaacgctggtgggcaggcgcaggcaggtaaccaggcgcaggtccctgtgttgtgcatcacagacggtccgatgcacagacgcggacggtccgagacaccgccagacagtccagatcattccatcgggcagtcttgcaacgcccaggagccacgacggccatgtaccttcaaaccacgacgaccaaaaataggtacgtggaaaactaacacagtaaaggcagccagtcgactagtcaaatgaggcccgccctttgatcaattattgtctaaatatgtaaaaaagaaggccaacccaagtgaccggccaataaagcgacctcgttcacccacccaggagcgacagcaggtaggaccgattggaccacctcaccaataggaaaggacgtgaggtcataatgttcaattaagacctaatgtgcctgcatggacacctccacctccatacgcatccgtgccatatcattatgcgttcacaccaacacaaccatatgtcctgaatcaaatgtggggtatgccaccatatacattcgggataccacaatacctcgcttggggagcaccccaatcatctgtttttgactggttggcacctcccgtacaagaccgattgagcgtccctcaatccagtcagcaggcatagtcccagcaagattgccggaccactcgaccgcaaaggccgaccaatctat

SEQ ID NO: 76688 - DNA, 480 bp, Zea Mays
gttgggttcttggggcccaggtgaatgtcctcatagtaagtccttgccatgtgggttgcttattaagtggtagagtagcagtaggttgctccatgtttattgatcactattaaatagatggttctccagatcaatgtgttttaaaactattgtacttaactcttctcttgttatgcacgcagagtggtgactgttatagctctttgttagctaggccacatactcatccaatggatcgaaaccaacaactagcaatgcttggttacaagttactatagcctgaatgcatgcatgtatgtacgtacttacgtataaatgtatgtgtttagatgcttcattctcccctgaataataattgatttgattgcagagagtcataaagaggtgacgcaattcatatcatgcaccaatgtgtccatgcgtgtaccgatgaggtagttaggctcaactaactttgtatctagccgtgttaaacactat

SEQ ID NO: 76689 - DNA, 734 bp, Zea Mays
ctctatctcactcatttgaggtctcttgtttgtttagctgaagaactcatttagtgataaaaggagagccttttcctagtgaggtgatcgagatttaataaccacgagattaatacctcattactgcattaagagcagtgtgcatccactattcttattagccttgtttaggtcaagtgagagtatgagcttgttactcttgcacatcagcatcacctagatgacttggtagcgattgagagtttggagatcactcgatggtggttctaggtggcccaactcaagctttaacaattgtgggtgattcactgccagcgtggcgaagaatcagtccctagggagcacatggaaccaccctaatcctctttttttatttgatctgattcccctatgagttctaattttggcttacggttgggctaggatgactctaagtcctttccccttcttgacttgagctctatttttaattctattctacttcgacttccctaatctatgaatttgggtgaattgggatttcaactaggcttcaataccatgataggtttataagaccattaggatctcactaagtccctaattaccaatctgtaatagccttaatgatgaatcggagatctagttctacgaggttgagggagagaggaccatgagttataccttcttatctaatgtcgagtgtcgcattggccaaaactgtcgcgtcctgtgtcggcatgccaccatcttgc

SEQ ID NO: 76690 - DNA, 677 bp, Zea Mays
ctggacacgcgtcaataccggacccatgtctaggtcacggcacttcctcccctgggaccttattatggggggtccggagctcacttggtggggtccaaaccctatccaacagccccgggttgctttacttcgggggtccgggttgtgcgtacaggggtcctgtgtcttctgggcccgacggtgttgtctccgagaacgccaccttaactgctcacgagatactcctggggttgttctccgcgtggctaagggaagccgcacaggcatcgtgccttcataccgtagcaaggggtacccctaatccagggtaccgacagaaactatgaccatagccatgaaatctttgttttgcaaagagacatcaaccccaacggctaatgtcagtgttggggaggtggatgcaaaggagtcctagaactagtcggaagcaagaactttccaattcttgcacatatgacttcagccatttatgaagctccttcaaaatcttcagatgtggtcacacaccatcttctttctccataaagaggccaatagtgggtgcaacaacatcctagagcaccttcaactccatgaccatgaaagcttctggatccttgagctattgaaaagtcatcatagcctacatgagttcttgttcagcatctgggcataatcactcaaaatgtcatcgggcc

SEQ ID NO: 76691 - DNA, 717 bp, Zea Mays
ggatgcactgttggtgtatacgtctcctggcgtgacctgtgctggcttggaggaccgaccgaagtcgcgtgttttctcgacaagcaagtagaaaatgacgctgggttgccacacgcatggtcaggctccttcatcaacgtctgccgtgtgatgtcgctaaagcctctgcaccatcaccggagaaagccctcagccgtacgtctgcccgtcaccgcggaccaagatctgcaaaaatccaatcacgagtaagtcagcccccagcaagttctttgtgtccctatctccgtttttcttagggccacgaataggatagtacgccgtgtggagcgcaggccaccatagctgactggggggagagagatggccgagagagagagagagagtggaatcgccgccgcgcctgtgggtcacccgtgcctgctctcagcttttggcggaggtcttgggtgctgggtgtttccccgtcggggtaccgccctgggggagctaccggcgaggtgggagcagcaatgtctatggcgccgtcgtccctgcgctggcgccgccgtgttgacaaccaggggaggaaagagatggccctgtagccgttagatggggttgacggcagggattagatgtgggttgtccaccgctggatctttggtgaacggctcggacttgatttcgttgggttaaagtgtaggccgtagatttcgaatcgggcggtcatggttggtt

SEQ ID NO: 76692 - DNA, 724 bp, Zea Mays
gcttgtaagcgaccttgccaatgcgttggaggatccgaaaaggcccaaaatacttgaactgcaacttatgattggcccgaggagcgatagaagattgtatataaggctaaagtttcaagtagacgaaatcgccctcagcaaacttgcgatcagagcgtgttttgtcgtcctgctgtttcatgcggttgagcgcccgaaggagatgctggtggaccatgcgagacatcaactcatgttgcgataaccaagtagacacatctgaatttgcaatggaatccacaggtgtgatgccaagctgtcggggagtgtggccgtacagaacctcaaatggtgagcgacccaatgataaatgaaagcatgtgttgtaccaaaattctaccagatggagccactaatgccttttagctggacaagtgtgcacgaagcagcgaataaatgtttccaagcactggttgacatgctccgtttgtccgtcagactaggggtgataagcggaactcatacgcaattgtgtgccggccagagtgaatacttctttccaaaaggtgctggtgaaaacacgatctctatatgaaataatagcctctggtaatccatgcagtctatacactgtcgacatgaataaatgtgtgaccttggaggctgtataagggtgagccagaggaataaaatgaccatactaagagaactagtcgactaccacgagtatgcagtcagcaccatt

SEQ ID NO: 76693 - DNA, 689 bp, Zea Mays
cctcgtggcgaggtcaattgtgcagtgcacggttgataaccagaggagaagtggtgctgcgattgcggggttctagtcgtgttgattggaagccggatcgtctgtgtgacatctccaccaaatcgatagttatcttcacctgacggaagatcgggcacccccgttcctatcaagtggtattcaaagactcaggtattaccatcaggcttaccctagtttagtttaggtttttcatcctataactccagataatctccatacaaaaaaatccgctgtcctataaccctgtttagccttgcaatttcgtttcagattgctttgttgaatttgtatccgtgtcgagtcttgttgcgggtttaggtcgtgtcataatcgtagttcaaccgctccatcactgttatttgtttccgccgctatcccatccacctttcctagattacaagtcgagacaccacgttactcgatttgccctcgctagccgccttgtgtgaactctcgccacgctagctctagattaggttgcaagccgcattgcattgcagccctccttgtttcatcatctggcgcttacctattgcttataccagggaggtttgtgcccctgtgttctatagccgccgctagccgccgctacggttcctaccaatttgtgccctggaaaaccataacttgaggtaccttccataaaa

SEQ ID NO: 76694 - DNA, 748 bp, Zea Mays
gtagcgtgcaattgatcgagtttacaagcaacaggagaccctaaggatgctagaacatgaaccagagaagcacgaaccgacctgtggatggctgtccacggtgaggtgtctcacggcggcgcggctgaccgaattgggggaaattaggaattcgggggctgtggggatattcgagagcgaggaatggtgcactggctttgtaacaagctagcggagtaggcagggacatcaatttatagtgactagaagcgatggctccaaatttggggggataagcttgtggccggagcgaaggtgagtcaccggagttcgctcaatgtggaatttactagggtagagtcctggggtagtaactaaccatctcgcacgacactttgcgacgtggtaacatggtcagtaacgtggcggatccggggtaacggcgaccctcacgactacggtcgcgcggccatgtcgcggggcaagtgggtacggcgaggctgactctatccactctccttcggatctttttacccccctgcgactatccactcgccacagagcacaaatcgtagcaccgacacggagatcactagcggcgagattcactgaatttggcgatcttgttcagtccactcttcatcactgaacaccactccgagctgcctgacagaccaagtttgggagcaatttaatccaaaagttgtatagcaccaggcctagctcagtataacaaatttgttcaccaatattagggcttcaatttttc

SEQ ID NO: 76695 - DNA, 981 bp, Zea Mays
ctccattgcctttatttgtaaaatgaatttttcatttggttatgaatgatttgaaaagtcatgtaatatcttcattgaaaatttgcaaagcttgcctagattcaaacacttctgttgttttttcatgtatcaataaatgaactgagtcaagagataacacagattttaaaaccatggtgggtaataatcttgcgtatttgtagttttgtgacaaccgaagcggaagtatgcgtgccctcatgcatgagcatctgtgtgatatggataggggtagagatgtgggttcagttttaatttgtagcgaaattacttgttaagtatgcatggaaggaacctgtatggtcacagttgagtatttgtgtcttgtgcaatctgataacttctttgttcttggatcagttgatgcatatctatgagtgacttgtttgctatgccccctttgattttatctcctactcattcctggcatatcaatctcgaaaaaaaaaactattgccactgttctgtactccaactagaagactgtctaaacagtttacattttactgcattcatgggggttaccaaacttctgttgacagcacctaaacaccatgcctaatagtgaacacacctaaagtttaggagaagcgcaacacagacaccattgctgaaaccagcaactaacataacagaaactactaactttctgcaaactaaagtcaatttccagactgctcccaacttcagcttaagtcaggttacttttccatcagtattcttagatggcagcatcacttcaaatgaacccacttcctagtttgcaccgactcctcaaaactttttttcttatagttactcatctgaaacttgaagactcactgatcaaatacttcagtgcatctggtagcttgtttgaaccccaccggaagcctcctgcttcaggactgccacccgtcttcacattcagcccatactgcaaccatagaatagaattttgtg

SEQ ID NO: 76696 - DNA, 298 bp, Zea Mays
gaagatagagttcgccttggagtgaggaagtagctgccgacgtctccaccaggcattgatgaggcttcaagcaagcggcggcgatgagcactggcaagcaaccaacaattgacaacaaccttcttccccttctccatttccacaaccctaggtatggatctgatcaacaactacatagattcgtagtttggtactcaatatcgttgaccaatccccatggatctggaaaatagaatctggattaggtaacactgctatagtaattttgattacgaagttgtcctgtaacaatatgaat

SEQ ID NO: 76697 - DNA, 477 bp, Zea Mays
gcaaagagctagccacggcgaggtgttcacggtggcgcggaaacccgatttgggggaaagggaaattgggaggctatggtggacgatcagaggcgagagctggtgcactaggtgcgtaataacctagcggagctcactggggcatcaatttataaatttcatcagcggtggcgtccaatttggagaaggcgtgctggcggctggagagaggggaagttcactggcgcgggttaccgtggcattcactggagcaacgactcagtcgatatataggccgtctatagcgacctacgacgacgtggtaacaaggcagtagtgtggcgtgctcaggttgacagcgatcatcaccgcgacggccaccagccacgtcgcgacgtaagtggatgaggtgacaaagcggccacagtgctccgacttcatcctgtgctaaagatgttttcaccccgagtcgttatccggacgcccaggggcgcgaat

SEQ ID NO: 76698 - DNA, 367 bp, Zea Mays
attgcgaaggattgaaggggattaaataccttcctatttgattcggttagagatgtattggagcattagagagaatttattctcctccaatcctcctcaattcattcataaccgaacaagccctaagcaagcagacaacccactccacctccctcctctcccctctcacagacaagcatggcccgctgtcatctcaaagatccgaacctccgaacattaccttccatccattgcggcagcgcatcatacccaaccagatgccccagtactcccccttatgtttgggagcaagtgaaacatagtggattggagcgactaaaatccctttactattcaaaattgaatagtaagagaattttagcccctt

SEQ ID NO: 76699 - DNA, 357 bp, Zea Mays
tgtgacacaattttgatttgaaaaagggacaagacatctctcctatacccccttctggattgacccaaacaatccagcagggcgattgaggaaagcccctgccaactctcgtgggcaagctgctgctggtacctcgcgtccctctcctggtcacggatctcccacaccacgtggtcgtggtcgaggtcatggtcgcaggatgggagctcgattggatcatggtgttgcaactttcttttctatgtgcaggaacatatcttctgatgttcatgagctggcgaggcgacagcgggagactgacgacaacctccatcgtcaggcctcttccatgggtatgcctttttctcctcgctcgcc

SEQ ID NO: 76700 - DNA, 354 bp, Zea Mays
ggcgaatacaatcatctataaatgaaagccacttgagcttttaggaaaacagattgattggcaacccttctctatcaacacagtcgatccggtggataagaaagtcttggtttggctagatgtggttgataaagacaaaggcaagaacattatcattggtgatcctcacacgtcaaatctgtcatgaggactggtcacttagaaggcttcggacaggagaaagactaataagatcggaggcaccaggtgtaagcaatatcggatacccgatcatgatcgtttgtccagcatgcgccggatgatccgagaccttaggttgggcggtccggactacttgtggacagtccgaggacg

SEQ ID NO: 76701 - DNA, 363 bp, Zea Mays
caaacaccccttactaatgtggcataggtcgagcttgtcgtgttgttggatcttctctcgcaggtatccatcacaacaagaccggacgcaaggaagatgagcatctccctgtgtagcttctccttgtgggttgactatctgttgagttgtcccccaccctgagaaaactaagttgcgatctccaaggcctggagccctggaagcttagcctaccaaacaaagttaagacattttattgtgtgtttggttggggagccaattggaatagaacggctctatcggtaccctggaataggggtaccccttactacagtataagtacgcggagctcgcgcgactatcactagtcgcggggtgagcagc

SEQ ID NO: 76702 - DNA, 473 bp, Zea Mays
ggatacttgttcttgatggtgacttcatttaacgatcggtaatcaatacacattctcatactcccgtctttcttagagacgaacaggactggtgctccccaaggggatcagctgggacgaatgtatcctttttgctggagatctgcgatctggagcttcagttctgctaactcggtaggagccatgcggtatggtctctttgcgatgggtgccgttccaggaatcagatctatgtagaattccacttctctttctggtggcattcctggtaactcttctgaaaacacatccatgaattcttcgaccactgatatgctttctgctgttagattgaacatcatcgggtcattggcgggtggctgggcctgacaagagactgactttccctagcggtcggtgaggaggactgtcttgcttgcacaactgatgatacccttgtgtttagttaaccaatccaccatccctaagatcac

SEQ ID NO: 76703 - DNA, 964 bp, Zea Mays
cgagggggtgtctcctccctgctacctgtggaggaacgaaaaaggagagagagagacacacaccttttgatgcacttaccctgaggaggcagagcatcgctcgttggcttgtgtcagtcggacaggacatgcagcccgtaggcaggagttaatgcgatgggacgtgatggcccacgaggcgtccgttgtggcacgcatgtgcaaggaattcgatgagacagagcctgctcctgggtttgattcttaaaaacgaggggtttggcctaggcctcggtgagtccgtcggtccctgtatatatgctcgagaggggatccctcttggttcttaccttgtgtctgccttcagccctagccgccaccattcccctcagtcatagccaagagtgtgcgtgtagagagaggaaaagagctcgcgtgcccttctttgccaccttcctccgctgccatggctaaaaaaacttagtgtccttcctccccacgacccatggcccatctcctccatgaccgacgagcaagagccgaccccgcgtgggctatgtggtcagcttcacccccttccacgagccggggttcggggtcccataagccgcttcatgcttgcgctcccacattattatggggtgtagctccataacttcaaccctaactccatagcctaggagaccatcttcacgatgatttgcgaggggtacctcgggatcaaccccgttgggacttgtggctccacctctttcgcgtgaagccgctctcccttccctcggaggtgagcaaggtgcgccacatggtgagtgccagaggcagcactcagatcgagcatagcactgtatccttgctaacctcacctagttgaacaaggggtggcagagccgctggttttatctacgcaacgacaataggcggttgcgagagtacacccagcgggtcatgaccgtggcgtgggagcgctggtgatggggtacgctgc

SEQ ID NO: 76704 - DNA, 422 bp, Zea Mays
tgcatcttggtcaaaaatttgatagtgaagatgacagggagtgggctaggatatgctattctagttacctacttgcacatgggaaggcctagggctatgcatgaagttacatgaccgagagctccaccgttgtgtgggcatccttgcaaggggctccaacaaatactaggggaaacctgcatgcttctcgacaccttgataaaaatactagtcatcaataggagcttgtatctttatcatattttagcttctgcatctacattgtttaccttggttatgtgctttacctatctaacttattttgtgaaatatatttcccgattcacccccttcttaggtgtcgtggtcccttcacctagaaaaaacgtcaagatgttagtctaactagcctaaacatttttgatgactagagaacttgaaat

SEQ ID NO: 76705 - DNA, 382 bp, Zea Mays
cctcctcaccaggagtcctatcttgggatgttttcgtcaggcaatttgaaaggagattctacctggtcacctttctgtagaaaatgaagattgacttgcagtcctacaagcaggagaagaagtctgtcacagagtatgaggtgggcttcaacaagatggtccgctttgtccctcatgtggcttataatgagatggagaaggcgagccagttccgtcagggtctgaagccttctatcaggcatgcactgggggcctttccgttggtggacttccgtaccacggtggagcaggcgctgggtgtggagatgcaacaccagtataccatggagtcgcagaagtcttcgggtgttgatcagcctcgtagctaggacacgaggagggg

SEQ ID NO: 76706 - DNA, 294 bp, Zea Mays
aagacaagtctagccagaggagcccgcatgacgagcaagagaagatacctacccactgcggtagaagaccttggtccaatgtctctctccatcactctatgcttcgtattttagtattcctggacccacttgtcggggcccagtacaacccttgtacgtgctccccttggtctataaaagggagggcacatgtattgcaaggggaaagagggggagagaggggatctcttgagctctcctgtgctacacgcccacacggactcaatcacccaggggactagaaccccggggaca

SEQ ID NO: 76707 - DNA, 890 bp, Zea Mays
aactttgctatagggattaagacttggtcacatgaaaaatttggagtaaaataagcccaaagtcgggctgtcagactgcccttggtctaaattcagactaacagtgagattggggcaatctttgaactgggattcgaccatgatccactggaaattcgactagggatgctatagcaaaagtgaagatggtttatagatctataactttgatgcagatgggtgatgaggttgtcacaaagaatttggagaaaatctgccttgattgcgctctgtcaggcgctttaaacagagattcaaatggtatagtagcagaaatatctcagatacggcgtatctcgccgccagtgacccttcgccgcgattgacgtcgatcgtcgcaattcgtgcgccgtgacttgtggataaccgtgggcaaggaaagatctcaacttgggaaagggagagagacttatcgccggactgttcaccgtgacacttgccgtgctacggacagtggtgtcctcgttgtagttcgccgtcgattgtagccacaccacgtgcttagaagatctaccacgtcgcagtagatatccgtaggaggtcagttcgtcgccggaggcattaccccgaggagcgccatgatagtttatgtcggtgactcacctctcctctcggccgccggtcttccctttcaaaattggacaccaccgcttagcgcgcttataaattgatggcctggtctgttgcgccatgttatcacgaagccagagcacccattccagccttcaattagacaacatagccggagaatttccttcttcccccaatttggtcgactgcgccgctgtgaaccacatcatcgcggctagctgcttccaggtccgccctcgctctttttgtccgtgttttag

SEQ ID NO: 76708 - DNA, 594 bp, Zea Mays
cactagttggtaggatccttgggtcaaaacacggacagttggtgcgccaggtaggggcctactgcgtttagacaccacattcccaccaaggctccagatggctaatccccagcaccatttgtggctcagcatagtgatctggtttgggagtcttgagttcatgtctcttggcttcggctatgacatggtgctctttccgcctagacacccaaccgatgttgactatcgtttctcccaaccagggggagcaaagccactcctggtacactggccgatggaggaacatctagacttccgtctctatcctcctcgtcacaggagacgaagacggaacaaacacaaccgcgccacgggcagcgctctacgcccaaccaatgctctcaggccagctgacgatgtcgactcccttgcgagggacctatcgtgcgttagcttcacacccggagcatcgacatcaacacacgtcgctccaacatcgactccattgaccctccccttcagatcagggagtgtcggctccaccgactccccctcccatgggtcgggtgacgccggcttcgccagcactcccacctacagactgggaggcgccag

SEQ ID NO: 76709 - DNA, 500 bp, Zea Mays
gcctgatagcgacatagccctagagagtggcctagacatgacctcttgtgttgttttccatgtcgaccctcccgagaagcaataccaatatatatgctaggttggctcgtggttggcgctattgctacttccatgggccctagccatggtctcaccatgcgataagggagaaggttggcaggtcacgtacgtggattcaacgatggtggagcgaggaggaggcgaaggagccaacgaagagacaacctacgacagaacggataaggaggctaggtgtaatggagctttgacttgaggcgaaggaggagcaagaagggatagatgtggtggcacgaccattcgaggtgatactcatggacaaatgagctacaatcaatagtgaggtgggtggaggggcaacaaccttgacaactgggtgacagaagatccatcaatgtgtcacactcatgcatcaaggagagattagttggctgaaaggtgctagtttggttttggtaatt

SEQ ID NO: 76710 - DNA, 510 bp, Zea Mays
agatggtctttgcatgggtgcggaccgttcggtctcgaaggctggaccatccgcgacactagatccatgttgcgacccttgtccgaccataagggccaaaccatcctgcgaaagatcggaccatccgacctcaaggaccggactgtccatggcctaggacatgtttcttatgagtgtactcattatttaaactttacttaggattcagctgattttccatcggctctagcattacaggggtgaagcctttcctatctatacttatgaattgataatcagaaaagtcaactcctgtgagacatgtagcagtctcataggtccaaagtacaggggcatcggccacggcgatgcaggccgatgcatcagcatgtacttgttctacatcattgcctacccattgtagtaacatttgatgtaaagtagaaggtatacattgattagcatgaatccaatctctgcctaagattagactataattctgtcggggaccgtaattaggggtacccccaa

SEQ ID NO: 76711 - DNA, 349 bp, Zea Mays
gaggggtcgacaacgatgacatgagtgaggagagggagatagagcggcagccggcagggtcagggggaggttgagggcggcgaggtcgaggggggagagaagggatgtgggatgatcctaatattgtccattgaatttgagtgagtaagagaaaggttatcctgcgatctaaaccattggtttggtgtgctaagtttgggtgtaatttatttgatgaattcagtggaggttatgaatgtgatggtgatttggttggttgggttttgcaaagttcaaaccgatgtattataaggtgatgatatagataaatctctactatacttaaagcaccagtttcaatggtcgtccc

SEQ ID NO: 76712 - DNA, 548 bp, Zea Mays
ccgagtacgtcgtgcatgtgctcgctggcgtctatgacaagactctcaacataacaagaaggaacgtgatgctgatcgatgatggggtcggtgccaccatcatcactgggaacaagagcaatgcaataggcgtccccatgaacatgacggcgacaatgagtgagtaactctggagatcgatatttcattgcagttgagctgtcatggatgcatactgtaaataagaacagaactattaatttgttgctactgctgcagatgccttgggtcacggcttcatagcacagaacctgacaatcagaaacatggcagggccgaaaggcaggcaggccatggcgctaaggtcaaattcgaacaagtcggtcatctaccggtgcagcattgaaggtcatgaggacaccttgtacgtggagaacgggatcaagttctacctacggacctcgatcttgggcaccatggactttgtgtttggcaatgcctaggccatgttccggacctgcccgctgctggtgcgccgcccaccgaaaggcaagcacaatgtgctgacg

SEQ ID NO: 76713 - DNA, 1557 bp, Zea Mays
cagagttttggctctcttttgcttcggcacggaggaggtttttggtgcacttttttgttttaccacctttttgcatgcaggaaagcaatagtcaggataaatgaatccgatgacgttaaacactctatttaacctcctttttcctcgaccaccaaaatcaatgtttaaagcttcgtcttcagcctttgtaaaagcacctaacatttcgtcgtaggttgattcaatagcttcaagccattcgtcatctggttcaccaaactgacttctgtaatgatatgtatatttcaaatagagcaaccaccttttccgacactttggtttgagctggcatcaacatccttcggcatttccaattcactgattaggtgccacagtttaaaagctatgtgctcttgaaccaaatcccttatgcaaatgtagctgcacacaacgttaaacactatgaggcaagcttgggacttctttgtattcacgataattggcctttttattccgatgcgggaccggatagaccactagatcacacctttaatatcgcctctcttgtccaagccattttcacataaaaccattgcttcatccacgagcatagacatttttttccgaaatgttggtatggggttgctggcatctgatcagtatacgaaggtataacaaccaaagttattatggtactactcttttccagtagccttcgtctgatacaggagctcatgaatattacaaaagcagtctgcatttggttctaatccttaactcctcactgcccaaatgaacaccccaaccttaattaaggcttcgggggtaagctgataaaggtatatatcaaatcttttaagcacctcaaccaacatcttatgcagagaaaagcgtaatccaaccttcataaagctttgaaaaaccaccactttgtcttgttcagggagtgggatagagttcttccctctggccctcactatagacacatcacgaaaatacatacccttcatggcctcaatgtgccctttcttcacggtacattttccaaagttcacgtggcttggcctccacggccgatcttcagcatcatcattaccactgtcaacatcaaaatccttgttgtcctctaaatcttcaaacagcccagctagaatctcattggttatcttctctacattggtcatttccatggcttcgtaaaacctagctagagcaagaacctcacactttttaccttcagccatctcgactcaggctaaaggagcaaccgaagctaaaaataaatgcaattcaatggcctaaaaagcagcaagatagctcagcaacatgataaatattttatgatgatcatcatatttatacatgagaaaccactgcaaagtgcccccacaattcagaaaagtttcgctatcttagtgatgggaaggtgtatttttggaccttcggcataaggcctctatccatttcgcagcctgagtttgttacaaagaaaaaactaatactgcgaggggctactgttgggggcctttgtctttctaaggtcctaaaaaccacacttaactactggttggcagcatg

SEQ ID NO: 76714 - DNA, 521 bp, Zea Mays
gaacaagcacaccttccctatgatgatcacgagagagcgttaaagttgctacatgctctagatcagagggtttcagaggtgaaggcctcggcgattatcgagtcgcccaaccactagacccaggccaagatcgagaacctaggtggtgcaccatggccctagtctctggaggtggttcccaatctaacccctcatctactatgttttattttgtcttctttgctttctgtaatagaggagcaggtggagagccttagggatgaggagctagcttttgtggccagtcggttcacgtagtttcacaacaacagctagaacccgtgacatggcgggtcgaaggatagatgttacaactgcggtgaccccaaaaacttcatgcccagttgccctaagaagggcaagtaggaggctggcccgtgtgaccatcactttggttgatgcaagggcaaacaagagtactccttcggcaaccacaagtccaagggatgatttgaaaaggaggcactcaagaagaagtacct

SEQ ID NO: 76715 - DNA, 459 bp, Zea Mays
cggaaattgtaggactccactgtattgggatcaaactggtgaaaggcagttctttgggccagaaattatataagaggcagaagaacaagtgcgaatgataagggagaatttgaggactgcgcagtcagggcagaaaagttatgcggatacctggagaagactgctagagtttaaggagggtgatcacgtgtatctgaaggtgtcaccgatccgggtatgcgaagatttaaagttgaaggaaagttatcccctcgctttattggacccttcttgatcctgaagcgagtgggagaagttgcatatcaactagaattacccgatcatcttgcagatgtacattatgtgttccatgtgtctcaactaaaaaagtgtctcagggtacctgaagagcagctaccaatggaggatcttagtgttcaagatgatctgacttatattgagtatcctatcaagattctt

SEQ ID NO: 76716 - DNA, 632 bp, Zea Mays
aaaaaatattttctaaataaatttctttgttttattaaatgtatggagtgcgcacaacattaccgagaattaactatagggggtgcactataaaatcctggacctctccgtaacgatcttaatacggtcctagaccgcgggtttatttctatatagttcaggggctcatgcgcaaaagtgcacggctgaaatggtatcaacggatctcgaccgtccgatcaggaatcaagggcttagattagaatctggccaccacaatccggtacgcaaccagtgtcgttcgatctttacatgacgctcaagattcaattatcccaagatcaaccctcacccgatcgattcaatcggacggagcacgttactctagccaaaacggtatcaaccaacaaatcgagaccatagatcatgcgatctacggatccaacctcacctacccgtatctaatctaagccacacgtcgccagatctacggcgctggcatttctccctcacccggctctcttgcgcgcggcggcgagctgccgctgaactacccaactggttgccccgaggtacgcccaacttcaaatccggtgaaaaaggaagcgcgaggggaggcgaaactatccaggggcttaccgacgaccgaggag

SEQ ID NO: 76717 - DNA, 411 bp, Zea Mays
gttagttgtcattttgctctaccaagttgatatttttactattacatcaactcaaatattaggaaaccaaagataaatgctcatgagatgtacatgcacattgccctaaaagatgactcttcttccaacaagaaaaatattacttttgatgctaaccaacataagaagaccaaagacaagaccaaaaaagtcatcattgaaagcttacgtgacgacgaaagtggtgatggaaagattgctctcataacgaggaacgctaccaagatgctcaaacgactaacaagaaggacatcaagatttaattctaagaataagttcatcgcaagaaataagaggaaagcccgtcgaaaggacacactactacaattatggcaaatttggtcacctagctcatcagcgtctgtacaagaa

SEQ ID NO: 76718 - DNA, 471 bp, Zea Mays
tggacgacgatgtcgtactccgttaaactggtttgaaccaggtgaaagaaatttcttcaggcctgatatggtaaaagagatagaagagaaggttcaatgaataattcataatttgaagaaagctcaaactcgtcagaagagttacgcagacacacaccggatacccttgtactttccagttggagactatgtctacctgacagtttcaccaatgaagggtataccacgtttcggggtaaaagggaagcttgcacctcggtacaatggtccttttcctatactttaacaatgtggaccagtggcataccgacttcaactacccgaaaccttgtctgcagtacataatttgttccacgtgtctcagttgaagaagtgtcttcgggttcccgattgaaccattgacgtaactgatgttgccctagaaccagacttgacatattctgagtatcctattcgagccttggatcaaaa

SEQ ID NO: 76719 - DNA, 925 bp, Zea Mays
ctcgcttaatctcatgtcaaaatgatcacatctaagatgacatgaatcattcttccatttcttttagccacctttcatactctgattgttgttctactctacttcttgagtggctttggtaggacgaagatttagcctctaaatgcctctttccactttataactttaacccctcttgtgtgaccaggatgctccttattttcgagtgcttgtgggagcagtagctctccttgtaagacttgaagctccattccctcaacctctcattgaatgtgtccaccttctgtaagagtttgttagaattacctagggtgacaaggatcctatcagggttatatatagcatgcccccccccctcgcgagaaagaattgcatagatctaggctcgcacttgatagtatgaggcgtaatgccttgccattccattgcctcaactttcgtgtcccaaagcagcattttcctgatgtagccacgtgagtcgagatgatgaggatctatgtacttttgcacattcaccttatatctagcactcactaccatgcatggccgatagtgatgcggtatattattggcaatttcaacaaaaccagctaggaataaagccacttttaatgaaattgcatttaataaaagttgctcaataattatggatatatctttggatgagtatatactcaagatgggagagaggaggaagggggtgtggggttttgtacagtagaaccgtcgctattggctcaagccatcaaccgacagcgataatcatgatatcattgccgattcattgctcaaatcagcagtgacaaattacaaccggttttaatggtcccctgatcatttttagggagtgttttttggttccgttaactaaagtgtagctcgtgtcttatatcaaatgtttgaatatcacttataagtattagac

SEQ ID NO: 76720 - DNA, 1288 bp, Zea Mays
gtgagggggagaggaggaggaggtggcgtaggggcgtaaaccttccattgatgcggatgcgagatttcggggctcggacgcggacacgtgggtggaggctggaggcgctagggcaggggcacggtggatccatggcgcgttccatgacgggtggtggggaggatggcgggggcacggtggatccgcgggcgttgatggcggggaccgaggcagaaccgtgcaccatctatactgtggatgcctacagtaacgtcttaaggagtagtagagataactctatgtacacaacaatacatacatgagaggaagtaagatttgtgttcggaggaaaagttagtgtgaactcactccaaatgatgaatcgctgggattcggatggtggttatgagacatgggttataatggttcagtgtagtgctaatcgtagtattgttctgaagcgtgttacactaagagtgtttgtgtgttcaataaagagagagagttcccttttatagtttcagggttggactttaaaatggggacttgttctctagggacttgtattctgcggggaggagatcgaccgatgggctttgggtagcgtggttcctctagtgttgtccgtagggttgttcgtggtcgtactccatcatggcgtactgtcttgtccactcgtcgtatgtgtcctttttgcttgtcttccgctgatattctcgtggtactacacgggggtcttgcaaatcagtcatatgagttggtgggtgtcgtgcgatattgcctatcgtcacgagcctacgtcacttattggcgtgcgtaagcatacatttggtatggtgtatctattgcacactacccgatattctggtcactgtagaagctctgatgctgagatacttcatgaatagggttggtcggcccctcgaggatgtgggagttcgtctggagccgtacttagagtggtgttgtcatgtcaatagtggccactcggtgtgccctcatcttgccattcgagtgactggccatagcctagggtgtcatgtcttgtcttagtcgacatagattttgcgacgtttgacttaggtttccaccttgcatctctttctcggcagggacttggttggccgccagcttcgtgaacatgctcggcaggggcctgatagatcactctgtctcgtcgacttgctcagtagggtcctggttggtcgctccgcctcacagagttgcttggcagggacttgttcgatcgctctacctcgtggagtcgctcggctaggaaatgattggtcgctctacctcgcagacttgc

SEQ ID NO: 76721 - DNA, 505 bp, Zea Mays
accatagatatgatcacagggccatacaaactcattcgacggtgtgaagtgactgcaattcttatattgtacgagctgccaaggagaattcattcttattatttaacacactaattacaattgatttagtttcccttcgacgaacattgattctactaccaatccgtcagaatgcttgcacgttttaattttcatttatttaattgcatgtaggctgctggctcgattctagcgcatgagatggtgcatgcttacctccgacttacaggtattctggttgtgcttgtttatcttcgtctgcaacttccacttcattcttcgataccattatctgtttgcagtacaacaatatttactatcttaatgtctttttttggggtaggatactgaaccctgagtccagaggttgaagaaggtaactgtcaggttctagctcatctttggcttgagtcggaaatcacattaggttctggtagcatggcaacaaccacagatgcgccgtcgt

SEQ ID NO: 76722 - DNA, 484 bp, Zea Mays
agtcatgaccggtgctcgctcgggtaactcctccaaggtggtgaaattcagccttccttgcttgacttgtaccttttgtttcttcccttttcccagaattgcagctagcatatgtcttggttgattttgtagacaatccttggcgtagtgaccggtgttaccacacgcgaagcatcggtttccggttccctgtcggaactgctgctgctgctgttgcggaggtggattgtttctcggagcgggggcagtgagatggttgggtgcttgctgctattgaggtgtcctgatcacccatctacccgactgctgctgaaatcccctactttgattgctagaaacaattcggaacctctgaggttgggccgaggatcctgtcattggtgtcttccttttctttttcgctcgatgagctaagatgtagtcttcctgagagatggctaggttgaccaattcattgtagttgttggcccgaacggtgttaagg

SEQ ID NO: 76723 - DNA, 1040 bp, Zea Mays
actcaccattccacaaaacagagatagaaagacaggtgacagaattactgaatgcgggtctgatagtacctagtgccagtccttttgcatccccggtattactagtccagaagaaagatggtagctagaggttttgcattgactacagaaggttgaactctatgactatcaagaatcgatttcccatgcccttggtagatgagattctggatgagttggctggcacccagttttttaccagtttggatatgactgcagggtaccatcagattagaatggcagaggaggatgagtttaaaactgcgtttaagactcatcatggacattaccaatttcgagtcatgccttttggtctcacaaatgctcccgcaacatttcagtgtgccatgaatactgttttggatccttttctcagaaaatttgttatggttttcctggatgacatattgatttacagtccaactttggaggaacattacaaacatctcagattggttctgtccaaactcagggaacataagtttttcttgaagcttaagaagtgtgcttttgtgaaaagagagctgcagtatctagggcatgtgatatccagagacggagtggcaacagaccctacaaaaacagcagctatgctggcttggcctataccacagaatataactgagttgagagggtttctgggacttacaggatactatagaaagtttgtgagtgggtatggagtattggcaagaccccttactcagttacttcagaagcaacatgggttcaaatggactgaagaagctcaaacagcatttgaagccctaaagaaggctatgtcctcaactcctgttttagctctacccagatttgaccttccttttgtggtggagacagatgcttgcaagactggaatgggtgcagtgctcatgcaacaagggaagccaatcgcttatatcagcaaagccttaggtgtgaagaacaggcacttgtccatctatgacaaggaatttttggctttgattctagctgtagagaagtggagaccctaccttcag

SEQ ID NO: 76724 - DNA, 462 bp, Zea Mays
atcatactcggaggaagcttccttcgagtactccgagtcaccaaaatcctctggggtaggacttgggggccgcttgcgcttaccgtcggtgcagcgaggccaacctttgcccctcttgcctctacccatggccgggtggaaagtgaggaagtgaagaagaagaagagagcaattgatcaaagaacgagtgaagaaaacagccagggcaagcgggctatttaaaggggctgaggggtgaccgtccacttcctaccccgctcgccgaacagacgcaagaattcaataagcaattcaagccgcctgaaaatgagtcaggcaactggcaccgtttcacgtaaaacggcaccagttggacccaagtcaactgctcaggcaaatgattacatctctctgtcacattaaattactacttcaggacaacgcgataaacactctgcgcaccaagacaccccttgggcacac

SEQ ID NO: 76725 - DNA, 413 bp, Zea Mays
taggggatggctatgaagagcttggactacgactaggaggagggagccgtgagcatggacgttggggtgatgcacgaggacggtgccgttagagatgtaggatgtcatgcccgcacagaggatgggaggagctggttcgacgcactcatcgttcctccaacgagttcacgctcgcagttcgcaccgatgcacgcagcaagttgaagcccatgtgcttttcgtctctgctcctcccgggcatcctcaccaaactccatcacatcccctcgatcgaggcctccatcgacttccccgttctccacctccatcaacacatgcacgagtggtccccctgcataagcacatccccttcctaaatacatgtttgtattaacttcacatcccgctattatctactatgttgtgctctcgtg

SEQ ID NO: 76726 - DNA, 519 bp, Zea Mays
cacacctcattgggctcgctcaggctacaaagatcaccctcgacaatcgggaggacttcgtagtcgacttgtcttcagaattggtggagaaagatctataggtggaacagatgaaccaacacatcctgactctggagcagcaggtggagatctgggataacaccatcgatatcctagaaatctagctccacgatgtgcaggaagagcttgcggaggccaacgctcacctagaaatgcaccaccaagacatggaagctaatgaggcatgcagctagggagaggaggacgggaaaaccacgtaagcttagtttttggtaccaacttttgaactaggctttatggtggatcccctaaaatgttgtaacccgggaaattttttatgaacgatgcaaggaatgaatgaatgttatcctcgtttggttcgatataatgttatgttatttttcttatgatataaagtctcagagtttggaaccatgaatcgaggtaacaacaaccgaatttctgtttgagatggca

SEQ ID NO: 76727 - DNA, 325 bp, Zea Mays
atcatagtagcttcagccgaaggatccttcgtattgtctatggagaaaatggtttccgtttgggttgcaactttaacatgttcacagccagatttctctaaaatgctgcaacccctctgacactggtgaaggcgcagaaatccccacagtcgctaagtatttcgtcaaaagcttaagcttcttcgccgatccattcgatgattccttcgggatcgcctctaataaatttttgctcagatgagtatgcacccacctttgcaaaactatctttcaacttcttagcacaatccaaggatttctcgtaatacctctccttcgattcccg

SEQ ID NO: 76728 - DNA, 844 bp, Zea Mays
aacatcacccaacctttcatcagtcccgaaggggagatactcttcctcgggggctaccatcgaagaaaagatccccaggtctctggcccgccagtcatagagagcgcacaaaatagaagctactggaccacaggggcccacccgtcagagggggataaggggaaccatcttgttagggaaaagatccccggtccctagagcccaccggtcaacgagggcgttgggaagaggcctctggaaactagggcccatcagttagcaggaggaggaaggaaatgtttgccctggaagcacccaccccccggacgaaccatgaggcaccgagcccagggtcgggcgtggcagagctagaaaaagggattgggcatactaaagggaaaccactcggtggatcctcatctggcccgagactgacccgccgtagtgaccgtccgcattaactacgcatggcgccgagtcgtgacagaggagccggtccgcgtcccactcatgacatacgagcccctcgggctacagcgtacttatgacctacaaacccttcggactgcagcgcatttatcaaccccgcgtcctcggcttgcggcacactcatgacttattaggactaggcctaagtgtgcaggccgcctacagggcacatcgatatgagtcatgctgagatctaggctacgaagatcaggggtcggcgtagcttgaggcgataataatgacacctgagccccacgctgccaacaccgttcgccataaagtacacaagacgaccaaacggcctagatgctcatggacacatgcgacttcaccagggtaaaacactcgattttaccatcgcctagtgactcctcct

SEQ ID NO: 76729 - DNA, 632 bp, Zea Mays
tcatcgtgtaggtcttgccgggatgaaatttggggtcagtgtcgttgggcaattgctcgtcggaggaggaagtacgctaccatccaccgcggccacggcagcttgggtgtcgggtggagacgatgattggatagccatcagattaggagttaacggtcaggatctggtcaacgtaccggttcgctgggggggaatctgaaacgttggcgcggtatcggacggtggtggattgatcggggtgagatcgcccctcatccgtggatgttagatctggcggtcgaaaagagttatacgttatttgctgcgcagacctaatccgagccgatgggcagagatcggacggcctggattcaccgataccccttcgtttcgcttatttgctaaagaccctgacaaacacttgaatcaacccgccgtccttgactggggcgctctgtgtcttgggaatttttacaccagaaccctgcactctatatatattatgcgccgagtccaggagatagaaaatccatggaaaatgagatagaaattcattttttaaataaaaataattgctagaatttgttaaatccatagaaaattcatatgatatccaatttaatctgtccagttcctataattttataatatta

SEQ ID NO: 76730 - DNA, 322 bp, Zea Mays
gtataatccgggagaagttgagggtagctcaaaccaggcaaaagagctatgctgatattagaataagactgctggaatttgaggaaggagattatgtttgcctcaaggtgtcaccactccgtgtaatgaggagattcaaagttatgggcaaattgtcacctcgctttattggaccattcatgatctttaggcgagttggggagatggcataccaacttgagctaccaaataatctatgagatgtgcataatgtattccacgtgtctcaacttaagaagtgtctccgtgtccctgaggaacagttaccaatggaagagctcag

SEQ ID NO: 76731 - DNA, 1223 bp, Zea Mays
gtcaaaggtcgtggagagggagtgaaggatctaggtgtgcctcaaagtagtgacgtagttttctagatgccctcaaggctgcatatacaattttcactattttgaaaagttggtctttgattccataaggacttttgagacaaagtatattgggtattgttgtatattaccctcaacatttttctcttggccaaggattacgataaatgcctaaagggaggccatgacataaagcagtaggattgatgttggatctagactgagtagggttgtaagctctgctaggtaagatttgagggactcaaaggctgcaacttgttctggcccctagacgaagtccttggctcctcttagaattttgaggaaggggagactatgtttggctaacctagaaatgaacctattgaaggctacgattctacctatcagcctttggacatcttttatgtctttggtgtctgcatctctgttattgcccttattttgtcaagattggcttcgatacctttactgaacacgaggttccctaacaccttgcatttttggatgctgaagacacatttttctaggttgaggcgaagcctggcatcccacatgcttgagaatgtttttgtgaggtctgctaggaggtcgttcttatttttggtggccacaacgatgtcatcgcatacatgaatatgttgtggccgatctgtttttgtaggattgacttcataagtttggaaaaggttgagcccacgttttttaggccttcaggcatccgtacgaagcagtatgtaccaaagggtgtcataaaacttgcctttgccttatcttcttatttcacgtagatttggtgatagcctggaaaacagtcaagaagtgacatgacttttcaccctgttgctgaatcgacgattttgcctattctaggcaggggatgtcatcattagggtaagtgttgttgaggcaggtgaagtctatgcgcattctccatttgccattttctttttgaccatcacgtcactggccagccagaaggggtagtctattgattcaatgaacttggcctcgaggcgttgatggaccttgtccttggctgctttagttttttcatctaacatcttgcgaattttttgttttgtgggccaaatcgaggggctgaccagtaaattgtgcttgacgatagtgcgactgacccagatgaggtctagagaagaccatgcaaagacatctttgtttct

SEQ ID NO: 76732 - DNA, 285 bp, Zea Mays
ggagttataggatgaaaaacctaaactaaactagggtaagcttgacggtaatacctgagtatttgaataccacttgataggaacgggggtgcccgatctttcgtcaggtgtaggtaactatcgatttggtggagatgtcacacagacgatctggcttccaatcaacacgactagaaccccgcaatcgcaacaccacttctcctctggttatcaaccgtgcactgcgcgattgacctcgccacgagggctaattcctgcctgagaatcaaagacacaagcaagaac

SEQ ID NO: 76733 - DNA, 469 bp, Zea Mays
gagcaaagatgaccgatagatttagcaaagagtgagatgtctacctggaaaggtcacacgagaggtgacgatccaggcaggacgggagacggcacacggtcacacaaggtcactgaaatgacagaagaggtgagcacgtattagtcacatagtcataagcatatgaaatgtgaataaatacatacacaaagagatatggcacgagacgggacgatcgataggtcaaaagccgtgaaaacgacggttgacggacaaatagagacataggatgattggaattcaaattgaggcacaaaacgatatgggattgagccgatacttcacgaataggtttatataggtcaatatgagtgaagtgtgtgcttggtttgaatttaggcgaagaaatagggtttggggcactcggctcggaaacgatcgcgcaaatcgggaattttggtgaaatttaagcctgggatctcggattggc

SEQ ID NO: 76734 - DNA, 311 bp, Zea Mays
tccaacggtgtgtatctaaatctgcaaatggttaaatgagatgagtgaacaattggtagtactcccttaatttgtcgagtgacctgtaatttctagattgctgcttcatcaagttgtaaattttgattgatgctagcattttttcagtatgtacagctattcataacttctttctgtgctcttcattaatctcattaagatgcatctatgtagattagacaactacagatttggttcatgtaacttgtgaagttgatgtcaactttgtgtacctcattgatctgaaccatttgaatcaatgctatttttaa

SEQ ID NO: 76735 - DNA, 359 bp, Zea Mays
ccccgcgcgaggacctttcgccttctagtggacctgggggatatctgtcccccacaccggtgagccggaatgtctctcgctggtaagagcgccaatgtggcctaggagctccgccgtgggaagcctgtcggctggggggagtagtcgtggctgtcgatccatgcatggacgccgcaattagagtagagataccccttcatcgtataaaaatcaggctatcgagattggattggagggctgggagtagcgcagatgtggtcgtctctttggccatcgaccccagatctagcggacgacatttcataccatttcataagatataggatctaatctgtaccatcgaccaatgatcagacgac

SEQ ID NO: 76736 - DNA, 529 bp, Zea Mays
cgtcggaagtcctagctccgccgcggaacccctcgcgtcatggcccatctacttcaccactagaccaccggtaagaagtacctcatcacctccgttactttttgctctacgtatagcaccggtcggagtgtcgattgggtctctattatgcctagtgggtgtacgacggtgaggttgccgccgtggttggtcggcggggccgccatcccacgttgtcttggttgaggatgcacctcgaccgtgggatctcaaacctagggttgagattagatcttaggtctcgggcaggctggatcctaggaaaccgcacgatcgggatctgagggatgcggatgactccaaacaacattaaatctgggccatctgtttggcatcgggtggatcagcatagttgtgggtagatgaaatatgtgccatcagtctctgatccggtggtcattattatgtaacgcttcatcctatgtaagatctaattgtagccgtccgatgttgatcccgcggccaggataatcccgtaccccttcggtcg

SEQ ID NO: 76737 - DNA, 327 bp, Zea Mays
gcaccacaggctgtgccatgcatcgtctcgggtcatccagcaggtcctaagtcgtcatcagcttcctatttcccataatcgaaataatactagggtgtgtgatgcatgtcagtcaggcaaaagtcaccaattgccttaccccagatccactagtgtgtcgagtcatcctatggatctcattttttccgatgtatggggccctgcgcccaactctattggtcgtcacaattattattcgagtttcattgatgatcacagcaaatttgtttggatatatttgttgaaacacaaatccgaggtatttcagtgttttcaagattttcataa

SEQ ID NO: 76738 - DNA, 741 bp, Zea Mays
gtgttttcttgtggttctcgcgtgctactgtgctgagaggggaccaggaagaatccgtcgtccggccggctcgctctctgccggccatgacgagcgccaataaggcgaagctccagctgcaggagagggtcccgctcccccgcacggcgtggaagctggccgacctcgccgtcctttccctgctcctggccctcctcgcccgccgtgcgtcctcgctggtgtcgtcgggcggcacggcggccgcgtgcacgtggtgctgggtcgccgcgctcatttgcgaggcgtggttcacggtggtctggctgctcaacatgaacgccaaatggaaccccgtccgcttcgtcacgcaccctgaacgcctcgccggatattggtgagtggtgccggtacgtggtggcaataagtacaccgtactgtactgtactgtacaccaccaagacgtacgtgctagtagctactagtagttctttgtttctttttggttgcctcgtcaatgtgttgcgtgcgtttaatatataaatgatgatgaatttgttttgtcgtcagggcgggcgacgacgagctgctgccggcggtggacatgttcgtgacgacggcggacccgaagctggagccggcggtggtgacggtgaacacggtgctgtcgctgctggcgctggactaccccgcgggcaagctgtcgtgctacgtctccgacgacggctgctcggcggtgacatgctacgcgctgcgcgaggccgc

SEQ ID NO: 76739 - DNA, 509 bp, Zea Mays
tatcttgatgaaacattttttccttgagcaaatacttaaaattttatgaagcccgtgcttctaaaccgaagattataatttactgtcaaattaataatgacaaagcagtaagcagtaaatgcacggtcgattatatagtgaggtaatttaaatacaaaaaaaatataatcgccattgacaatatgaaagcacaaaaccctaatagtgagagcagatagacatatgtatttgggaaatgtaactgaatggacgactaatacttgcattgggaagttaccaagtgcgtgaagatagacatacctccgatgggtaaaagaaatatgtatttgcaaaccctaatagtgaggaacggacgaccaatacttgcattgagaagttaccaagtgcgagcaaatagacagacatccgttgggtaaaagacatatgtatttgcaaaccctaataatgagaacactcaagtgcaagcagatagacgaagatctgatggggaaaagacatttatgtatttg

SEQ ID NO: 76740 - DNA, 478 bp, Zea Mays
ggcgctgttggtggccaccaggtccttccggtcggtgtgcttctgttgcctcccattttcctgcacccagtgtcccccgaagataaagctatcttctctatcaatgcgtggaaacgccccaccaccccctccaccctgctactaacactgtctcggctcaggggggctctccctcgtggaggggaaggtggtagcgcttggaacggtcggccatgcccgacgaagttcttgaagtcccgacaatttcattgagtgtggcacatctccttgtgatacaggcactaggagtcgaggatctcatccagtgttcgtatctcgccatagggcgcaacgtaggtcctagtagccggcggccctacggtgtgcacttcttctcgaggcctcttgttgcagcgcttgtttagttgttggttcatgccttcctgggtgctagaagtgtgggctttgctctcccaatgaggtcttgggcttgctcgtc

SEQ ID NO: 76741 - DNA, 515 bp, Zea Mays
gcgccgccggagccacgccgtgggtgctcgttgagagttgagacgcggtacccgcggtcgaaggctttccccgtcgtactttttcgcgggcgttccggggcatgccaaaattcgcagcagatggaggagggatgacggggagtagtattaaactcgctagctgctcccccgcctctgtgcccgaaattcgctgccgctgcaagcaatacccgggtaggggtggctgctgccccagtccagtcctgctaacgtgacggcgatatgacggagctgaggaccagttcgcccctgttttttcgtgtccagaagataaggacgtgaggaaaagaactcggtcaagacggctggcagttggcgagtcttccgtctggcgaatcaacgggcgggtgagccccctcgtagtagtgacaggctgcaatggcagggcccacgagcccaatctctacacgtattggtgcatggtggtgcacttgtgcatgcaatatattaccaaacctgccatcttttttccaatc

SEQ ID NO: 76742 - DNA, 688 bp, Zea Mays
ggaagctgctgccgggtctagtcagggtggcctggtctatctaaaatataccttcagatatagaggcgagtttgatgagccaaacgatgagtggttgagcagtattgaggcaaccagtgacaaattgcttggggcctatataagggccaaagatgatgcaatgaccttggccttcgaaggttgaggcaagaaaaggttgaatagagttttttacgtcattggtttcgtataccctgattatagctatccctcgtgaaagcagggaaagaaaagaaaagctgccacttcggccatttctactgtgccaaagggtaaaaagatcaaggttttaacgcaccggcctagatacattgaaacggccacagtgtcgaagcttggtgaagggacatcttctattgctgaggcagaacaacctgctcttgccagccccagggaataattggctgaatagccgaaggttcctgtaaccaggtcggtcgaaacaccaaaacatgatgccgaagtcaaaggagaggcagccaaagaaccagagttaacggaaacggtagggctatcaaaaatcttgagcccgccagcggagccagaattgctgaaggtatcaaaggctccggcaataactcccaagaggagaaggatggctagcgtgctggacgccgtcctggaatcgacaagggcatcgactcctacc

SEQ ID NO: 76743 - DNA, 532 bp, Zea Mays
cattctatattaggctactagctcaaccactccatgactaaggcccatttgagtggcccattcagttgaaattccaaagcaagtggttgctaggttttagtcccacattgatagttcaaggtggtatagaccaatttacatagcaacactcattcccatgactgaatagataaaagaatgggagagagagcatgtctatacacacacgtgtgtgtgcattcgcatgttccacatgacatgtgacgtgtgacttgcgacgcgcgaccgtggtgtggtgcactgtatctggccacttgtatccttcactaatttttaaccattttgtattaattaattgagaactgatatagattttattgctataaaggtggttaattggtcggatgctaattaataggcgaattaagggaaaaagacttcttgagggcagtcacacctatattaggccctgaataagttcgggtttcaatatacacaaaaattctcttctatttttccttcttcctactttggaaagctatgctatcatgat

SEQ ID NO: 76744 - DNA, 806 bp, Zea Mays
gttgcatgtggcataggggccttgtcattccgaaactcaatttcaatggacgcataaccatagtcatcaacttctcctgccttttctcgtctgcctttatgtaaaaccattcacttttccaaccggtcagccacttagtatgatagctgagaatttgggccttcatatccttccgatacacaaagttgtagcagccaaagttctcatgaagaccatctactctggccttcgtttggtagtgcagctcgtgcacccggcagaaagcttcggcattaggactcataccctagcttcggagggcccatatgtagacactaagtctaacgattgcattgggtgtcggctgatgaaagtatatctcaaaaattttcaaaacttctccaatcatctcatgtagtgggaaacgaagtcctgcctgaagaagcttttaaaaactacgacttcatcgtcttttggatctggaatcacctctttcccagcaaaacaaacaagtttgctctcagcctccccaaagtatcccaatttcttcaacataaccatgttgtctgccgtcacagtagatttaccaaattcaatgtgactgagtttcgttgggctcagaatagtgtaatcctcttcatcttcgttatcactccctccttcaactgcgatttgtttagcttcagcagtcaaggtaccttcggcaacaggctcctctggcacaacaagacctgattgcctcatcacttttgatattggtgtcgtctcagttacttcggcctcgtctccctcacgagacactctagaagtggatcgtactctggcca

SEQ ID NO: 76745 - DNA, 906 bp, Zea Mays
ttcacatgtttctagcatttattttcacattaaaaatcatttcctatttacttttactggattttctaattctctggactgggcgtaaaaaacagaggaatacaggggttaactcacaaaatgtcccaagactcaggattcaccccacgcggacgacatgtttattttataaaagaacagggacccttttgaaaagatgcagccgcgaaggggtacggttaattctcggccgtccgatcaaaaacaatgttccagattagatctgttattgaattcaaccggtatgcgatctaagccctcagatccagaatcagcggttgatagacgtccccgctgtgatctattcccagcccaccgatctgttctcaacggtcctggtttaattaagcgaaggggtaccctgtgttataatcttggccatcgagtctaggatcaacggtgatcgacacatctcccctcccagaactaccagcacggcggcgcctaagcgcccgcgacggcgcacgccggtgagacgtgcaattggcgcattagtcgccccaaaccccgattggatggatgctacaagaagaggggtcgatggcgagttagggagacgtgatcataccggtgcttaagcggtggtgaggatcgaccacaatgggatgcggactgcggcagacacggggcaccggtgagcaatcaccagtggttcggtgatccaccccacccgagaaggctacaagaatgttcctgacgacagggcgaaactccttggtcagccagcggggcaccaacggtggtggtggcatgttaccccgacggcggcatccattttctctccctcttctcgctcttggtgctcggttacggcagcgcgatgccagagcacaagcatcgacgcccaagctctccatgcttctgctg

SEQ ID NO: 76746 - DNA, 771 bp, Zea Mays
acgcttcgaagctggtgcgcgaaccagatgccaaagacccagcggcgtcggccgggccttcgtaggtggttgaataggggttagggctttcgatgtaaccttttgtttttgtgatactgaacctcggttgctgcgcaggttccgacgtttgggcctgcgcaagcaaccgctgctagcaatactaattttgtggcggcctcaaccgttgtgcctgtcgatgataatttatctggctctggatctgagtgttttgagtctgatggtgagtctgggagttcgttttcctagacagaggagtcctcggatgaaggcttggattatttttttgcgttagatgtggccgtagcggagtcttcgccgcgtgtggaggtaggcgaggcggctgatcttcctagtgcgagtactgagtacaggcggcgaagggtggtgtcgaaacacagtgtgggtgaggtttcgcgaagtggtaggcgccgtcatatggggatggagtgtggccgtcttcgagtagactggattggtaaacgagaattgttgtcctcgccgattggggcgagcataggtgagggggatctgcggaatctttttgagggtgaggagttgaagataatgttgttcaattatagggaaatgggtataatcccgaaggttgagctgatgtagtatatggtgccctcgctgtgtgtatgtaactgtaacttgtattgtaatgtggcctgatggtcgttttcgcacgcctgtactaatccggctgcacccgtaggtgacttttgc

SEQ ID NO: 76747 - DNA, 708 bp, Zea Mays
ctagaattaccatacacaattaacaaacacattcaccaaataaggcatttcggcacacatgtccgacatcacacaaaactacgatgaagcgctgttaatatttagctttagaccaccatgacataaccatttaacctctaattggttttaagatataactcaagcattccatgaaacatgcatgattttgttttctcctagtttttcactaactcttgtaattataaaatatgtattattttagcaccatatgaaactatctaatttggggccagaatttttatgaggcatagttaataacaaattatgactaatgtataaatttcacatgcccaggttttatattttatttactacaaaaataacaaattgttgatgcaataaagcatgtgagacaaggttaaatctaaaactaattattttctgtgaatgcatgaccatattaagttttcctaggctactataatatcatacaaggacagtggaacatcattttccatttttacatccatatatgttttataaatcatttaaaactacttaaggtgcattaaacaagttaaatcactaacttaatcatacatgcacaataattcatgaaatttttaccagtcaccaagcatcacactaagagtctactgtaaaaatgtcaacccatttggagcaatggagctacagatccaaaaataacaagcaaatcaatcttct

SEQ ID NO: 76748 - DNA, 1073 bp, Zea Mays
ctcgatcagggagacaacccgatgtccgaacgcctagctggacagaggtcctaacatatttagagcttgctgagtccagggtgttgcttgccaagatatgtgcgttaaagaatagaggcttgaccgctaaagctgttgttgttgactttgttttcaagaatattcaacctttgaaggatagagtctaccctgcttgcctatacactggtgttaatgaccattcttgaattaccaacaagcgaatatctgaggaggacgtgctgagtcgggttgactcgatgctgaggggcaaagcttcgaatgctggtgctccccttcgtattctgcttggaacctcccactgtggtaagcattattgcttatgagttcctgtatttgtcatgcatagtgtccttactgcgtcattttgtccctgcagaggtctttttcagagttcgtatccaacccgcctgttcaagacggcagtccaggccatagagcgtgaccttcttcagaagatattgaagccctcattgctacgtaccggggtctccctgaagaggaaaaacagactcatctccggatgcaagtgattgccaatgaggctgaagtaaatgttgttcttaatatgctggctagcgagtcatctgaatctgctcacactgagtcaacgagtgctgcagctgggtgtgccttcagcggggatgagggagcttgtagccctgacggtgttcgttgcaaacggacatgccgagcgggttatccagttgtgtctgccgatgggaagaaaagaaaaataaaacttcggcgctcatccggcttggagctgggggctgactctgccgcttcggacctcgatggtgacccgtcaggtaccgatctcgaagatgatattgagagttgtggtggcactagagccggtggacatgtatctgaggaacaggaagaagataatgaagaagtccccctttggttcgtaagagtcgccgtagcaaaaccagcaactctgtcagggttggttaatcttcagaggatgacgatgtctgccattgatcatgcgctggaggagattatcctagaaggtcttttattgg

SEQ ID NO: 76749 - DNA, 588 bp, Zea Mays
gccagacgtcgggggggccataagggtaaggaaatctccacctgattttatgtcgtttccatgtttgtggagcaatgaaagggacacgactttcggttttggccagttacttttttttctgaactaattgaaactggcgtactgtgttttcccaattggttgtggtttaatttcaggtttttgacgcgatgattcgtcacagagtttcagattcttatgttttgtcacaagggcaagtctttttgctgcttaagtgctagtatgcaaactgtgtatgtttgatcatcaagtgatgattttctaccgtttttgcaagtaatgacttgctgtgaaaccgacatttgggctataagatgtggtattttgtggggccctacagaagcacatagttgaatgtacattacttacctcaataacttgtaatttacactataatgtatagatacggcgtcttcaataaatactgaaatgccttttgtttatatgatggaattagataatgtggttgctaattcgttacacacttacgctattaaatgtactttgtaacttgaactatcttactctctaatcttcggtacattgaca

SEQ ID NO: 76750 - DNA, 604 bp, Zea Mays
ttttgtccttttcaaattattggacttttccccgtttcatgctgatgacctatatccaacttaccatcagaatttatgacacagatctttgttccagtgcatagaaatgcacattggtgtttggcactaataaacatgaaggataaaacattgcagtatcttgaatctcttgttggttggggccgtgatgtactggacatactggtaggcttatctgaccaaactgaaagttacactattcttagactagagtgcctgaattgcatggggttgcctttgcaaattattcatgtaatacttgtatatgttttttttgaaaggtatatataattgatattcattatcaagaaagcaaaattacaaagtacgatgttcttcataaaaggacccagcacaaaattaaagggcctgcaagatttctctattgttggattgaagcactacagttaaattttctgtctggcaggctagatacatcgtggatgaattgaaggacaagagtaacatagaggtagaacctagttcgtggactgtagtgtcagagtctttgcccttgcagcagaacgggtatgccttccttctagtactaatcaccataaaatcc

SEQ ID NO: 76751 - DNA, 644 bp, Zea Mays
tgacaattgcattatgaatgtattgcatctttggcacatctttttgtcaggatgttgtgtttgcactttgaagttgttcttttgttccacccagtgttcaggtgttagagcttgtaacactattgtagcactatgttagtaatgaactttttttgtaatgttcttgctcgccaggtgcctagactcataaaggaatacgttgaggaagtatctactcaactgaaaatggtctgtgattctgattcagacgagttgcctcttgaagagaaactcgcatttatgcatgagacaagacatgcctttggtagaacagccttgctgctaagtggaggtgcttcattatgatcctttaatgtgggtgttgttaaaacattggtagaacataaacttttgccaaggataatttcaggatcaagtgttagctaaataatgtgttctatagtagcaacaagatcatggcctgagctggagagctttttttgaagaatggcattccttgagatcagggcttctggaggcagctttgctgtcatctgccaaggtatgtcaaataatttctcgttgtattctttttattaagtttggcttatttccacttagaatggtgatacactttttattggacatgcttccagtccatgtaa

SEQ ID NO: 76752 - DNA, 572 bp, Zea Mays
cgagctaattattgtgttcaacaaattgataggtcggtcgaatgcacgtcatctgcgattcaagctcttgttatgttcagagaaatgtatccaaggtatcgcgatcaagagataaaaaaatgtattaaaggagcatctaaatttattgagagcaaacaacaaaaggatggcacatggtatttaaaatcatcttgtatattgtatgatgttatccatttctttaatgcacatagacaagaactaatttactaattacgtaataggtttggcacttggggtgtatgttacacttatgggacattatttgcagtgcaaggattagttgttgctggaagaacttatgaaaacagttcttctattaggaaagcatgtaggtttctattgtcaaagcagctaatcacgggtggatggggtgagacatatccgtctaatggaactgcggtaattcttaatttcccttacctaactatgtgtcttcttggtcatttcatgtttgatatttcatagaatagcgtggtacacatatatttggtcttcgacaaaatatttaaatgttatcatgtgaattgttc

SEQ ID NO: 76753 - DNA, 384 bp, Zea Mays
gattggaagtgacactgtggtctgtggaagcctgcgtggctgcgtatggcatgccacagtatttcccatcatctagagcgtcaaatccagcgattccaactccgcaggccgggtcaccgccaagcagtgcccaagaggagccggaacagtgacgcgcacacgcacgcccagtagtctttccatttcacagccaactggtcgccgtggcagaggagattcgcaaaagatcggccggtcggatcaccgccagtagtctgagcttgccggccacgattcgccgccggtctctatccgcccgggttcctcttcacagtcacaggcgtccacatcgtgacatcgccagcgtcagaactggaacaacaaacagttcgtggaaacttccaa

SEQ ID NO: 76754 - DNA, 378 bp, Zea Mays
aagagtgcagcagcagctactcagctatggagtggacacaaattggtacaccaacattgctctgccacagatcacctcaccgctgatctagacaaattgactactcccgaaaaatacaagaggactgatcagatccccacagtcagtgggacacgtatgaacatttgtaatactggtcatgctgttattgacaatcctattaaacccttgcatcttaacaatgttctccttgttccaaaatctcaaaaaatattgtgtttatccatcatttttcttatgataatcaagcctcacttgaatatttttctgatcattttattattaaggatttagacacgaggagaattctttttcgcgttgtgaagatgggctctatcc

SEQ ID NO: 76755 - DNA, 422 bp, Zea Mays
ccgcaagtcactaggcgggatcctctcatttcaatagggaggcctctatccattctacacccaccagagagagggcacccacggtgcacgatcgtctctaagacaaccaccaaccccaaggggtccacgaccgtctcggtggacgcattcgacaccatgagacgtatggctaccgccctcagcggcgcgaccattacgatagtagggaggatcagggcccctctcccgagctaccgggtccataggtcttcagcaaggccatccgcagagcgccattcccacctcggttttgagccccaactactatcactaagtattcaggggaaacaaagacggagctctggttcgctgactaccgactggcctactagctcggggcaactaatgatgacaacctcatcattcgtaacctccccttattt

SEQ ID NO: 76756 - DNA, 549 bp, Zea Mays
tttggatccatttgcaatctatagaggcaagatatgtgtcgacacatttgtctcccacatttaataatgatctccgttatttcccaaaacgaaagattcattgttccgtattcccagcataatgatattgcgcgcattgctaggaatttcatcatcaagatgaacctcttcatgaggcaaatcaccatcagggtgaattaatcggaggagagttatcacagaccacgtgaatctgtaatcaaaatatatgctttgactaagaccaactaatcatattcgtaggcgtccccgagaatagatcaaatgccaataagtcaaatgtggatatgatattaatcccgggtatatccacatctacatcaggtagaagcatccaaaccaatatggttaatcctcaacgatttctagcaaactccatatacacaggagtacacaccgaatgacagattcagtttggcttttgtgcgtttaatagaatattgaggcattacattatatgggcattcctccccctaatgccaagatgttctaaaagcatacatataaaat

SEQ ID NO: 76757 - DNA, 468 bp, Zea Mays
atcagccagggcaaaatagctcgcccagatcctatagaactgagcattccttttcctttctaagtggctcagcaaaacaggatccgattgccagtcatgcgaaaacataaagttcaacctcacgttgttgtgcccattaacattaggttccaccggctgggcatcaggaatagctatatccccaggcacaagagggacatcctaaaaaggtgggccatcaacctcctggggcccaatcatagggaggtcacccaaggcaaggggggcaagggcattaaagttgggcaccggccccacagccaccagatcctccgggatctgcccattctgaatctgcccattctgcagcgaggcaccatgaatgtgaccagaagaactatctgaggataggttcgaatgggggttgctgacttgttgctcgtcaggtggctggtccagatggggctgctgaggctgctgaacaggagg

SEQ ID NO: 76758 - DNA, 491 bp, Zea Mays
tgaggtctggactgcagttttctgcctaccttcggatagagctctaggttcggatggttttactaggagattctataagtcatgctggcatatcattaaggacgatatgcttgcggctatcattgccctccatcaaggtaattctcgggggttgtggctgctgaactcagcttatcttactgtcatccccaagaagattgatgccacaacaacggctgattttagacccataagtctcattcatagttttgccaaattggtgaccaagattatggctaaccggttggctcctctcctgccaaggttagtggctgcaaatcaaagtgcttttgtgaggggaaggtctatccacgataactatatgtttgttcagcactcgatcaagtcccttcatcggtggaaggtctctagcctgtttttaaagcttgacattacaaaagctttcgattcagtctcttgggcttttctcttggaggtgttgtcccatcttg

SEQ ID NO: 76759 - DNA, 901 bp, Zea Mays
ggattatgccttggtgccatgaaatattttgagataattaggcccaaagatgggctgtcagactgtcttaggtctgaaatttaggctgacagtgtgattgggcagtctttggacttagattcgaccataatccagtcagtgtttggctatggttactatagtaagtttgtagctggatcattaggctacaattttgctgcagagcattggtcttgttgccatggagatttgggaagaaattcgccctaaacattgactgtcaggctgactgaagaacaaacccatggtacaataaactgaaacagatcgcagattcatcccccttcaccgtcggtgcccgtcgcgccgcaattcacgccggtcgctgtgattcgtgcgccgtgacttgcggataactgtggtcgagtaaagatcttggcacctggatcgactcgggctcggtcacagctaagctcgccgtacccacttgctcgtcgatcggtcggatagacctcaccgccgttggccaattcccgccgtgcgccacgtactaaagcacttgaccacatcgcagtgaatcacatcgtgcatgcccggtgatcgccggggtgcttgccacggtaataggccacgaatcaccgcgccagtaaccttctttctttccggccgccagcacatcttcacgaaattggatgccatcgccattggagcctataaattgccgaccccgcctgctccgctacgtaattgtgcaaccagtgaagcaacccgtgcctcgaatcatccactagaactccccaatttgggatttcccccaaatcaacccagaacaccgagcggtataacctcgtcgtggccaactcgattcaggtccgatcttgccctctgctttcttatttcagcacccttacttgctcctgat

SEQ ID NO: 76760 - DNA, 481 bp, Zea Mays
ctacgttccgccacagggtacaccgactcattcaggaggaggaccacacccagctcagtacgctccacaggggtctccacggacacctcccactcgtcaggctgcccccactggcacctcgacgaggcctacaggatagaagacatgccctacatgcttcaagtgcagtcagattgggcactatgctaatgcttgtccggtggggaattctggtacaccagctaagaacaagcaacagactcctggcaagggatactctatagccagggttaatcaagtccgcgttgatgctactcctgatggtgctgacatcgcactgggtatgttttatattaatgcaattcctgcaacaatattatttgattctggtgctacacattcttttatgtctactcgttatgccaactcaaatgagatagcactgctaaatatgaaaaaaccaatgatagtaattacacctaaagggcctgttgaggcaaaa

SEQ ID NO: 76761 - DNA, 695 bp, Zea Mays
aagacgttgccgataaattgttcaccgaatactctttgtcgaatgttatactcggtaatgattttgccgagtgttatggagactttgccgaatgcctgcgacactcggcaaataactctgttccggtaatgaaatgcatttaaactgttattatccgcctcttgccttctagttggaatagttatttttctactacgttgggctgcaatctatccaatcgactgtatactagccatttctacggtagagcatatatacagtgcatggagaaaagcggactgtaagtttgtaaccacggtcgggaagagcaagatagtggaggatccgaggtgaaggaaggcgagctagttttaccctgttcagtttaatttcagaacgaagttgtagagtatctatggagaacccaagatttgtagtcgcgagtaagaccgctgccgacacctagtaggcagtacaacatggcattcaccggcttgaactggaagccgcgcgcggctagctctctagctttactatacacggcatgccgcatgcagctagcaggagagcaagtagtaccaggccagcgccccagccccgcccgcgccgtacggccaaatgacaccatgcatacggccgactgcggcctgatgagccctgtcgcaataatggcgatgctcgatctccggccgcgagatggggagggcgccacctgg

SEQ ID NO: 76762 - DNA, 432 bp, Zea Mays
cttaggagagggaggtgctttggagtgagcaagacgggagagaggttcgggaggggagtgagagggataggatacgactttgctcacagatgcatttgacgaaggggcggggcttcgcttgccgaggtcctagctcgccaggtggccacgtgctacggctccgctcgctgggccttcgctctgcttgcttcttacgactggacgtaggcagtggggaaagagagaggatgtgtgcgaatgagtcgattgagagtgctgctttaatgatacaagagagagaatgttcagtggagcggagagagaaaagcaaagcagtggtgtggtgtctcagtgcgacgtgcgagaacaccagtagcacgggccacgcattggccgggcggagagcgtgcgaccgtgaagcacggagggagcttcaattcccagtgtctttta

SEQ ID NO: 76763 - DNA, 471 bp, Zea Mays
acaatcatcatttccaacaagcgtcatttgcagttcagattgatgatgtgcatcaatatttaagcctccatcctactcattagtgcattatagtcaatattacaaataatgtataaatcatcccatttgtttgcattatacataaattacattgtttttttgccataatattacctgttgtcgtgaatgtactgccacatgctcctcgttatcacattgcgatacatgttcaccttcagcgtttccaacatcatcctcttcgccctgcaacgtttaatttttacaattagcaataattaagttctgaataaaatgttcaacaattttatataaaagaacacccacatggttgccctatccagtagttgcaccaccagcatcttcacatcctatatctggctctaaacgcccaatcatctccaacagttcatccattgtgtccaaagccttatcactccctgcctttgacat

SEQ ID NO: 76764 - DNA, 345 bp, Zea Mays
aaaaacgatgtcgaacccgcgacagacgaaacagattaaaacagagagactgttatttagtttcgtcaaatttttacgatcctcactagtgatcgatcatttgatctgacaccaacgatcacatgctgagaggaacgatttactttatcagctagcgcatcgttctgttcggacagcgcgggctccaaattgttcataaaatcagaagttttctgatttccgtattcacttacgcgcatgatccgaacagttcaaaaatcgccagcaaacgaagattcgataatccaaaaatttctcgaaccccttttaattacgtagattatcgaaatgaaaatggcaccaaac

SEQ ID NO: 76765 - DNA, 290 bp, Zea Mays
ggaagaagcagctgcagctgctgaagagattccgggcacagtggctggaaaaggaaaggagaaagccgaggatatttcggaagaagaggacttcaactttcaagatatacttgggcaggaattgtcgaaggctgaaaaagaagaactgaaagagtatgctatatcttgcgggtagagaccaggtgcgttactcttcgggggagtcaacgaagaaagcttaggatgccttcgggaccacactggggcgaaggttgtcggcactatatcaaagagtgttggtctcccgaagg

SEQ ID NO: 76766 - DNA, 673 bp, Zea Mays
caccccacccgcagcagcagcaacaacaactaaaacgttatccgggggatctacaggtgggacatgttctccttttcgtgaggagcttcaaacaccctgggttgcattcgggttgcaccaaattttttttccccaccatggcactagatctcggtatcccccgaaaataagcaggtgcacgggcacgtgctacgacgcgggcatcgtggtcgtggccttggacgttcgatctggtgatcttcgtcactctgctggacaccgacggccaagttgctaacgcatggtgtgacgatgacacacgtcatgtcagcagcacttggtcggatattccatagttcaatccttccctctggcccgttaggccgtcgcgagacgtacgttacgtttggcgtgacggaggtggaccatgtgcttgatctggcaaaaaaaatgggcatgtgcactcatttcgtacgctctacctacagtgtacgcagctatataaacaaagggggctgggaaggaaagaaaaaaactctcactctcaagcgagcacgtgttgctgaagtccagtagtccaccaagtaaaaacaaaaaaagcaagcgttatcgttaccaattgaaaacgtgcaagcgcggccgagctcgtggctgaatgaaccgagtccgctctgcgattttgctcgctccagtc

SEQ ID NO: 76767 - DNA, 319 bp, Zea Mays
cgggtggttatagaaaccacacttttcacaagtgctagacttatctttgtttgacttagaagtacccatttgccttaatgccttaaggcttaaatgtctcttacgcttgttcttgacgttggagcttctacgattgccattgttaatagcatccttttgagtgttagcatgtacttcagtcaaaggcataacaccatatactattgttaagactttcaaataagaagctcattgtgcctttctacctaaagaaatgtcttaatcaaatcagagtaaacaatgaaactcttttcgtggtcttgttgatgaaggatcattt

SEQ ID NO: 76768 - DNA, 317 bp, Zea Mays
gttgagcatgagacaatgatggcatctaaagaagggaataagctagtctgttctgtaaacaacaatcagatacttatcgacattatttcggaaggtattgttaacaattggttcatccttttcactttttattgacaaaatgtcaacatggattaaatccaatgaaaaggaagcctttgctccacctagtttatttaaatccatgttttataattcattacagaacagtttagcagttacactacaagtatgaaaggcaaccattatactggatgttgtcactgtaatgttcaaataaaacaaagcatgcgctcttc

SEQ ID NO: 76769 - DNA, 455 bp, Zea Mays
cactagactgcgaatgatgtcgacatgtgtctcgatgactcgaactgagctctcaaccatgtcaagtggctctttttccatttctgaaacagaaaatgaccaagtctcacaatcaaaattgagatcgcaacaaaggcagggatcagagggaaaacaaggatgtggcttatagggcaaaaagaggggtccaaataacactgtcatggctatgaacaagtcaaagaagggagataagaacaagtcttataacatagggttgggaagcacaaggaattcatgtgtgccaacaatgcacttcattactccacataacttcggttctaggcactctaccacagggattttgtcttcattgctatccatagggtactagtatggacatgaaggcacaacaagaatatatagcttcgtataatgcacacagatgcaggtggtgtcgtaggtaagaagcattt

SEQ ID NO: 76770 - DNA, 568 bp, Zea Mays
gcctaatgaaacccttagccagcagatcatctaattgccgcttcgattcaacctgctcctttggggccatccgatacggggccttatgaataggctgcgtacccagaatcagcttgatctcaaaagctgcatcgcgctccggaggaatgcctagaagctctgccgaaaacacgtcagcaaagtcacacaccacacggatgtcctgtacccgcaaggcagcctcaccttccaccaccatggagaaaaagattcccgacttccttgaccggcgatctagaagaaattgcgccaacaaggataacgtgtactttggggaacttcccaagaataccacctccctacctgacgacgcctgcaataacactgttttccaaaaacaggatataactgcgcgatactgagataaccaatccatacctaagataacatcgaatgcccccaaggaaatcacaacaagattggccaaaaagacctcatcagcaagaataacggaacacccctgacaagctgaacagctactaatggagccattagcagaactaaccaaaattgggtgacccaacctctg

SEQ ID NO: 76771 - DNA, 355 bp, Zea Mays
aaaaaatattcttccccactgctattaaacactaatgtccccttcgggtattttaatttttgggcatagtgtagtgcttctagcttttcttcttgagaaagtatcttccccgaagcatgacgaatgatgtaatcagcgctttcttttgaagcttcggaggcaggagcttaaaccttttcagacccaatttgcgctgtcgtcttttcttcaactacggcaggctctgtctcagtgggctctgaaggcccagcttcggtttcagcttgaattgttgcagcttcgacttctgcttgcttcgttttagcttcgggttgcgctttagaagcttcggcaatttttcttgaaggagcaggac

SEQ ID NO: 76772 - DNA, 366 bp, Zea Mays
aagagatgtcattgtacaatgactgaacaagaacaccagattcacccctcctcgtcgccggtgatcttgcgcccagatccgcgctagcgtcgcgattcacacctggccaagcactgatagcgctcctcggtaagaaatatcatcgctggagataagctccggccactgttctcaccgaccgtcatgtcccgccgtggtcaatcgcgctggcatcatcggtgttcgctgttatctggccaggctacgtgcctcaatgctttactatgtcatgctgagtcaccataaaccgcccgatggtcctggctcgtcaccggtgggtctgccacggtgaaggccacgaatcaccgcgccagtgactcatttctt

SEQ ID NO: 76773 - DNA, 882 bp, Zea Mays
cgacagcgcccctgcggaagagagagctctaatcttgcccattctattaattagtccatttaactgcgaaattaattcatttctagtataattatgagataacaatgcgtaatttgatactataaatatagtattactttttaaaactaaaaaaactgatattgttcgttgtggcttgctgcagctttaatctgagtattttgtctctacggattgcagctgtaacagtacgaacaactgcagccgcagctgccagccgagcagccgaatatggtgaaagggtaaatggaagctgaaataggagggatggttggagaggagaaaaaatagttgagaatgcaatatttaaatatgagtagaaaatacaatgtggggatttcgaaggagaaatgattggagagagtttaaggcgtaaccaactctgattcaaatatcaagaaaatataatcaattctctctatacaactatattgatgtacgtataacaaaaacgacacgtcttatattatgagacaacactaaaacatggctacataaactgggacgcagggagtacatgacagggccggccacgtcgtctcgcggatggaggtagacctaatcatgggccactcgatctgaccaacccgaccccaccaatgcaacaggtgggtacaagccataattttttacccttaataattcacgggtcgggtacgagccgtgatttttaacccagaacctcgtctaacccgaaaaaacccgacccaaaaccaaaaaactcgaccaaacccgaaaacccccgactcaacacgtctaacatggaggcacggaccgacccgacactaggcatgggtcgggtacggactgtgataaatggcccacgaccgaccttaacccgac

SEQ ID NO: 76774 - DNA, 290 bp, Zea Mays
gtagcatcgcaattatgcccccatcatctccccctgtgtcataatttaatttcgtggattccgctctaatgacggccattatagctctattttcaccgcgaaccagcatgagtcatcaaattgcaacatggatgacggaatggcgtggccagtatccccctcaatcccgtccaattctcctaggatcctggatcaccaaatcagctctgacggtgtaagctgggacgaaccagctgctgctaatcactggtggagggaaccgtaacatcgcaattatgcccccatcatct

SEQ ID NO: 76775 - DNA, 740 bp, Zea Mays
caagccacccacgctgaacggcgccatgatgattttgtttttaccgcaccgccaccacgactgcctcgaccaggtaaaaaccgagattctctccaactccccacgtggacaagggttgggtcgggcaagctcccagcgagtcacaagccagataaccggcccataggtcatttgttcggtccgtagtccaaggtcgtacctcacattctcctgcggcaatctagctgacgaggtggccacgaggcccccttctggtcagccagactgaccagaaggccgatacgggatagaataatgaaggactaaatgagatgccctagcgggtcgagccccccagtgggactgctcattgagactgaaccctataaaggggcagtcggatctcacttggataacccatttgtagctcgacaacaccttccctcacgccgactaggtcagggaagacaacccttccctcaaaagggcccgaaagccctttcgggggagttgtgtgcataacaaagaactggcaggcgccaacgactaactcgaagggccaattcagaagaggtcaacaaaatataggtccaaggcttcaccaagaacaaagtaaacccccagcaatccttacggattactcgggggctacatcatactgacgcgcttgagcgcattcaagccacactccgacgggcacctaccggacaactccgcatgggtccatccctagaggctacgtttgctccggtaggcacctc

SEQ ID NO: 76776 - DNA, 512 bp, Zea Mays
tccaggtcggtgttgagaccggccactacaccagctagggtgttgaggcgatcctcaccagcttcacctggaacgatgctggtctggcttcctccactcagacgcagagggagatgcctgaacctcatgtcatgcagctgctgccggtaggtgtggctgagagaacacagagtccgtctggcagcatcactgaccgaagcagcataggtggatagcggtgtcagggactcatgagctgacagagtcctgaaccctctatcccctgcatccatcaccctgacattaatgcgagtgatgtaatagcaagcccggggaggctcgctcactcgccttgtctcgtacaagggtcggacgtaggttcttaacgcgtgcagcacttcatgcagcaggttggggaagtgccccgtctcgaacattgatatgtaatgttcgacgacaggcccaaaccccatgaagtagtcctgctaggcgtagttggcctcctcgttgacatgttcctcgtcatcttcgtc

SEQ ID NO: 76777 - DNA, 510 bp, Zea Mays
cttcaacatgatgcactattttctttatttagtataattgttggtagtcaaggttaacccatgatgtgaaatatgcaaaaatgagaatcacaacacaagtggtcaaatgaaccttttatatttcccatttctcgtacattctattactctcactatttgggtattacaaatcctacccccttaaaaataatctcgacctcgagattaagatgaactagggaagaggtggggaaattctatttgtagctcttcttctctctcccaagtagcttcatcttctccatgatgactccattgcactttgcacattttgtcaccttatttcttgtcacacgagtcaaagtgttaaggattttgataggatgctcagtgtaggttagatctccctgcacactaagttcttccattggcaactgttcttacgggacacgaagacgcttcttaagttgagatacgtggaatacatcatgtacatcagacagatgatctggttgctcaagctggtaggcc

SEQ ID NO: 76778 - DNA, 763 bp, Zea Mays
gtgatagttagaagaactttagggaaaaatcaccacaatgttgcgagtactctagaatagtgaattagagtttgtggcgttgattaaatgtggtcaggacaaatcgtcatcgtgtggcggtgggacattaatcccttccaatactaggaaatggggcgatgtgccaaggttaggagaagatcttagcgattgagcaagcttaggagggtacgtgaaggttactcgataacggtagcagtgatctcaatgatggcaacaatattgaaagagggtaggggtgaggcatgacttaaatagtccggtggggatgaaaacaagtacaacagatagctctggttttctctctgccatgaaggcgcgtgaacttctccttttggactaactgtgcagggatcacacatagatttttggtccctcggtactgatttcctatggaggaggaagggtctgacaagtgggaaccataggtcagtgacacaaagtctgtagattgataccttctcggtgttccctagcaagtttgctttttgcatagaggagggactcgatgttaaatccaattgccagccatgtggacaacagagaggccttgtacctttagctcctaaattatgttcatgatggttgagatgacatctatatgcatgggaaataaactttcatccattcatagcggggttcaggacactaacctaagaactgaggtaacttgggtgcatggttgttgttggtcactactgaagtccctataaagaaccgtgtt

SEQ ID NO: 76779 - DNA, 478 bp, Zea Mays
caatataagaagtcatcttcgtctgtaccattaaacactaaggccccttttggatatttcagttctcgagcatagtgtttagcttcaaaaatctcttcttcagataatctttttcccgaagcgtgtcgtataatataatcaaaagcttcagaagatgcttcgggagtaggagtggcagttttttaggcagaatttgttctgcagcttctttttctgtttccttttctccagtttccaaggatttctccttggcgggctctgaaggcccagtttcagtctcagcctggctctttgtagcttcagctttggtcagttttgtctcagtctgcgcttttgaagcctcagtcgttttccctggagtggagcgtgaagtttttatcgtctccagcacatctagtacgttagccatccttttcctcttggggtcgctgtaagacctttttgtgcctttggcactgtcacctctgacgaagggctt

SEQ ID NO: 76780 - DNA, 487 bp, Zea Mays
tgaggattacatgcgaccagaagttcttggtcgtggaacctggaacctccgccaccgtgttttcggtggtcgtggccgtggccgtggccgtgggccctggaacctccgccgttgtgttttcggtggtcgtggtcgtggccgtggtttctgaccagatccagtggggagagcactgtagacgtgttatatagcattgttagcacgagatatggagtgattgtccgcatgggcataatgtatgtaacgggtgaactgtggtgatcactggaccagtgaactgtcctgaccctgatgcaaagtatcctccttcatgaattcccaatcagaaaatctgtgtaaaatctgccctgttcagagttcttatcctttttgtttactattagtcacgttcgtaaggctgaaactcaaaaaattgatgggctccgcacaagcggtggagattgtttacttggaccgaaaatatgtgaaaattttgtactgttcagat

SEQ ID NO: 76781 - DNA, 377 bp, Zea Mays
taaaatttggtgtcattcttttcactctttacttattactttgaaagtagttagtaatttgtgtattgactctcatttctagcattgccataattgttcctcatagattgcttacttgtcatagctagcgaatttatatctcttgtcttgattaaatttctctagtgtctttggttttagttaaaaccgtctattcacccccctctagctggtgtccttgatcctacaagtggtatcggagccgaggactccattttttgtggatctaaccatcccagagttggacaaaatggctagtaacaacattgagaagccaccacattttgatggaaacaattatgactattggaaaataagaatgtcaatgcatcttaaat

SEQ ID NO: 76782 - DNA, 913 bp, Zea Mays
ttcggcaaagaagggggatttcttcctgcagcgtggaaagaagggaaggtgttttttcgccaccggctcaaaaatggtatgtacgaaggttccacactccataaagaaatatattacatcattacataaatataaatacaaattgtttacaaagtgtttcttaaaacacttggaatcatttcccagcgcatttaaccagcaaaaaatacaaagattttaatcctccttaaggactttatcagcagcttcgttcagaagcctgtcgacaccttcgtcaatagcgtcatttgcaattttgataatgtccagtgcctctttgatggacgggtcagcttcaggattgtatgttttgggaggtggagaaagttcagctgcattgaggcataaatatttgtcagtgtcgatgctaaaaaacttacgaaaataagttaaaagatgcatacctataagtctagctcgctcggcagcttcttcagcctttttgtctcttctgaagcatcatgagattccttttcatttcttttgatggcttcatcggcgatttctcgtccgcccttcagccatatttcggagtaaaatttcccacctagggtagtagcttcggctgaagggttcctgatatcatcaaatgagaaggcaaagtctgactgatctacaaccttagcttgatcgcaaccagccttctccaagatggacgtggccccataggaaccaacaaaggcacaaaaatctcgtcggtcactaagaacttctttgaaagcttcaacttcaccatttatccattgaatgatatcatcaggatttccatgaataaatctatgctcagaggaataggctccaacctttgcaaagctattctttaagttcttagcgcattccaaggatatttcacaacatttttctttggcggcac

SEQ ID NO: 76783 - DNA, 537 bp, Zea Mays
ggtcgtcccataacggtcgtgaggttggtttgtgctggcccctaacctggtcgtgttatcttatgccggagagtcgtagctttctcctccctcgtccctcatgtgtcgtcttgcgaggttggtccttgacccttccactgttagcgatggccgagctgcggggtcgactggaaccatctcgatcagtcgtacgaacatccgacgctcgtgacgcaggtcttcaggtgcgactggcaaggtgaaggctcgtgcggcgagtacgccactcgccctaattctcaatccctttcttactctcgtggacgctcagacttatgtttctttttgtcttttgagaagggcatgaaatcgagtttgcggggctgcaccgggaggtcaattcggtgacccgttgcattcgtgcacgtgaagcaagtcgcctatagcgtttgctcgatatttcgagccatgctcggaacatcgtggacctcgacatccatcgtgggaccgctattgccctggtcgttgcccaatttcgcactaggtttgacctccgtg

SEQ ID NO: 76784 - DNA, 464 bp, Zea Mays
cacgataagtgcatcaatcgacactccgcgcaaaagtagcctaagggtgcagccggattagcacaagtacgcgaaaacggccaaaagtccacaatacaatacaagttgcagttacatacactcagcgagggcaccacatactacatcggctcaaccttcgggatgatgcccgcctccctataattgaacaacattattttcaattcctcaccctcaaaaagatttcgcagatccccctcatcaatgctcgtcccaatcggcaaagataatagctctcgtttaccaaaccggtctactcaaagatgttctcgctccatccccatccaacggtgcctaccactccgcgaaacctcgcccacgccatgcttcgacaccacccttcgtcgccggcacttggtcctcgcactaggaggatcagccacctcaccaacctccacccgcgatgaggactccgccgcgaccac

SEQ ID NO: 76785 - DNA, 444 bp, Zea Mays
gaagatgtccccgtttgaggctctatatggcagaaaatgcaggactccactgtattgggatcaaactggtgaacgacagttctttgggcctgaaattatacaagaggcagaagaacaagtgcgaatgataagggagaatttgagaactgcgcagtcaaggcagaaaagctatgcggatacccggagaagactgctagagtttaaggagggtgatcacgtgtatctgaaggtgtcaccaatccggggtatgcgaagatttaaagttaaagggaaattgtcccctcgctttattgcacccttcttaattctaaagcgagtgggagaggttgcctatcaactagaactacccgatcatcttgcggatgtacatgatgtctttcatgtatcacaattgaagaagtgtctcagggtacctgaaaagcagctaccaatggaggatcttag

SEQ ID NO: 76786 - DNA, 1199 bp, Zea Mays
cacggatgagaagcgccaagagcgtttcttggaaggactaattggaccactgaattatcaacttcagagccatactttccccaatttccagaccctgttgaacaaggcaatcggccttgaaagcaaaagaaaggaattatctgaccataaaaggaagtttcaaggtgagtctagcaggaacacccgcccgaacaacgctcaaggttcgcagttccgctctggaaatcaaggcggaaacaattatcaagtgcaacactctggacagcaaggccagagaaataatcaaaatcagaaccaacaaaggagcaactctcagaccaaccagaggtctggtgggagttcacagaatcgtcaaggtggcgccagtaacacgcaggccagaagcaacgcaccaatccaacccaatgactgtttcaagtgcggtgagctaggccactatgctaacaactgcccaaggcgcaactagcagacaccatagaaaagcaataatcagagaaatgattagaacacccccgctcgtggatctgctcagaacaagacaccgcagaaccagagcagaggaagggtcaatcacgtcatcgcagaatcagtacctgaggatgccgacatagtgtatggtatgttccttgttaactccatacctgcataagttttatttgactctagagcatcacattcgtttataactgagtcatttgtggaaaaacacaacatacctaagtaccccctgaagaagatgttacacattagttcagcgggaggtgacatgaaggccacacactcatgcccccatgttaatctcaagattcaaggaataaattttttagtcaacccagtggtcctaggatccaacggtattgatgtgattcttggatgcaactggttgaaaagttgtgatggagtgatacagtgtgccaatggaacaattatgttgacaagtcctcaaggtgaaagaatccaagttaacatagacaagtcaacagatgaaaaagggaagacagtgatcaatcacttggaagaaaagcccttggaaaatatcaaagtagtgtgtgaatacccagacgtatttccggaggaattaccaggtatgccacctgaccgtgatatagtgttttctattgaattattacccggaaccgcacctatctcgaaaagaccttatagaatggatgtcaaggatttagtagaactgaagaaac

SEQ ID NO: 76787 - DNA, 868 bp, Zea Mays
gcgcccccttcatagacggatcagtttcaggatcgtatggctctggaggggtagatagcttagctgcattaaaatacaaaaatctgttagtgccgaagctacaaaatttacgaagctaagttataaaggatatacctataagtctggcccgctcaacagcttcttcaacttttttagcctcttctaaggcgtcatgagactctttctcattttttctaatggcttcatcagctatttctcagccacccttcagccatacttcggaaaaaaacttcccatctagagtagtagcttcggtcgaagggtttctaacatcgttggctgagaaggcaaaatctagctgaactacagccttgacatgatcacagccaaccttttccaaaatggtcacaaccccatgggcatgggtaaaagcacaaaaatccactctgtcactaagaatctcctcaaaggcttcgatcttgccgttaatccattggataactctataacggtcaccacaaatgaatttttgctctgaagaaaacacaccaactttggaaaagctgttcttagattcttggcattccatagctaaaccgtagcatttttctttagctgcacgaaactcgccaacatttctctgtgcccttgatcgttcgatttcacatatttcatgtttcgtcagctccacattaaaattttcagttgcttcgacaactttcttttctagctcttacacttcaactttgtgggcttctgcttgagcagatggcttagctttgctggatttcagcctctcgaccaaagatagcaaaatcttgtcttttgcgagagcttcgtttctcaagttcataacctccgatagaaggtttccaagtgctatatg

SEQ ID NO: 76788 - DNA, 760 bp, Zea Mays
cgcataccctaggagcttcgcaagatcacaccaagcgtacccgtggtggtggcgggctctgacggtggaggtagaagagtggattgctcgctggagttcaacgagagcattcgtccgccccacgctcagttctgcgcgcacgtcgtcgtgatttccagtacgagcccctttcatagtttagaattgatcctcgctttgtttagatgggtcctgcgtagagaatcaagcaccgtatcaatgtctgggttgtcgccgacgatgttccgccatatggggacggcggcgccgccattcaaaccgaaacgggtgaggaagaacggtgtatgtcgttgatgagtgagcgaatggctgggattatcccgcgtgtacccgttcggcggtgtcaatccggaccgtccgtctctgatcgggtgcatgtgattcaccatgggcaacgcaagatctggacggttgaactaagatcctagggccagatatgtgtaccggttcacttaatgcgacatctaatcatggccctcggaatgagatccaatggccagaatccatccatactctcggtcgcgacagatttacatctgagaccctcaggattccctaaattgaacccgcaatccacctaggtgttgtctgagtcttgggattcttaccccgatgcccctgcgtttctgtttcattgaggcgcagtccagtgaataagaaaaatagataaattgatttaggaatgaatttttaatataaaaacaattcctagaacttgttt

SEQ ID NO: 76789 - DNA, 483 bp, Zea Mays
ccgagatagaaggaaatatattccaatgagcatgtggtggaggacgcacaaaaattaaggtatggcagattttatatagaactatgtgtacaaatccatatacgtgtatgaatacacacacaatgtcttctctcggaaaatatgtgggtaaatccctcgaccaccaaattttgcagcagcaggtgacaagttcagaaatcggataacttctatgtcaccattatggaaaccataaactaaagcatatggagcacatctgtgaaatcacttccgaccatcgattgatattgtattgagaatgagagggctctggtctaaattattctccctgaagaccaccttctccaagcattttcctcataggtagtttttgtgtattcactgttttactcagttcgaattgatacatacaccaaatgacgactgttggtttccacagcaatgacccagctaccttataggagcaacattcggccgaccagg

SEQ ID NO: 76790 - DNA, 1833 bp, Zea Mays
aaaacaaactctttaattcaataatagtacgaaatcacacttttattacatacactggggaaaatgaacatagaatgaacatgagatataacatgtcttttttttattggaaaaagaagctatggatcaaaacttgacgatgatgaatcagaaatctctgccattgctgctccaacatccatagaaaacacgaacaactacttcccaacggttcaaatatgctagttgacaatctgaggatcaatattctggtataaaaaaagcaaatcagaccaaaaaaaatgatgcataaaaaacaaaaaagctccataccaccatcagcactgcacgcaccacccacgaaaaaaaggaaaaactagaaaaacaaaataataagagcgcccaaaaaaacaacacaaattgaatcacaaaaaacctgaagaaacatgttgcaaactagagacttgtcttcagtgttcttctcactaaaatagagatccttggccaaggtgattcgaatttgagggatgtcctcagtgcggatcttgagcatcatatcaacaaatatatcccaatattccatgtattgaagtgtgaaaataccgcagtcatgcctatgataattaaagaaggcaaaattactacaagaaataatttgttgtggctgtttttaaaccatataaaatatgtagaaaaaattaagatagcaactgaatttggattctaataaaaagaaatgatagagttgaaacttacgtattttcctactttggtactgtaggatataaaattttgaatgatgatacataagcatgaccaactaaactaggcagagcaactctaactaaggtctaaactaggctaaaaaatgacgatacactacacatggaaaaggcaatgaaaacaaaccaacaaaattgctgaaaatctcggacagatcagacaagagcatttataagacagtagaagtgagcaacacactgggaataagaatacaaacaacttaggaaaaaaagactacatataccaactatgtcttatctgccaccatccataaaagtataccaaaaaatagagcctcagactgacatcacagcagcacaacactacacccaatgaagatcagagacatgggcaattaacaactaaaacatgatagtatctggatttgtattctactaatagtaaaaacaactacaaaatatctacaaataaataatatattgagtgagattttaaaccatataaaatatatacaaaaattaagatagcaactgaatttggattctaataaaaaaagaaaaaaaggatagaaatgaaacttacgtattttcctgttttggtaccgcgggatataaaattttgaatgatgatacatctatgtttgaatcagaatataataaccataggactttaaacatccgaatctagaaaaaaacacacaacattataaaaaatgaaaaaggataaatatcaataaaatatataatatacacaagaaaacaaaaaatacatgaagaagaaaaaaggcacttacaagcttgtctctaacaaagcattgaaaaggatcttcctcatcaaaatatgaatccataaaaacaaaacgcttattcttcaaatcaacaatgaacaaaaaccaatggttcgcatggcacactggaaaatacagctgaaaaaacagattgaggtaaaataagaacaagacataaatgtatggcacattaaggctgctgcttggaccaaaaaaaattacaacaaactaagcaaacaaaaaaccttgttagagtgatgcaacttcaaagtagaattagcccctagaaacgatttccttagatcttcaactagaaacgattt

SEQ ID NO: 76791 - DNA, 569 bp, Zea Mays
gatggccccccaaaagcactctatggctccctggaagtcgaagcggacggtgatgatgccatggggacctggcctcgtgatgatcatgtacgtgtagtgtagtacgaccatgaatttttctagtccaggtctcccgatgatggcgcagtatccacaatcgaactaagctacctcgaagcataggaactcggttcgatagttgtctggggcgccagaggtgacgaacatgtagaggtgtcccaacgggtactctccatcattcggcacgatgccgaagaaggaggtgtccgactgggtgaggtcaacgatcgaaattccctgggcatgaactgtccgagggaaggtgacattgatgctgttgccaccatccaccagcacctccttgactcggctttcccgaatcactagaccaacaagcaggggcatttgccagggtgatcaaagttgagccactggtcggctcgactgaaggagatggtgtgttctaaccaccgatatggggttggggtgctgttggtggccgctaggaccttccgatcggtgagcttctattgcctcctattttcctg

SEQ ID NO: 76792 - DNA, 526 bp, Zea Mays
gttcactttgaggtgcctttggatcccagtgatgcagagataagtgttatgcttgatatgttagccgaggattcttctgataccactcctgctggaacattggcggtggcgcctctcccagaagctagtaaagccttggatattcagaggcctatcagtgttcgctcgaaacgcccttgccgggccagccagcctgcttctcctgctgatgggcagaaaaagaagaaaagacgtcttcaccgagtgtctagcttggatcgggatgctggtcctttggttcctgctgctgaggaagtgcccgtgcctgaatttacttaggctgatcccgatgggtgtactgtccgtgttgttgatgaaaatgaggaggaagaagaagatgaaatccctcttattcggaagaacagtcggcgctacatagctagtggggaaagtagtgtagttccttctcctgctttgtctgccctcgttggtctgcaagaattatctctggcagactttgattaaactcttgaagacatggttccag

SEQ ID NO: 76793 - DNA, 291 bp, Zea Mays
aacaaatcttatattctgggcaaggggtacttgttcttgatcgtgacctcattcagagctcgataatcgatacacattcttctggggccatctttcttctccacgaataggacaggggcggcccaaggtgaggtgcttggtcagatgtaacctttctctgacagctcatcgatctgcttcttgagttcaactaactctggtccagatactctgtaagctcttttagaaatgggggcggtgccaggaagaagctctatagcaaactcaactttccgctcaggtggcatacct

SEQ ID NO: 76794 - DNA, 961 bp, Zea Mays
cgctgagacaccttgctcgacaccgtgggggaatggtgattcccccattggagcaggcggtgccaggaatgttggcgcaggcgctcgaggtgaaatgttgatgctggccaagtcccttgagagagactcaatgctgtcatcattcccggtggcatcttctgcgcacagagtgccccgtggggcacgattctggttactccgtctttgcctcctgcaacgagaagggtggtggcgagagctttgatcctctagaggggcaggcgggaggagtaccaagtcgtactcgatgctgagagacatgaactcaagactcctgaacctgatcatcatcccgagcatgagtgggtggtgagaatctgccatctaaagcgctggcgattattagggacgtttcacacgactaccccctacctagcgcgccaattgtcggtgtttggaccgtgggtccttaatcaaccagtaatgtgccgcgtggccggctctagatggtgtgcgagatgacacaagcgattatcctggttcgggcttctcgaggccctacttccagtagagggcatggggcttatattactcacaccatggtgcctgtagtaggggtttacaaacatagtaggagaggggaagtccccaagtccctagagatgattgaggcaagtgccaatatctaagatagagtgagaaagcaagaactcgtctacgtgtgtcctcctgtcccatggagagaacactaccctatttatacaccaaggggagcgtctacagtgaagttgagtcttgtattcgaaggagagatgccctggcgtctgatgtgacggtgatccatgtagcagattcgcgcccgatgaatctacgtagaatcccggggccgaggggttgtccatacgcccgagcccccgagggagaggccgcccatgctatagtggttgtaaacagcgtcggggtatgggccaaaggctgctta

SEQ ID NO: 76795 - DNA, 491 bp, Zea Mays
agataaatagattccatttcatggcactgtagcataaacatgataattagcttacaaattcatatgccatatttattgggattaagctttcacctagagactgctgatgaccgatgagctcactaaatcagttgcccttttaactgtcatggcatctacctatttgtttacctaaatttgtttctacgcaacaattaatctatgtttcgtgtgagctcctgttccacctgcagaatctgataatgaaagtgctctttaccatcatctgaggtcgatatgtgaatatcacgagcaatattaaagaagtatttcttatttcctcgttcattatcggcatcttagaatgtgttgggaaatagtcaggtggccgagtagtgcctagtaatagtttggtggtgtagcgcctagtgcgcagcccattgtacttaattgtccgttttgaaaaaaaaaagttgtgatgagcattaggtaggaattttggtggataaagg

SEQ ID NO: 76796 - DNA, 433 bp, Zea Mays
tagaagcacgacactacgccccaaaattgaaatatccgaagggggcattggtgttcaatggtagtaacgaagaagattttctttactgtctcccggataacaaagaaatatccgtttgccgggagataggtaagagcataggatttccgaagctagaagacgacctttcaattttgtcgaaggatgaacttgctgacagcctagcatacaacagtataaaggtataaaagtttacttttaagttggaaactagcatatttcattgtcatatttaattctttcttcttttttacagggcttgatttttagtaatgccctgagggcacagaagaatattgaggacgaaggctatacaatggctctgaataacctacgttcagaggttattgaattgagaaacgaaggtctggaaaaggacaaaatattaatttca

SEQ ID NO: 76797 - DNA, 515 bp, Zea Mays
aagcaagctatttatagaggtcgggggtgaccgtccacttcctaccacgctcgccgaacagtcgcaagaattcaataagcaattcaagccgtctgaaaatgagttaggcaacaggcgccgcttcgcataacacgacaccctttggaccaaggtcaattgtttaggtaatatgactacaccctgcggtcacatcaagttactactctaggacagtatggtaaacactctgcgtaccaagacaccccttgggcacacccattgggtgtgtcgccaagaattttcaaagattttctgaagaagttatatccacaaaatatacgcaatgaatgtaccactacaaaaggaggagatcggctgagatggaaggaagtccaaatgtggctactgaagtgcaagtctaatcagcagaagcattgaagcacagagcagagtgatgtccagctgagagccatctgcctcaaccagcaagacgtccaatctgtcatcaatcaaattaattttagacctaacaaggc

SEQ ID NO: 76798 - DNA, 379 bp, Zea Mays
cctcctgcaaagcttgatagtacatgcgttgaaggggttggcattgatcaaggttgatggccaaaaagcgctcctgctcttccttctcttttttttcagcctccatgttcagacgttgcttatccaaagctagtctttccctctccaactctatcattgtattgcggtgttcccgagcctcctcaaccttcactttctccaaactaacaatttcatcaagtcgtacctttcgctcatcttatatctctttgaacaattcaattttctgaacagaaagatcatgcatcttagacgcgtattcatgtgacagtgacactgaagaagccttcttcttagtcgcttttgctccatccctccctatgggcattttccttgagga

SEQ ID NO: 76799 - DNA, 763 bp, Zea Mays
ggcctgaagatgcctatagtccagcatcggatttcaagatgccttccttgtgctggaaaagatggccggaattcagactgtcagcgcagcgctagaaagtgttcagaggccctaatgccgagtactgtcatcggagtatgtatgtatgcatgcatgcttaagtggtcgtactacagaggagagtagactagagaccaatgttcaatgtatagctagctggtcacactcacacccgactgacttgcaggacggacggcatgaagaagctggggttatctggatcagagagacgagctagtggaccgcggtgtgaagaggcaggagctgggtgagcgagcggagacgaatcgccgtcacggcatgagccatgagatgagaatgacggttggatctgcggggcacatggggcaagcaatgctgccaatggccgtgggaatgcattgagttgagctccgtcgtcggaatccaaggcgggtgtagaacgtgctgtgccgctgcaagcctgcacaaaatgctgcgttaccagtagcacagcacagcagcctctcgtgacactcgcttcacacactgccattctactggccttttgttgcgattgcatggattggccaattgctggatctgctgctgggatggacgatcacgctccatgaattatatctctcgggaaaaacagctacaagaggccaaggaaccaagccaccgtggttccgctctcaccgaccacgctgctctgcaacaaaactcagaaccgactgcgcaa

SEQ ID NO: 76800 - DNA, 509 bp, Zea Mays
tttgtctcctacctctcgtgcgggttggcattgccgatctcccccttcttcatgttactgttggaggacttcggtctccagctctagcacctcacgccccactccattcttcaggcggcatctttgcccacctgtgcgagatgttcgtgggggtggcaccgtgcacctctctcttctgccactttttcatgctggtgaagtccgggaaggccaaggaccatctcggtgcgtattatttccagacaagggcagattcaaccggcgcctatatctcctccctcagcgacgcgaggtgggaaaactggcgggccaaatgggtgatcgctagtaccgaggctagcgaccgcctcgttcttccgagtgacagaccgaggctcgagaggaagcaatggagagctaagccgtcgttgatgccagagttcgagcccgtgttgggaaggatcgaatctctagcgtccggtggtctaacgtcgatgcacgtggttggcgacttcttgcagcgccggatc

SEQ ID NO: 76801 - DNA, 1293 bp, Zea Mays
tttgaaatccggaatagatcaacatagaaggaaagatagaaggtaccaaatagaagattgctagggaagcgaggagtgagtcctagcagaatagagtatgtctatcaggtcatgacattacgagcctaatacacaaggatttttatagaggttcaatccatagagtgcataagaccctcatccccttgctaatggtagattattgtatggagggtgtaaactacctcctactagtgccatcgtaaacacatttctttgaagtctcttggcttgagtttggtcttgagaaccttaattgaatgatgctctaccactctcttttatagtccaaaggagtggtagtattacatgtatatagttcatatggctctagtctatcatagagccaatcgtctatatcttgtaacaggattgtatatcgtatcttatggtaggattgctccaatgtaataatgttgttctgctcttgatgtattaattgttccttgtaccttgtactataagcacgattctccatactgtcctatgctggcaacaaggatcctcccaatctttggacacactagatttcatatccagatattgcaatatgttctaaagtatatctacatagtggctctaggtacacttacgtcgtgcatgttaggatagaggcatgctcgtaatatcatattaaatgcaatcgttatagaggttatctctcagtaaggcaactactatactagccacctagataagcattatgacctatggcatcaacctttgtgcatcgatcatgctatctgcaagtgattggccactaacactgctcttcatgtcctatcgtactttgaggcacatcatagacgtggtttgggggttataccgcgtgattggattcccgactgagtgcgcgcaggccctgtgcatgccgttgactgtgcatgtctgatgattggtagactgcacctgtggatcctagtctgcacggacggatgcagcccagatgtttttttttgtctgtaagcctgcatgcggggagacgtgaaaaaagagatactttgtctatccaggctgcagcgagcccggcgtcctagagcctagctaccaatcacgtccatagggtcgacctgtgtagtacttgggggcctaaagtgtctcgcatgctacattgtgtacatgtacgtcatgtcagctctataatgtcacacattgcatattaatgtgttatccaagatttatccgctaagttatcgtattaggacaatctttaagtcttcttaatgtagggcccatgtctcaattatgtagtgc

SEQ ID NO: 76802 - DNA, 407 bp, Zea Mays
cgcgcgacacgtgcacacactgtgttgacgtgcggtgctgcgtccgctgacattactgggacaggcaggtactgctgcactgctcgtgaggtcgtaacaggcatgggtgcagccatgctcgagtgatggcagagccatgacgaaccccgcctctgctccatcgcggtcatctcatccctcttcctttttgtggccacaaccttcacggacacgacggaaacgcatcagattctctctccctccttgctcctgtcgtcccttaaaccgagtccagcaaggggcccgacgcggatgcgggaaaaagggtggaaccgcggtggagcccaccaaatggggagaagtatccgcgagctggttccagcggcaccccgagctgcgctccgaccgcgccccccaggtggcgcgac

SEQ ID NO: 76803 - DNA, 905 bp, Zea Mays
tttgagatgaattattgaattaggaggagatgggatacgtctaccctagagccgcccgccccctgacgaatcgaagggaaaccactcgagtggaccactcgtctggcccaagactgacccaccataagtgaccgaccacattaactttacgcctagcgaacccctcagactcatggtctgtgagctcctcaagctgcaacacacttatgacctacgaaacccttggactacgacacatttatggcccgtgcgccccttggcttgtggcacactcatgacctatcagggctaagcctgagtgcgcaggccgcctgcagggcacaacgagacaagccacgtcgaaacccatactagataggccagggatcagcgtagctcgaataagggcgcccgggccccatgctgcatgcgtcttccgctatgaagaatacaagacgactcggtgaccccaaggctcatggacgcacgtggcttcaccggggtagaacgcttagttttagcttcacccgatgactccttctcgaggaagccaggaggtcggccaccaaacaaaatagagacgcacagacgactgacggacggaccgacgaaaggaggagggggacatcgacgaagacccggagaccagaggtccatcgccaagccaagacttagttaggactctagctctgtagcccttagctccacctcctccatataagagacttgtgagcctctcctccctctctctcccccgcttgtaaccctactatgagcattgatcaacaaaggtgatggtagcgcaagtcgccgaagactcgatgtagaaacattctgcttgaagtagtataaatcttgcgccctccacgcacaccgtccagagcttagaacgcgcacacaaatttacttgtctgagctaggttcgg

SEQ ID NO: 76804 - DNA, 528 bp, Zea Mays
cttcttcttcggtgtgttggttccagtgtaccttataaaacttgagagtcctctttcgagtaactcggtctttctgatccaaaacttgaataggatgttctgaataggttaagtctggctctaaaataacatcagccacatccatagttcgatcaggaatccggagacacttcttttattgagatatgtggaacacattatgcacaacagatagtgattctggcaaccgaagtctgtatgcaacttgcccacatcgctcaagaatagggaacatgccaatgtattagggtgctaactttcctttaaccccaaatcgactaacacccttcattggtgatactttcaggtacacatgatcgtcgacttgaaaaaccaatggtcgacgtcgtttatccgcataatttttctaccgagcttgagcttctctcaagttatgtcttatgcgttggaccttttcctttgtttctttaaccaaatcaggcctgaaaaaccaacgttctcctggttcgaccaattcatgggtgttct

SEQ ID NO: 76805 - DNA, 535 bp, Zea Mays
gattctgtaatccatcgcggtcgcaccctcgaagaccctccaggtgattctctggtatctgctgggtgcgtggcgggcttggcgttcgagaatggcggcctgcaccgccgggattgccctatcaccatcggaacaggtcgtcatccgtcgtgcgccgtgaatagctgaatctgctccgcggtcgctggcaagaccctccccaaaggtttgttttctccttcttcatgcgtagctcaagtcgaagccaggtttcatggacttgcgcgttggtgtggtggtgctccggcgcgtcgcggccaggatgggtggggcgccgtcatgtctggtggcctggtggaagaaaacacctctgccgttgatcggatacttaacggccaggattctgagaaacgtaccgctttggtgggttgggatccagaccgtagatctcgtggttggcggctgtgattataaacgttatacccttcgtccaaatcgtacgcgggccgtcgatcctggaacgttcagtcgtgcggctggcatcgttgtttaaaat

SEQ ID NO: 76806 - DNA, 1215 bp, Zea Mays
cgtggacataaggaatgttaatgtgtagatgttgagtaccaatattgtctccccttttttcatccagtcatcaagatttccaacttcaggctggggaattcttcatagagatacagtgcacagaatattgagttccctccacagtacaattaaatttgtagattgcagatttttcagctccatacagcaaaaaatttgacaaggactaaacacttgtactctgccggggatgtaattgaaaatgaaatcttcgcatgattgcttcacaacatataggttggtgtgaccagcaaagtagaacccagtgctgaaatttcattcaggatctaaaataaaaaatatataaaggataccattggcctcacagagtcacagacctcagttggcgggctaaggcactagcaaaggactgaaaaaatacagtccctgacaaaacaaaaatcttttgtgtgtgttaggggggtgggggtggggggagccacatttttgtgtcttttgcttctaagtgaaaactgcttcggcttcattgtttttccttggtttttggcttcaccaagccattttcgtgtgtgcacatttggcagcacttttgattaagagggtggagaatccctaacaaaagccctgccaaagaggaccttagagagaagggaattagggaaatgctttccatctattagcctcaagctttctgcaaatctgcaagtttagctactttgaatgacaattttggaactataggtattccatggccttctacagttttgttattcttcagaatcttcttatctggtgagaaaaatacatgggtacttaagttttccatgtagttcattatttattggttcagaactgcaatctaatagttttgttttttctcagcggatttggtgcagatgaaggcaccactatccacttagtactatctcggactcaccatcagagtgtggtccttagtatgctggcatccaatccttggctcactgtgctgttcgacaattgggctaccatttgaggtgtgcattaagaaataaaactgaggtatgtaccttgactcgatgaggcatgctgagttgaaagcatggattcgctccatgatgttcggctttactcccgcattccatcatgcgtggtccttgaactttcaatacaattatgtatgacagccattgtttaggcttatcatgtatcaaagcctagtctattgaatatttg

SEQ ID NO: 76807 - DNA, 520 bp, Zea Mays
gggttataaaagccagggaatagaacttgacgccaaagctttctgtgaggccttcaaccatattcatgaactgcatttctagacgaaggcaaccaaaagcctcactttgcataccgaagaggttcgatgttctctgccttggcctaccgaagcaagtggccaaattaatgggcaaaagaatggttttatatgaagaatgacttgacttcaaaagaatcgtgtttttgatgttatcagattcttctatcctaattattctgtcatggctcaggactcaaagaaaaggaagaagaaagtgacaacaagacgaagaagaaagatgacgagacataaactagtttcttcctttccatcctctaaacttgttttgcatactaacaacgaaccctaaatcaccactaacaacacatgcccatcgctaccctgatccaattacacacaagaacaaaaaatgaaaacaaaaatcaccactaacaacaaactctagtacaaatctcttagtcgctcaacaccaatgatg

SEQ ID NO: 76808 - DNA, 342 bp, Zea Mays
aagctactaggctggaggatgttgatgtactcgaagaagaacggctgaacgcagtaattcaatcggcacggtaccagtagactctgagacgctatcacgacaaggccgtgcgacgacgacgatccttttcagtgggagatctcgtcctccaccgaattctaacgggggagggacgacacaagttatcgcccttatgggaaggaccattcatagtagcagaagtcactcggccgggatcatatcgccttactcaaatggacggcacagaaattgggaactcctggaatatagaacacctcaggaagttttacccctagctgtatttcaaaagctatcgggacg

SEQ ID NO: 76809 - DNA, 354 bp, Zea Mays
cggggctccaagaagtgcgagtaggcgtacgtcgccacaacaccatcacccaagcaccgtagaactagtgcctcctcgattctccctgtcatcatccacgccgccaccactcactatggtgcatcactgcatcctccattcgccaagacgccaacatcccctttagtcgtgtgggtaagtgggttgcagcttgctagttgctggtttgttgctgccttgcggcttgcaggttggagcgtgcagtggtgctactacaaactgttaactgcagtgaacgtctgaggaagtctaagcgtccgaggaagtctgataaattgggtagaacgggctacccgaacccaaacccgaaaaatt

SEQ ID NO: 76810 - DNA, 490 bp, Zea Mays
ggaacatgcgcctgcaactcatcaaccgaggcgttcgggagaggagcggcatcaactggtctacctcccccaacagatggagcgatatggggtcccaaccatgcatgtactgaggtctggaccgaaaagaactgatgttccagaaggtgctgcctctgacgctgatgcttgttatcatgatcttcatcgtcatctggggaggaaggcggaggttgttcctcaaccaacaaggcaaccgaaataccaaccttcacagaaatggagtaaatcaaagtgtgagggaaacatgatccatcttctccaatagacgtcggctcttcaacatggagatcacagcgagaaagtaggcaatccatagagaaaccccatgccttcaacttcagaaccgacatgtccgtcccatcaacagaatccggatgcaatccttgaacgatgcagtgtccaccgagtagatgctctgccgtatcaatcccccagaggtgtgccggaa

SEQ ID NO: 76811 - DNA, 307 bp, Zea Mays
gagaaatctcatgtggagcccacatccatgtgttgcctccgtgaattatcgagtctgcatatctgcatgtagtcaaaaccgaatgcaactactcccacacctgatcccacctctccttgatcccctgtggctaagacccatgtggtccatcgtatggttagctttcgaccaatcaaatcacgtcacgcagtgtaaatccgagaaacactagttattcaatatatacgttgcgttgcgagtccgtctcgactcgtttcattcgtaccgacttcgtaataacctcgactatatgttagtaacattattt

SEQ ID NO: 76812 - DNA, 537 bp, Zea Mays
taggatgtgcgagtgcgtgtgtgcatttataatgatgagtatatgcacttctggatcgtatgcgtctgtactgtaccagcctaccacgtctaaaaagctataatttaatttttaatatctaattttatcttcgtggcaacatttattcacgcaaaaagacaggtctccaaaaacagtcgatgcacgcgctatccaaaataatgccggtatacatcccttagaccgttagtgtttcaaaatagctctgacaagtaaatttgtatggacgttctagtttctggacggtatgtgcgatgggtacaatatttataccggttcagacgaaacctccctacatttaatcttcggtaactcacgctactggtacctttaccggtcaatgttcatagtacagattacagacaaccaagagagaggggaaaagctcccaagtcacctgtacggaggagatggacctaaaggctatagagctggaggcctaattgagcctttccttggtggcggggctccaggtcttcgctccttgtcctcgtcgat

SEQ ID NO: 76813 - DNA, 693 bp, Zea Mays
cggacaggagggcgagggtggacctggaggtggctggccacgacacgcgtctcatggtggcgcagccaacatatttgggggaagaacgaaattctccagctatggtggctaatcgagggcaagggttgacgctctggcttcgtaacaaactaatggagctggttgtgcactcaatttatagtatctgtgagcggtggctccaaatttggaaaagggaggctggcggccgaagaggggggtgagtcaccggcgcgaactacgtggcgttcaccggggcaatgtctcaggcgatggacaggctacctacggcggtctactgcgacgtggtaacacttctgaatatgtggcgtctaggcgtcaagcggcaaactccgtcgagggtcatctcgaccggccgcagggcaagtgggtacggcagccagctcatggcctcatccgcggtcaagatcttttcaccgttggtcgttatccgcacatcagaggacacgaatcgcaacgccgacgaggatcgcagcgcatgcccaccgacggtgacaggttcactgaaccagcaatctggttcagttactgtaccatcacgttcttcatcggacgttctgacagagcgaattgaagagctttgttatcaatttttcatgtggcgacctactaatatgtctgtatcaaagttgttgtccaatgtaccagctgcaa

SEQ ID NO: 76814 - DNA, 626 bp, Zea Mays
atgaggtaaattttgcttctttttttcaaatcaaattttttgagatttgcataatacattcatgtttaattgttggatcttatatcctatcatctagctagagcaatttattccttttagccatagtcctccctattctctctaccaccctacctttccttatcaatacaatttatgctcctctcatcaaaattatacatccatcgtcaattttccagcttctatacacactcttatttgtaattaacatcatttagtttcaccactccatcgctcttccatctccactatcagtatgtctccaaaaatcatctcaactaccaatatgtttccactatctgactatgagtaattaactctcacactggcattatatggagtaggcactccaactcaatcttttttagtggtggtttaactagtcagcatgactcggtattgatatcggcaagttggaagatatagacaaattcacagcataagccagcttctatacacccatgttaatttcagtaggattccctatcccacttgtcttttttgtaaccgtagttgtcaaatatgtcaccaaatgttattgccagctaacctaagggtgctagcagacattgcttagtcaccacaac

SEQ ID NO: 76815 - DNA, 536 bp, Zea Mays
cgatgatatgttgccgtcgataaccactaatatcagactctagcttcgagaaaccaacactctttgacagagtgccgattatttttgccccagcgcggtcacagatacgtcccaggatttcctcatcaactccgtcgaagagcatggatcccggctggtagccacaagattttccatattgttctagctcctctttctctgcctcagacaattcctgacctcccaggtgccgaaggtcaaattctttttcctttgatgaagtatcaacaacttctttccccttgccaagcaccacgaccacgttttcctctgcggtcgcaactgtctcctctgcgaccatatctggtatgagcttgtcaatttctgacattgtgctcataagattagcagcttcggcagcagcttcagcttcggtagtggcttcaacctcggcacttgcaacaggcaccattctggacgccgaggctagaggtggtgtttgctcaatagcttgcataacattgacaattcttcgtcttttctgaccttcagtcttc

SEQ ID NO: 76816 - DNA, 363 bp, Zea Mays
gtcccatccccaccttgcgcgatgcccggtgcctcggtcttgtgcccttccccatcacatcactgaggaccgccatatcctccactgtcgccgctcccgccaacaacacattctccccgttgtgattgtcacccagcatcgccccaactttggcgttgccccaccgccctcgtcgtcggttcccccaccatccgtgcccaccttccaagttccaacctcctccccacgccaccatctgcggcccttccatcctcgagcccacacccacgatccacaggtgttgtgcctgccatccatgctgccaaacaaactttgcatgtcgcacccatcgccggcgccccctttccatccacgcccccgccg

SEQ ID NO: 76817 - DNA, 293 bp, Zea Mays
gttgggccaccattgtcgaaccgtggagcgcagagaggaataggaagccgccgcgacctagctcaggtatcaccgttgcattctcctgggtgtccctgacctccgccgcggatggtgtactgccgccgtacttggccgttagtctgagcgacgggaggaagaattgccgccaccgccgtacctcggcttcagcatcgatctgtgcctggaggtcgcctgcacaacagacagtggtaagagccctcatatctgtctagccttcgtcttcctcgcgtgtagctcgatgagaagca

SEQ ID NO: 76818 - DNA, 403 bp, Zea Mays
gcggcggcaggggttggtacgtcctcccagcacgcgtgccccccgatcccaatatgcgcccaaaaagagagcgccaatccgctgcccacgccgcttcgatctcttcctttttgtcatattttccggaagaatctggcgccgagacatggcttggacatgattgtatgcaatcagaccatattcgtgctcagccactaacctaaactgagcagaggagagctagctcactgaacaaggcattagcgttaatactaccattacatacttgcatccaccacaccggcgggtaccaatgaaaatacaacggcacagaaataatataaaactgcctctgctgatgaagcgcaacgacatgcatgcacgcttactccacacagttttaggttaccatgccgatccccag

SEQ ID NO: 76819 - DNA, 355 bp, Zea Mays
gggatgcccatataacacctcaaatggggatcgatctagcaaagaatgagagttggtgttgtaccagaattcagctagcggtagccagtgactccatttgctggggcaagcatggacgaaacatctgaggtatgtctcaatacattggttcaccctttccgtctgaccatccgattgcgggtgatacgatgaactcatgcaaagttgtgtgctggacaatgtaaacagttgctgccaaaaggcgctggtgaagacacgatcacggtcggacacaatgttgtctggcataccatgtagtcgataaacctgatccaaaaagagtttggcgactttgggggctgaaaaggggtgagac

SEQ ID NO: 76820 - DNA, 760 bp, Zea Mays
gcaaggccaacgcccaacggcaacgtggctcgcaccacacgccgccgcgccaaattaccaacaccacggcacacgggtgggcttcatttccgtcccgtcaatgcttccccgatggacctgttcaacaacagtgggcgccgggcgaaccaatgctactgcgacaacgacctacgactacgatggatgctgctcctccgacaactagggagggagtagccagttttccttttggcgcgtggacaagataggctaccgtcttttctgcacaaattctgatgtggattcccctacaactacgacgctgggcctgctcctcctagtacaaattattataggctacgaaggaaaaaaaaggagagaagaaaaagggagccaaaaaagctcgctcgttcggaaagggcagcagcatgtagagtggccagcaaacggcggagggaggcataggactccactcaaaaagacgctgatcgattcttattaaagctgattgtttgaaccgttgtaactgtaatctatacaaacaaaaatattgtagatacagtataaactggtacggactaaagtcaagtaaacatacttgtaaggattagattatattctcctcctccacaaaagcacagggcgcagcatcattttgccctttattcaaccggtccatgtcctgcccctctctctctctctctgaaaggtgctgtgttctatatatgttatctttgctccgctcaccttagtatccttctcacttggcattaggatatgg

SEQ ID NO: 76821 - DNA, 350 bp, Zea Mays
ttcacaatgtgttccatgtgtcccagctccacaaatgcctgcaagtaccagaaaaccacatcgaggcagaggcaattcagattcaaaaggatctccagtaccgagaaaagccagtgaagattctcgactcagcggtcagaaggacccgcaactcaggagtgaggctctgtaaggttcagtggagcagagatggagaagaggaggccacctgggaaagtgaggactctctgaggaaggaatacccttaccttttctcgagccccgtctgaatctcgagggcgagattcctttaagtggggtaggtttgtaacatcccaaaattctaacccaggtttgaaaccctaatctac

SEQ ID NO: 76822 - DNA, 407 bp, Zea Mays
gtaactagctggcgagagacagtagatttttaatacatggttctgattgtgtccagaaaagacaactgttcctgtacagtttaggtttcagagccatagcgtgtgatgtttcgaacctttgccaacgacggagagacagagtgcattttagattcggacatgtcgggcggcaatctgttgaatcgtagtttatggcctttttctaatgtaactagtttataaaaaataagaaaatagtccaatgtaagagtagtatggcattgaggcactaaaacatacctggtggtgtcggtgactttcagagtcaaatactaacgattcccaggatctacacatgacgcgcaagaccttaggaccctctgcttctcatcgtattgttcggctctaaggtctggactgtccaaccg

SEQ ID NO: 76823 - DNA, 542 bp, Zea Mays
gttgatcctatttcttcgtataattgccaagaatctcgttgcacatagttttgatcatctctagccattcagtgcacggtttcttgatttgtttctcaaatttaaagtgataggggagccggacaagttcttatttctttccccccttctttcttcttcgacatcccccagccgctagaggtcagaaaagtcttgtttgccaagtagtcttgtactaaatccctggtgctgatttcggcagccaccactctgaagtcaacctcggccaactggcacggggagccgagttgcatatggcaaaacgtccttgtcattctgaagcttaatcgcatagggctcataaccatggtcatcaatttctccctccttttctcgtcagccttgatgtagaaccaatcatttgtccaccaggttggccacttagtgcggtagccaatcaccagggctctagtgtcctttcggtacgcgaagctatagcacccaaagttcttgtgaaggccatccgccctagccttcgtctgatagtgcaactcatgcactcg

SEQ ID NO: 76824 - DNA, 449 bp, Zea Mays
ctagccttagggttgtcttttgttttgtcagtgatattcatgcaagtgttgataatgctttcacccatatttcgttcctggtgcatcacatcagtgttatgcattagaatcaaggctttcatataagggagttcccatagaccacatttgtgagtccaattatgctcagttccataaccttcaaaacgatttccatgttcgtttagtttcaaatcattaagtctcgcgagaatctctgcaccactaagacgcttgggtggtcccctcatcacaatcgtgtcctttttaaaagcgttcctatcaaacctgaacgggtgatcctctggcaaaaaacatctatggcaatcgaagtaacatatctttccaccaaactttagtcgaaagcataaagtgtcctcaacgcatattggacatgtcaaaatctcatgacaactccatccagcaaagat

SEQ ID NO: 76825 - DNA, 1014 bp, Zea Mays
gcaacatcagagctatgtcgattaggactttgaagtcatccacgactggttggtgcaagactgcttcaacaacccatgtatctacctgtcgctccacttttgttgaaggtaccacacgcaaaggagtatcttccttcaaaccttgaagaggttgggtgagcaccccacctacttcactcttaaaaaaggatgcatttgaccacaacactttctctgcccactaaaagtgcacaactgcccctacacatgcacgcatacagcagcgttgctgactttattgatgtgtatatcaaagtagggaaaagctctgccttagagtgcctcgagctattatgtagaggtgttatttcaagttttaatgaggaatatagtcatcgtcccactgttgatgatctcatgtgattgttagctaaggaagaggaaaggaggttttctggtatgatacatagtatatatttcatgaatttggaagtggaggaactgttcattggatggagaggacaaattacaatggggacatttgatctaccatcatgcttgaggcggttttctcatatggcttgtggatttgacgttcttcttttggggtggcggggtcaaacaacgacgtcaatatgctcaacttatcatcgttgttcactgatgtgcttaaagatgaagcatctaatgtgaactttacgataaatggtcacgagtacaaccaatggtactattttgttgatggcatctaccttcagtggttggtgtttgtgaagatcatttctcttccgcaggctccgaagtagtggatattttctccatgccaagagggtgcacgaaaagacatatgggaagtatttggggctctcaaggctcgattctatattcttgctatcccaagttgttcctttgcccttaaagtacctagagtgtgcatgtatcattatgcacaatatgatcattgagaatgagtgtggaggatcatacgacgtggataactatgagatagtcgagtcctctgttacagcaccaact

SEQ ID NO: 76826 - DNA, 720 bp, Zea Mays
ttccgcttcgaaaatcagagtgggaacaacaactaccaagcacaacgctctggacaacaaggtcagaggagcaaccaataccaaaccaacagagaagcagcactcagaccggtcaaaggtctagtggccaacaccagaatcatcaaggaagcgctgtgaacacaccatccaagaacaacaactcaactaccccagttcaacctaatggttgtttcaagtgtggcaaacttggccactatgccaacaactgcccaagacgcaatcaatagacacctcaaaagaacagcaaccagaggactgaccagaacacacctgcttgtggatctgcacagaacaagactccgcagaaccagagtagaggaagagtcaatcatgtgacagcggaatcagttcctgaggatgccgacgtggtgtatggtatgtttcttattaactccatacttgcatcagttttatttgattctggagcacctcactcttttgtaacaaagtcatttgtggaaaaacataatataccaaactatcccttgaagaagaaactattaattcgatcaccaggagttgaacttagagccactcactcatgtcctcagactatgattgaaattagaggcctaagctttctagtagagctgataattttggaatcaagtggaattgatgtgatacttggaatagactacttgaccaagtatgatggagtaatatcatgtgctaaga

SEQ ID NO: 76827 - DNA, 853 bp, Zea Mays
attttttggatgaagcaagtcttaatcatgttcacaattatgaaaacggacttagctcaacaacattgtatcaatttgagcaaaaagagcctaaggttgtcataacatcatcatgtacaaaaggaacatactacaaagagcatagtcacattttggcggatatacaaatgaagctcaatatgctacatgatgagaagcaatgcaggtatgttatagatataaaaaactacaaagaagaattaaaaaatagaagatgcaaacaagaacaaaacgaggtccctcagctaaaaaaggaaacacacacccaacttccctcgtaaatgtgcaaaagtggactgagcaaggggttttgtgaggatatctgtaagttgtttgtgggtatcaacatggaaatggtcaatgcccctttctcataatgacctctgagaaaatgaaagcggacatcgatgtgcctggtcttaaaatgtagcacatgatttttggcaacactgatggcactagtgctatcacaaagctaaggcatatgccaaaactccaagccaaaatctcgcgaagtggccatcatccaaagcaaccgcgagtattagctagcaacaacaaaatacttagcctatggagtggattgggctacactatactatttgcaagaagaccaagaaaccaatgaagatcccaaaaactatcaagtcctagaagtggacttgtgatccaagcgacaaccagcaaaatcagcatcagagtaaccacgcaaggacaaaacagaaaaagaggaataccataatctagactcaggtgtgaaatgaaggtacctcatgatctatttgactgcctgcctatgggaagtgtgtggaga

SEQ ID NO: 76828 - DNA, 479 bp, Zea Mays
gaggctaaagttgttagaaccctctccaaaagcgttggcctaccgaaactagaagctgacctctgcagataccaacgacaccatatcgctggaagtctgctttatgccaattttaaggtaacaaattttattattattgttttatttatgttttaggtcatttactgacgaagattgttttggcagagtatactattgagtaaagttctaaaaatgcaacaagatctcgaagaagagaagaccaaaactatcatcaaagatttggaagaaaaagttgaagattatgaagctgttctgaaaaagaaggacttcaccatccaggaccttgaaatgatgactaaggaacacgaaggtgcattagagaagaaagactttgttattcagtctatggaaggctccttggctgggtccaagctgagaataacagtttaaaggatgaattgctcaaacaactagaaaaatctgagcaagagaagaaa

SEQ ID NO: 76829 - DNA, 309 bp, Zea Mays
gcatgctgcaccatttaatttcgaagctgtttgaagctatggattacggtgctccgtaattgtctgttcgaatttgttgatagtttttgggctttgggttattggatagacaaacgacgaacggctatacagtctagctagataggtgattttatgtttcgctttcgctgggatggcgttggtactgctatgtttggggaaaatctttactgccatgctagctgcatgtcctaattgcttgactgggttgactcctaccacggaacggtgataccaatctcgcactcaagcacaattaatcagtatgcg

SEQ ID NO: 76830 - DNA, 695 bp, Zea Mays
agggaagcacaaatcgcaacaaaacacacacacaaagagacacgacaatttgatttaccagagtacggttccaaatgaccctacgtctccattgaggcatcccaagggactgagtctttttcaaccctctcaagtgattccgaagatcaaacttgagtcctctctttttgctcaactcaatccaagagaccatagtcttcacaaggcactccacatactgagagcctcttgctagtctttgcaatcaatggcagttcacaactccaagcataagatcacaagattgcagcaacacacactcttctctattgcactcacataaggcactatcacaaatcgccctagactggttatcacttgcttgattctctctatttggcacttgggaggtttttttatctctttgtagtgttgctctagcttgtaagagttaattcacagctcttatgcattgaatgggccgattggagacaatccccaaaatttgcactttctgtgaatgcaccagacctcctataatgttggtctgatgacccaccagatctttgtcagactgcaaaatcagtggtcattctgacaaaaggctaccatgtcaggtggcactggatcagtctaatctaccatcagacctttccacgtaagttgccacatcatctagccgttggatagtcgttggcactagaaactgatcgttg

SEQ ID NO: 76831 - DNA, 693 bp, Zea Mays
ctcattaatgtcgggtccactttctcctgcctcactcagtccatacttaaggaccaaattggcagaaacatattcacctacgtcgatggcatccacaagggaaaggttttaggttacctagtgtcaagaaagggcatcgaggcgaaccctgatagaatcaggcccataacagaaatgcatcagctgcaaaaagtgaaagaggtccagaagctgacgggccgcatcacagcattgaacatgttcattttgaagtcagtcaaacgttgtctaccatttctaaaggtgctacgagggggcaggggctttgcttgggcccagagcaaggaactgcattcgaagacatcaaatcatactcgacagacctcgccaccttgtctagcccaaccctaggagccaacctattgctctatttagtggcctcccgtcacacgatgagcgtagtcctcatacaagaaaagctagccgaaggtagactaatctagtccttgatgtatttcatctacgaagtcctcaccgagtctaaaaggccacatgcccgaaattgagaaaatcacatatgtcgtggtaatggtatcaaggaacctaaggcactacttcgaagctcacaaaatcaaggtgctaacagagcaaagtctatcagacatatacaacaaccctgaggcctccgttcggataggaaaatgggccatggag

SEQ ID NO: 76832 - DNA, 542 bp, Zea Mays
aaagacaatggtcgatagaaggtgaaggtaatgtgggtttgtgccgatggattaggagtggtaaagaacgaacaatgaaacttgattgtggtactgaagaagctgagtgattagctatggtggttcacaccttgtgaaaccaacagatgcgaggacatagcgaagtgaatcgtgttgctagcatgatcgagaactgatagggcgtgtacagaatgtggaggatgtgtgtggggtacgctaattgcggtggtttgttggttgacccttaaaaataccgtcatcacgagaaaccgatggacgttcgtctggcggttaacacactagagccagtagatacactgttgatgcgactatctctcctgaacgtggctttgaccacctccaagtgctagagacagccaggttccagcagtggtggatctaggaacgaattaaaggaggagctactaagggtgcatttggttcaactttctaaaccagattcgctgccaaaactctagaatctctgcagaatagattcctctagttcaattcaaaatcat

SEQ ID NO: 76833 - DNA, 628 bp, Zea Mays
agtacacaattattatctcttgaatgactcaagtgttaagaatccaaatttagggtttacaggaggcatgcaacacatgggctgtttgtagcaacggtcaacccaccaatcgcgaagcggacttcggatcggagtggctgagcgcatggcccattttgtttcgaacaacctaacgacgcgtcgttagacagatcagctaggccatcagataagtgatcaggtacattgattatgggcttatttattacctctctcaactatgttcatccaagttcatgtttccgtcgtgcacttggaaaaccagatataggtactcctccaacttcagatgtttccatcctatatacactcaaaaccacgtcggttttatctacgtatagatgtgtacactatactatcatgttcaactaagatagcatgtaagtagaaaattatagatcgtcattattagatgtaccacagccagaacatgatgatatagtgaaagtagtagtacatcctcacgtactaccaatgacaacacgttcacatgtgctcctcaagtttatcgtgaacacctctacaatatccacacatgcagaggtaaaacatggtggagtcatgtgctagcaccgtgcacgtggcgaga

SEQ ID NO: 76834 - DNA, 856 bp, Zea Mays
taatatatgatgattatagtaggttttatgatatttatttgtgtattgtaggtcgttcacatgcaactagcttttgttttcttgcatgtacctagacagctagaccatgtgttgagccagattggttacctggatccagcgatcaacgatccactactcctctgcaccgtgtgagccaggcctatcgaaaacggttgctctatgcattttagcgagccaggcttccgctatatttttgcatccacacagcttggcttcagcgtccccaagacaaccaatcatgtctaacctatatcgtggagcctagtcatactcgtatacggcaaccaatcatcattaaaactgttcgcgctagctttcctaaagtttttttgacgtgttaccattaagagtgtcccttgttatcaataatggttatggaagaataaacctttgttttggtgtattttggtgtgtcattaagagtggttatagattattccactctttttagtagaggcattgtttcttctcaatctacgaaaggccaaagttatcattatagttttagttgttttttactggcaagtgtatagcatacacaggaaaattaaatgttggtagaaagatatttgagcaataacgtattaggtagaaatgtgttgttggtagctaaaattgctcgggcgaaggatgcatcgataagaacctatagaatagattatgttggcatagttatgccacgatatatcaatataatttagacaccacccaccatggaaggtttttttgttcaggtgtattttattctattgtcactttttctcttcccctttttgcatgaggattggcatgtttgaatacagagctaataata

SEQ ID NO: 76835 - DNA, 1737 bp, Zea Mays
gaagttgctgctgtaaggcatcctgacggtcctgaatggtctgaaatatggagagcatctgctcggactgctactgctgaactgctacctgtcgagcctgctcggcgaccaaatgagcttgctattgactcaactgctaaagaataggtgctaaggccagatccatcgatggaggagcaggagaaggagcaacactggaaccacctgtctcgtgatcatgtgagcgaggaggcacagggggaggcggtggtggaatacctagatcatcatcagaggagttggaagaagtatcaactgcaccaaggggaaccagactctgcttctcaatctgcctaatcgcctcatcctcaacctgacgtttagaggctaaatgatcctcagtacaactatctagggcacgagctcctgtatgagtctcatcctcaggctcagggtggtaaaatccaaacacaagtcatgcgtgaccaagaattgcctggaactaaggggtcaaatctgctgcgcaaatatgtgacagcggtagtgggcataaggcagctaatgacaaacacatagtctgtccaacacagtgtcctctatctcacagataaaaaaatctacaatgtcgaacaccaagtgagaaaccaaggcacctaggagccagagctaaatatgagtggtggcctctctatatcccatgcgaggtaaaagtgtccacctcatcagagcatgtagaaactttgcaggtgtggtgaagtccgctagagaacgcctcaatccatttgtgaacggtggtcggatgagaaccgagacatgagcaatacctggagcaactccaccgtgagggcgacgagatgggtctgcagaaccatagcaaagatcgtgtagcctcgtcgatgactcaagaaaaccaaacaactctctgatctgattagcatgtaaagtgacattctctcgcttaaagcaaaatctcatccactggtggtcgatgtcaatccagactatagcgtagaagactttgaccgactcctcaacatagcaaccaccaaaatccaagagagtggacatgccaggtagttagatgatgtgacccacaatctctgtatccaccgatgagccctcaaggcgatctgaacagtctgctgagctctgtagaacgactcccgagtttgtgtgctgaacagaggaccagctgtcgagtcacgctgtgctagaaactaggtatccaccagcacatgtctaaagcgtcgaatcctggtggcagtgtctctatgaaggtcaaatagcctccgatactcagccaggggttgtaccttggtctcatcatgctctcggaaacgaggtgaagaaacaggtggagtagtgaagggagtgggagtgggggaagcaggcgtggtggaagctattggtgtagcgagggtagttgtaggtactagagtagataaggctggagtggtagtggtggctggagcagagggctgtagtgaggggtcaagtctagctggagtggagcgtaaccaaaatgactaatgtctgacaatgtaagcaatttgatcagagccaatatgcatttgtcctccctgctctactctctcagccgatgctgctgcaaccgctactcgaatagctttatcaagtttgcacttcttcttgcctccctatcgctcaaggtagattgcattgcccttgtcctggcgaaaagggtgaggaaggatccggatcatcccctcctcttagagtggcattcttcgtccgaac

SEQ ID NO: 76836 - DNA, 434 bp, Zea Mays
tgcaagcccactcgtggctcactcgtttcctcggtcatcgattgaccgattagtcggtgacctaactcgcccgctgcagcgccaccttacctcctcattactcgccagctcgtcgccttgtcgggatcctgcatacaacgttgatactttgcctcctagtctgcaccaacagatgagcaagcagttggtggcaccgtggcatcatctgtccctcgctaaataactagggtcccaccgcgccgtcgcaacacggcaatggctacgcttgtcaccaccgccatctatcgcttccttgcctcctaccctcagtcctcccacttgttgccgcctcaccgacgccatctcacgacagatttgacgactcgccacaacgacgcgccgatgtggctgctccgctccagtgcctcgtcctcagccagtccacctattttctc

SEQ ID NO: 76837 - DNA, 457 bp, Zea Mays
caagcattagaggtttgcaaagaaaagactctacagtggcgagaagcctgacaatgttagtggcactggagttgaggtaccggtgagcccactaagattatcattatgatgcggatcattgaaggttgcctctccatggtcctaatgtgaagctgagggagtagtgtgcactcaagggtcacacttctaaaagtcctagggacacaagcgttgtggtgcctctaggatgtggcatactcccgaatgagcatgagttgaagtgtggtctacagaaacaacacctcgtgaccccatcgaaccatgtcttcctgtaggagatagtagatgataagaccgagccggattacaatgtcatttgtgttgcgactcatgatcggagttgtgggagtaggtgttgaaggctactttgttgttgagcagatgtgttggtgacaccatagttgcataacattggaaa

SEQ ID NO: 76838 - DNA, 698 bp, Zea Mays
ggggttcagaaatgttcaagtcaggagcatccaacactcccatttgggccaagatttagtgcggttcagattcgcatttgatagagataatttggtggcaatgggtccgcaacaagctcttgggtttacttttactgttattaggcataatgaagcctggaatcagcgtgccctgacttttaaccatgaatgttggctccttctccttggttttcctctagatttctagactcatgagcatattcaaaatgcggtcgactcctttggaagggttctcatgtgggatcctgacccttcaaatgtaactaggctacttgttcgtgctagagtcacgtccctccaagaagttccccaatttacagttttttcagttactgagggtttccaaggagtttcttggacggttcaatatgatattgtgcaacagtttatgcttggagctctccctcaagatgaagaccttgttccaccctacccgaatgatgggcaacaattaccagcagagtttttttgggttgggacagctagttgttaatatgcagtttgatcttaatattccacctcccatgggggaatgatgaagaaaaccttgataataatgatgatgctaggtgggatgcttggccaattcattaggttcggcctcctgaacaagtggtgaatgctaacaatgctgaggagcaatttagctttcagct

SEQ ID NO: 76839 - DNA, 346 bp, Zea Mays
tcaggagcgtatgtcgagtggtcagaagatcataaatgcacttcctctcttaatggttgtgcagtctctgggtcacatggtcatttcagagactcttggttttggattaccttgccttagggtgaacgaggtcagggccacctgtctaggacgacttggtcgaaattttggggtggttgaggtcaggtctatcctagctagtcgaggaactcttagctagctttgttacagtcggattccttctggtttggggaacttagatcagggatcctagtaggagaaacttagattgaaaggtgctcgttcttcccttggctagatttgccgaactatgattgccctgatc

SEQ ID NO: 76840 - DNA, 619 bp, Zea Mays
gcggagccggggaaggagagtgcgggcgtcgtggcgccgtgctgtttggggaaggggccgcggcgacagggggctgcaccggcgcggggaaaggaggcgggcaacacggtgacataccagagtgcagggtgagggaggtcgctgtccacgccatgggcgacgtcggggagaatcggtgcgtcgctgatgagggagcggatgcgcggacgggactggggtctggagggcagccatggggaggaggtgttggctcgccgctaagggctagagaagggaggtcgccggtggccaggaacgtggacggctgtggctcgccagggaagggggcgccgatggtggatctcgccgtgtaaggaagggaaacttggcgggtctcgggcgggcgggggaggaggcgtaggcacggcggagatagggcgcatggcggctgtcgcggggaagcgcgagcgcggcgacgctgcgggactgcgggcgcggcaggactgctcggctgcgggcgcggatgcgaggactgcggcggggactgcgggcgcggggatggaggcggagcgcgcgatggcagaaccaggcggtgtgcacgcctacactgctaacatatagagtagtagagatttccatc

SEQ ID NO: 76841 - DNA, 521 bp, Zea Mays
agtaggaagaatggtgcaattcacaccgccaaatacaactacatatggttcccatcccatctattacatgtgggacccaccgtcagccataacacacatcttcgacttctgcaatccctcatcttcctccataatccctcatcttcttccaatctttcccattgtacttagattgagagcttgaacttgtctaaatccttcagttttcgatctcgtgatctaacccttaaaattcattgtccaatatttcttaatatcaatcaaatcagtctaacagattgtacttagattgagagcttgagcttgagcttgagcttgaattatctaacagaatccaaacaatgatcaagtacacagttgaacccaacaagccgatgaggaaccgaaatgcaattatgcaatgagcaagcaaaaaaaaaaacacacagaaaagcaatatgtctatcttcacttcagattgtggcgtaaagctatgcgtacaacaggcactgcatccgtgaaggagctttcgtcgaatctgc

SEQ ID NO: 76842 - DNA, 508 bp, Zea Mays
tttcatccaagagcccggccatttctttcgaaatgttggcacgagatatcttgcatcagagcggggcacgaagttgtagcacccgaagttgttatggtactgcgcctttccagttgccttcgtctggtaagataattcatgaatattacagaagcacctggcatttggctctagcccttggctcctcatagcccaaataaaaacctccacttcaatcaaagcttcaggagtaagtttatgaagttatatttcaaacgtcttcagtacttcaaccagcatcttgtgcaatggaaaacgaagcccagccttcatgaagcttttaaaaaccactacttcatctgcttcgggaagaggaatagtgctttctcccctagccctcgctataaatatatcatgaaaatatttgcccttcatcgcttcaatctacccttgtttgacagttgatttcccgaaaacaacatggcttggcctccacggccgatcttcggcatcctcgttaccactttcc

SEQ ID NO: 76843 - DNA, 587 bp, Zea Mays
gaaggtgaagcaccctcgatcatacccacagaagctgggtaacattggcctgcaacagcaggagcctacatgttcccacaaactaggccgcccttaaaggttgaagaagtatgagaaactgtccgggttatttcctgcccgactggattactagctaaggggatgtcatccgggacctccgtacggatgacagcaccttcgatttcaggaggatccaataaaagatctttagggataatctcctccagtgcatggtcaatggaagacattgttaacttctagagactaaccagtcctgataaagcctgaattgggacgtcgttgctgctattgctatgactgttcttacgaatcaatgggagaatttcctcatcctcttcatcctcatcaagcacacgtccaccgactttggcaccatcacaattttcaatatcatccttgaggttggcgctcgccgagccatcgccgaggactgagatagtagagtcagcacccagttccaagccagatgatcgccaaagttttttctttcttttcttcccctcggcaggcgcgactagatggcctattcgatgcaatcgtttgcg

SEQ ID NO: 76844 - DNA, 274 bp, Zea Mays
aggtcaatgacaaactcaacttccctatcttgtggcattctaggtaactcctctggaaatacatcgggaaagtttctaaccacacggatgatgctgcctacaaatttcccatctactataaatatggcgggtctggtagaggcggttatggtaatctcaacttcgaatatttctcctttagagctggtgagttctacagttcccctagcacaatgtgtaactgccttggccttccttaaccacaacataccaagtatcaggtctatgctgcttt

SEQ ID NO: 76845 - DNA, 556 bp, Zea Mays
ggcatgtctcaacatcataatggcatcttttgatctctcatggaatggctcgacatagatgaggcatctatctttctcttatggtgtggctcaatctcaccattgcatatcgctctattgtgatgtgcctcgacattcctgtggaatttctcaatttcttgtggtaagggcatcgttgagggctacacctaacaagatgattgtggacaagattcgtcattggctatgatcgcttgatcatgtctttggctaaaatgacttaggcacatcattgatagcttccttggagttggtcatactgcttcaggtcatgtctcagctacaactactcaaacaccatcaacaagttcttctgagtcaataacactattttcaccattggcaacattagaaaccctaatgacaaaggcatgccattattgggcttccaaatgttggtcttgccacaaacgaccatatatctccctacaactactcacgcacaatgtcaacaggcttccatgggttactaacaacactaggcaatgtcttcgactacaatttctcgaaaataaca

SEQ ID NO: 76846 - DNA, 899 bp, Zea Mays
ctctcccgggttgctcggttgctccggttcagatggatccgaagaatcgcaaccctaactgggaccggtgggggccgaaggatgctccgcagggttcccagtcgtggggaaaaaaccggagtctcagctggcggttgaagactagatctggaaagcctgatggcaaggatgacatccctatctctgcttccggcgatggcagccagccaggtatcctcaaaacccctccccctaccattctgaaagttgagaatgaattggtgcgtaggttttttttgccaaaaatgtggtatggatggccatcatgctagggagtgcttcaaatctttgtggtgtgagatctgtcgcaaggaaacacacaacaccgctcggtgcgttctccccaaacagaacaaacctagcatgcctattgttgggatggcggcagatgggctagggttttactcttctcatttctccaagccgttatcaaacaaaccgaagcacaattttattggtctggttaaaatcgttgagggtttgatctcggccgaggatcttgagaaggatttcagtttccatttcccatggggccgtacttggaaagctaccaagtgtcactctggttttctaatgcaatttccctctcaagagaggttggatgagatgattaatttccaagaaatgaaaatgaagttgtcgggtgcaaaaatctctgtatcttcttggagctcccaggctaagcctaagtccaaactgcattcggtatggattgtggctaagaatgtgcctgaagaacttcagaattaccaggctatctgtgaattgggacctactattggtgatgtggaagaagtggatattacctctttaaactctaaacaaattgttagattcaaagtgcatgtgaagagtgttgc

SEQ ID NO: 76847 - DNA, 1546 bp, Zea Mays
tcaggctcaacgtgcacgcgcgggagttcgtcccggtggccagccctttggcggcggccgccgccggcggcggctactattctccgttcgtgcagctttccggcgatggcgggctgggcacggactggatgaacttctttgccgagccggaccccacgtcgccgtcgtccttcctgccggactttggacactgcgacatcctcagagctaccggcggcatcaatggctaccctaaccccaaaggcggcgcaagtgtggccgacatcgcagataagattgtcaagcaggttcggaacctcctcgcttaattattctgctgtttccggtgcacattactcgcgtcgcttgacgccgagtcaccgtcgcgtagaactgtagatctctgggaaaaaaaaaccggaaacgccgagagcgcatgctgctgcaggtgatcttctctgctctaatctaacagatcagggagccgcatgatctttggttccctcatcctgaacttcttcaatgatgcagacatttatttatcacaacttaactagtgacgtttttatttcagtgataattctcgtgattctcggatctacgttgtagatcatgcgctgttggacgtttttgatttgttttgtttttgcttttgggttttacagtggttgttgcccttatagtttcattgttctcacctttgtgcatgcaggtcgagtaccaattcagtgacacgaacttggttgcgaacgattttctgacaaagatcatgaacaaggatcccgagggctatggtacttaaaaaatgcagcaactttttatcgtacacaacaataaagaaaagagcctagagatctagaactgatgatgaaattttctatcttccattaaaacttgcggtggaaactaaatggtgtccaaccgttacgttttgtgggcagtccctttgtctgtcatatcatcctggaagaagatcaaggccatgggggtaacaagccagctgctggtcatggctctccggacctcggacaagctcgtaagccggtgctacgacctctgcgcctccttttcctttcacacaagtcgtacgtagccatatgtagattaccatgaaatagttctgagcggcgtggctccgatccgtccaggttgtcagcgacgacggcaggaaggtgcggcgggcgcagccattcaccgagcgacacaaagaagagctgcaggtgaactagtgtgctgattccgagcagaggacgacaaggtatttttagttcctcaaacaaaatgggctcactgatcactgtttgtgtgtaccggctcgtgcagtgccggatggtcatcgccgagaacttgccgcaggattccacgagaaacagcctcgagaagatcttcggcgtcatcggcaggtcacacacgagaaacagcccatgtagtttaatttgtttgttctacgcatgttagccttgccatgtactagctagcgtctcttaaccgtgtgcgcgacgagtttttttacagcgtgaaaaacatcagaatctgccatccgcaagaacccggctctgcaagatca

SEQ ID NO: 76848 - DNA, 1081 bp, Zea Mays
atctccaaccacgacagcgggaattccaggaagtagtagagatagaagggaacagaggataggcggcaacgtgaagaacacgttgatcagagagtagctagaggaatataattctgttacctttcataaccctctctctcatgcactcacgcctttatgcagccaggcaacacgccggcatctcatctcccataggccacgcacacgttacatggagttcacccactccgggcccaacagcctctggttcaacttacgctcacgtgtacctctccttggcccagctggctcctctttctcctttgaacggcccacattgtccagtttaactcccgcgccttcaggttcagcagcttgtggcgccctgctggtaacatccccccggcgacgagaacctgcttgcccccaagcaggtgcattgggaaatgtttgcttcaatgtctccagatcttcccaagttgccaacgacgatgacaatcctgaccacttgataagcccttgagccacaccactggtattcatccgacgttgtaacacttgtacagggatttgtagaccttgcaaagcaactggtaattcagcaaccgcgacagtagaaggaatagctttcttcaattgagaaacatgaaaaacgggatgtatattagaggaagaaggcaactccaacttgtaagcaacagacccgactttggacaccactggaaatggcccaaagaacttaaatgccaacttctgatttgctcttggagctagcgaagactgcacatacggctgcaacttgagatacactgtatcccccacctcaaacaccctctctgaacggttcttatcggcctgtaccttcatacggtgttgggcgcgagccaaatgctgttgaaccaattcagtcatcactgccttctcctggatccaatcggccaaagcaggaactggacaaactgcctgagcatcgattccaaagtgttttggctgatacccatatagcacttcaaaagggagaaaagcccacagcagagtgcaaggaacaattgtaccagtactcagccaagtatatccactgacaccatttatgaggacaggc

SEQ ID NO: 76849 - DNA, 304 bp, Zea Mays
gctgcctgcacgcatggctcgccattggaggttcctgcagtgactgtaccgttgccgttggatcgagcgggcgagggtcgctggttgggcctggccgggaacgtcaatgggccagtaggaagtaacataccgacggacagacagggagtgaaatgttgctggtcccttgaaagtgggcaacgggactagtaggggaaaaaaggccgattcgtgaacagtccaaggaggacagcgactttctgctggtggtaaaagacttgtcgcgaggaacagctcaactctatcttgactgccagtcgaaaat

SEQ ID NO: 76850 - DNA, 747 bp, Zea Mays
atgagcttggggacctcgtctatcatgttgaacggagttccgagaaaaacgttccatagcaaaatgggtgctcgccaaggagacccactttctcctctcctgtttgttcttgcagcggatctccttcaatctatcctcaataaagcaaaagacgttagaatcattcagatccccttaagcacatccccaaatcaagactttctagttatccaatatgctgatgacacaattttgatcatggaggcttgccctagacaacttttcttcctcaaagcttagctaaactcatttgctacctccacaggactccatgttaattaccaaaaattaaacatttactcgatcaatgtgtcaaatgaaagaatggagatactagccaaaaccttcaattgcaagattggtacctaccccttcactttatttgggactgccgatgggatttacaaagccaagaatagactcttttctgcccctgatacagaaaattgaaaaatgcctatcaacaacctccttgttcttatcacaagcgaacagactacagatggtaaatgcagtcttcacctctcttcccacattttacctctatacgctcaagattcctagtacagtcataaagcaaattgatagatatagaatacacttcctatggagaggagctgatcccaatgctactcacccagcccaggcaacatggcatttagcttgcaggacgaaacgaaaaggaggtctgagaatattagatcttaa

SEQ ID NO: 76851 - DNA, 758 bp, Zea Mays
gatttttgcaggtatattacatggctccgcctcgttaaaaacctcaccccccgggaggaaaagagtgcgggcctgaataatattgtttggtgaattacaagggcacgtaggccctgaggatttaaacaaaaattttgcggagattgtcaatattccaggaatggtcgaggtcttcgccggatggcgttgttagcctgtatgcgctaggggacgccttcgtcttgacgatgaatggaccctcccactttggctccagcttgcactgtgactctgtacgggtggttcatacgagtacgaggtctccttcgttgaattctcttgggaagactgtgtggtcgcgccaggccttcgtttgagcttggtatttgttgagggcctgtagggcgaagacgcggtctccgtcgatgaggtctttggacgttggttcatctacgttggggacggctgatgcacttgttcgaggtgatccgtgctttatttcctgcggggtcatggcctctgatccatatagtagacgaaaaggagtgaatccggtcacctggcattcggtcgtgttcagcgcccagactgcttcaggtaggtggtcggcccatttacccttcttgtcgtcgagtagccttttcttgatagcagtgaaaatcttgccgttggcgcgctcgacgacgccgttagattgcaggtgatatactgaggcgaaggcaagcttggtcccgatggagaagcagaagtccctgaagtcctggctgtcaaactgtttg

SEQ ID NO: 76852 - DNA, 336 bp, Zea Mays
cggcaaacattgacctccttaccgctaggtagacaatagaggaaatcatcatcattatctcctccttttaccaaggatccatgggggtacttcagctctctagcataatgcttagtttcggcaacttgctctgctgatagttgttttcccgaagcatgtcacacaataaaattcaaatcgctgctggaaggtgcttcgggagcaggcaccgagggaatcgttggaaggctctcttccgcaatattttcaagtatagcttccgaaggtcccgcctcagcgtgagcagaggtactggcagtaatcatctctgggacatcttcagttttgctgccagaa

SEQ ID NO: 76853 - DNA, 712 bp, Zea Mays
ccaagatacgcaccgggcgacactccagagtcagatcttgctgcacaacaatcggttccaacttgatttgatggtccagatcccgcaaaaacttcctcaacatagagacatggaataccgggtgcaccccagccatggattccggcaattgcaagcgataagccaacctaccaacccgggccaagatagagaatggtccaatgtatctcgggctaagcttcccagagacaccgaaccgaacgactcctctagtaggtgataccctgaaaaggacttgatcacccactgcaaactccaagtcccgcctcctcacatcagcgtagctcttttgatggctctgagcggccaaaatattctgacaaatctcccgaactttctcagatgtctgctgaacccagtcaggaccaaccagagatctctctcccaaagtctcccagcacaaaggggagatacatcgcctgccatataaggcctcaaatggtgccatcttgatgctagcctgatagctgttgttataagcaaacttagccaaggcgagatgatcctcccagctacccttccaagatagaacacaagcacgcaacatgtcttccaaggtttggatagttcgctccgactgaccatcagtcttagggtgaaaagcaacactaagagaaagcttggtacccaaagcactgtgaagactcccagaatttggatacaaatttggagt

SEQ ID NO: 76854 - DNA, 353 bp, Zea Mays
gaaggatgtaacacccctggtgttactatcactaaaacttgagcatcacatcataagcattggcatatcatgtgttcgttacacctagagtgaattcactaggtaaagatttcaaataagttgtactggtatgacttgatgtgtggttaacactagggtaaagtgcttaacttcagattaaggcttaactacagtgttcatgagcaactcattttgaaggtattggcctttgttgaacttttgcacacttgtggcaagatgttcattttcattcttaagtttcttgacctcatttctaagcctttcattgtccactgccaactcattgttaatgtcattgctttctatggcaa

SEQ ID NO: 76855 - DNA, 394 bp, Zea Mays
gtttccggtacttcaagtggttgcaaattaatcagtagactccctatgtgacgctagatgtctaggtagaattctgaaatttatggtgcccaaattgtcaagttagaggtgtaattcgatcaatgccgattaagtggctgaaaataactagtaaagaagttgtagatgtaaaactggaaactggtatgcatatgtcctcgtatgatgttgtggtaccttgatgacattaaaatgatcatgtgttgcgagaggtaaagagtttagaattaacttatcgtcacatgctaatttacattattaaagtgtctctttcatggtcaccaacttacataacataagcatgtgatagttgtgttcgataaccaactcattgcaatttggaaatgggaatttg

SEQ ID NO: 76856 - DNA, 483 bp, Zea Mays
acagagggattaacaagttgccacacagaaatcggagattaatgccctgcaaatggccctgtcagacagactgaatggtgttctgattgtacagtgactgaataagatcacagattcagctcccctcgccgccggtgaccctcgtgccatgatccgcaccgtcgccacgattcgtgctctctggcatggagattatcacggtagattaaaaatcttggcacaggataggcttggacccggtcgacggtgagctcgccgtacccacttgggctgcggtcgagcaaagtggtcctcgccggagttggccgcctaccgaccatgagccacgtgccttagggcgttaccacgtcgtagtaaaccactgaagcatgtctggtcatcgtcggtgaccttgccacggtgaaagccacgaatcctttgcgccagtgctctcccctctctctggccgccagcacgccatgcccaaattaggagccaccaccc

SEQ ID NO: 76857 - DNA, 717 bp, Zea Mays
tttttaatccactctggactgggcctcattttccaggaaagtcagggactctggcgcaaaataacccagactcagaacactgggttatggatcgcgggttcaaaaccctaaacccgagggttttatatgcaatatgcgcgactacaaggggttcggatggatctcggccattggatctccacgcgacggctaagattagaaggccgttttaaacgaaccggtaaccattctacgccctcggattcgaatctgacggtggttattttatgaaagcaagatcggattgggcccgtcagatctcatccaacggttcacgatcaataaccgaaagggtatccccgtgttctatctcgaccgtaagatggttatcagacggtctcgatcactaaccgatctaatcttctcttctagctccctctcacggccacaccggtgacccacgccctttacccacggcggcgccatggccggctcccacaatccaggtgccccggccccaagactcgaatacaaactacgctacacgttgagggaaatgaaacagacaagatggccaaggactcaccaccaattacttcgcggacgccactggccacgcggtgcggtctcggtcggagtccgacgagaaatctcccgctcgcaaagcctcaatcgcgccgaccgaggccgagcgcacacaccgacggtcgcgtagaaacccatgggcaataattccga

SEQ ID NO: 76858 - DNA, 833 bp, Zea Mays
tgttgcagggtttctggattgtttttacttgagtctggaacgacaggaatggaagcatacagagaggcagaggatgtacctagaatcagcaatgatgaaagccaagtcatggccatcaccagttttatcagttgagcctcccaatatcttcctcgcaacctgcctggtagctgaggacccaccttttgatagtggcgttggcgaccttgcacgctacatcgaagtgcatagtctgtaaggcaacttgagttggtggcaataacaaatttattgagtgttcgaaagcatgggttaccttatccttgctgtagtttttggtgctctgtggtgtctgagaagaggtacctccagttgggacagagtctgctgatgtagacttggatgcagcccgcgcagacgaaattgatgaaggttgggatccactgggtgaaattggaacttgacctccatcaccaatctcggcgacaaccgtgttaacctggaaacacacattgcctaaagcaatggtgctgtctgtgaagcttacgttgaatgtgtacaccttttccatcagcctatttatttcatcaggaataaatctggctggattatccgcgatcaagatgtcaagtggtttcttaacaatgcgttgtgccatacatccaaatagtatgaaatcagtctcgcctgtctcatcgcctgctgtgatgagcaacctgtacctgcgcacaaagtagcagccacagatgtatgattaaggagtcagcaggcatagatgtaccagaccaagaaacatcacataccttggattaggcggaccaacatggccacaaccagagtccgagcatttatag

SEQ ID NO: 76859 - DNA, 491 bp, Zea Mays
cttgagtaccacgtgagagctgggccttctaggcctatgatgaatgacttggccatggtggcgtcatctcccaaagaggatgcaactgtgacttgatatctcatgatgtattgagttgggtctgcattatcgttctactttgcgtaggtgcctgctctgaagttttggggctagggggaaccctagagctctggtggaagagggatccgttcatcaaggtaattcaacccttggaaggcagtgggtgcgtggtggtagggcatggggtcctatcgttggtgaagggggtcttcgcccttcatttctgtgatcttctactccagttctcttgctttctgctcctcatctaacatcatttgcctgaccttggcttgcaagttgatacgctggcgcttagctgtgaggatttacttctgttttagcatgtgattgttctttatggggagcgcacatagctttagatggtccttggccaagatgcctaggacctt

SEQ ID NO: 76860 - DNA, 724 bp, Zea Mays
aacaagcataataccctctggtgactctaccagacaatgtgcttagcgctggataatcgtgtatgcaccatagcaatgccgcatgtagaataaactattttccagctcttgcatcaatagtatcgatacccaaccaaagatcctgcaactcgtcaattaatggctctaaaaagacatcaaaatcctttcctgggcattctttgccagggattagtagacacatcatgaagtttgattgctcaacacatacccatggaggaaaattgtaagggataacaaaaacaggccacatactataagaggagctcattttcccaaatggattgaaaccatctgttgcaaaaccaagcctaatattcctaggatcttctgcaaaccaatcatgctgcttatcaaagtccttccatgccttaccatctgctggatggttgagctcattttccacaactttcctcttcaacttatgccattgtgcctcctttagatattttttttcgaggaaaacatccttttcaacctaggaatcaaaggaaaaatgttgcagtaccttttgaggactcttatttttaccttcacaatctttccatctagattctccacacactgggcattcatctatttttgcataatccttccgaaacacaacacaattattcaggcacacatggattgactcatatccgagtcctaatacatgaataagtttctttgcttcattataaga

SEQ ID NO: 76861 - DNA, 546 bp, Zea Mays
gccgggcccggaggccgcatacgcgccgccttctctcgacgccaccgccgcggcagccgatgtcgccgctgcgatatcctcctccgacgcggtcacttgggccggcgtctgggcgctgctctcgcgacacagggcccgcatcgcggtctgcatcgccgcgctcgtcgcctgcaccacctgcacgctctccatgccgctcttctcaggtgaggaactagggcgttggttgagacctctcggatgcgcatgcgccgctgacgctgatgctgcttgtttggttttctgaaatgggctggctgtgtgctgtgttcctgttgcagggaggtttttcgagaccctgattgggagggggaacgagccattgtggaggctcttatccaagattgcgatactgtacacactggagcccatcttcaccatcatattcgtgatcaatataactatcatctgggagcaggttatggcaaggctgcggagccagatatttcgaaggattctgatccaaaaggtgctttcagccgacatcccctgttttattaatgcttt

SEQ ID NO: 76862 - DNA, 462 bp, Zea Mays
gacgaagaaagttcttagagtggctaacgacgaatgtgttaggatatagtgtcgtctaacttggatggaagacgacccatcatggaggttagaagaagttgcatgaagaacgattcctaaaaaccttatttgtcatctactggtgtaggatcacatggacatttggagcttcactggtgcaagcaagcgctcgagatagagatgctatgtaagtgatataacaacgagaagagggaaacccccgctcaattagatgtatttgtgctactcgataacctatttgtatagggatatccaaattgattgtgtgtcacgatcaagacctaaaccatttactagtattcctaaacttaatggtcaagtaaccaaaaacaaatctgaaaaagaagtcatgccccacatggccatgggcaaaatatcgatggaccattcatgcagttgtcgtgcgctcatgccttctgc

SEQ ID NO: 76863 - DNA, 535 bp, Zea Mays
cggatacagacggggttcgccggtggtgacacgacgttccggacgctaccctacagtagagctcaagcaacgggtccgaggagcaacacgcgcccagagggacacagaacacgcacaaactaagctaggattaccttggtccgtgttggcctcgaggagatgtacccgagcaggcacggcgagcgacacttggcatgggctgagcgcgccaaggggtgctcgaacgatgacaggcgacgaaactaaggctctaggagcgtggaaggatggtgaagcccggtgcttagaccaactccagcgagggcgcgtatacggtcatgctttcgtaaaatacacggccgaggctactgttcacgcagccagcggactccatatccgagcgcgaagaacacgcggcgccggtgctcgctcccttttctcgcgtcctctctctcttccccgcacttcaaccgtcgcttttgcaaacgaggtatgtctccacgagttcgttcatccggacgccgagacgtagattccagatcgagctcattcctcc

SEQ ID NO: 76864 - DNA, 313 bp, Zea Mays
gcaccaggggaactcatctattttattcgagattatgagtattcgtggattgtcagtatgtttgctctctcaagttgggttgtttaggtctgggtacctgaattgcaattgcaactaattcggttgcaacatggaaaggttaggcccacacgaacgtgcctgcttggattctggcagacaatatacatgctaatttagttttccttagcattgctccatagctgatgattatatgaccagacacctttctgatggatagtaatgctctgcatatagaaatttcatctcttaattgtgtttccatgtggaaatg

SEQ ID NO: 76865 - DNA, 451 bp, Zea Mays
tgagtgggataattctgctcatgaggcttgagtgctcttgatgcataggcaatgacccggttgtcttgcatcaaaacacaacctagtccagtgccagaggcatcacagtatacatcaaatggcttgctattgtcgagttgcgctaacaccggtgttgtggtcagatgctgcctcaaggtgtggaaagcatcttcgcacttctgaccccaatcaaacttggctcctttcttcaacaatttagtcatgggcttcgcaattcgagagaaatccagaatgaaccttccataataaccagccaatcacagaaaacttcgaatctgatggacagttgttggtggcttccagttcatcacttcctgtaccttatccggatcaatagctatgcccgcttgagagatagtgttacccaagaatttgatctactttagccaaaaatcacattttgacagtt

SEQ ID NO: 76866 - DNA, 541 bp, Zea Mays
cggaagaatgcaacaccttgagccaaccagaatcggaccctaatgactagagagagcctatcatcaggtacataaagaatgaagaagaattagatgataaaactgcggcagaacgcatagcgagacagttgcccagtacaccctcatagggggcatactatacagaaggggtgcgacaagagtcctcatgaagtgcatttcctcgactaatgggaagcaactattagatgagatccacgccggacagtgtggaatacatgcagaatccagaactctggttgggaaagtttttaggtctagtttctattggccaacaacaaagagtgatgcagccgagttagtccagagatgtgaagcttgccaattcttgtcaaaacaacaacattaccggcacagcagctatagaccatacctgtaacatggccatttgcatgcttgggattggacatgattggacccttcaagaaagctcagggaggctatactcacgtgctggttgccattgacaagttcaccaaatggatagagtacaagcctattg

SEQ ID NO: 76867 - DNA, 552 bp, Zea Mays
ctttcttttccacaaacaagacaggagcggcccaaggcgaggtgcttggccggatgtaacctttctctgacagctcatgaatctgcttcttaagctcaaccaactctggtccagatattctgtaagctctcttaaagataggggaggttccaggaagaagctctatgacaaactcaactttccgctctggtggcatacccggcaagtcctttggaaatacatctgggaactcagacacaaccttgatactctcaattgggtctgctccactgctatcaacgaccagctgataacaacttcctttcttcggcttaggcgggactaactcggtcaccacttcctctcctagtggggacaccaacttgattgtcctcttatcacaactgataactgcctgatacttatctagccaattcatccctatgatgacatctattccctgggtacccattactataaggttggcgggaaacgctatcccccttatttccacacatacattcaaacaaatgctatcggctcgaattctaccaccagctgagtcaatttgaa

SEQ ID NO: 76868 - DNA, 457 bp, Zea Mays
cgcggaccagagcgagctcggagagcttccctactgctttaatctccggtaataatgccactctcgagttatgcattgcctgcgcctactttttcgcccagctgtgaccgttggggagctcggcctcgatgggtgcttctcgtcgatgccgccgtcatggtctgcatggccaccagtcccgcgccgccgtctgttggggttgtgaggtagtagagggctgctagccatcggatctgtgatctgcgatggagatgagtgggtgtcgttcatcgattaatgtacggtggagatttgatcacatggcgatagaacacgagccttcggattgaaatcgtgcggttcggcgcggataagagcgttggcgtcgcgtgggccgttgatcgttcgatgtgtggtcgagaccaaaccgcgtgcctgttctcatcgcaacttcctcacgtgtaatcttagcccttca

SEQ ID NO: 76869 - DNA, 339 bp, Zea Mays
ttgccgccggtatctactgaggtcagcctcaagcttcggaaagccaacactcttcgatagagtgctgacaaccttcgctccagtccggtcccggagacatcccaagctctcttcgtcaacaccaccgaagagcaatgctcctggttgacagccacctgatattgcataatccctcagctcttccttctcagccttagacaacttttgcccaagtatgttttgaaaattaaaatccttttcctccgaagtatcttcggcaatctccttctctttctcgggcactggggccagaatctcttcggcagctgtagcagcttcttccacagccatgttcaaaag

SEQ ID NO: 76870 - DNA, 1539 bp, Zea Mays
cccatcgagcccaaggaagcttctcacttggctcacattttgtggaggcatccagtcgtgtacagctttgatcttttcttcatctacctccacaccttgtcctaatacaacaaatccaagaaacactaccttgtctgtgcaaaaggtgcacttctcaaggttagcatataatttttgttctcgaaggacagcaagtacgtatcagatatgttcaacatgatcatcaagggttttattataaattagtatgtcatcaaaatagacaaaaacaaatttgccaatgaaagttctaagaacatgattcattaatctcataaatgtactaggtgcatttgttaacccgaagggcatcaccaaccattcatacaacccaaattttgttttaaaggttgttttccattcatctccctctttcatacgaatctgatgatagccacttcttaagtcaattttagtgaaaataaaagcaccactaagttcatcaagcatatcatctaatctaggaattggatgtctataccttatggtgatgttattaatagctcgacaatccacacacattctccaagatccatctttcttaggaactagaaggacagggacaacacaaggggaaagactttcttgtacgtacccttttttaatcagttcttccacttgttgctgaatctcctttgtttcttctgggttggtgcggtaggcagcgcgatttgggagggaagcaccagacacaaggtctatttgatgttcaatccctctcttgggtggtagccctggtggtacttcatcaggaaacacatcctcatattcgtgtaatgcatcaaagacaatacttggcaaagtagagggtaagtcgttagtaaaaagaaggttgtccttgtacaggagcacaaagaacatggcattaggttcactcaattcttttagatcccccttcctagtcatcatgactagtccctcttttcccggtgtcttggttattggatactgtggagttttatttggctttataaactcttccttactattttgtggatcactctcaagtgcttctcgctctctcgatgtttcttctttagatcatccttcataacttcctccagtgtcaaaggaagcaaagagattcgctctcctttgtacaagaaagacaacttgttggttcttccaaaaatctagacatcacgatcatataaccaaggtcgacctagcagcaattgacaggcttgcatagggaccacatcacattccatgtgatcattgtacttcccaacagaaaaaggaacattcaccacgtggctaacatgcaacgctccacaatcattaagccactgcatcttatatggactaggatgacgccttggttttaattccaatctgtccaccaattcttgactagaaatgttgttgtagctaccattatcaacaatgatgcgacacatcttatctttgatcatacctcgggtatggaaaagattgtggcgctgtccattttcttctttttcagcagtcacacttagcactcaaagagagataaaacag

SEQ ID NO: 76871 - DNA, 1147 bp, Zea Mays
actcacacacgcacaccaccaagttccccattcccagccacacacacacctcaccaccttcatcggcacatcacccatctcactctcagtctaaatctacgacaaggacagctcccacccgtccttgtctcaacggcctccagctagatcctagatcaggggtagaaaagaagattcccgggctatgacgagaaaactaagtccttgggatcgtcattgaccatggacacggctatacgtatagatttacactctgcagaggttgtacaactatacccatacgaagcggaggcttgaccgagcctcaacacaacaccatccagtaaatctcctgctcacggcaccaacctgcttttccgagctaacatctgtgggagggactccctcccacaaaacgtaactatgaactcccctattcggggccctcttgaggagtctatcggatacgggcagggcacatcatcagccccattccgaacacacatcgcctaacgcctacagttcgcggtgccgtttacgggagaccaccttctaggcccgtactcttaaggtgtatggaatgcacggaaattcccaaagcgctgctaacttatctcggtccttatgtagcaagggcttgcctcctccagggtcggttgccaccctcaatggtgggccgctcactccatccacctctctcatatcaccatcgctcacaggggatgtctcagtcatcccctaattcttttacactcacacatgcttgcccctgccggtaacccatctctcatcactgttcccgctcatccccaacccactccaactcacgccaagaatccacgacaatcccatccatcacacccacacgccatacacacacaccaagtcgcatgaatagtataagtatgggataataacatgatatcaagtaggagcaatgatatcaacaaaggcttatcaatcaaacagcatggatatcataaggtgagacatccatgaaggctaggaatgagatcctgggtttttaggggtctcactcccagtagtcgttcggaactttggcctagcactactgcaatataagcgtgtctataggatatgcgaggatgttaggtgacctattgtagcgaagtcctcctcgggctcggggacatactctgggtcgtcg

SEQ ID NO: 76872 - DNA, 352 bp, Zea Mays
acgggggagggacgacacaagttatcgcccttatgggagggacccttcgtagtagcagaagtcactcggcccggatcgtatcgcctcactcagatggatggcacagaagttgggaactcttggaatatagagcatctcagaaaattttatccctagttgtgtttcaaaactgttgaggcaacaatgtattctgtaaggtggaaatatgtcatcaataaagagagatttcaaagatactcggctcatttacgattggcttgcattcttacttaactcggggcgaccactatgccctacaaacggagcaatcgacttaagtcggcaacgacttaaggcggtgcaacatgctcac

SEQ ID NO: 76873 - DNA, 564 bp, Zea Mays
cactgctaagacatagtttggttctcgctagtttgaacaattcttgccaaagcttgctagtgaaaataggatctctgtctgaaatgatagactggggtaaccgtgcaatctgtacacctctgacagaatattttggccacggttaaagcagtgaaaggatgagttaagagcaagaaatgcacatacttagaaaacttgtcgacaatgaccatgatgcagttgtattggcgggactggtgaagaccggtaatgaagtccatactgatcacttgccaggcatgttctgggactggtaaaggcataagcaatcctgggtattttgcacggtctggcttcgcttgctggcaggtattgcaagcctggacaaaggttttgatttgcttcttcatgcctggctagctcatgtatttgcttttcgatctcatctttttgccgcggagtataccgatagggttgaagtctaaaaggttgagctccacttagtaaaggaatatgatggtccacatttctcctgggaggtaaactggtgggcttctgaaataggtgctggaacttctgcaccag

SEQ ID NO: 76874 - DNA, 761 bp, Zea Mays
tgtaaatgaaggccaattgagatatcaagaaatgaagattgacaaataatctgtccctgacaacacattaggaccggtggacaagaaaatcttggttcgaccatgttcgaccaataaaggcaaaggaaaaatattatcgtcggtgacccttgcgtgccaaatatttcacacggggtggttactcggaagactccagacataagaaagggctactaagaccggaggcgtcagagggcatggtgaaccaagtatgcccaaatgtaaatgttttggaggtgaaggtcgtgataaacagaagggtaaaaggccgaatgttactattgagcaacttctagctaaatatcacaagcaaatcaaggcaaaggatgttgatcagactgacaatgctaagtcatctggagcacctttgaagacatcaaaatcacatccgtagcgtaaatctagagatcaggattggcaatgagaagagtttcatgtatcagcaacttggcttctcatgccaaatttagaattcaattcatgcttcacaaattcaggggagtctctatacccatgactcaaacatcttgtgtttatattattcatttgtaagctcaaattgtgttgccatcaactaccaaaaaggggatactggaagtgcaattaagccctaatatgagtttggtgttaatgccgcataatttgaggactaatgagatttatcaagttgataagcaagtgaaagagcaatgaggatactaagtgatacggtggagcctcca

SEQ ID NO: 76875 - DNA, 639 bp, Zea Mays
aaaagtatgggatatcatataataaatgttactattgtgtagtagatatttatacgaagctatcgcaactggaacgagtcaaatcggatttaaaacggaggagatacgaatttcctaaggttttgtgtatttgatacgagattaattaatagataaattttaataccattttcatgttaaaacagagacaataggtgataaacaacattattataaaattatagaaattagaatgaattaatttggacttaaaatgaattttctaggaattaaacaaggttcgggaattattttcacactgaaaatcgttttctaaattgattattctgattttctaatcctctgtactacgcgcacaaatagcagagagtttaggggtcatttcctaagaaaccagggcccccacggtagatactttacactccgaatgggtggcgagttgattcagaaaaaaagacagggtctctttagaaagattcccaggtcgaaggggtatggatggattctggccattggatcagcacccgatggtttagattagatctagtgcattatgaatccgcggacagcgcaggaccgcccaatcacaaacctacggcctagatctaaagcaaccccgagtcgatcacgatcgtccaa

SEQ ID NO: 76876 - DNA, 441 bp, Zea Mays
acacacgccaccaagtcactcgtggtggtgtggtgtctagtgctgctgcgtatgtctttcgcttgcattgcatacacgagacgagagaataacgggacgaggcagcagaggacagacagtgctaggcggtggatgtaaaccgcacatgcggcacgcgattgggccatcatttttcttttccggtggctctaaactcatggatgtccggcagcgaccaccggcaggcagggctgtagaggttcctgacaaggtcatgtggggaggaggaagcgagatgcccgtgactgacgtctcatttatgcctcccacaccaccacgcacacacacacacgcggccgggacgacgatccattcacccatggatcggaacttggtgggtctgcctcgccgcagtacaaccccatgttcagctcttccttgcggaatcaagtgagatctccg

SEQ ID NO: 76877 - DNA, 864 bp, Zea Mays
gacgaactccataagccagacggacacgcatgtgagcagtgggtatagtacgtacgtactagtagtggtcctgctcgcatcgcatgcattccgggctcaaaaactccctccctgggctggctgctgttggatagagagaggggccaccctatggctcgtgccatgtctcctggttggtcgatcttggaggggaaaaagtagtctcgtctctgcatataattgcatcgcgtagtacgcaaacatacttacatgtctgttcgttggtgtgggttacgttaggggcatgcatgtgatgtgatatgaaccagtatgcactgagatcggcatcggtagttagtactccgtagtgtgccaccgaacgaacgggatgagttgacatgccaccaggaatccaccgcgcatgtgtcctcctccaaccactcttctttctttcttcctgattctgatgacccataagccataatccagcaaccaaccttagctgttagcttcctagcctgcatatacgtacccaactaaccagagacgctctcttccgatcttacccgttggtagtacaactgcacgcttctcgtcagccgtcaggtcaacgcagccagcagtgcaactgtttgcaacattgcgtttcagtccatgccatgcaatatcttttgagtcccagctcaacaatctagtagtctaaccttttttccccccgttccgtcagtcactgcacaagcactttcgctttgagtgcacaagctgccgctgccgcaccaaaaaaataaaaataaaaaacattggaggaaacgaatgaatcgccctgctcgttcgtttggacgagcaagaaacaaaataaaaatcgcttgccaacaaacaacaggc

SEQ ID NO: 76878 - DNA, 539 bp, Zea Mays
ccacgacaaagcagtgtggcaccgatcctttacagtaggagacctggtactctgccgcgtattaataggagaaggacgacacaaactgtcaccgccatgggaaggacctttcattgtcgcaaaagtcacctggcttgagttctactagctaacccagatgggcggaactcatgtaggaaactcgtggaatattgagcatcttaggaaattctacccgtagtaacaccacaaactccagatggcgagctacacgttgtaaaccagagatctgattatcaataaagcttatgtgtttgtccacatacaaacaaaccctcaaatagcgaccgacttaagtcggaaacgccttaagccgacgcagcgcgctcactcatacatgacttagggtgattaatatacccctctaacggagcaatcggcttaagtcggaaacgccttaagtcggtgtgacatgctcacgcatacatgacttagggtgattactataccctgctaatggagcaatcggcttaagtcagaaacgccttaagtgggtgcga

SEQ ID NO: 76879 - DNA, 365 bp, Zea Mays
tttgtgcggatggttgcgagttagaaaaactaaatattcaccacaatttccaccagttgaaaacaaactttgcatgccattcatgtggcattccccacaactggaattgctagggcatgttgttcgatcgctccccggcgcctccagctaggttatagggcgccagccatcacatatatccactcctatattcatcgctagaagtttctagaagaggtgatgacaaacctgctcatatgttgcctacgatgttgctactgctcttccatgcacaagagtcaaggcgatgacctctaccttggatctgcgccactcatcttgtcgtacagccgacatatatgaacatcctctcctccttactctcc

SEQ ID NO: 76880 - DNA, 1679 bp, Zea Mays
attacttacaccaaaatgcttacagtagggagtacaagctggttaggagaggaaaggatccgaagtcccaggggttgattgaggcaagtgccaatatctccgtggagaagaaaaccgtgaagtctttgtctgtcctccctgaagccatggacgtctctatttatagcctcaatgagggactccaggagcaccggagtttgtcgtgtataggagaggaggtgtggccaagccctgtagccggtatggcctttgtactcgccgttgacttgtgccgggaggaggatgtctggttcttgtatttgtatatttgactacgcggagagccaaggctagggcctagggctcggtcacgtacccgagccggtctgatggggaagttgtccaagtcgtagtggttggagcagtggtgggtatggtaaaaagctcttggtaatacgtcagctctgctacttctggtgacgtcggacgccctttcattggtaatatcgaggccgaagccatgctcgggtgaggtggaaatcttcttgaagtcgtggtcgagcctgctctagggctcgcaaccgtgtaggatacagtgggaggagtggccttctgtggaattcacggggagcaggtaaccgaggctaggctcgggcaggcagagattgttccgaggctaaggccggcttcaggcgagacagagtttctccctgagggttagcccatgctttgccgtacgcgcgtcccatctggagctggcagacggcgtgggggaatagctaccataattcctgggcacgtgtcatcatagttggtgaaagtggacaccgcggtcctatcacttatgttcgcctgcgacgtttcgtggggtaggtacatgcattgaatgctcatgtcccctatggcctttggccgagacgggctcgagctcggggttgtcttccttgcccgagacgggcgaggtgtaaatggtgttctgtggagaagggacctcggacgggacgaggatttccccgagtacgtacctggcccgaggggagcctcgagcgagtcgtggcttacactctcttcaccttggggaatgtgtctgacggtggtcttggagttaagcgcgttttaggggcataatctaggtacccttaattacgatacccaacagtagcacccgagtcctccaaggaagtgttttcacacttgtttgggggctcatatgtcttcatgtgggtatattgcttaaccctaagagatggtagacttatttccgatgggtgtgtgcgagcgcacccgttgagtgtagccgccgaggcctcaaaggagtggttaaccccttcaaggtcttaatatttccctccatagatatcattgattttgtcctttgtttcgtcacctggccctggcctgggtgcaaaggcagcccccgagtttctgcgtcaggttgctggagtttcaaacaattctatcacagcatgggtgcaaggcaaccccaagcccctgcacagagaaagaggacgatcgagggatgccttgacattttgatgatacgcctcttcgtcgcctttccacaaggagtaagaggggaaagcgacgttctaccctcggtgggcaatgagcacgacatttggtgagttgttattgggtaatccaagtgaagatccccaaatgtatgtcggttttaaatcataacaggatgcatagggaaa

SEQ ID NO: 76881 - DNA, 871 bp, Zea Mays
atgcttgtttgggagaaaatggcagtatagaagttaaaccgatgctggaagacctcattcgcaaagctcatcgtttggacaccgagatggtaggacttgtagaaagggctaacaaggaacaactcccagaccttagaacagatgaaagaggaactctttggtttaggaaccgtctgtgtgtaccaaagggagaggcatgagaaatcctactagatgaagcccacaactcaacgtattctatccatccagggtctaccaagatgtacctagacctcaagactagatactagtggagaggaatgaaaaaggagatagctcagtatgtggcccggtgtgatacttgtcgacgaactaaggcagaacatcagaggcccacaggcctactgcaacccctctcagtgccgaaatggaagtgggaagaaataggcatggacttcataatcggactgccccagacccaaaaaggaaacaattctatctgggttataatttaccgtcttaccaaggtagcccacttcataccagtaaagactaccttcggaggagccaccctcgcccagatgtatctcaaagaaatagtctgacttcatggaattccacggagaatagtgtctaatagaggaacacaattcacctcaaagtttcagcaccgcctaccacccccagtcagatggacaaacataaagagtaaataaagtcctcaaagacttgttgagagcctgtgtgctgaccttcgatagagattgggagtctagtttgtcgtatgcggaattctcgtataacaacagttaccaggccagcagcaagatgtcaccttttgaagccttgtatggaaggagatgccaaacccctctgatgtggtcaaacgtag

SEQ ID NO: 76882 - DNA, 649 bp, Zea Mays
ggaaaatcgagtcacaacgaaagcccaaggacactccccagtcgagcaggacatgggtcaggccttcgcaaccggacttaggccagcaaaaccgcacccagtcccaggtgcacaacatcgcaaatcaacaacatattggggacaccgctcgtcgtcatgattacccttcgtagcaaggccacgatagtaacacaaccagaggcaggggtagaggccgatgctgcggcagcgaagattctattgtcttttccatggcgaggactcagcacacccaacctgggattgccctgaaaccaaggcaacaaaatatcgaatggctagaaaccaaccgactgacaaccaaagagatgtagcccgcacctaccatccccatcagtacaaccagcaacaattccacaatgagcatttccatcctcaccaacaaaaccacaatatataccaacaacaccaagaaatcccagctctacctcctccaccaccatagcatccaaatcaatcattaccaccaccacccccaccgaagcaagaggacttcatcgatcaaccctcgaggggtcatccacatgattaccggaggatccagctccgaatttgacacaaatcggcagaagagagaccactatagaagggtcaatcatgtagccctcac

SEQ ID NO: 76883 - DNA, 781 bp, Zea Mays
ggaacctcaaccttttctggagcagtttgctctgccgccttttcttcaggtgcggcaggctctgtctctgtgggcactgaaggcccagcttcggtttcagcttgaacttgtatagcttcggcttctacttgcctagtttcgattttggcctgcgatttggtttcagttggagcgactttctttgcaggagcagggctcaacgcctttgtagtctccagtacaacatccagcacattcgccatccttctcctcttgggagtcgcagcagaagccttttgcaccttcggcagtgttgcctctgatagaggactcaggatttctggcatttttgtcactctttccacctgtggctctttggtcttattatcttcagccttggctggctcaactgtagttatcttcggtactacacttggctctacagtgctttgcataattggaacagtttcttttgctttggcagctgaagaagtaccttcgccaaattcaggtatcacggatggttcaacataacgcggccggtgagtcagaaccttcatcttcttgcccttcggctcaactgtgatggccaaagcagcaatatttcccgaagcagcaatctttctctttatcccttgccctcacagcgggtagcaatagtcagggtatacgaagccaatagcatcaaataccttgttcaatcttttcttattccgacccccgaaagctgcggaccaggcattgtcctcggccttggagtatgcccccagtagctcatctctagtagcttcaatgcacttca

SEQ ID NO: 76884 - DNA, 500 bp, Zea Mays
cttcggcaatttttctcggagtagaacttgaagactttattgtctccagtacatccagaacattaaccatcctttttcttttgggggtaaccgctggacctctctgagtttgtggcactccaacttctgccgaagggctcaaaatttatgatatttttgtcccttcagctttcggttcttcaattctttcagccttcggtgttgtagtcagctcttcagttttctacgtgggtataggttttttggctttagtagccgaaggagcctcgccgacaaactcgggcactatggccggttcaataaagcgcggtcggtgagtaaggacttttacccttttcctcttcggcacaggctcgcttggagcagccgaagcatcatctttcccggaagttgcatctttcctctttcgcccccgtagagggtagcggtagtcagggtacacaaacccaatagcatcaaaaactcggttgaaccttttcttctttcggcctccgaatgcc

SEQ ID NO: 76885 - DNA, 695 bp, Zea Mays
gcaagatatcgatggactaatcatattgtgaagagtcatacagtgatggagatcacaacattagaatacgtgatttgaagtcctctaattaactcatatatgatgagatgattcaaaccataagactcgggggtttctagctcaagacaagtggagaagcatgattacaagtccaaggaagaggtatcaaagaaagaacctggaatgggctcatagttgtgcaagactttgatagaaatgaaagtgaaaattctagaaagaatcagagtttgggttattccagtgtttggagatgttcttggtgaccattgcagcatactagaactcaatgaggcgagaggattacttagatttgaagtttggagttccaagtgtctattggaaaataagtttgatttttatttgagttcttgagtttggtaatcgccatactatcaagagagatccacaaatgagtattggtacttgtactaaaagctcataatccttgttattgaaaactcgcgagtttacccattggtttctcctttggtttatatcttgtttctgttcaaaatctgtttttacagatcattgcagttcaaccgagattcaaatttaggttcaaccgggatctgtagagaattctctgttgaatatcggttcaaccgagattcataccggttgaaccgggatttgtacagtcgcctagaaac

SEQ ID NO: 76886 - DNA, 586 bp, Zea Mays
caatcatagtgtatgcataagatgagatgtcctatgagatggagtctagggagagattaagggggggttaggagattagggttccaaacctcgggttaaattttgggatgttacaaaaagggatggaattgttggatagtgacgacgaggactattctcaaacaaaagttgagcaaaagatccattgcaatgctcaagcatgcatcatgctcatctcttgcctcaaccaataggagtaccacaaggtggacgaactagagagtgccaaaagaatttggggcactctaaaggtagtgcatgaaaggacaaaagtgatatgcaatgcaaggattgagcttcttgaggggagcttggaagagattatgccttccctcgagcgctgatagtgtcccctatccccctagaccaaggaggtctacaggtggtcctaagcttcacgcaaatgcctgacaagatagacccatcgtgagtactaggaatactggtgcttctctggttatcgacataagggatgatgcaacaaccaatagtccctatgctaagtggatgtgcaaaggagaggacaaatcaaggagatgaaatgaca

SEQ ID NO: 76887 - DNA, 906 bp, Zea Mays
tcttccttccttttatctcttgaatttggcttgtagcactcgctcaccgaattatggatggcactcaatttcttttgctcttctcctcctctacttgctgtactaatttcagttttcttttgtaaatgttcaaccatgatttgttgaggggtcataggcttgaatacaaactttctccctttcaaatctagtgtgtactgatttgttcttccacaatgctgagaatatcggtcatattgccaaggtcttcccaacagcaagtgacacacaaacatgggtgcaacattgcactccactgtgtcaacaaactctccaatcttgtacgaaactttcaccttataaccaatcttgatatctccttattcattcaaccattggacatgatatggatgagggtgtcgctgcaacttcagatcatgcctttcaaccatctcacgacttacaagattatgactacttcctccatcaatgatcacctttactactttgtcttgcacttttgatcttatttgaaaaagattatgtcgctgtccaatttcagcttctttcatttgaacgctcaatatttgtgtaaccacaagagcggtactatgctcaaattcacatcctgtatgttcttccaatttatcagtgtcatctacatttcctgcttcagatttctcttcactagctgatgtatattctccatcatcagtcacaaggatcacacaattatttggacactccttaatgacatgaccacgacctccacacttgaagcactgaataccactactcttggttgttgaacccactgatgttgaagtggatgctgctggtttataactcgtgtttggagcagcaccgttctttccactagaattgccttgaatattggatcgcaagcctccagttgaaccttttgtt

SEQ ID NO: 76888 - DNA, 475 bp, Zea Mays
aattggtctggaacgattaacaatctgataatctggacatgaatggcatagacactcagcaccgttaacataagtaaacattcaggtaccacttcggttttacacacttgatataagactgatatgaagtagcataaacactggccacagtaaacataagtgccataggaagtagcatacaaatgtgcaacacttgccataagtgccttaggaagtaacataaacagtttgggatcccatacggaatcttgttcagctatgatatctaagtcttggcttttaaacaacgtcgtttccttggaacatacttgaaaggcagcagttctgcagggaaaggttaaaccctattgttgcgatgaaaggtcaggtaatgcagaacaaacgcacgttggtccaatggttcatcctgtaatagtcataatagttgaattaatgataagaagatgtatgaaaaagtattttatgcattaacaaa

SEQ ID NO: 76889 - DNA, 387 bp, Zea Mays
gcatgcttccataggaataacatcacaatcagcataatcagaataagaacccagcgaaaaggggacacgtaccgaacgtgttacctttattttaccaccatcattaagccattgaatgtgatacggatgtggatgtgtgcgagtgggcaaggataatttctctaccaacgctgtacttgccaaattgttgcagctgtcgcattccgatatatacttagcaatttccctcttcattcgggtccaccagtacaaatatctgagatcatgatacatcttgttactgccggggtgcatggagaatttggaaagatgagcttcatccaatattttctttctgagctcgggatttttaggaacaaccaatcggtctccaaaccatagaattcc

SEQ ID NO: 76890 - DNA, 455 bp, Zea Mays
gtggaaaatggggcagcagatgctttatcacgaagaccacctgcttcggacgatattttgttcagcctgtcgtcctgcaagcctcaatggctgctccaggtggtcgacagctatacaaatgatgaccaggcacagaaattacttgctcagcttgctcttcacaagtccagcacagggccatacaccttacattctggcctccttcgttataaagggagtgtggattggtgctgattcacgtctacagactacaatcgtttcgtcgctgcatgacagtccaatggggggccattctggatttccagtaacctacagaagaatcaagcagctgttcgcctggtctgggatgaaagctcagattaagtcatatgttgcttgttgctcagtgtgccaacaagctaaggccgacaggagtcgatacccggggctgttgcaaccccttccggtgccggagc

SEQ ID NO: 76891 - DNA, 866 bp, Zea Mays
gaatgatcgaagaaagaccgactatatggagagaatcttttaaagagtgattgtcaaatatattagaaagtacaaataaggaaagatgcatcgtgtttcgagtgagcatcgacaagtaaaattatgatgcacgttttaggcccaaatggtgtgcgaggtggacacaagagttatactggtccaaacagaatgtacctactccagtctttggtggcttgtgctaccgacaccaaatttctcatagcaaggggttacaagcaggcgagagatggaagagttctcaagtctctatttgagtacgtgagttggtcatggttgtgtgtccttagatggagttttatgagatcatcttctccctcgtctgtcgtctttctctctggctgaagctgacccttccttttaaagtttaagaaaggagcctcttacaagggtctcccccgcgagcgagtacataagaaggtaaaaaagaggtctgttatcggtaaaaatgtgttgcgctctagtactccgtctcgtacttgctgacttacttcaggctgaggcaccacccctttgcttacatgagtataatattttgtaccctaaaagtacccgctcttgactagggtgtacctcgtagtggtggcatagcaccgcttgtaacgacgacgtaagccactaggatgggttgactttagggtggttttattcgtaccctcagcttttgttgaccgtcatacatcctagtctgcctagcaggttttcctcctctctccatgcaagagtcgtaagctctatagtggacctagattcaaaggagcatggggcctggctggaggaaggatggcacccatccttgcgatatcgtgtgggatggggcaaccgtg

SEQ ID NO: 76892 - DNA, 290 bp, Zea Mays
aggcaaaattgtttgtttatatatgaattcagataatcttttatatacaatcttagctgtcgaaactcagtctggaccttaccttaccccatgattttataatttttgctagtgtgtttataatgggtggttcatcttttgactatctgttactgactgaatgagttacaatatactccaattcattgataggagctatgtggtgggaagacatgtttcgtcatcaacaaccacccgttgtttgatggagaagggactccagaaatattgtatgttttccctttatattt

SEQ ID NO: 76893 - DNA, 929 bp, Zea Mays
gggccttacccttcagggcgatagcagctgccacaacatagggaatattatacgagtatgggcacatgtttaaagtcgacatcaccaatctagttgttgcatcaccccggaggcccagggcacacttctagttacactctttttttctcgcattgagttaacccttctatattgcccccctaaacttatcgtctgtaacaatcgccaacgcacattcacacctttaatgtccatctcttctgagatcgaagttggaggcgtgcaggtggcctccaacagtttgataaagtccaccgacatagagtcagttgtcgtatcgacttgcatcttcgaaggccccgacaggatgtcgaactgaacatgagccattttagctttcgtgccctctgggtgaaccctcttcttcatcccccacatacaccctcccttcacccctttgccttgctcgacctccttcccttaacactagacactgaatatggcccatactctctatcctcatcaactcaaacacctagttcgggcgaatgtcgccctagcggatgtcctgattcctcaaaccctatgcctcgacatacttcccaacaagcttacaagtctctttgttgacttcggtgatgaagtctttgcctgtctcccctcagatcaacatcgaaggggggctccacacttaaccttcttgaacaacgttacacatcgccgctgacaactgacacccaacgaaatgtggcctcgtcctgatccccctccgcaaccacataccgaggaaaagatatttattgcatagacttcacctcgtgtgccttcgaccaataaattaaaacgtgtcttaaccatcaccaaccttaatatagaaccacccctcgcttcaattgttgcttcagcgattcttgccgtagggcatgagttttatgatagcatctaaagta

SEQ ID NO: 76894 - DNA, 923 bp, Zea Mays
tgttttggtgtgagtagaagagcgaggttacaatgaacttaaagcccaacctacagatgcatttgagcaataggagtttactaaagaaggcatgggtgccttagataatgttgtttgaccttataatatttattggattgttctcaaatatgcattgcatagtcagggggtttatatttgagttgcttttgcttgttatgttgagccttaatatttttttggagggactagatgtgttttcagagttacaagctcttttaccttttgctctaatttctagatagtgggcttgagccctttctatcccttcttaagagccatcagttgatgctttgttgcgtcgagtcgttgtctatgtctttggggaccatgtttttgcttatttcaaatgaccccaatttagattttgtttagcttttggtcatttgagtgaaatcttccctttttccttcttttttgctctttatgtttgtgtggttatgtggacaatgcattcatcaagggggagattgcgaacacatggttgatatatgtgaaagggaaattggccttatagccattcctatatttttttagtgcttgatgaccatcacaatcatgtgaacaaactagtttgccaagtatatgatcacatgttcataaggatatacatcaaaagatcaaatccaaaaaatcaaaaggcacagaccgttcaggcatcctatgcggaccatacgtaatatctaaattagatttggacaggaactatgttgaattgagaaaatgaactaccgaccgttcaaggctaagtcaagtaccgtccagcgccatgcgcggaccgtccggtaccatgcacggactgtccagctataaattgtggaccgtccgcctgttcaaaattgaacaaacctaaaggtgatatgttccataaaatgaattttagt

SEQ ID NO: 76895 - DNA, 1312 bp, Zea Mays
caccgaccacgcagggcaagaagcgtattttgaaggaactgggtattgtgaatgctgaagaaactgaaactattaggccagaagaccttgatgagtatgccagagttttcagcaaagggctttcagaggtgcaaatcatggccatggcagcgctattcggctggtctaggcctatggagctgctgcagggtggaccaatctgctgatttattgggtccctcactggtagtcgttcttctttcatcccttatggatccttcaaaaattctaatttggaatgtgcgaggccttaatgggtctgctaggcaggatgctgtacgcactttggtggattctgctcgagttgatgtggtttgtcttcaagagactaaaatggtggacgtttctcggttccttttattgcggatgctaggaccagcttttgaaaattttgtattcctaccttctgttggtgctagtggtggcatcttggtggcttggaaaaatagcattggtgtttgtgctggcagtagggtggatgaatatagcgtctctatgaattttcattctagcaccagctcaccgtggtggcttacatgtgtgtatggtccacaagggaaccgtgagaagattcagtttttgcaatctcttagagaaattagagctctctgtactgggtcgtggcttgtgctcggggacttcaatctgatattaagggaggaagagaagaataataataacttagaccgtgccatgatggacaggttcaggagatgggcaaacgacttggctcctaatgaaattctgttgattggccggaaatatacatggtcgaatggacactctaattctaccctagtcaaattggatagggttttctgcataacagattgggaggaacaattcccagattctcttctccagagctcagccacggatgactccgaccattgccctttgctgcttgggtttcatgattttagcagaggaaaaggaaggtttcacttccaagcattttggcctaggatggagggatttcatgatgtggtagctcagtcttgggtgtctgttcctgcagggccttgcccacttatcactttggccaagaaattaaagacaacggctaggagtctgcagagctggaatgccaaaaaaattgggaagattaagctgcagcttgagatggctagggagctcctacatcaattagaggtggcgcaggacaatcgttccttatctcctgctgaattgtggctccaaagcatgctcaagaagcactcccttgccctgtcctctatctctcgtaccatggcaaggttgaaatcgcggattg

SEQ ID NO: 76896 - DNA, 418 bp, Zea Mays
cgggagtgccgagagaactggccgagcacaaactaaaggtctatccctaggcaaggctgatccaacaaaagttgcgtcgtttcacgctcgacaagagagaagttattcatgccgagctagctcgattagtcgcagcaggattcattagagaagtactacatcctgagtggttagcaaatcctgttcttgtactcaaaaagaataaagtggattggcgcatgtgcgtcgactatacagatctcaacaaacactgtctgaaggatcccttcggacttcctagaatagatcaggtggtagattcgaccaccggatgctctatgttgtcattcctggactgctactctggataccatcaaatcagcctggcaaaagaagacgatgaaaaaactgcattcattaccccgtttggagctttctg

SEQ ID NO: 76897 - DNA, 987 bp, Zea Mays
tcccgcccgaagtctcctctccacggaaccgccgttttcgccacacccgagcccgtctcagggaggacaaccccgagcctagcttcagtctgcagcgggagttagtagagagtggtcatgctatcgactgggttgtgagttcacgatccatagcctaggattgtgaggcgactgcccgagcccgggtggaagagctgagcctagccgtggaaaacctacaagtgtataacaacatcctgcacgaggaagtgtgtgtgttatatgaccaactacatccaaacgtaccacccgaagttacagagatgggtgctggcacagcgggagtaggtgaaggaggaccctatggagagctagacatctttggagctcctccttctatgaacatcgtggatgatcaccctcctgaagctagtagcggatctggagcgacaaaggacgtggatgactagagtagtatagtagtgggttgtttcttttgcctagacttaataaggaaagtgggtttgtatggactgagtatgtgtaataagtaagagcttggaataatgtaacaaaggttgtgtaactatattgtataataataaagcatgttttcttctctagatgccaacaaggacgtgtggtcatgatggggctgggacttctcggggtagtggggaggagatcccaatcccaccacctgtatctccaactctgtcggaggccattgctgccctgctaaatgctactgctgacaatacccggtttctccgagagatggcaggaaactagatccaccagcaaggaggtcgaggtcagaatcaggctcctagagacactacttatatggaattctcgaaaactcgtccccctgtcttcgttaaagcggaagaacttttggaggcgaatgagtggatccacgtgatggaagaaaaatttggactgatccgttgcacagagacttagaaacccatgtttgttgctcaacaaatgtgaggccccgctagt

SEQ ID NO: 76898 - DNA, 826 bp, Zea Mays
aggggccgagccgccataacctattccccgttcccgacctagcaccccgagtcaaacctttaccgtgaaccgagaaagagaaagagggagctgagagcccgtccgcgctgccgtcgtcgatttcggtcgtggttccgttggggactcaaatccgggtggtagccttccgccattgtccctgtcaggtgctcgtggcggaagtgagcgtgatcggcgattggtgcgacctcaattgctcaccgacgaagagcaccgagcctggatccgcccatcgccgtggcctacaccggtcaagcgtccatttgcagtaagatgcatacctgtgtgctcgttatactccgtacttcgtgaaaaccctgagacccgttggaattggtgcaccatgtggtcgattcaccttgctccggcgatcccccgtcgagaacggtggcggcgccgccgaaattcacgtcgggtagaagggggagcggctcctagccgtccgatctggacgtgtggtcaggattagggagggcgtgtaccccttcgtcccattaagtaacagccgtggatcccagatcctgtggctacgactagatctctttatttgaaacctaggtcgtcagatccaaaaccgagggcctagattgcatactgatttgtaaagtctgggatctaatcgtggcccatgaaatctaatcgggcgactgatctcgtgcaatacccctttgcgcgcgcaaattgctaaagagcccctggaacctttataaattaacccgccgtccattagtcactatgcgttgtgtctcgggtttcttgtcccgagccccctggacttttattaaat

SEQ ID NO: 76899 - DNA, 448 bp, Zea Mays
cctcgtgactcgattcgtggtgcagattatagcgggccagtaaaatccttgacggatcacctaggcagcaagggccctaggccctgagtgggagccgcaagttccgctgtggacttcgcgtaggatctgaatgccttcggtttcggtgacacattttagcatgggttgactgatccccttcttgtatagctggtcaccgattagtacgaagtcccggcttcggtgcttgaggcgcttggcctcattgatgtcactcgggtggtagtatccttgcagaaacagtgttattggggcccaccaatcttcagtcataatgaggttgacgatgcgatggcctttggcgtcattggttacttgtaatccctctgggttgcggacggctggtgtgccaatgacatggtagaacacgtcggagggcaaggtctcgcctctggctgctgccttagca

SEQ ID NO: 76900 - DNA, 711 bp, Zea Mays
cacaaaaatttgagatctaggcactgcaattctgtctgtcaggcactctgaatcagaattctgatggtacagtggcgaaaagatccgcgagttcagtgaatctcgccactggtgaccttacgccgcgattgacgtcggtcatcgtgattcatgcgccgtggtttgcggataactacttgcggtgaaagatctcaactcagggaaggagtggagccttatcaccggtctattcactgtgacacttgtcgcgcatttgactgaggtgtcctcgctagagttcgccgtctttcgtagccgcgtcacgtacttagaagagctaccacgtcgtagtagataaccgtaggtaatctgttcgtcgcctgagacattgccccgatgaacaccacggtagttcgcgccggtgactcacctctcccttcgaccgccggctttcccctttcaaaattcggcaccaccgcttagcgcccttataaattgacggcacagtccgctctgccatgttatcctgaagccagagcatccatccctgctcgattagccaccatagtcagagaattttgttcttcccgcaaatttgttgcccgcgccatcgtgagacgtcgcgccgtggctagccatctccaggtccatcctcgctctcctcggtgatgttttagcacccacacatgcttgtgatgctcctcggctcaacccattgtgcttgaccacccc

SEQ ID NO: 76901 - DNA, 529 bp, Zea Mays
ccgagttgttcccgacgattaggcacggtagcattcaaattctaagtaggggagcatcaccacacctaaaggaagctagaacggacagtagctgggctggaactaccttatgcgaagctggccacggaagagctctcctcggcggcgatggcgaccgaattggggggaaaaccaaattcaggcgctacggtggctaatcgggggtgagagttggtgttctagcttcataacaagctaacagagtaggtcgcacgctcaatttatagcgtgcgcaagcggtggcttcgaattcgggggagataagctagaggccggagaggaggtgagtcaccagagttttctaacgtggcatttactgggtaaaagcttacgaccgtcactggttatactccacaacccgcgacgacatggtgaaatggtttaaggcgtgtcgtgaacgaagtaaaggcgacacgacggcggtggtcacgcggccacgtcgccggtgcaagtgggtactacgattgagcagtaacagggcccaagctca

SEQ ID NO: 76902 - DNA, 301 bp, Zea Mays
gaccaccgatagggagctggggcactggtggttgccaccaggacctgccggtcgttgagcttttgctgccttctgttctcctgcgacctgtgtcctccgaagatgatgttgacctccctgttaacgcgagggaatgctccaccccctcccccttctggttgctgaggctgcctgggctcgccaggccctcctcgtggtgggggaggtggtagaggctggaatggtcggccattcctgacggagtgcttgaagtccctgcagttccgcaaggtgtggcgcatgtccttgtggtacagacact

SEQ ID NO: 76903 - DNA, 1149 bp, Zea Mays
aatgtgtcttcacatttctaggtccacttgaatttggattttttctaacagaactatcatcagtcttgcaatttggaaaagcactcaatcaaacgtcaatagtacccagtcattccaatgaagctcttgatctcacggacatccttcggtgctttctagttcagaatgtctgctaatttatttggatccatggctaatcatctcgatttattatgtgactcaaaacatgacttcatgcatctagaagtcacatttactcaacttggcatacaactggtgctctcatagcctcttcaaaaccatcttcaagtgttccacatgcccctcctcgctccaagaatagatgaggatgtcttcgacgaacaccggcacaaacttgtccatgaacacactgttcatcaagtacatgaagaagggcgacacatttgttaaaccaaaagacatcactatgaactcatataacccatacttggtgataaatgacatcttcggtatgtctgagggtcagatcctgagatgatggtaacctgatctcatatctatcttcgagaacacgctagcacctgtgagctggtcgaacagatcttctatccttggtaaagggtatttgttattgatggtaacatcattcaaagctctgtagtctatgcacatcctcttggttccatccttcttctctacgataggactggagcggcccaaggcgaggtattaggtttgatataacccttctctaacagttcatctatctatttcttgagttacaccatttctgatccgaacactctgtaggatcttttagagatgggggttgtaccggggataagctctatagcaaactcgaccttccttcccagtggcatgcccgatagctcctcggagaacacatctggaaactctgacactaccctggtggcctcgagcgggttggcttccttgttatccgtggtcaactgatggcaatcttctatttctgactcaggcattcttagctcagctactatttcctctccggatggggatatcaacctcatagtcctcttatcacagctgatatttgcttgagacttcctgagccaattcatccctaggatcatgtctatcccatacgtactcatcactattaggctagcgcggaactctatcccc

SEQ ID NO: 76904 - DNA, 971 bp, Zea Mays
ctgtcttggtttttctcaccccaactccatccacgatgttcttcaaacaccacatcgtgtgacacttgcagttttttagtcaccggatcataaacctgataaccttttgtgcctgtttcataacccacaaaaaccatttgtgttgatctgttagacaacttagttactcctggtcctattttcttgacatgggccacgcaatcaaatgttctcaaatgacctacatttggtttcttcttgtgccaagcttcataaggtgtcatcccttcgagactcctggtaggatctctattcaataggtacactactgtgtgaactgcttctccccaaaattcactcggtattttcttgctcttgagcatgcatctggccatctcaactatcgtttggttacgccgttccacaacaacattttgttgtggtgagtagggagcggtggtaaaatgtttcagccctttctcattgcagaattcagtaaactgaattgagttgaactcaccacgtctgtcagaacgaaacgcccgaagtctgcacccactttctacttctgccattgccttcactcgcttgaaacactcgaatgcctcagcttttgtcaccaagagctccagccacatgtatcgactgaaatcatccaccacaagcagaaaataattcttgcctccaggtgtacttggcctgatctgaccacaaagatcaatatgcaccaagtcgagtggcttctcagcacgatagtttgctatctttagaaatgcatgacgatgatgttttcccaatgcacaaccatcacagaattcctcaactcggtctatcactagcatgccctccactatcttcttggaactaagatcacgcaaggctctgaaatttagatggccatacctcccatgccatagccatgccttgtcttccttcattggcaccagacaaacaggagtggccagctgcatcttcaacagatagagacagtt

SEQ ID NO: 76905 - DNA, 523 bp, Zea Mays
tcactgcacaagctctgtttcagtgtacccaggatctagatgaatacctttagttgttcgtccaaagatttcttcaccttcgagcctaggaaccagtagtctaggacaacattgtcatcaaatccatggtcaaggggcttagaccagggccggcagcccaatactttgcaagaaaacctccacactctcttgagaaattgctgcaaaatatggatgaatacataagggctgacaatgatttccgccataaaagggaggagttacacagatacaccaaagcggccaagagctttgagggaaggttccatcctacgcatattcaaagcattcacaacccgatgcagggtgaggaaaagatggaccagtcttaggtcagtcgggccagcagcaagcaaactcccaccagtaagcaagctcttagcagcaacctttgaataacatatttcatcgacctactccgagaggtggaaggggaggccaaaatttcggtggcagactcaatgcacctccaaggaagccattc

SEQ ID NO: 76906 - DNA, 701 bp, Zea Mays
catccatctgccaaatctcataatcgaaatatgtggcaatagctagaatgatccgaatagatttaagcatcgctactggcgagaatgtctcgtcatagtcaactccttgaacttgtcgaaaatcctttgcaacaagtcgagccttatagatgttaacatttccatccatgtctttcttcttcttatagatccatttgcactctatgggtctaacaccatcagacgggtccactaagttccatttgatctcatggcgacttgccatttctcagaatctgggtccatcatcgcttctgcatatgttgcaggttcatcgttgtctaacaacaacacttccccattgcccaacaatagcacttctctacgtgcttcacgaagccttgctgaccttcatggttgtggtggtgtttctcttgccacagacgtctcaacttgttcagctacattagcatcacttgttggatcatgtgacactggctcatcttgaacttcttcaagatacacctttgtttacttttctctcttttgagaaactctttctctaagaacacaccattctggacaacaaacactttgccctctgaccggtggtaaaagtaatatcccaaagtttcctttggatatcccacgtacatgcacttgtccaattttggagtgagtttatccgactgaagtcgcttgacgtaaacctcagaacccca

SEQ ID NO: 76907 - DNA, 689 bp, Zea Mays
aacaagaagaggtcattgggagagaagcccaaagataaggtgtccttaggggagaagctcaagggaaagaaacaagaataccaaggctcctccaagtcacacaaggacatcaagaaaaagatgatgcaaaaggtggtctactacaataccgacacatcttcctcgccttccacatccggtgccgagtcaacatcttcaaagtgccttgagaataaactagttaatcaaatccccttattttatccttgcattcctaaacataccccttgattttggttccattaggaaaaccaccacaatttgatggtgaggattatttgtggcagagtgttaaaatgataagtcacttgtcctcactccacccaagcatttgggatgttattaaattaggaatgaagatactagagataggagatgaggactattacttagacgaggtggcccaaaccattcatcacaactctcaagcaacaatggtattactcacttctttgtgtatggaggaatacaacaaagtgagtgggttgcaaaccgccaaggagatttgggacacactaaagacgacacacaaaggtgacaagagcatcaagatcacaatgatggagcttattgaaggagagctcggaacgttcaccattaacaaaggagaagggcctcaagaaatgtacaacaaactcaagacattggtg

SEQ ID NO: 76908 - DNA, 1356 bp, Zea Mays
attttcaccatcattctaaaacttggtgaccaaatactgacatgcagcattacggtgctgttgcatgagaattaacatgtttctggatgtatgctccctttcttctcaggtgtcaggtcttatttccttgattgtttatgcattaactaggtatgtgcccgtgcgatacgacggcaaataaattattcgataaatggtagtgtacaacgattacattgatgtttgtggcgttgctatggtttctatatatcacataagtgatcgatagttgtttaaacacttatctttggctttgcttagtgagtcccaaattatcaatggttggtatcaaacattttttatcttgtaatcagcaaacaacaatacagatacaaaatgaaatgtagaaggtacacaaaattaagtggcagcatacaaaacatccgccttaggatcattgtagctcttaaccaaaacagctccacaacatgtggttccatgattacattagacgaatcaggtgcacattcaagaaataaaatcaaggactgttcaggaacaatggctaacagtaaattttgaattacgcgcaaacaaggaacagtgcaaaaattaaatttcacattcgtcacacttcttcggttccccaattttattggcaacttactcctgctttggttcatcacatttcacatctgaaccaacaattacaagataacaaaaccagcatcaaatgttgcccctcgaaatcgaacagcggaaccaaagcaattggaaaagtgaaatcatctaaccttttagtttgctgcaccttgccctcctcttttagatcatctcatttcacatctgagataacaactacgtaaaaacaaaattagcattaaaaacttgtccacaaacaatcggcagcagaagcaatgtgactaccagtgaggcattcctttttgagataaaaatactcagaccagtaccaagcttcaggtgtaataaaataaaaggtatcagtatagctgctaaatctaccaacaaccccttgaaccaagcttcaggctccagatttcgtacctgatgaagctatcataagcaattcatatagcttgcagctagttgccatctgcactactatacaaaaatgcaaggaacctattgcgagtttatattattgaagcaggatttctccaaatctatatagatcgctaaattgtggcttgatataactttgaatcttcagagacaaatcaaatgtatagttgttcgacctgtatctcttgccaccacgctcatcgcccttcctgcaccggaggcaccagggcaccccacaccgggctagctgccgctcctccccaagggcaccggcagcatgcccaattgcccagc

SEQ ID NO: 76909 - DNA, 614 bp, Zea Mays
gagactctgaaatcagggtctatgcaagccctcacatgattgcacccgtcttttagcagaacataagcagtgctttaggcgcctatctgagcataataatcgtctcgagctgagagaacacctttgaaagcatgcgcctcgctaagcacccacctcatcaaatcctccaagtcaccatctaaaaaaattatctttagatagatccccggtagaggagaaggtttttagcaactcattgtggcatctgttgccgagggtgtaacaattggctagcgggattcgatagttttcatttatccctctcacatgccttatttcatccttcatgtcatcaatcttcacctgagcgctgctaagattcatagccactttcagtggatgcttgcatcagctttgtcgtttcagctttgtgctcctttttacccgttccaactcagtttcgagcaatgcaatttgtttgtccttttcagcacttgaagctttgagcttattttttctcctcacgcattatctggactttggtctggctgtcaataaaatccttttccaagatcttgaaagaatttttccttttcttcacaataaaccgaagctcagacacttcggaattgagt

SEQ ID NO: 76910 - DNA, 419 bp, Zea Mays
tacggggttgcatctagtcctagctttcatggagcttgcgcatccagggaaaaggaccggcacgtctctaaaagcacaggctcgttagatagaggaaggaaaagctggggtagtggtagctccacattagcctctgcctcggcatggtgacagctcgagacggaggggattagatctcggcctatttacagctcagaccgtagcagtacctggctctggctgtagaggactaccacgtactttccaagtccacgctgtacagcagcactgcgtgcatccctcacacacaccacaccgtatcgggctactaccggagcatacatacacacacacagacatgagtggtagggaagcttgccaggaaattattccaggcgggcccctgacacgagagcatgattgcagcgggcccaggcttg

SEQ ID NO: 76911 - DNA, 669 bp, Zea Mays
gactagtcggcaagtgcagcgaccaatcggccgaagcgactaccaataggattggtccaatcggtaccgaccgtccatgccagcacatcaccaacccttatcgaccgccgttgaactggactaagttcatgtgcctctaccgactatagatgtctagatggaccgcccgatataacctgatatagacccactagagcacgacacaaattagactatgttatgcacgacatgaattaggcgaggtccatacacggtacaacaaaccataaccataccgagccaacctatggcacgacgagcccaatagactttatacagcctgtatcgtttaaatgacagaaagtaaatgacaaaaagacaagatgaacatctgtttgaatttgcttctctaaaatttaaagctaaatgtttaaaacaccttgtctaaagttagacctaaactttagatcattttagatctaaaaatgttaggactctaaagtttatataaggagattgaaacgggccctagaaccaaaaccatgctgccagagttggtagctccgagatgcatagacgggcgtgcatgtcgtccgacactcagagactacatatatgtatgtgggacaagtcagaactgaacagagctggcgacctgccggtcggcctcccggcaatgagaaactcaac

SEQ ID NO: 76912 - DNA, 882 bp, Zea Mays
gccatggtcgtgttctgcgaccgcgccggggcggggaacgcgcacaggcagaggagcagcagcgcgttcagcctcagtaaacgcgatgggtggcgtctcgctaggttcctcccgcccagccccgtcagtgcttgcatagtgttccttagtgcatagtggttgatgacctaaattaaaaagtatatatggtaattgtttttgtgcgagtacatattagattttgttggatttgtggtttttatctagctgattttattctcgaactggaaattgtagattgtacgatgctaccagcggctgcggccagtgggtaagagtaagattgcgaatcgggcatcgagtccatagggctagccggctagcgctgcccgggtaggggaaccgatcgagccgacaacagctgagcagcactacaggcttgcagcaaagggacaggcggacaacagccagccaccaggccagccccctcaatttccacgacgtttcatgagtggagggagacacgatgcttgcatgcagtagcttttcggcttgcatgcaggttctgcagtagcttgtgcggcttgcatgtggtttgcatgtggcttgcatgcagtggaggttgagcaacttgcgccgcttgcatgcggcttgcatgcagggaggttggtgcatgcgaagcgtgagcgggggcacggtagtggtctacattagagtcttaatagttgtagagattatgttagatccctaagggcatagtcttggaaatgagaggtagaaaaaggacgatatgtgcgtgaatagggaaatgcacgtgaaggtttaatatgtttgtaaaatgacatgaatttagtttactcctacaatttggtttatttattttctggtacttatgcttccttg

SEQ ID NO: 76913 - DNA, 546 bp, Zea Mays
caaagttgagtttcagttcggcctatcatcctcaaactgatggccagactgaaaaaactaattaggtactggaggatatgttgagagcttgtgcccttcagcatggaggtagttgggacaagagtctaccatatgctgaattctcgtataataatagttaccaggccagtgtgaagatgtcactatttgaggctttatatggcaggaagtgcaggactcctttatattgggatcagactagagaaagacagttctttgggcctgaacttattcaagaggcagaagaacaagtccgtataattcgggagaacttgagggtagcacagaccaggcaaaagagctatgctgataatcgaagaagaccactggagtttgaggaaggtgatcatgtgtacctcaaggtgtcaccacttcgtggaatgaggagattcaaagtcaaaggaaaattgtcccctcgctttattggacccttcagaatctttaggcgagttggggagatggcctaccaactcgagctacctgatcatctatctgatgtacacgatg

SEQ ID NO: 76914 - DNA, 512 bp, Zea Mays
ataatccagcgccctatgcggtcacgcttcggcatcaggaggccatcgatcgcaagtgggaacaaagtgcaagcatgtttgatggccttcaacacggtgtgtacttacattggcactagggatttggttcaagagcatatttcttataaggtgtggctgcttcttaatgactaggagatgtcgaaggagattgctgctggctccagcgaaggtggtctggtttatctaagatacacctatcgctatagaagtcaatttgacgagccgaacgatgacatgcttgaggctgttgaagctaccagtgacgagttgttgggagcttatacgaaggcagaggacgaagccatgaccactacctttggtgcttgaggcaacaggagacttaacagagtttttgatgtgatcgtttttatcctaattactactttcctgcccaaaaacaagggtcgaaaagaaaaatggcaacttcatcttcttcccccgcgcctaagccgaagagagctaaggttttg

SEQ ID NO: 76915 - DNA, 487 bp, Zea Mays
ccttcttcttgatgaaaatggctggacatccccacggtgatgaactgggtctgatgaaccctttctccaataaacctctactaattattaagtaagcaacagtagtctgcctttgacccgttctgcctctgactcgttctgcctctgacggtcgtacagcagtacagccccgcgcaaaaaaatcaccttgctgcggcaccagagacgttagtctgagcaacaaacaacacacaccaatgcttataagtcacgtttcgatgctctgggtggctggtatggcactaatcaaataacaccatagcagtgtctgtgtagcggtgtatgcggcccaacgattggcgcggcccattctgcagcccatcctacggcgcctgccttctacacgcccacctacggcgcctgccgccagccgcctccactctagcgacggcgcgctgcatgatgcccacgacctcgacctcctccccccgaccatggcctcaaccgc

SEQ ID NO: 76916 - DNA, 420 bp, Zea Mays
tatggaatgtgcctccaatatggaaccaccgttttgttgtgccatctgcacccgtcgtcctaaaaaagacgtcaacccgctttcatcctcctcgcatcctcatctcaatctccacgacggacaatttcatctggtgagcatccagtcaatttcatttgtcgtgtgtgtgcacggtttgtgctttgactgataattctgcttctgttaatgtgaaatggtgcgtccaatgagtcaccggatgtgcttgtttcagttgtttcttgtagtctgtttcacacaaatgcacatttgtctggtgcatttggtgcataatgtttatttgtaaaaatctggttgcaatcttgggacacatgcaaatcaagaggtagtgtttatttgtgttgcaatctcaatcttcacgcttaccaccagtcaacaaat

SEQ ID NO: 76917 - DNA, 501 bp, Zea Mays
gctgtgtgccttcccttttatagtttaagggaggcacatacaaggatgctgagccccgacatgcgggcccaggagcataacggtagaaatatattacgtgagtaataaatgctgacagcacacagagatcctccgccttagtaacgcatgagtaatcagcgggagtcatgatgaccacagtccatgcagcattgatagtcagtaacccttctcttggaaacgcgctaataatggtgagtaacagcatggcccacatatcgtggactgagcacgccacctgtcagtggaatgtacaggcacacgtcttatctgtaatgaatgtgaaggcgcgcgtagcccagaggcatcatgctaggttccgcccgttggcttataccgcacgcagtatgtcacgtggcagcatcgggtctccgcctgagcggggagcaggagtgtatgcggataggtctggatcccaccagtctaggtctggacacgtgtcagcaccggaccccagcctag

SEQ ID NO: 76918 - DNA, 823 bp, Zea Mays
caagtgctattgtagctaaatcagtaagtctttgttgtgtcattgtagaacgcaaatagaacttcaatagttttaatttagaaaagctccgctctgctgatgcaacagtcataagaatggtcaataaaactctgtatgtaatacttgcattaggattggttgggttccttgataagctcgtgatgctcctgtgttatcggctggtagttgcaaatagctgcaaataaacaaaatctccctagccatgcatccgtagggtagaccaactgaccaagtaaagcctggcgacggaggctagaggctgaaacatcccaacagctggcagaatatgaagattatctatttattactttacataacctgatttttatattatatggtctatacatgtataaatttggaggcccttgaaaatttgggggccctgttccaatgtacctgttgaactccctctagcacgaccctcatcatttactacttatccaaaaagttaggacgttcacctggtttcggctgggagcactcccagaaaggatggtaggaggttatagaagtctattctgtattgaaatataatacaagtaaattgcttctactttttatcagcttaagtttgagttaaattggttggtgcatacaatttaacaaggtattgagaccaaaaatcttggattcaaatcttagttagcgtaattaaataaaataatagttgtttgctcctattccacatttgaaagctaagagagactcgcataagagagtgtgttgaaacttgaaatataatattcaacggatggggaatgatgttagaatataatatatg

SEQ ID NO: 76919 - DNA, 760 bp, Zea Mays
ctcgagccttgatcaatttctgggtctgcaactgggtgccgatgctgagccattcgatgaagccggtaaaaatgtggggaaccgtttcttgggttggctctgggcagagtttgtcaatctccttattatcgttgagaggctgatgacatactctggcttggtgtctcacgagggcgggttgaatgctaacgtttttctattaatggtgacatctataacattgacgagagcgtaaagatgtcggctagcatgttgtttgaccggatgtggggggcctttggcttgaacgtcgtgctggagcgggcgagagatggaagaggtatcttttacctttagtctcccctatatataagggatattgagagctctagacttctaataggtacaataagccttagccaccctctggaccgcatccaacaaccagagtgtatgggtctggtgtgtcctctgtcatgcaccaggtcaaacctactcatgtacgtgtgttagccaaatctcctggtccaacacccaactcccacgtgggatacacgtcataattgtggttctgttttttttgcacaaatggagtaaatagttcatagaaatagcgtaagttcatagagatcacataaaaccccgctcagccactggaccacgtccacacgtgcaggtgcatgcatgcagatcatatttttatggtagattcgataattgtggcatatcgtgggagtttgcgcaaattttggatgatattttcgtttccgctgcatgcgcg

SEQ ID NO: 76920 - DNA, 291 bp, Zea Mays
tgggattctggagctccgaaagctgaatgaacggatggtcgattgttgagaggggggttggtgctgattgctcgtcaaatgttgatttggatgttgagagctactaagtgtatagcaagcattgagcgagccagagactgcgactgacagtccatgccatgagccatatcgtcgccaacgatcggaatccgatcccgcctgtacgtggcatcattgtcaaaactgtgtctgcaatcaaaactcactgagattttccatgcagatgcagttgagttgtgctccaaacactcc

SEQ ID NO: 76921 - DNA, 371 bp, Zea Mays
aaccaatgcagaatggccacagctttctgagacgacattttgatattggatcctaaagcatcttctggaagctcccattaggaagccctttatgacatggcagaatggagggaggatatttccacccatatctccaaaagatccataacccatataatccttacaggattatagcaagttcacttcatcatacttttttcattgcaaaataacacagtttaggactattgtcaccatagcgagctgagagccaatgaagaatgggcctagctttctgagatgacattttgatattggatcctcaagcattacatcagagctcccataaggaagcccatagagacatggcagaatgatgggaggatattttc

SEQ ID NO: 76922 - DNA, 520 bp, Zea Mays
ctttgggaactaaatctcaagggttgttcacctatgagaaagaatatctggcgattctggttgctgtagatcattggcgccattatttgcagttgaaggagtttcacatttacacggatcatcgcagcttcgttcaattggatgaacaatgtttgcacactccatggcaacagaaaatgtttactcgtttattgggattgcagtacaaaattatatacaaggggttgacaatagtgcggctgatgcattgtccaggcatccggaggttcagttctcctgttcggcattgtctacttgcactccacaatggataacaaatgtttctgattcttagcaccatgatgatatggcttcgactataatggccaagttagccattgatgctaaagcagtaccatcttattcatggcacaatggaattcttcgctataaaaaccgaatttgggtgggatagtcactgacactgcaccaaagattgttatcagcttttcatgagtctgcagtgggtggtcattccggc

SEQ ID NO: 76923 - DNA, 749 bp, Zea Mays
gcaacattgaagtgcaagatcagtacaactacaaggactagaactatgagggtcgtaatcatgacaatcttcgtcgtgaggcattcaatttccaagattttctctatgacgaagcctccccactgacactagagctgcaggcgacgccttggccaccattgtacaagccttctgtactaccaatgtatgatggtctaaccggtctgaagcaattcctcatgagttacgaagctatcatatcttcatatggcggtaactcagaaggcatggcaaaatcattcatcatggtggttaggaatgtagcccggacttggtatccatcgcttcggccaaggactgtcactttgtctgcatattttttatgttttttcttttcctttacaaaatagacattgttagaaagactaaaaaacgatgtatttctaagattaaatagatgttctaacataaatacatgtacgttgttggagtattgtatagtgcttcactgattgcattattaatatttttcaccataaagtaacatcagtaccaatgtcatccaagtttgttagcctagggtaactcaggttgcaactttgccaccagtgagaaaatctgaccacgaacaaccatcgaggtgaactgcagccaaatcgcccattaaacaaccagaaagctaatagccaagcgacaagaggtgagattttgaaatgaaggagcgatcaaccacactgagctccaacatatgattagggtttttacagttc

SEQ ID NO: 76924 - DNA, 408 bp, Zea Mays
gtttaaaacacttcttgcactgagaaacactatgcaacaacatgaatgcaacaactaagatacttctagggctcccgccaacataggacaaaataactctatttgttttaataaagggaaaagaaaagcgtagaaaagaaagagtaacacctaaattttgagtacagagcaaagaaatttttataccccaaaagtcagggtgttatagttgggcaaagagtatttgataccgaacggatatgtagtggaagcattccctttgcctgaaactctatttccctttcaatctaagtctatgttccgaggtatgacatgataaaaggtagaaaatgagcaatgtgtgcaatatttcaatcaaggttccgagaatcaagaacaattagttcactcctaggctcaccgaatctc

SEQ ID NO: 76925 - DNA, 465 bp, Zea Mays
gaataaaccaaccattttctatcatgaacttctccattcctcatctttctagagtaatgagtatatgaaaaatgtctaccattagaatccaaaggaaatacaatattttcttctcttataggccccttcccaaccaatatatccctcgacttgttatcaagattaccccaattccttgggtcatagatatcctcagtaggaaccgactgttcatcaaagctatcattttctatatgagatgaatcaaatattggatcatggccagtcacatcattaccatttgtgttgatgtcaacattttcttcaaatgtagggtcatgatcttcttcgttggtatttggttgttccgccacaacaactatagccaaatttggttgatcttcattacttgaagttcttgtattagtgcgaacaaatttatccatggcacctctttgtgattctataaattcctctacttctttc

SEQ ID NO: 76926 - DNA, 350 bp, Zea Mays
gcggacggtccgaattgttcgtttgggatttgtgcagaacgtggcggctcgagcacgggtctcagtaatttggttctaaaaacggaacaagccactgttggcttggacggtccggtcatgcacatatcaactgatttacccctgatttccgtaggaggctgtggttgttcggggtatgtgtcaaccaacttctcgtaaaggggttatgattggccatgccaatctacagccgatgaatcacgtgtgttttcccctgattcaaactcgtgcgagggaacattcacgacagtagatttatcaaatctgcgcactagcctcttataatcattttgcatgccccctataatctg

SEQ ID NO: 76927 - DNA, 376 bp, Zea Mays
gaatgtttggtctggcaccttcaaagacaatggtgctcctatgtttccatatctcccaggcaacaagaatgattggagaattaaggcctttgctcatctccttaggaagaactctaataggactgaccccaccaccgggagaataacaagatataccacatcacagtagacaaaactgctaacaagatataccacatcacaatagacaaaactgctcataatatcaggtaagactagcaaaacaaatatgtcatccaaaaccaggaacttggctacatggcaacatgatgctacttgcatcaaagcgtacttcgagtgtgcatgtgccagtacaaaaaatgaggaaattgcaaaagccacttcacggctgtttggt

SEQ ID NO: 76928 - DNA, 718 bp, Zea Mays
cgcacaacatctttggattgcgggttaattcctagaatccccgaggactctttagcaaaattcgtggtcgaaggggtatcctccatccagggccgcccgatcagaaacggacgcgcctgattaaatccaggtgagctacacatccgcgtttaccgctgaccgtccgatcagatcctacgatcaggatccaaccacccgaaccggtgcacgagatctaatctgaagcgttcaagcgcagatcaacgaccgagagccaactgagcgaatgggtacacctaatctaatccacgttcattccttcatcatccaacggccgaacccccttctcccccaacaccactacacacagcggcggcgtcaccgcgagcagcagcgaagttcaacggagatcgtgattctggccctcccgagcgccatgccccaattcgcatgacccacgcgaaattgatgactccccgagccccattctacaaccaattttggccaacaccgagtacaggactcggtacacgttgcgccacggcggcgccattgccgtgcaccccgtcctcgcgatacgctatcctatacctcaattcgatggagcgatacccagagaggagggagacgaacataggggaactcacatatgctagaccgagatgaggtggcgcccgaccacgatgaagagcggacacaaggatgcagctagcgctccgacgagcacttctcggttccc

SEQ ID NO: 76929 - DNA, 365 bp, Zea Mays
cacacgtttcgttaaagaggaaagatcgtttacatcggatcatactggcgacataactagctttgttagtaagtcgtcgaacacgcaaagcagactaccaaggtttgaacaccccagaatacatgcatgatacatgactctatattttgttcattcgcgcgacgagagcataggaaccattctgtcctcaaagcaggccgagtagcgttgccaggtcagagttgctagcggcaatctagtggccgctctctgccaccacgaactgcgcaacctctcccgccgagcgagtaatggcctcttgaaagacataccaatttcatgtcttccaaattcaccaagacactaggacgatcaactagtgaatc

SEQ ID NO: 76930 - DNA, 514 bp, Zea Mays
tagactttaggaaacaccatagggcatacattgaagaatgggatttgatgggtgagaatgtggacgacaacgaggagccgcacaacaacagactataggcagtaccaagtttggtagtaaggtgtgactcgttgcaagcttaggggacagtggacacaggatgactacaccgacatcgattcgtcggacgacgaagacacggcgtacaaccaagacactcgagtggggacacaagtggaggcagcaccgatcttggaccgagtggtactggttaaaacttgttactcaattcgaaatgcacaaaatatgacatctatgtaatgccaatatgattgaattcttttgcagggcaacacactgaaacggtcggtacaagacatcgagcgcttctgttcgacaatcggcaacaacaacacgcgtaccttcctggacataagcttttaaaacaccttgctatccaaaattcgatacatgatgttgcttagcatgtttttggcccacagcgcttagccaa

SEQ ID NO: 76931 - DNA, 434 bp, Zea Mays
gtagctgcttgaacgcagcgtggctgatgacgttgagcctagccccaccatcaatcagcacatgatgcaacttcatattggcgatgacaggggcgatgatgagtggtagtataccagcccctgccatgtttttggggcagtcggatgccccgaaggagatagtggtgctccgccaccaatgatgtggggctgccttcgggacccctggagtcgccgaaaggacctcacggcgtagggacttcacgttcctacgggaggtgagctcccagcttccgccatacataacgtatagcttcttgcggcggtcgtcgtcatcaccagagtcggagtctccagtgacgatgtccttgaggacttgctctggggtttgatacccaaggtcccgttctcccgcggccaggttaccttcgtcgaccttctccttgccaggccaa

SEQ ID NO: 76932 - DNA, 669 bp, Zea Mays
gtttcagcaggggctgcatcagaggaatcttcagccaacatatccagcatggcacttatctcagcatcacttggattcaaaggtacctcgaaatgaacctgcctctcatcatcagggatttcaccaagtgaggcaaccaaagcacgaacctcttcgggagagggtcgcactctaaggcccaaactgctatcaccagcaggaggattcgacacaaaattggtaaaagccttggaacgaggcagattccaggccgagtatgcaacaggagcaccgatgttcgacaccttgcctctgagtatcatctcgagccggctgaccaaatccactgcaggaattcttctgttggtaacccgggtcgaatcagcgaggcctcgatacagataagtcgggtatgctctgtcctttaatggctgaatgttcttgaaaatgaaatcggcgaccacaacttctgcagtcagacccctctctttcaacagtccaacctcagcaagcagaacccctgcctcagccacctccaggtctgtgggggactcggtctagctcgaagtacgaacatctgactgtctccctggccgtggggggagggaattcccgtggttctccatgataaaccactccaggcgccatcctttgatgctgtccttgagtgggatgtcgaggtagtcggcc

SEQ ID NO: 76933 - DNA, 821 bp, Zea Mays
gtctaaaatggactctccagtaatcatgtggatgacctccttgaatggtgggttggcgaagtcctcttttcggttttagtggcggagggggtagatgatggggttgctggtttgcttggggtgacagaggggggtggaagtggcaatatttcttggtgttgcagttgtgggtgatgagggaatctttggttgcagttttgctgttattgggggtggtgtgggtgttcgttttcatagtggtgatattgagagtggtaggtgtgagatatggctatttgattgtttgtggggaccgctctagccatgtggtcattggcttcctttgttactaggcagtttgtggttgaatgccctacatctttgccatggaagacacaataaagctttctttactacttggggcctcttccacgacctctacctctcgctacgccgccgttgcagccttgctgtggagggtaatcatggcgtcaaggggtcgggggcttcacctggttgttactagttagctatattatgcacttgaagctgttgttggtcgcactcttggttatggtggtcttgatgcggacccttggtccatgtcctgctagactaccgggtctcctttggcttgcgctacgactccactttcctataatggagttcctcgaatcgagcatatttttttccaaaagctagtacaactcttagaggttggatgctgggtctctcgtacaatgactgtacagctgacctgcttgaagactgctgatgtcataatggatcacgacttgatcatcgatcaatggcaactgcgacttcaacataataaatttatt

SEQ ID NO: 76934 - DNA, 332 bp, Zea Mays
gcagaatccatgaattattgaagggttacgtggtggctttgacaagattaattagctgctgccactgccaggtacgcaaccgattcagccaacttcaactgatggcctgattcggtgtatgcccatgtgtttccggttttcggtttaaacctgataggaacgggggtgcccgatcttccgtcaggtgaagataactatcgatttggtggagatgtcacacagacgatccgacttccaatcaacacgactagaaccccgcaatcgcaacatcacttctcctctggttatcaaccgtgcactgcgcgattgacctcgccatgagggctaattcc

SEQ ID NO: 76935 - DNA, 485 bp, Zea Mays
aagctcctctctggacactcactaaagattccaaaatataaagcattgagctacactaatcaaaatctaggctttcttagtttctagcattgttgtaatatcccttgcttcccccacccctaccttggtcctagtacctgccccttataattgaatatatcctttgtaaggcaaagtatcctgtgcacatgggggcttggcgcacatataacatttgggccttcaatctatcatccaacggtttcccttcccacctcaaactttatcaaaaaaacaccccacttccccctaaagctccctgcattatttctgaaaaaaccggtgctacttctaacccttcatgttccctggccaacgcccccggcgtgttcccttggttgccacctccactgcaacaaaaaggatgcctccccttcatcctcgcctcccaagcactgcctccccttcatccatgcctcccaagcgtcactgttgcccttcctcga

SEQ ID NO: 76936 - DNA, 565 bp, Zea Mays
cagaccgtcacggtgttgggtctcgccgtggtcagggtgcaccacatcaccatctctggtaagacctactaactgaatcatagtagacttctcatggtttttcacccaagcgtatagagggtagaggtgtggggagagttcgtgtgttcggtagccatgtcgccgccgcatggatgtgtgtgccgccgtgggagtccgtcgggaggaggaagaggcatccgtggccctcgatctggtagcaggcgggtgagatcgggtcaccagataccccttcggtagatcaaatcttgtccgttcgatcttgatcgaagaggctacatcgggtcactgatcatttaatggatggccgagaatgctaggtagcatagtgatccatctggccgtaaacctagaatctaacagtcactgcttgatcctggatattttgaggtgggatctaatccgagccctccattgatgatccgacggctcaagatcttgcatacccctttggccgtgcaaattttcaaacgggaccctagctttaattgaaactaacccgccgtccaacttcatttataaactg

SEQ ID NO: 76937 - DNA, 1471 bp, Zea Mays
gacaaataaaaagagacagagggactacctctgatttacataaggaaacaatattgaatgctaataagacaaagaaacatccaccgcattagggagtaggcaccggcggagccagggcccggcctgcccacgtgcctgggcttggcgctgccggtgatccagagatatcgaggtcttaccccatccatggcgtcgggaagccgcgtcgcacccacacgctatctcgcctctgcgcggcctgagttgccacgtcacacgcaccaccaccactcgtagtcatcgggcgaaagcacatcccgcgctggcagaggagggggtcgtggctggccacgaagtcgatctccaaggtcgtggcccagtacaccctagacgtgcggctccacgtgatgttcgagaaatctggtgtgtcggcccgcagcttcgactactcccagttgctgcgcacgccgcccacgccgtcctccgagcagcaaaggccacatccaacccttcaactgcaagctcgacgtcgccaatgactccttccgcctcctcactttctccgagaatgccaccgacttgtcgccgcaccacttcattccctcgctcgactctacgtcgttgttgcccgtttccctagctgccgacacatgcctcctcttctcccccttgtccgcggtactcctagagcgtgtcttcatcacgcgcgagatctcgctgctcaacccgctatggatccactctagagtctcctctaaatcgttctatgcaatcctccactgcatcgacgttgacaggactgtggcacgcgacaagtcggtacctaaagccaacgaaaccctaggtgccgcgccactgccccttccctcccaccggcagtgcccagggttcaaatttctcctggctccgccactgggagtaggggtcaatgcatcgccatggtgtaatgtcaactactcatgctcaaccctaattcacaaacaaccgtcacaacctaaaggtcgaggctccaaaccgtaaaagtcactcacgttcagcaggaccccgcaaattcatggaatagaaactaaacaaattgtcaacaaagtggaaggatgtacaaatgcaatggtcaatttgatgcatccattccagccaatgaaagatagcaatcttagagacatccatcccagcaaatgaaagatagcagtcttagaggcatgcatcgaagcgggctagggtttccttaccaacaaaagtagaagtcggtccaaatctagatagatctccaatccgcactgagaaacaatatgtgaggatgtggacaacgacgagaagggacttcgagctttaggttttgcggaacagaatcggaagaaggcggtcgtcaggcaagagtaaagagaaagggtgcctgtaacggcctccagtatcaagaaaccgactctgatactggatctttctcgcgctatatgctatagtcttgacctctaaatataaggggatatttcct

SEQ ID NO: 76938 - DNA, 746 bp, Zea Mays
tttgcttctaaggatgtgattgccacttgatttggtaaggttggtgagtgcagtggcctgaaaccctcaaaaaaccttcaaccaccccaaacttgtcaagctcattccacctaaaactgccacccatgctgtgaaaaatggagtgattgaggagcctgtgagagcctctcctcagaaacaagggtggtgtccaaaacctaaccaccttcataagacacttgacacccttctcgacatctctattgtcccccctccaagagctcctcatccacccaaaaagaccacttccacaaacaaattctacccaagagagaggtgaggtttcattgtgaatattgtgagagggatgtgcatttggttgcattttgctttaggaggaagagagatgagtgatggagttccgagtcgagcaggaggaacatgaaccagccttctcatggtgttcatgagcttcctattcagagacatcctgttaggcctagaggtactttgcctcaagctgctaggccttaagaagtgagaccatagggtggtcatgcccagcgaggtactagtcaagagccatatggccaaggaccccatgccagtggctttggttctctcttccccaaaggaccacagttttcttctcgtggtgatcgctacccccatgggactggggatgtttggtgttttacctaacactttttaggggcaaatactgcaacacttgcatccttcacagtttactaacctcggtgttgtgc

SEQ ID NO: 76939 - DNA, 365 bp, Zea Mays
aaagaagttcaaactccttatcgataacaggtctgcacaagagctaagaaaaaaccctgtgtaccatgaaagaagcaaacatattgatactagatatcactacatcagagaatgtgttggcaatggagtggtggatgtgaatcatgtgagtaccgatgaacagctcgccgacatccttaccaagccacttgggaggattagcttcactgaaatgagaagacagctggggttcatcagagttcaaggttgacaagattaggggtgattgttgcataagcatcctgtaataatcatgtcaagtactttagcctgcatatatgtgcattagcttgcatatatgtgcattagctgttggtttagtttgc

SEQ ID NO: 76940 - DNA, 565 bp, Zea Mays
tcgtataccttgactattgctacccgctgcgagggcaagggataaagagaaagattgctacttcgagaacgattactgcttcggccatcacagctgagccaaagggcaagaagatgaaggttctaacgcaccggtcgtgttatattgaaccagccgtgatacctgaattcggcgaaggtacttcttcagctgccaaagcaaaagaaactgttcaaattttgcagagcactgtagagcatagtgtagtaccgaagataactacagttgggccagccaaggctgaagataataaggccaaagagccacaggtagaaagagtgacaaaaatgccagaaatcctgagtccaccgggagcggcaggtttgccgaaggtgcaaaaaacttctgctgcaactcccaagaggaggagaatggctaacgtgctagatgctgtactggagactacaaaggcgctgagccctgctcctacaaagaaagtcactccaactgaagccaaatcgcaggccgaaaccgaaactaggcaagcagaaaccgaagctacacaagttcaagctgaaaccgaagc

SEQ ID NO: 76941 - DNA, 618 bp, Zea Mays
agtttcggggctttttcttgttgttgagatgagttcaccatatacccaaacattctcatgtttctcttaggacaaccttcaataagatggctggtatcaccacaaccaaaacaggcatgacttgttgagtcacttggttgactcgtccttacaatgttggtaggagtttctatgcattgttgttcatgatcatatttcatgtctaggaactggggtagcttcagctcagaggtgatctgcagtggactcttctcaggacaattacgacgataatgatcttcacatccacatcgatagcaacattttcttgaagttatttcttgactttttccttgtatacattcttgcttcttagacttgttttgaccacgaggttgaaattgtgtgcatgcgatagtccacccattaaggtaatgcatgtgcttctttttcgagctgagcatccttaggaatcttgcattgttttcattttggaatactctgcaattcatcagctgacgatgcattagacatgagggaatctgctaacagttgttcttggggagacatcttcctttttatgctgaaaaacaacatcttattcctcaattttatggcttcacatccacctacattgat

SEQ ID NO: 76942 - DNA, 1354 bp, Zea Mays
ctcgagctgagtttcattaaattcgtgagtagcttttatcgctcccttaagtgccttcgcatatctcatgggcctaataaatttatttcattgatcttgtagccctttccgattagggaaccgacacctaaaggcggtttgtgacgatgccttctttctgccaccccgactctctccctagggtggcggttttcagagagcgcagtgctcctgaaccttttttgaggttgatgccatcttttggggagatctaggcactaccaaggaccaccatgcctgctgtacattcctcgatggcggtctgagagcctgcctcgatgggtgtcattgacgttgggcttcctcaaccatggggcttgccacgggaggccatccctccattagacttcctcccgggggcaccatccttcctgcatcagtcgtcggtcatggtggagttgcagcctcctcgtcgtcggggaggatcgtgattggaggacggggatggtccacacacagcgtccgaggagcatgggcaccctatggtggccaggggagtgtattattttccctgagcctaggcatcggtaattagataatgacttggtcgtttgaggaggcatgggactcatacttttgtttgaagtcctactgctaggggcgtcaggccgacagggtctgagtccagccaaccggtggagcttgagcatcccacgattgagacaaataatggcctcctaatggcctagtcaggtcttagggagacacgatcgccaagcggtcttgtcgatggatccacgtcggggtccttgaccaaaggtgagtatcgtactcccccatccctaacttttggtccttttagttttagcggtttactgacggtttttcctgattttgtttaccagtgatggtgctggaagagctcacgtgtgcggaggagtgcctttgattccttagcgatgagcgctccgatctatccacgaccatcgacctcgtatgtgacaaccttggggtttcatagctgggagaagtgtccacccatactccccgaatggagctcgtctccagtcgtattcaagaactggaggccaatccacttcgactgagggtcctcgatgcctcggttgccgctcgtcctctcggtgagggtttggtcaagcggggctaagcctgccttggatgtgtcgtcagttggtcacatggtgagctccaaagacctgagggcgttggtaggacccatcgtgtggcgctcgcccatcggtcgctcacttttcaagtttcctagagaaggaaaaatagaggaataattttttcgcaatgtattgtaaagacaacaatatgttttaataaacatcatcagagtcctcgacatcgc

SEQ ID NO: 76943 - DNA, 341 bp, Zea Mays
gtgaactctaaattgcatagaaatgctccctctgagctctacaaagtccatgctaaacaatagtggaagttgtcttaattattggtgtgagagttggcgtataaccatggaaatttaacaatgcctttatgatcgattattggtgtgtgaaggaggtgttgtttgacctcttacagactttatcatgacatgaggatccatggttatattatgcaatttagttctatttcttaattggttctgcttgctcaattttgtagttgcacaaatttaggtggtttgtgtgtatgatgtcataaatttggtccataagttgagttcttttgcatgcctttgtttcc

SEQ ID NO: 76944 - DNA, 638 bp, Zea Mays
cctggtttgatctctccatcagcttataactggctaatattatagcaatgtttaagaaaatgcatgcaccattgggtttacagaataacaaaattaaataagggtagaatttaactcgatctacataatgtattttagtggatgagaaatttatatcagcatatttggcctaacatcacccaatgtggaccatattatagttctagtaacttaaaatccttaattactttgtttgataaataaagtattttatgcacactccgctcataaacctagttaagattataagcaataaagacaatcttataccccaaacttcaacctctctatatgaaaggattgtggacctcataacttaagcttgaaaatgaactaggtgtcaggccttagaatatcagtagatactagtacataaaaaggggaacaaaaggtgacacagtcttatccataatggcataaataaagtcattcttttattagatgcacatgtttttggtggtcctgcactcctgtttatctctctaaaaaacttgaagtgtcataacaagatgcaaaagtagtactagtggcagagcttctcataggatgaaaggagcatgaccacccctgaacctgtgtaaactatatagttgcagcca

SEQ ID NO: 76945 - DNA, 762 bp, Zea Mays
atgagatgaccttgaaattgagactaggtcaaaaactgaaccgacagtagtagatcatatttgatgcatgtatatgcgataagcaagaaagatacttacataccaggtagcgatcatcggatcgatcccgcccttcatggatcagatcgaagtgaatgcatcaagaaaccacatggtatggctagtgagggccgggaggaaacaaaaaagagagagcttcgaaagattctgagtattgctagggttaattggaagggtgtatatatcatggaactcctttgcaaatggtgatcgaacagatcacctgatattgctgctacctgttgagagattagccatatgctggagagcttagacacagggcatccagaaggccatagaacacaacagtgataatggcgaagcagaagaaatgaagatgtagagaaggtagggcacaaactggacgggaacctagctagcatgcgctgggtttttatgcccagcctccatgagggagggtagtgagcagaatgatgagcaagggcagatgaaaagatatacgcctataggtagtgagtacaactctctctctctcattacacagttgcatgcatgcatggtcggcatgtaatagcggggtaggtcgagcgttttgcggatgaatatatgaccactcgtgctcctttcactttcagttagtaagtgcaacaattatcagaaattttggcggccgtgttttggtggctgctggtacactgatgaagtgatgattgaataaca

SEQ ID NO: 76946 - DNA, 586 bp, Zea Mays
gtggttcattttttcaattacaaaatacacttaagagactgcatgatacaatcttaagacactagatcataaatatagttaagagacaatatgtctggtcttgtgcagagacgaactctcagcgaatagtggtctcttatattttttttcaattagtcctaaaaaaactctcaagataccccatgttaaatggtttgtccatgcccttatgaggctacaagatccttataaccagctgccagctgtattattaaatttgcgctaagccgtatcagatttcagtcaacgtattaagctgtatcagtgttaagtggaaaataatcctgttgtttggcacaatgattaaaggtaaaagtgataatgcagctgttggtgtgcgattgaggagcgagtctgtgagtgtacactaggaaaataacactagaacaatgcagtcgacacctgccacctggtaggatcggcgtgacgaaaccattttggtttcgccaaaaccagttcctggattagagcaaaacaaagccgagaaggagcaaatgagcgaggagagaccgccgaaacagcggcatacccatcctcctacttggca

SEQ ID NO: 76947 - DNA, 282 bp, Zea Mays
cttttacagaagaagaaggagccctcggcaacgaagaagtctgctgggccgaaaaaacaaagaattattactgtgacagaggccattgaagaaacaccaccaccagctttggcgttaaaagcaccagctgttgagagcgctgcatctaccgaagctgcacctgctgaagccacaattgccgaagctgcaacggccaaggatgcaaacttagaaagcacactttctgatatagataaaatacttctggatatggccgcagaagaagctgctacagccaccgaa

SEQ ID NO: 76948 - DNA, 949 bp, Zea Mays
cagctacctcttcccgcaattgagccaacacaaagcagtatccaaatcctttggcctttgaaccataacaacagacttcacatcatcacaaagaccatctataaatatcatggtataataaagagggtcggatatagaatgatatgccttcaactgatctaccaactcagaaaatcgttctacataatcagtcactgtagagctttgtctgatatggaacaactgcctaataagaactgcgagttgatccttcccaaacctttctttaatcatgttaccaaagtctgtccatgacacttgcgaaagctggtatcctactgactgcaaccatctagctgcaagacccgtaaaatgcatggtagaaaccctgatccacacactaggatcaacggagtacatgtggaaataatcctcatatcatttatgccacagcttaggattatccccatcaaacccaggaaactgcaccttgggcaattgacctaatgatcgagcagactgccaaccctgatgcccatccccaaaattgccgtgcggcattggacccatgtaatcatggaatataggaggagcagtgcgtataccattgttcgggagtgagctctgggcgtatgcaccccagggccttcctcccgatgatagaacgtgtcgcagtgccccctagggccatcgacgttcgaagcgaacgcaggtggacatgccctcatcgatccatatggtcccagtattctaggttggaacactggcgaccatttatgttggtcctgatgacgaggaaggcggttgacgtcggcgcgcaacaagttgactgtggcctgaatgacgcccaccaagtgctcgacgcatggtctccaacgctggaaggaagcagtagccgactcaagtgctgttacacatgccatcagcatcctgtccaacgcgtcgactcgctcccatgtcgacaactgaa

SEQ ID NO: 76949 - DNA, 518 bp, Zea Mays
ctcgggcttccttggctagattggtgactatctgggaactaggaatccctcaccggcgctcggttcatgtcgcagacccgccctgaaccgtggacgagctcgctactccttcaatcgcgggtaagaatctcccttccgtgctcgccatcaccccgtctaggtttagcaccggccaatttcaggttaggggcgttcgggcatcggattgcgcgtccgccggcgatgctccgccgtgggtgagcagtgctcagctgtcacgtggatttgggggagagaagaagaaccgtgggccagagatctagaattcaagggctgagattagatgattgcatacccttccgtagcattcggcctgatccgttgatctagatcggacggatagaatcaaatccagaataataaaatcctccccgtcatatttgcatccaacggttctagtcgcgtaccatttcacggccgcgccgatctaatctggggcgcagattgatgatccaacgacccaaatagcccgataaccc

SEQ ID NO: 76950 - DNA, 618 bp, Zea Mays
gaggaattcagagatcttgataaactaggacaggggtttacatcgaccgatcctttggaggagattgacataggagatggtaaaactccaaggccgacttttgtaaacaagaccctggagaccgatcctagaaatgaaatgatcgatctattgaaggaatattcagattgttttgcttggaattacactgagatgcctggactaagccatgagatcgtcgaacatcgactgcctattaagtccggttttagacctttcaagcagaaagctagaacatttcgtccagatcttctcccacgaatcaaggacgaaatccaccggctgctagaagctaattttattagaccttgcagatacgcagtgtgggtctccaatattgtgccggtggagaagaaggagtcaggtaaacttcgggtatgcattgattttcgcaatttaaatagagaaactcctaaagatgaatatcccatgcccatagccgacacattaatcaataatgcatcaggaaatagaattaatagctttcttgatggtaatgccagatataaccagattttcatggccgaagaggatgcgtctaaaacggcctttatatgtccaggctttattggtttattt

SEQ ID NO: 76951 - DNA, 396 bp, Zea Mays
gtttggtccatagatccaaacactgacagttggcgtgccaggtagggcgtagttgcgtgctaaacaccagttcccaccgagactccatatggctggctttcaccacccctgaggctcggcatcgtgattaggtttgggagtctggagttcatgtcgctcggcatcgagtacaacatggtgctcctcccacctagtccccaagctgacactcaggaacgtccacgcgtccgtccccgtccttctcgtcgcaggaggcagagacagagcaactgcaacagcgccactcgtggcaccccgtgccctggtgaggctcctaggctggctaaggacgcaaactcccttgcgagggacctagcgaacgtcagtgtcacgcctcgggcaacaacggcgacacac

SEQ ID NO: 76952 - DNA, 351 bp, Zea Mays
cgaaagtgaaactacaaaacagaagaaccggattttattttctggcataaaaagtcaatggtcttcccaagagcaactaatagcagatgcactgtcagacgatgaattgccaggttttccaaaaaggaaacatcacaaggatgctcagctccaaaaagaagcaaatgagtgttacattgatggatggactatcacctgcacacagtttcagccccgtcaccgcatcaggtccaagaaacaaaaatggagacatggaaaaagtcaagaaataacttcaagaaaagcttgctatctatgtggacgtgaagatcattaccttcgtaattgtcctaagaagagttcactaccgaa

SEQ ID NO: 76953 - DNA, 474 bp, Zea Mays
gaagagaaaaggtgcaagtggagtttggtgggggagagggggaggccaaggttggtttgggggaagccttctaaacgacactcgaacacagaggcaatttgagaggagcggtgggggtcatgtgcatgggatggctacactcttttcgaagtttacattgtggcctatgagggatctaaagagatctaacactgactccaggtgggtagcattctcaaggtgaccttggtggaggatcagcgtgtcatcagcgtattgaaggacaacacatgactcatcagggatgatgggtgcctgatgtcggggttgtggttgatgatctcctggaggacattggtgaccagaatgaagggatatggggaaaggggatccccctatcgaaagtcgcgtttgcaggtgaactaacgtgcaggcgaatcattcaccatgatggttgtttttgaggaagaaaggattttctagatccacctaagc

SEQ ID NO: 76954 - DNA, 415 bp, Zea Mays
gccttcgcgtagatttcgtcccgcagattacgtgtctcgggcccacgattccacccacttctcatggcagttattcagctcacatcacccgcaacgcacgcggcggccgaaccgtagcattatcgcccgccgtcgccttgttcttctccaccgcagagaccaagccgccttcgcttcaccacggcgaccgtaccctagggaatctcgccgtcgtcgacttcatcgtatccaacgcagagaccgagccgtcgtcgccttcagcttctccaccgtagagaccgagccgccgtcgcattggtcttctccaccgcagagagactggaaatcggtcggtcctcattcccctccacacaccggtcagtcctccaccgccatctccttcattttctccgccgcattctcgttgtcgccgtca

SEQ ID NO: 76955 - DNA, 690 bp, Zea Mays
ctgacagtcagccaatgaactgaataaggggtaacagtgatgttgtgcaagctttgagattggattcgaccatgatccagtaattgtttgactatggttgctatagcaagattgtagctggatcatagggctatagctttgatacatatggattaagtagttactacatgaaattcaaagatcctggcacctgaaatccctctgttagacaccctgatggtgatcgccatggtacagtactaaaaaagatctccaagttcatcgctcgtcgtcaccggtgatctaacgcccagattctcgccggccactgtgattcgtgctagcgcaagtggataactgagaggagtaaagatcttagcgctcagattgggtcgggctcgctcaccgttgtgtccgccgtacccacttgaactgcggctggccggggtgatcctcaccgccgttagccgcttaacgatcatgcgccatgcgtcttggaagcttagcacgttgcaatgaacctgtgtagcaagcctgtccatcgcccgagaacttgccccggtgaaagccacgaatttgcttgtgctagtaacttcttccttctctggccgccaccgcgctatctctaattcacgggccaccgcccctggatcctataaattgagtgtgatgtcggctccgctaggtagtcaagcacccaatacatcaact

SEQ ID NO: 76956 - DNA, 426 bp, Zea Mays
tgtgatttttagggatgttatagtctcccccctcacaagaatctcgtccccgagattaagatcttacccggtctcgaagagatgggggtacttgtcccaaagttctgactccttctcccatgttgcttcctcgacggggtggttgctccatagcaccctgcagacggggatcctagtcccgcgggtccctttctctaaccaatccaggatttgcaaggggtattcgatatactctagcgtatcctgtaaatcgataacctcgggggcaatttgtttctctggtagccttaggcattagcggagctgggacacatggaacactgggtgcactctggctaagtgttccagtagttcaagcctgtatgctaggcctccgattctcttctcgatgcgaaagggtcccacataccggggagctagcttacc

SEQ ID NO: 76957 - DNA, 678 bp, Zea Mays
tttgactaccagcggcagatatgttgaggaatgggtccgagttttctatgctactgtatggatcgaccctgatcaccactggatgagattccgatttgatcgagaggatgttaccattcatgccagtcagattcgtgagttgtttggattcaacgagtcatcgactcatcttcacatcatgtgctatggcacctctgaccctcctcatcgccctcacggtggagttgctcctggtacagctcacatcgcggctttgttctgaccgcccttctcagatgggtcgcgatgttctccgacagacttcaccacatcggccaggtttctatatcagctcatgagacggacgcttctgccatggatgggttacagggaggctgccactcatattcagctttggctccttagtgccctagtttctcactcagagtttgatgtcgtggattttctcatttgtgagatcgaggacaccatactggatggtctccgtgctcgtcgacagctgccttatgctcactatctgtgtcacatctttgctcagctgatttggcccccatagttccagggtactcttgaggcctctcacctcctctttgggtcctaccgtccagctccagacgatcctgtgccgacacctgctccagcgattgatactcaggctgaggataccacctttcacca

SEQ ID NO: 76958 - DNA, 364 bp, Zea Mays
cggagaaatgtgtattcggagtaccggctggaaagctacttgggtttatcgttagtcatcggggaatagaagcaaatctagaaaagattgagaccattatgaggatggagccaccatgatcacaaaagaaggtacaaaggctcactggaagcatggcagcgctgagcagattcatattaaggctaggcgagaaaggaatgcaattctattaattgctcaagaaggtggacaaatttcagtggaccacgaaagcgcaagaagccttggatgcactgaagaagttcctgaccacaccaccagtactcaagccaccacgccgagctacgtccaatcagccggctgaagatctgctgctatatatttc

SEQ ID NO: 76959 - DNA, 379 bp, Zea Mays
caagatcctaagtaggtgtaacccatcttagaagtcatgccttggccttatcatgcactaaagagaagagaatgactcaaaccctaattcaaatcccttgtaggcaaagggagccctagaggggattatggcaaaaagtctatgtagatcacattgtcatgacttggactaattataaaagttgtaatacacttaataccctacaaaacatagtaagagtgtgaccccaaaaaggattcagataaccccaaaaaggtcaccaaagagaagagcataaaagaaaaatcatgatttgctcaagttcaaaaccgaccctctttcaaagatcaaacatgttcactttaatcccaacctcaaaaccttatggcccaattgacaa

SEQ ID NO: 76960 - DNA, 812 bp, Zea Mays
cccgactcatcgaggtcctcactcgaagtctggaaaatcaacgtccaaatggtggaagaccgcaagacagaatgggggatttcctgaggctcaagcctcccacgtttgccggatctagcaaccccctcgatgcagacgattggctacgcacgattaaaagaaagttggaagacattggatgcccggaaaaccagcgtgttcaactggccgcccatcaactttccgggatggccttagcctggtgggataccttcaatgtcaccatcagagatgctacttgggtggaatttgaaacggctttctgggagcaccatgtaccccaggggctcgttcagcttaaggaagacaaattccgggaactgactcaagacgtaagatctgtcagtgaatatgtgcacaagttcacggagttagcccgctacgcgccagatgacgtcagtaccgagggcaagaagatggcccgttttctgaagggactcaggccagaactcaagacaattctggctagccaagacttcctcagtttctctcacctctccaacaaggccatgcaagttgaaagggcaaaggaagaagaaaaagggcatctcaaaagaaaattccaagtcctccgggctcagcagcaagaccggcaccagaagactcgatcctttggatttccacccaagggaccaagcttcagtagaccagctggacccactccatcacggttccgtcagcagagtcagagctctttccatgctccctcagttgcaagcaaccaacccccggcgaatgcatgttggcactgcggagatcctagtcatttcaag

SEQ ID NO: 76961 - DNA, 445 bp, Zea Mays
tgacggtggtcgacggtgaaggtgaagatcatgcgagcttgtgcagatgggataggagcaacgaaggacaagcgctgggccttaatcgagggactggagaagacgagtgaccagccgtagtggctggcacttgggacatgcactagcgcgaggatgtggcagatcggatcgtgtcgctaccacggtcaagggatggtgggacacatgtcctagatgtggggatggaggtttttgtggatgagcctaaaatccaccccgcgccccagagggctcgtttcgccaagtttgggcctcaaaacttggcggtgtgattttggtgggaataggaggcgacacatggcgtcatcacgaagggtgcgtcgaggtgaagtaactacatgtggagcatgtgggcgtcagatgcatatcctaggagttggtccatttttcccccggttaagtggac

SEQ ID NO: 76962 - DNA, 356 bp, Zea Mays
ccaccttacatgagcaaatagttatggcacagattggtgacaagggtgttcaagttattaaggaaatgattaaacagaaggtggaaaaatacaaatgtttccgtcaggacagcaaagggattctatggtttggagaccgattggttgttcccaaaaaccccaagctcagaaagaaaatattggatgaagctcacctttccaaattttccatgcaccccgacagtaacaagatgtatcatgatctcagatctttgtactggtggaccagaatgaagatggaaattgctaagtatatatttgaaggcgacacttgccagagagtcaaggccagtcatttgaaggtagcaggcacctta

SEQ ID NO: 76963 - DNA, 1460 bp, Zea Mays
tgccatttccgcagtttttcattcagacccccactaaatcagttaaccgaacaagagtcccgtgccctattctgttgtttcactgacatatgcaccgagatcctttccttttcatttattcacaaactccgatccacgacggtggctccggcacccctaagtcgaacacgtggttgcgcgctccggcaagggtcaacacaactatgcgttattcgagctcagcccgacatatcttttgagtgaatcggatccaaatgacctaaatcgccccagacaacagcgatggcagagacctgagctccgatgacatagaccggagtttttaacgcagtagcgttcaaccccaggctatggaaagctttagcaatctgtcaagcatatgatgctcaccttggttgggttagggaggatcagattcaatcggtcgacatggaaggtgtcctcggcggcgttcaccggatggctttatggtgttccggtgaaactactgtcgtagagttcaaaaggaagattttgtgagcaacactatgaccctatgtcctgaaacgtgagcacattgaacatgttaccttcccaaaaaggttgtccacggggagatgggagatttggtggtgatggtcaccactgttagtgtctgcacggcattctggcctcctcatcgaaacagagaggtagagagggcttgagggtttgtcttagatgctgagggatggcatgacatagtgagcaggccaagagctcaattggaatatatatacagattcagattccttctcttatcacctctttctttaactagggtcaaatacatgagctgcactggttggggttacactgggggctttcaccgtggccaactggggttaaattgttcctctatatcaactgcaggcttcccacacagagccaagcatagaggaaactttacttctgcttttgttgcatgttggatagcaagacaaatagtgaagaagctgagtcactatggccaagattcttattgccttgctctgatccatgaagtggtaaagctgggacaagttatcccccctaggctacaagttccttttgtggcaatcactagaaacctccagagcactggttgagatggatatgtttcttagatttttgcacaaacctgaactacttcagtcgacaacagtaccaacctcattccctcctttgctcccttctccaaacaatgatagacctatattactcaagcaattttgttccctaactataggtccataagtttactataattttccagggtcaaggatacaagaatcacaaactataggtccccaaagttggctgaaattcacaggaagcatacccagttatctaagactgagcacgaaccttatagcctgactgggcactttcaggtagttgtttcttcaccttttgtgtgggatcacacccaactcacttaaggagattggttcatttataga

SEQ ID NO: 76964 - DNA, 1078 bp, Zea Mays
cttggtggcgttataaagggtgctagtgagagtgagagggtcagggtgagggagaggagaattacgacagaatgctcctagctctcttgcctgccctggtagctgtttaagctgccccatttatagttcaagggggtggtatttatagagagatgggtcatttgaagcagagtgggatctgttatctatgggagtttttctaacgtagttctactgacgttgtcttcctgatatgcgcgtaagcgaacgatcagtatgtcggccgccatgtcccatttgtgggctactatagagactatggtgctgaggctccttgtagttgaacttgcttggtcccacaccgtagggttggggaattaagggtcatacgtgatgacaactcgtcccattgatagagactctccgtcactccctcgacgtgtcgtggcgtcagtcgagacgatatttggtggcgacatgccttatcgtggctggtgtcggtcaataatgtctgtctcgttttctcgctagatagttacaggtgtgcgcctatgaggtgcgttacagggggtcatggaactaagggacctcagatgtatcggccctcattgtgggtcttcacatctccgccttgccccagctgctcagtgggacttggtgggttcgtccgccttgcagatttgctcggtgggacttggtaaactcatctgcctgacaaagttgctcgataggatatggtcggtttgtccgcctcgcagagttttcgataggacttggtcggtctgtccacctcacagagttgctcgacgaaatttggttgggccatccgcctcatagagttgctcgatgggacttggacgacctttccgcctcgcattgttgctagactagatttggtcgacctgtccgcctcacagagttgctcggtgggacttggtcggcctatctgcctcgtagagttgctcgacgacagtcgatcgacttttactcccgtggtcatttgtctagtcgagctaccacaagtaacgtgcctactatggttaccccattgttggggacccgtcaatcactatctcaattatggcacttggaggatttc

SEQ ID NO: 76965 - DNA, 342 bp, Zea Mays
ctttttactatggtgcattgaaaggttgcactggtgtttgttaatttaacaaactcaatgaactgttatttcgatttcgattaggatggaatatcgtactacggtactagtatctttaaagttcattaacagataacctatcagtggctctcattcgtactagttagttttaatttgattctcaattttcattcctttgttcgctatattctctggtaagtcaggattcaggatcacaatggagtatttcttaaatatgtgggtgtcagacatttgtagttctaatgccgttggcattggttttattataaatatctgttctcaggttttgcccacctgaat

SEQ ID NO: 76966 - DNA, 721 bp, Zea Mays
cctcgagatggcagagtgtgatgacgccaacacacgtgaggcatacaggagcctgaaggactatgccagaaagctgaagaggttcgcccccgtcaagagggttcggaagcacttctagaatcagggatgccagactgtcgaggaggagtccccatcgccgttgcccactctagggctagataaccttttcaatgtcgaggaagtgtccttagctagccttgataagatccttaaggagtttgggatgctttagtgggtgacactcaagtgtagtgtaatttgtggtttttgtcatgcttgtaatgaacatgtttgatgaataaaataaaatggttgttcaaaaaatgacatgtgcacccttttctcctctggcagatggcttcggatagaaccatgcctgcagcctcagggaatggggcaaagacccccctaggcaacgaaggagaggacatgggggaagggagcgagacccacctccctgcacttccagaaatgccactagacctggcccaagttctagccaaccaaacccgactcattgaagtcctcactagatgcctagaaaaccagcatctgaatggaggaagaccccaggacaggatgggagagttcctaaggttcaaaactcccatgttcgcacgatcaagcaacccgctcgatgctgatgattggttgcgcacagtcaaaaggaagctggaagctatcaaatgccccaaatgtt

SEQ ID NO: 76967 - DNA, 312 bp, Zea Mays
agagagcagagaaggcctggatgcagaaaagcaaaactagggcacagaatgcagaggcatgcgacagtgcagtacatatggggttttccgaggccagacgccatttctaaaaagcgcccagtcatcaccgagccgttatttctaaaacgctggcgtgccatgtcatcacccagctgttatttctaaaacgctggcgtgccaagtcatcactcggccattatttccaaaacggccgacgcggcctaatttaacttagctgctatttctaaaaacgctggcgttactagacttcactcggccactatttccaaa

SEQ ID NO: 76968 - DNA, 322 bp, Zea Mays
aattctccaactaattgcaataatccggatcggagcatgcctgttcacgacgacagcgaaaaccgagaagaaactatagtgttcagggcaatccagcacggtctaactcaatcaaccgagcctacaagcaacaggagacctaagaggtgctagaacatctaacagagaggcatgaaccaacccgaggagggctgccacggtgaggtgttcacggtggcgcggaaacccgatttgggggaagtttggaattcgcgagctacagtggctaattggaggtgagggctggtgcattggacacgtaacaacctaacggagctcacta

SEQ ID NO: 76969 - DNA, 1283 bp, Zea Mays
cgaaactgccaataagtgatggcgggaagtacgctaggcatgcgcatagcttcggtcacctgctcgatgaaatgccggtgtcagttcataaatagcagttgttgcagctggcctgccccctccccctcccctgaagatttgctcgcacaaggctgtcagatggtccattgtgcctttgtcgggctgttcctctatgcgttgggcataagcatggtggtgtggccgtgtgggccaagctgccgtgggcaaatcgggatttgggggcagagtttggtgcatgagtagggttggttggtacatgcaggtgatcggtcgctgtgagcgtaggtggtacaggtcgttggttgtttggatcgtactttgtgagcagttagtgctgttgatcggatcacgacctcgtacctggtagaaggcacagatcaggcgtgcaaactgtacgaggcctcgtgcgtggtagtcgtctgtagctgaaggcaggtatgatttttttttttactgaacttacaattcagtgtttgtcattgcataagcggtagctggtagcgaaaggttgctagttagctagtctcctggtgttagtttcattagagaggcaacgcaaatcacctttgccaatggtcgattggttactccaaagtgcaaacacatcttatatcacttgttagttaaggcgcatcgtaaatctgacaaaatggcacccagttctgccacctgctgatgatgagcatgtgtggagcgcgaaacagatagtgctgtttgttccactctgagcttttatgaactgcttgctcttttgctaacagcattggaagccgatgagcagtagtgatgttcatttagctagctagctgttagctattttagttccttcaacaaacctttcctgcgcccctgtctgttctgtcgacagcacattaacataagaaacccagctgagcacgcccaatggcaggaaacaagaagaagctaatggctcgatcaggcctttttcatacccccacaattttagaactcgggttcacagtattctgaagtacgtagctgatacataagcctggaaaacagcacagccagtgggatgcaatcgtttgtgacactgccaggcagaaatatatgggaggcatcagtaaagcgcgcctctcaatgcattcctctcatgcatgtatgtgatgtaatgttgcttcttcccataatgccgcagcttgttccagtttgatgatctaatgattgttgctacccccttttaggtatacgtacgtacacttaaaataagggggtgtttg

SEQ ID NO: 76970 - DNA, 635 bp, Zea Mays
atgatgtctatgttggagcgaagcccgaattcgacctcgatcgggtcttttcccaaccacacttaaccatgtttggacgcagggcccgcaacacccgaagacatcgtctgaaatcaaagacaagactttgcctggaaccgacagcaaagcctccgacgatgacggcctgcataaagacgggggctcaatggccgctggggcgaagtcaactgcgatcgatgacttgacaccactacaccgtacggggacaaggcgctggtgaaggcacccttggcggacgatgaggagcgaagggtccggtgcacgaacgtaggcttcatacattcgagggacccgtactctctcagttagggcctggacccacttgtaagccccttggaggggtggatttttaggtgtacataggtgtgcgtattttgctattgtgtaatgaccccgttgcggggaatattccgggaatgtagtaggtaaccgggggcataacagtacttgggaccatctaccctcctggttacctataaataccatcgtcctgtacacggatgagacacgcataataagacgctacagttccctactggatgttttgttgtgcacctgagctctttttgtttctgagtgttagggcccaccta

SEQ ID NO: 76971 - DNA, 556 bp, Zea Mays
attgtctcaattgccttgatcttctctgggtttgcttcaatgccccagtacgaaaccaggaatcccagcaacttccctacagagacagcaaagacgcacttgtccggcttcagcttcgtgtgtgttgcccgcagcttgtcaaagaccagggtaattaagtcttcaactagggctgaccctctcttagtcttgaccatgatgtcatcaatgtataactccaccctgtccctaatcaggtcaccaaaagtcttactcatcgaccgtacaaatgttggcaaggcgtttttcagaccgtaaggcattacaacataacagtagagcccatccatggttacaaaagtggtatgcttcctatcttgcctagacatctggatctgatggaaaccagagtaagcatctaggaaggacaagaggtcgcacccagagttagaatccatgatttgatctattcgtggaagtggatatgggtccttgggacatgccttattgaggttggtgtagtcgatgcacatctgaatcttcccgttagccttaggaacgatgactggattggcca

SEQ ID NO: 76972 - DNA, 392 bp, Zea Mays
ctcaggtattggcggcgtttagcggcggcggaagttagaggtacggccggcggcgagaaaatgtcgagcaccggagctggcgacgacatgccacctgtagcatctgtaaatacgccagcaggtacgtctgtttcaatggacatgaatcttgtagcgtctgcgatcgccccatacacagagggtgtctccgttactcccccggcagcattgagggcacctggacatatcgatgagcaaacaaaaacgacagatgtggtcggcacagagaagcacatctccatgagacatattgggccgcatgaacaggacacacctcatattcttcaaagccatgtaagttctccctaatatgatactcttattctcttacatacttctttgtaatgttgtac

SEQ ID NO: 76973 - DNA, 536 bp, Zea Mays
gggggcacgtcgttagttggctaagataagcattaccgtcttgcgttgcagccagtgatgtgtggctaaacaactgagagagagagaggacgaggagacgctctggatcgagtttagtttgtattgcttgtttggtactctaatgccagaacattagtgccgtttcatctcgacatcatctgactttgtcgagtgtgaacaaaacacttgaaaacaatgtatacgtggtatggttttgtatataagagccgtgggctgaggttgcctgctctgcatgcggattacgatgtctaattatatatacccgccttcatctcctactgatgtatcgtcggagagaggatggcatgtattggcgtagcacactcccttacctagtcagaccaagactaatcaaagctccagctagctatggacaaatggacaaataaatttctcgcccgggaagccaggagtaggaggacctaggggctagggctggctgctgccgatgctcccatatcagacaagttgacgtcgtgcacgttctcacagcc

SEQ ID NO: 76974 - DNA, 459 bp, Zea Mays
tagggattcaactacgtgtagggtgccaataccttgattgtcctctaaaaactcacataagaactgacataagtgctggttttatgagggaaatcacgaactcaagcttcctgaattcatattatagaggtcggtacccaaagtgtagtagatgggtgacctagccccagcatttgttaaagttatgttggtggcaaatagaattcaagacatgaaagaactcagactcacaactgtccatgtagcctggagttggatagggcgtcgagtctcccccttgcgagagaaggcaaactatgcttgggagtaccagggggctaactgatccctcccgggctacatcaaaaaagatagaactatccacgaccaagaatcatttgccacaaatctcctgctcgattggagactagccgaaaggatgctctgttagatcatactctctaatagttccatgcccaa

SEQ ID NO: 76975 - DNA, 939 bp, Zea Mays
gcccaagtgggagggccctttcatcgtcaagacgaaggcgtcccccaacgcgtacaggctcacaacgccatccgacgaagacttagaacattcttggaacattgataatctccacaaattttttgtttgactcctcagggccagctcgcccttgtaattcgcaaaacaattacaattttattctggcccgcactcttttcctcccggggggtgaggtttttaacgaggcggagccatgtaatatacacgcgaaaaatcccccgcaaaaatctacatcgaaaaaagaccgcatcgacggtcttcggtattcgaccaatacaaagtcaccgcgaggggcagcgctggctaccctcgcgcgcgacactccgcgcaaaagtcgcctaagggtgcagccggactagcacaacaagtgcgcaaaaacgaagtcttcctcaaaagattatccgtgcaaaagtcgcctaagggtgcagccggactagcacaacgagtgcgcaaaatcgaagacacattacatttgtgcaaaagtctacatagagaaactgtccgcgcaaagaccaactataggcgcagccggaccgacataataaacgtgctaaaccaagtgcgcaacgcccctatgaacatagccggatacgcgaaggcacacagcctcatcatacaaactatagttacacacgtacagcgagggcatcacaccttacattggttcaaccttcggaatgattcccatctccctatagttaaatagcattatcctcagctcctcaccctcaaaaagtcttcgcaactccccctcatctacactcgccccaaccgatgaggacaacaattcccgcttgccagccctgcccacacgaagccgaccaccatccacctcactcactctacgcttcaccaccgcccttcgccgcctacatccagtactcggaccaggcaaaa

SEQ ID NO: 76976 - DNA, 490 bp, Zea Mays
agaagacaaccccctagaatttgccttggtattttctctgtgtagcatctacggaatcgaattatcctgttatcaaccgggaacgtggtgaaggggagttggatggccatggtgccactgtggggccgcgtcgcgtctgggttgggcacttcgtggtgctcacggacggcgtaggcatggttaaggtgttcgggaaggtttggtctccgtcttgaactaattaggttagggtttggggactgtgggctctagttcggaatcctccggtggagctctgccgcattcgttggcggcgccgctgtctgctcggtcgggaggtaaggggatatgcttgggccgttggatgagcagtggacgttcgagattagaactgggtggcgttttgcttagggaaaaatcatgtccgttggatggtcgatggacagatcaaattagtgaccagcaaggatggtttctggtcatgggatccagatccaagggctcatgtagg

SEQ ID NO: 76977 - DNA, 608 bp, Zea Mays
tggacgggggctcctaccaaaagtaccttgattagaagcgcaccaaccaatggcgcacccaccacatgtgtcctaaatgacagccgcaatgataggaccccatggtgttagaataagaaaggttgtgactccaatcaattagtgtcattccatgatgatatcaatgatggcctaaaattcctagacctgaagtgaacaatgtccatcaactatgaaaccatcaaggtttaggctcttgatgtacccttaggctcctacatcgggacatgcatgccaagattccataacaccactctatcaaggccttaagtggtatagtactcctttgtctttcgattcctccaattgccctagaaacatggaaggcatagggatcctccctcttgtcgcctcccataccaccaacaacatcaaacttaggcatttcctggctgatggtgaggatggcctcaatgtcttatcgaagtatgccttcgatgagatgtagatactaggtctgaagctcaaagtcacatgcttatttataggaatacccctggggtgatcctctaatcaactccatcaagttgttggtcacctttagcacataggggaacttctgcatggag

SEQ ID NO: 76978 - DNA, 345 bp, Zea Mays
caagaactaaacacatagagatagattatcattttgtgagagaaagagtagcatcaaagttgttggacgtcaggtttgtaagttcaagtgatcaagtggctgatggttttactaaagctctgccacgtgcaaagttgttagactttaggaacaatctcaaccttgttcgtggctgagattgagggggagtgttaaaataggatattttctatatatagtctaggatcttttgtatatggcagttcctaaattatagggttagattgttgatttgcaatcaccgtgatatggttgttgtaacttccttctgtaagccaccgcaggagggctgttctccttgcctat

SEQ ID NO: 76979 - DNA, 852 bp, Zea Mays
cagggacttgaacttcaggggattccttccatcaagctgagcttccagggctgcgatccttgcgtgtgcatcctccagctccatgtgtaccctagacaggtctagggtagcactatccaggttggtgttaagacctgccaccacatcagctagggtgttgaggcgatcttctccagctccacctgtaacaatgctggtctggctttctcaaggaatacatagaggaagatgcatgtacttcgtgttttgcagcagctgccagtaggtgtggctgagggaccacagagttcgcttagcagcattgctgaccaaagcaacgtcggtggatagcggcgtcagagactcatgagctgacagagtcctgaaccctctatcacctgcatccatcaccctgacatgaatgcgagtgatgtagtagcaatcccgaggaggctcgtacactcgccttgtctcatacaggggtcggacgtaggttcccaacgcaagcagaacatcctgcagcaggttagggaaatgccctgcctcgaacattgaggtataatgttcagtgacaggccataaccccacgtagtggtcctgctgttcttcgttggcctcctcgttgatgttttcctcatcttcttcttcttcgtcatcttcattatcgtcaccagagtcgtccgggtggtcgcctctgggacctggggcttggactgctggtgctggcggtgctgaagctgacgatccagctgcgaaggctagtgactctgccaacggggtgggcgcaggcagaaagtcctccgagctgtcctccagaatgactccgttctccacccgaatgcgagggagatccacagggatttcctcgactac

SEQ ID NO: 76980 - DNA, 505 bp, Zea Mays
aacgtctgggggtatgttttccccaaactctgatagtggcccctaggcctaccataggctcaatgactacatgtgggaccattcttctcgtaaatgccttatagaacgggtctactgcgccatgaggatactgtctactttagccatttcaaccaatgaccaatgtgtcagactatagtcatgttgcatgactctcaagttataagggtcatgcaatgcttcagatgttgtgcctggtagttttaagggaaggggataaaggtgccttaaatcttaggtgtgtggtcccatctttttattcactacttcgcacaatccacaacacttcctatcaagcgcctttctctcccatagtcgttgccaaccaaccgtagtcggtccgccctcgattcgtcatgctatcatggtggctacctcctcgttggaatcgttgttgagcatgtgtttccctaattaactagtagaggttggacaaggtgcatcggctcctcgggtggacctaggg

SEQ ID NO: 76981 - DNA, 1067 bp, Zea Mays
gtactgaagccgatggtatgctgacattctcctccccttgagaagtcgcttgaccccaagctggcgctgatggaaattggatacgtaaagcctcctcatcttcccaagtcgaaagtgatgcaccggagtttgaccacccaatcagcacctgccgaacagatttgcctccgcgaagcaccaccctacagtcgataatgtgcagaggaacctgaagatgagtggtagcatcgcgaagggttgcactcactgcttgaggacccaccgaacgcttgagctgagacacatggaccaccggatgaatggtagctgaagggggcagttgaagtttgtaagcaacagctccaatgcattggacaatgggatacggaccaaagtatttaaaactgagtttatggtttgctcgagtggccaccgatgtttgcacataaggctggagcttgagatacaccatatcgcctactttgaactctcgttcagtccgattcttatcagcttgaaacttcatcctttgttgggctctgtgaaggtgttgtcgtaccaacttcaccataagctcacgctgatctaaccaagtctgcagatcgagttgtgtcgtcgtatcagctgtagagagcccaaagtgtcatggagaccttgcatatagtacctcaaagggagacctgcccagtgaagaatgaaaactagtattataccagtactcggccagagatagccaatgaacccacttctttggacaagcgtgtgaaaagctgcaaagaaaggtttccaaacactgattaacacgctcggtctacccgtccgtttgaggatgataggaagaactcaacttcaatgtggtgcctgataatctgaagagttcctgccacagccaacttgtaaaaatcttatcacggtttgagacaatggattggggcaaaccatgcaacttgtaaaccgaatctagaaataattgagctactttcaatgctgaaaatggatgaagaagtggcacaaaatgagcatatttagagaacatgtcgactaccaccaaaatagtatcagcattgatggatttgggaagaccctcg

SEQ ID NO: 76982 - DNA, 398 bp, Zea Mays
agaagctgcagagcgcgaaaagcgtataggtattatttcttggtttttagcttcggcatttgtttttgtggcttcggactaaataatttttcctacttcagctgaattatctccatcgccgaaaccgttcgatcccctagctgatccaaaaatgaaggaagcactggagatcataaacatggctgaatctattgtcgacgaagttgttaacaaattactgaacgaagttgcagaggaagttcttaaagaggaatagattgtgttgtaataaacattttgaaaagcttgatgtatataatagatgaaggaagattaggtttctattgtaacaaaactatgatatttgatgtgtgtaactttgaatcaaatatgtaaattattgcaatttatttctttgc

SEQ ID NO: 76983 - DNA, 670 bp, Zea Mays
ttgcctccactgccgcttggtgctcgccgtggggtcgaggtgcatcgctattgggtatatatcacgtatcgcctggaccttggtcgccggagtcaggggtgtcctatgaattgctcactggagcccgtgttcgccgtggactgcatctcattgtagcctgggtctcttcgccaccaaatccggtaagtttagtccctcattagttcgtcgcaaacatagcatggtgtagcgcctgtcagttttgaaataggagcacttgaacgctaacaggcccttcgtcggccatggctccgtcgtggatattgggcggcgccgccgagctcgggtcggtggagggagtggtttggccacaatcgttggatactcgaggagcggatccgattaaatcatcccataccccttcgtatattgaatgtagaacattgatgcatgatcgagtggtggggagtgaatctcgtgtttgggcctcggtgtgtggatctgatcgttggatcacgatccaaaggccctggtcaaataccggtgtataaaacaatagatctaatgccagccctcgatatctgatcgtgcggctcagaatgacccgtacccctttggctgggagattttgcattagaagccctcgacttttgagaaaccaacccgcggtccactgcgtggttatactgag

SEQ ID NO: 76984 - DNA, 581 bp, Zea Mays
aaggctgaaacgggagatcgagctatattattattagtgccgtctcttgcgctgatgcactcctcctccgtcaggcaggagctgatctagccgcgtatttgtatttggacgaagtgcttgtctagatacgtaagtagctctaaacgaatgatcttgtttcagaacgtacgggacgagcagtgtagtattctctaacctggaaggaggagtgcaagcggatggaaaagaatagtttaacctggaaggagtgtattctctaaccaaaccaacggaaggacggcttgagtgaatgaattctgatcactctgtactatctgcttccctttccagtcagaaagaaggcaacatgggtgggccaaacgggccaccgtccaccctaagatttggcccaaagtttaagaacactacatatctttggcgtggaacctcagcaattagccgtacatcttcgacaacccgccgcgctgtttctccaacccgtcatcgaggcccatcgctaagcccagcacccagcctgcaattctctccaccttttaacacggtgtttggtccgggcctattttggtctataaccattcccg

SEQ ID NO: 76985 - DNA, 635 bp, Zea Mays
gaggtgatgacgacacactatatgtcacactggatcggtattgtggctaaaacgaggactaggatgaagcctaagtgcacctacccttttggtgtacatcggacatgtaggcaccggacaaggcacactgagaatattgtagagaggcccctggagtgaaatagcactagacatattcgatgcagccctggactctgcaccgaatgtgacactcaaagagattgaaatgcaactaagtcgggtataactcactagatatgtctggtgaaagcaccgatggcacactgaatacccaaaaggctcaatggtcagcaatgtatagctgcaacgactagctgatgtggaaggcaccagacgtgtccggtgttgagcagaaaaggttgcccacttccatgaccaattctgatagctagctgacatggaactcacagaatgtgtccgatgtgccacaaaacatgtctgatgagtacatgagttgttgtggttccaacgactatttgtgtggggaggctataaataccacctcaactgaccatttccaggcgtgggaactcaaatacattgctaagaagtcgagacttcattccatagctcttagacacccaagttattcatagaatcactcagtaattagc

SEQ ID NO: 76986 - DNA, 607 bp, Zea Mays
gcttgaggctacgatcagaccaagggtcgatccttgttgtggccaaggatcggtgctcagcagcgcacccttgggatccttaccctgtcgtattcaattcttcgaatagcagtgcttattcttgctgatcctagtttgggatcatcccatgagctaccaggttcaaacccctaaatgcccagcccgagctactagttcatctgttctggggtggtggaaggttgtaggcttatgatacggaaccaggctaagcggctacccaactctagaccaccctcgcgaacatagatctttccctagaccaagcttttagtggtcagatcctcattcattctcaagtgatgttctaaaccaggtgcaagaatagacactaactcaagtttcatgattacaacagaagtttagatccatggaaggggtagagggaaacaacatgtgtaaacaggaaaagaaatcgatggatgagaactgattattccttcgcaatcggatacatgtgatccgtgtagatgacactcgagaccgggtttataagggcgtctctcaccgggctgggcacagatggcgccacagaccgcgcttacgagggtggattcttacgggactg

SEQ ID NO: 76987 - DNA, 431 bp, Zea Mays
gttgcaaagaaatggcttgcctttcaggtgacgtctcttttctttggtgtgtatttacaaaggcgtagaagttgatcctgctggtgtccatagcccataaggacatatattctcactgttaagtgcagatataaatattaaactagaattagtggggcatgtaagagttattctttattttttgtttcctttccagaaatggttgtcaacttagaccatttggttgtgcagataattcatgcagtggaacaaagccatagtaagggaattttgccatggtgagaagggtttgtttgagtagcattggaagaaaatgttggctgttattttcacacttttttgcggccaggtgacataaaatgtgaaaatgtgctcgttactttttggaattggttatatcttgcggactttgcatcattcaagccaacgta

SEQ ID NO: 76988 - DNA, 353 bp, Zea Mays
cccaaatgcgatgatcttttaatacccggggatggtgggttgaataagggtaaaagcaggtgctcatttgtgattagcacaagtctgtgcaggtgggatcaccgtgagccatccgatcgagatccaaaggacagaacccacccagtgacgtaacgaaccgtacgagccttgattcgtccgatgcaagattgacagcctagatccaaataggcgcgaatgaacatcatccgcccgatcacagatgaagggatcggatcgaagcaccaaatggataccaatggatctaatctcgagcgcccgttttctgatgaacggccattggcaatctcctacctcagtccgagctgagcgac

SEQ ID NO: 76989 - DNA, 742 bp, Zea Mays
ggcttctgagccaaacagaaaggacatgaaccacctttctcgtggtgttcatgatcttcctattcgaagatgtcctacgaggcctagaggtgctttgcctcttgttgctaggccttaggcagagagaccacaaggtggttgtgccctgtggggtgctagtcttatgccatatggccaaggacccatgatagcgtctttggttcttgcttccctagcgggccataatttccttcttatggagatcgcttaccttgtagactgggaggggttgtgttttttctaacactttttatgggcagatgacgcaacactggtattattctcagtatcctaaccctagtgctatgctatttgctcgcccgggtctttctattgatgcagaacggaggcctggagaacacgtggctcgtggattctggctgttcgacttcgcgcccacgtgactggaagaaacaaatggttctctagcctcgatcgcgtgattggtagggaatagatcacattttcccggatggctggattggcgacacgcgtccatgccagggcgcctgcccggacctgcagccacagttgtaacccagcaggagagcacatggtataaacctgtttatacttgtcgtaactgagacaggaagtaccgcgaaaacgagatgggggtgggtgcagctgcaacctgacagtcggtactccacaggatcgatgtctccgcgtccaggcaagccagccgtgccgtgtctctgtg

SEQ ID NO: 76990 - DNA, 430 bp, Zea Mays
gactagaagagtgaatggttttatatcaaggccgatgaaaagaagagggggaaacagatgacgatggtcatgtgcccgctggttttaagcttcagaatgacaagacctttgtgcaacatgcagctagggtcaacatgccagctggccatagtagaattcagggtggtagctgaacagattagcaccagagacctggtacaagaatacctggccaacatgacatctccaacgtgaagtgattggagcatgccgaagctgaagggaacaaagaaaaaaatatgagcttgttcgattgccttatcgttttaagtttgagaagcagttcaaggagccttgccaagagtggctagaaatgattgagacaatgtgccatgaaattttgggaaattataccaaaaaagaagatcaattaatgactacagcctttggc

SEQ ID NO: 76991 - DNA, 380 bp, Zea Mays
ttatttttgatgacatgatctactatgacataggaaggatgaccaagacgactatgtcacgcatccactgagggcttgatggcggagaatacttgtttgaatctaacttcgtttggagacttgataggataaagacctccctcgcattttccttcaagaattgtgttcctcgttgctcggtccttgatgaagaaataccatggatggtattcaaaaaacacattatcatctctagatattttgtgaaccgagcaaatatttaacttagagctaggaacatagagaacattattgagtttgagtggacaaataggggaacgaatcaaagtactgccaatatggctaatttgcataccttttccgttagccgcgtgaatttg

SEQ ID NO: 76992 - DNA, 433 bp, Zea Mays
cgaatgtttgtttgaatccaacgaaataggaagattaaattgtctaatgactttctccacgatcggagtggccggatgacctaaacgatgatgccatctatcaaaggaaacttttgcagcactataggcttgctttatttggcgcccagcaggaagaggatagagcccatgatcacaccgtcctctaagcagaagtttcttcgttgcctgatccttaattaaaaagaaatcagggtgaaattctataaaagctgaactgtcagaggtgaggcgatgaacagagacaagatttttattggctttaggaacatagaggacattttttagatggagattgcgactaggggttgtaacaatagaatgaccaatgcgactaatttccatacctgccccactcgccgtgtggatctgatcatggcccttgtacctgtca

SEQ ID NO: 76993 - DNA, 537 bp, Zea Mays
gtacagtgtcccgaaatggatcagaccgccagcgccaaaaagtatcaccgccagtgactcaccgccacgatttgtgccaccgccgttccaatttgggctcggtaaggaacggataacgacggagttagataacgcgtatgtggcaccataccccgagtccagccggagttattcaccggcggccgccgtgactcagtgagctctcgccgcgctgttacacattcttcgatttacctcactgtacctctcctctacgtgctaggcatgcactaaggaagttatccatggctgggaagtgatcgccggaccgccgcggctataaatagcccgtgatccacggcgaggtatgaacatcccgcacacagtgagttgaaccgaagcaagaattcacgctacctctgcccccttctctcaaattaagtgtgcgcagtaaaactagtgttctttgttaagccatagcacccgctcccacccttaatcattcacctgagctcttgaatttcaaacttcccccaaactggtctccgccatcatgaa

SEQ ID NO: 76994 - DNA, 368 bp, Zea Mays
gtggatttggggaaattccaacttagggtgctacggtggacaatcgggcgcgaggagtggttcactaggttcataacaagtagatggaacaagccgatgcatcaatttatagaggacggccgtgaggagggcgaatttggacggggaagcgcgcgcagtgagaaggggaagagtcactggaggttgctaacttggcgctcactggctaattgtctacgacggtcactgtcgagtccttacagcttgcgacaacatggtgaatcaactatggcgtggcacaatcgcggtgaacggagatctccatgttgatgaccgttcggccacgttgctgcgcaagtgggtacgatgacttggcagtaacagtgccc

SEQ ID NO: 76995 - DNA, 838 bp, Zea Mays
ccaagtttgagagccatttcgactaagatccagtgagaatctacctagggttgctataacaaagttatagagctactatagagaaacaactttgctgtagaacttggtatgagttgccataaagatatgggagaaaatccagcccaaagattgactgtcaggtgcactgaaggagtatcccatggtacagtaaccgcctggatcagtttcagtgatcctcaccgccgacgaccgattcttcgccgtgattcgtgtcaccggcaactggattcgtgcctggagttgatggatagcgtcgcagggtaaaagatcatcgccgccggtgagctggaagccactccagctagccgcggtacctctccccttgctcaccgccctcggataaggattctcaccgccgttaagccgtcgtcgttgtccgccgcgtgtctctagcctgtctaccgcatcaccgtgactcactcttgctccccgttgatcgccggagcaattgccacggcgcaggacaccaatccactacgctagtgctcttctctttctccggccgccagcattgctcgaccgaattacgcgccaccgcttaagccctctattaattgaaggccggggcagctgcgctacatcatcacgaaactagagcccccaatcccaccctcaatcgttcaccaaagctcacgaattttgggttctccccaaatcggtttccgccaccgcaaagagcacctcaccgcgtccagcacgatccaggtcagtccatgtcttctgcttccccgtttaagtattctcatgtgtctacgatgctcgccgacccacataattgagctagaccaccgccaat

SEQ ID NO: 76996 - DNA, 649 bp, Zea Mays
aaggcgaggaagccaacacccgtgaggcctatcggaccttgaagatagactttgacaagaagctaaaggcactcgcccccaaaacgaagatccagaagaagaccactaaccaaggatgccagacagagaagaagaagaagaaggcccctctagccctacctcccccccagaatagatgactggtccgacgaagaagatgtatccctcgccagcctcgatgatcttctcaaggcatttggggacaccttagacaaggaactcgctagtacctcgaagaacgctctcgtgtagtcccacctgcagtagtcttatgcttgtaatgtgatggtgtaatgaataaataacttggttgaaaacaatttgcatgtgcatgatagtgactctcttccctggcagatgtctttggataaaaccacgcctaccgcctcagggattggagcaggttttccccgaagagctgaaggggaagtcgttagagaagaaagtgaaacccaccttcccgcacctccacccctacccttagacctagcccaagttctagccaatcagacccgactcatcgaggtcctcactcgaaatctagaaaatcaacggccgaatggtggaagaccgcaagacagaatgggggacttcctgagactcaaacctc

SEQ ID NO: 76997 - DNA, 607 bp, Zea Mays
attcgttctgtgcatgcgaacacagtaaagtattattgtgatgtgtactccctacgtgtgagtggcattgctccattgtgatgtgtgctcagaaggtgaagaagtaagcggggcactacttgtcctcgctggccgccgcgcaggcagctttgcatgagtcgtttttagtgtaatccttttttgttggaacttcgtgttcataccctaaccaaattattattgtgtagtaactttagcatagtcataagaagaaagtccacgattacaacatgcaacacataacagcaagctgcaggaccattagaccatcatccatgggcacatcacgtaggaaccaacacacgtattgtaacatcccaattttgatcccaaggttagaaaccctaaaactcctaaccccccttaattatctcctaagacccccacctcaggagacatttcattcatcatatgcatacactatggttattagtagcacctcacataggatattttgacacccaagaaatgcagataaaaatttgtttaaaggaaaaaggagattatagaaaaggagaaagtaaaatagatttggaaataggaaaagaaaaagaaaagggaatttctc

SEQ ID NO: 76998 - DNA, 684 bp, Zea Mays
gacagagtcagatgacagggccttcgatcagtgatacgtcgatgtggaaatcctcgagtgaaggggggcatgttcacctttgccccaacatgtagcactacctttgtcattcacatttttagttttacctctaaggcactacaattcaccaagatcttcggcaaataaagttatacctgtagcacacttagctttagttttacctacaacacacttgtttacctattcctccaaggcactacttatcgcacacttgtttacaagttcctccaagtccaaggaacttggttgacctgttcctccaaggcactacctttgctgaagcttcacactttgctaaaactatacctgcaacacacatgtttgctaaagcttcacactgagcattactctctgctttagttttacattcatcacacttgtttacctattcctccaaggcactacctatagcacacttgtttacatattcctccaagtccaaggaacacttctaattttttacacttgtttacctgcatcacactgagcattacacttgtttacctatatcacacttgtttacctgagcattacacttgtttacctgcagcacatttgtttacccaaggattacacttgtttacctgaagtttcacactgagcattacacttgtttacctacatcacacttctgaattttta

SEQ ID NO: 76999 - DNA, 579 bp, Zea Mays
gggtttattctaacaaagaacaatggcccttacgcaaaatggcacgaccgaaagagtacgggcagattctggccgcatgattagaattccgcgatccagattagatctgaactgtatcgaagtggtacgcgacggtagccaatggatccaataccgacggcggggattttaaacgggcacgatcggttggatccgtccgatcgcatctgatggcctagattcgaagcgcgaagggaaaaccttggcttttaatctcaaccgccactccctaaatcgacgtccaccacgcatccttctcctatgccgtgatagggcggtggtgcacataatgccgcggcgaagctcccgccggtgacacccgtcccggccagccgacgactgattccccaaacctgctaggattatgtgcaaaagggaacacgacatatgagatgggacacttactggagacaggaatgacgcccgaagagccacccacggcacgcagcggcccacgatggcattgtgcggtctggcgagaaattgccggtgactgccggttcccgcacccaatagaacactcgagcaccttccttggtc

SEQ ID NO: 77000 - DNA, 515 bp, Zea Mays
tccagtaatcggtggctcacgctaccggcaccattgttgatcaatgctcgtagtacgggttacaagcgggcgagagagggaggagaggctcccatgtctcttgtgatggaggatgtggagataagggctacaaagtggagtcctaactaagtcttggcttagcggtggagctctgacctttgggccctcgtcggtgcgtcctccttcctatcgtgggtccatcgtatttgcgtgcgggtgtcagtcttggcgtcttcttgtgtctccattttcttatgtacggggactgacctcctccttttataggccaaggaggggtcgaccggcggtggcttcctcaaggaggagacaacgagcaatggtaaaaccaagtgttctaccatgggttgaagccacgcacgcccatgggccccggggtcgtccggttgtcacatattctttatagcagacgacgcgggtaacgtggggcccaagcaccatcattcgagctacgccgacccatggcatctgttgct

SEQ ID NO: 77001 - DNA, 848 bp, Zea Mays
aacctgaccggaagggaatgctggattaggggcgtgggcacgctcgccataagcctgctgaagatggccagccggcagcagaaaaggaggggcagctcgaggcagataagcaccagaggccgtcgaggttgtgcagaggatgtcgggctctggactctggagtctagatggccggctgccggccggagaggaggtggctgtgtcacgagcatagagacggcgggaggtggtggcaaaacaaggtggcgggcagaaaaactgagcgggcgggcgcaaaaaggatcgggcagcacctgtatgctgtagtagaaaccctaatgggccattggccgccaacccattaacaccctgcaacccagccacgagatcccactcctggttgcccaattagtcgtgattaggcgacgattaatcgaatgactggacgactagacctcctagtcgcgtcgctacccctaatcgggcataacagattgatcagggcagctgctcctctgccccaccctcagggccgccactgtatatgggcctctatactagaagggcctttatacgcttaacagagggaattgccatgacaatatagaggcaggtatacggatgatcagatgacacgttgatgaggacatggcaatgaaccactggtgccactgtgagctcaaggaaagtggacggagcaacggtggcccgattctagccgatgactagcatcacagtcgcgctctggtggtggatgaggcccccccaagcgacactgagtgatgctctccatagcgcgcatgcagagagctcgcccacatgccggttgtgggtgctcacataatggcgttgggttagataaaattgca

SEQ ID NO: 77002 - DNA, 459 bp, Zea Mays
cgggttaattcgaagcaaacaactccgttatttgatagtttcttcttttcatcggaaattcagcaaacacccctagcaatcataacaaagcacgatgatccagaagttcagagttctaaggctgactctaacaatatctgctaaaatgatttctacgctaaatttagcgttcggtacacgcgttatccgctccaacaacgttcgctaagaggtccgctaatttagaggagccctctgacagtcgctaaaggtggagaatcgctgttcatccgctatttgtccttcacatcgtccaaggaggagttgcaacatactgtgacgcacagccagccaccaccacgctatggccttcggagctttcgttggagactgcggtagcacataccacctcgaccatgctatcccccatcaccgtgcagaccagcgtggtcggcgtcgtctgcgcccacacacatcgtg

SEQ ID NO: 77003 - DNA, 372 bp, Zea Mays
tgaacttcctctgaaatatcgaattcggtgttttcatgactcgggtgctgtgtttctgcttctttggtatcgagtgtttttctagcctcttgtttgagtagtactgtagtagtcacgagtctggcaatccagttgagaggaatttttgtggccagctccatgtaccattattctgcagttcagacgcaatcagacacacgggagttagaagaatagaccagattgtctttaccccgatcgaaagagtccaaattgctatccaatttcctctcccatggagatgagctgaggatctttcgcggagtgcctataagtagcccaaagtgatcccgacaagcaaactaaaactaccagcaagcacctcaaccctgc

SEQ ID NO: 77004 - DNA, 399 bp, Zea Mays
gtaaccaggagtgcgatgctcccaaggggatacaccggttgagggcccactctggagaatagacgagagggtaccagtcgggatcctaggatctgcagctgcttgaacgcagcgtgacttatgacgttgagcccagccccaccgtcaatcaggacatgatgcagccgcatgttggcgatgacaagggcggtgatgagtggtagtataccggcccctgccatgttttcggggcagtcggatgccccgaaggagatagtggtgctccaccaccgttgatgtagagcagccttcggggcccctggggtcgccgaaaggacctctcggcacagggacttcacgttcctatgggaggtgagctcctagctcccaccgtacatcatgtacagcttcttgtggcgg

SEQ ID NO: 77005 - DNA, 596 bp, Zea Mays
ccttattgaaataaccataagtccatcgctcattgcctattttcttaaaaaatatttagcctaaggaaaaaattgagggttcaagagagggtgccaataccaactttaacctatgtttacttgcaatttaaatatattgggatttggtttggtgcaaagctattgacaaaaaaatgaaattctctacatatttagtgcaccagacaaagcatcggatgccttactgcacacattctatgaaggcttggtattgtgtttctttttgaaaccatggtcacatctagtgtgcaccaaacacaatcggtgctttcaccggacatgtctggtgcctagggtttcatgaacaacttgtattgttcacatatccaatgcggtgtctagtgattgcccacgcatgtcagatgcttagataaattgtgttttgtcctatattgtgtggttttggtttgtcatgctttctattcaatctcccacttgctcaaccatatgccaccatttctctctgatgtgctcaccctcactccatcattcctatatctcatctctggccaccatgcactagtccccaagtttgtgcgctcgctttttgctgcttg

SEQ ID NO: 77006 - DNA, 470 bp, Zea Mays
ctacgccttgcgtcatagacgtgcatcacgtgcttgatgaaatactcgtgccagaaataatcatcatcctcgcgtcgccttgctgtgtcgtctttccgccttcctgtaagctcttggtttagccgatgtctcgcatatgcacgaatggagaatcctagcaagaaagtaagtaaatggggtgagacatttttatttctggctcgtgttatgcactttttagtgatgcaaaaatattgtcaactttttttgcacgcaagtagctgtaagcgctttagtgattcggagaacgggcgagtcgtgttgtttaatctgatgagtgggattagaaacaccagtttacgcgggatgtatatttttgatgggcatatgtatgccaaagtgtgctatattagtcattgcgttaggccgacggaagtgtctcgagtgcacgccgcaacatggttgtatgcgagacatggaaatataaggtg

SEQ ID NO: 77007 - DNA, 880 bp, Zea Mays
ggttgaaccaacatcgtcggggcaagtacccctgtggacccatagcaaaagctcctacgccagacgtaggtttctctgactccggcctccaactaggagcagaggagctggagaagatctccgaccagcggctcctgacaagtaccacacaggatgcgcccccaccgatagcccttcccagtgtgccgacctaggcccaccaattgcttaacaaggcagaggaggcattcaagcgggagtgggcgacgttggaggtcgagcgctggtgcctcacagtctagcacatccggctagaggcgtgcatcaacgcggagtcctcccgggctgccaatgaacggtccaagcttgaggtggaccgtgcggagttcaatagggacctcatgaaggtgttcgaccaggagcggattgcagtccaaagggacaaacaagtaacccagagggaggaggcagtggacaagagggaggccattgctgcgagctgtaatccttgcttgagccaaggataagatcctcgaagcgcaacacatcgagcaggaggaggctactgaaaccctgcacaggtgacacctagagctgcaggaggaagccagtaggattgctcttgccgaggaaaaattcaaggaggagttgcaatccctcgaccaacaccacaaatatggagaatcacctcatatgacagggtgaacgactttcccagcatgaacagcgtatgaccagaaaggagcaagagctcgaggagcggatctgcaagttcgttgtagcacgggtagcgttggaaatccaggcgaaggaggcacctagaaggcttatgaagacatccaagcggaccagcgtgcgggggattgttagatcgctgggccaacgacgtgagatcaacccc

SEQ ID NO: 77008 - DNA, 495 bp, Zea Mays
tggcaactgtatgcttgtaatgaacttgagtgctgaataaaataatgtgtttgaaaaaaatatggcatatgcatagtagtaatccttgctctcctctggtagaagggagtgagacccacctccccgcaccttcggagctgccattagacttagcccaagttctggacaaccaaacccaactcattgaggtcctcacaagaagcctcgagaaccagcgccccattggaggaaggcctcaggacaggatgagtgagtttctaaggctcaagcctcccacatttgccggatccagcaacccgctcgacgctgatgactggctgcgcacagtaaaaaggaagttagaggccatcggatgccctaaaaaccagcgtgttcatcttgctgctcatcaactttccgggatggccccatcctggtgggatactttcagcgttgccgtcagagatgctacctgggcagaatttgaagccgctttccaagagcatcatgtgcccc

SEQ ID NO: 77009 - DNA, 312 bp, Zea Mays
acatcagaggttttaagtccttcagcaaagattgaggcaggaaaaagccagaaaggtccaaccgtaaccccaaaaagaaaaagaatggttaatgtattagatgttttagagacaattaaatcttcgagcataactccaaagaaaactgttgaaacttctgaagtgtctactgaagccattggtgctgaagcttcgaagcaacaatttgaaaccgaagaaacgaacattgcagaggcaaccgaagaaataaaaataccagaaccaattttggttgaagaaactgacattggtgcccccgaagcaccctccaaa

SEQ ID NO: 77010 - DNA, 811 bp, Zea Mays
gttctgcaacgtggcctcaagcggaatggtgcattcagggttgttggtttcaacatgatctgaaagtgttgcccattcacacttatgatctgatcttaggcatggattggctagagttccatagtcctatgaaggtgcactggcattataagtggttgtccattacttatcaaggttcttcagtcatgttgtatgggtcgagttctagccaatgggatggcttattgattcaggttgctccggttgaccatactgaaagggaagcaccagtttcagcactatcacctgatattgcagcattgttggatcaatttcctcatgtggttttagctcttgcaaccttaccaccccttgcccctgtgatcatgcaattccactagtggctagagctaaacatgtgagtgtgagaccctacagatacccatcgggattaaaggatgaaattgaacgacatgttagctctatgttgcaacaaggtatcattggacctggttcatcttctttcagttcgcttgtgttgttggttcgcatgaaggatggatcctatagattctgtgtggattaccgttatctgaatgcactgacccttaagagcaagtttcccattcccatttttgaccaattagtggatgaactagatggttttctacactgaacctcatctcaggttatcatcaaattaggttacagtctggagaggagtttaaaacaacatttcaaactcatacagggcaatttgaattcgtggccatgcctttttgggttgtgtggaacacctggaacatttcaaagggccatgaatgttactctt

SEQ ID NO: 77011 - DNA, 315 bp, Zea Mays
tgagacatatttccctttctttgcctcaccccatccaactcaccttgattttttattggagttagactctctgttcccaccattggggccccaccctttgcatgtacatctccatcggcacccctgatgcctgcaccactggtaccacttgggttttagcctcatgtggcctcagctctcgcgttgcgtgctcccctggtcctgcttggcttccaaacccgagtggccacgatgccttgctcctctgtgccacgcgtggccacgatactacccctctctgacatcgctctctcctatgccacacacgtcttggag

SEQ ID NO: 77012 - DNA, 360 bp, Zea Mays
ccacacttgaagcactgaataccactactcttggttgttgaacccactgatgttgaagtggatgctgctggtttataactcatgtttggagcagcaccgttttttccactagaattgccttgagtattggatcgcaagcccccagttgaaccttttgtcgctgaggatgcagcagtaaaccttgagattgatttgcttcctccagtcatggttcgtgcaccatatggcaagggcttgttgctcttagtatcttgttacagctggcgttcagctttggtggcttgatgtaacctagccatgaaacatgcaatggtttgctcttcgtcttcatacacattggctctaatcatggtcttctcc

SEQ ID NO: 77013 - DNA, 970 bp, Zea Mays
tcacaaattatcaccaattacaatctcgtggtcaagacttatggctcttctggtgccaaggaccaaggacatattaatgcccaatttagcttcaagctctgtggtgatgtgggatttcatggctatttttctactcttcttacttctagtagattagatatagattatggtaagcatgctaaggggtgaaatccaatgtagttctgctacataaaccccatttatatgtccctgtaggtttggcctttaccgttttggttacagtatatatcatactcgtcaaaggactatcccgagttaattcagcaactaggggtatttataattttgagagatgtatgaaacacaagtataaaggtcctagatagaacgagcaaagtagttcgacgggaacacacaatggttttcacaccaatatagtgcaaattttctcagaataacctctcggtatactcgcaacttcgtgttgctagtggttacatatccttttatctcatagtttgcttcatatcatttagtgacaaagagggcaatatgctaacatctggttgagcaatatatgactgagatttccggtcttaaatcatttggtaaggactttttgcttactaatagaatcccaatttgtgatgtcttatatgccaaaaagattttcatgcattatatatcttcaggttacttcaggtaaaactttatgcatgaggtgagagtagagaattaacttatttgtgtttcattgtatttcaattaaatttcccagattttcaagcactatagagcttgatatagttgttaaggccacttggtgatatatataaatatatgatgccatacaacacaatcaaataaaatatagagtcaaacacaattatttgtgaaggttgcacaataatgtgacttcagggatttgaacaactcaccacaatccacgtgagtacaatctctagcgtatctggcgtcaatacgtatg

SEQ ID NO: 77014 - DNA, 537 bp, Zea Mays
gtggcaaccaagttgaaaataatgttaaggaatcgatcaagtagtcacgcagaatgcttccaaaaactttattatttcggtggagcattcactcgcatgccacatgcccacgccctccacaacccttgcacagaccaacccgacggtgagcttgtgtgttataccttgtacctctcatccaacacattcaagaccatggattgcactcaattatttaagttgtgttcccaccaccaaaactagcaaggtgggacaaaatgttagcacataccacctcatgtataggcctttgagattttctaggaattattctaaaattaaatggctatgcccaaataattataacaatcctcatgaaggaccggtgaggcaaccagagtggggttaatgggagccactaaaatttctcttctcgagagaacacagtgacttgattctgatctctacgcaaccccacagaatgtcacaaatagcatagcacagtaatactcaatccagtgccaattgaatattctaaaccgctacacaggaaactat

SEQ ID NO: 77015 - DNA, 661 bp, Zea Mays
gcttcatcgatgtgggctgtctcgtcgctgcagcacggcgggtggtcttagtttcggacagggatttcagctgccacctgcatcccacacccaaaacagttgtccacttcgcaggcggtcgtgcgcacgacgctggtcttttctctcgcgaagcatgtggtggtggcaggtcaaccagcacaaggaatcttcgtcagaagccgcggagaagatggatcgaggaggattggagcacttgagccatagccatggtcggtgttcccacactctcatgttctgatttgaagatgctatgtaagttgtcccatttcatatgaccgtgcctatcctgagatgtcgtgtgcttctgttagatccatttgcaaggatgaattaacttccgtctttaggacgatttaatttagctaatgttgtcatttgtctcccatatcagaggttagagtttggtcatttttcagcttgccggatgggggcaaagtcatggtggcatgctacaaccatgtgtgtgggtacagacaaattatgtacataatctgaggttatgttgggctaattactagctaggtaattttagttgggtctaataaacggtctaaattttggtagcaaagtctccaaccagttggtagccggtcatatctgatttcagctaatttttagc

SEQ ID NO: 77016 - DNA, 419 bp, Zea Mays
gaaatgtgcaacattgtgcaaaccacagagcagccagaacaccagtaccaacatagggatcttcggaatgaagaccacaaccaagacaatcttcagtacaaagctttcaaccacaatgattttctctatgatgatgctccccctagctatggaattgtaggcactaccatgggctcttcgtacaaaccaacccagttgccaatgtataatgtcattctaacctcaaacaatccttgatgagttatgaggccacagtatcttcatatgggggcaacacttcagtgatggtaaaatccttcatcatggcgaccaggaatgtcgctcaaacatggtattcttacctctgtctagggatagtgacctcctgacaaaagcttgaagatatgttgattacaagtttctaaggttttcagacaaag

SEQ ID NO: 77017 - DNA, 813 bp, Zea Mays
gggagtattctaggtatcgttttccatagagaagcaacatgctagaggtagaaatgaactgtaaacctgataaatgtaggcactagtacttagatggggggtaagtgcaatccaataataggaaagcaaggtgtatgaggaaggaatagataaggaccctagggtcagtaactaggtacataaagttgcttgggaggacaatgaggagttaaagatccaatctatacttctattactttgcaaaggattattcatggttaacttgttgataaccaaacacaaggtagaacttgctttgagtgaaattttaaggttccgatggtgcctaggggagggtagacaacacaactacgtaagctagctatcacttatgggatacacaggccgaactctcgttgtcacaaaaaggggctaccagtcatagttgtgtggatatgatgacacattataacagtgttcaagtggatcttgaacactaaagctcctcttatatcagagggtcaaacctaggtagtctagtaaccaagactagatgtgacttataacactagcaagcctatcaagatctgattaacaacagacttacctaattctaagccttgaattaaagtgctcctatactaccgcaactataaccaagatgtagaagtaaaataaagtaaagtgacatttgaatgtaatacttgaagtaatactgaaagtaatactcaaagtaagacataaggataactggaattaacttgatagttaatggtatagaagagttatacctaaggacttcaaagaaaactccataacttctaaggcagagtt

SEQ ID NO: 77018 - DNA, 578 bp, Zea Mays
gcatgtgaattttttctagttcatgtgtcatcttatccatagtctccactatacgttcaatgtgatcatctaaagaattctaggatatttaataacgtcatatgacacaatgttacttaaaatggggagttgcagtgaggccatcatagaagcgagctctacttccctctcctggatgaccctttggcggcgatctactgtgaagtgcgagagttaccacatttttgcctccttgcgaagctgagcttgttgtcgttggtctccatcgtccaacttcttcatgttgtcttcaaattcattacgctcattggccaacaaatcatccatagtcagcgtcgttgcctagagaaatgttgttgagatcttcaaaatcgaccattacaacctgattttaatatatctgaaatgcagtcgttccacaacggagtcaccaaaagtatgttagcacccttttggggccaaataccaacaaaccctaaggcctccacacgacgtacaagacgttggtgtcgacactgcaaggtgtcgaaccgttcgcgataggtacccggattgtctgcggtacgtcattgaatcat

SEQ ID NO: 77019 - DNA, 1329 bp, Zea Mays
gagtcctcatgaaatgcatccattcagctatgggaaaccatatgcaagaagaaatccatgcagcgcaatgtggaatacatgcaacatcaagaaccttagtagggaaggccttcaaagcaggtttctattggccgacagcaaagaaagatgcagctgatctagtccatagatgtgaatcatgtcatttcttatctaagcagcaacacctaccagctcagcagttgcaaactatcccgataatctggccctttgcatgctaggggctggacatgattggacccttcaagaaggctcaagatgggtacacccacatactggtcgccatccacaaatttacaaaatggatagagtacaagccaattgcgaccttaacctcagccaaggcagtggagttcatccaagaaatcatattcaggtttgggatacccaatagtatcatcatagacctaggatctaacttcactagcgcagatttcttcgattttttgtgagtaaagaagcatccaagtcaagtatgcgccagtttatcggagagggattggaagaaagtagaaagagccaacatgatgatactcgaggcaatcaggaagaaagtatttgacaagaatgaaaagctcacgggaaaatggatcagggaactaccttatttagtctagagtctgtgaacccaacccagccaaactttgcacgaaaacactatattcttcatggtctacgagtcggagatgccttaagtcggtgcgacacgctcatgcttcccagacttagggtgactactataccctactaacggcgcgatcggcttaagtcggaaatgccttaagtcagtgcaacacgctcatgcttacaagacctagggtgactactataccctaataacatagcgatcggcctaagacggaaacacattatatcggcgcaacgcaccatgacttacgaaacaaagggtgtgcactatgccctatcagcagaaacattcagcgaagtgggggcaactcaacgctcaataagatctcgatagatctcaaaaataatcatctcaagaaaaaatgtcctctgacgactaaaccgaccaaaatctagtttttcgttctaatcattgtgcaggggcatccccgcgagagacatcgtcaacagggccaccagaaacatccagattactcgaggaacctgatgcagcaagcacatccgcagcaatgtcatcgggtaccatgactctgaccctcttcatctgcatccaactagcccagatcgccttatccattgccttgtcgcacaacgccttcatgataactcggtcgtcctccatgaccttgacaacacaacggg

SEQ ID NO: 77020 - DNA, 693 bp, Zea Mays
cgatctcatgttctagagaaaagcatcatccatcatgtattttttgagatgaattcttcagttatatcttcataattaatgggttagcaaacagcgacggttctgtcactccatgtgatgataatattcctattatactagtggctgtcgcgcgtagtgttgtggaagtaaaaaagaacacaaaagagaagccggatgaagactccagaaataactggggacacgcaagccaatttgtagagaaactataatcttacttcagttagtacatgtcacttttcctggctagcatctgataaaatatgacactgatgaaataataaacctaatagcataaatgaggtaatacagtttgagcagcgaggtgatgcaaatgaaacaaaaacaaagcaaagttatagaaggtagttgggggaaatacactgccagaccgtttcagataaattttagagagtttaatatttcctgaccttctctttctcccgctaactcttcccatcctatatattatcaaagattaaatgattttatttctagacatcaggcgttatagattttccgagtaatgatattgtcagtgcccccactttgtccaagatattacagatgcagtaacaccaggctagaaattaagatgacaacattttacagcctgatgacatggggccagtaagaaactgggcgcataattgt

SEQ ID NO: 77021 - DNA, 562 bp, Zea Mays
gtcgggttagagagatatgggggtgggaagttgtctctgtcctagctgtccaaaccgagacaaaacttgtgccaagtcgtgtcaaacgatttagggttgggttcaaacttctctagggtgttctagaggtattttggtgccactttgtcaatggggccaaatggttttaagtttgggatcaaggtgaacatgtttgatctttgaaaagggggtggttttggacttagaagaattctgatttttcttttgtgcttaaccctttggtgaaccttttgggggtttttctaaattctttatggggtcactttcttactatcacttgtggggtatcaagtgtactacctcttttataattggcccaagtcatgatcatgtggttttcatacccttttgttcatgcttacttctagtgctccacttgtccaaaggggttgaattagggtttgggcaattctccccattatatgtacataacaagccaaggtatgacttttaaggtgggttgcacttacttaggattttgagctccaactttggtgtacttttcccaacttaagtcaca

SEQ ID NO: 77022 - DNA, 837 bp, Zea Mays
agacagaaatggtcacagtgatatgggatcaatttgagcatgccatatctttgaattcgttcggttttgaaccaagaatcccatagtaagtttgtagactgatgttaagtgaacacattttattaagggaagttgctctgttcttaacaaaattccagagataaagagggtagaaggtggtcagttcagaagaacactgaagatcaaaccctgacaaatatctgatgaacgcgataagatcagggccactgttgaatcggatgggctctcgcgatccagtgaggagaatcaatccggggatggataacttccaacatggtgcaattccgcgaacccagtcaagagtggccggggttagtcgccggcagtcaccgtgactcagttaacttttgtcgcggtgtcacccatgcctcgatctccctcactgtgcctcttccctacatggtatacatgcgccaacgcagttatccgtggccatagatagctagctggaccgccatggctataaattgcaccgtgatccacaacggggtatgcacacctccactcagtgagttgatcgtaatccaaaattcacgctgcctcagctccctcttcccaaattgattgtgcatggtgaaactacagtatcttacggctgtatagccccaatcccacccccaatttcacctagagccgccgcgacaccattttcccccttcctttgtcaccagcaagccaaagtctccgcgctccgtggccagcccactctggtaaggctctacgcctctcgtgtgttgttttagcagctcggtgtgcccaggaaactcatcttggcaaccgtttggtcaattcagc

SEQ ID NO: 77023 - DNA, 399 bp, Zea Mays
gggagatttgtcaaaatgtcttgtaaagcatgaagctgatcaaacgcttcaatggacaaaggagtgtgaaacatctcattcggtgttaccagccttgcttgctgaatggtgatgtctttgatggaggcaaaagaccaaagttccgggaaacttgcagatttacacaaaccatcccaattgtcatgccacagaagtgtagtttctccatctccaatctccacccgggctaactccttatatgagccttgaattttaaggatatctttccaccagaaggagcctacgagtttaacagaaggtagcgaattgctgtagtggttggcccaaataatgttgacccatggaatgtcagctctattgtagaatttgtgaaggcatttcataagaagggctttgttt

SEQ ID NO: 77024 - DNA, 1658 bp, Zea Mays
tgctccatgatttgtgtaactttgcgatcaagatactatgctggtagaagaaattataataagatactagctttgcatttgttgcataggatgaatattaattttgaccagtgaaatctagtacgctaagtgataaactccctttatggcatagtaggtggtaaacggttttacagtccataaagaattaaatgacactgaatagacccagccaagtgcatggtagtatcacagtgaggaaagccaacacggatctcatctagggtattcttactactgcatggtagtatcacagtgaggaaacccaacacggatctcatctagagtaattcttactgggactattttgtgctcactatgcaaattcagatggaacaaacaatcacagtagagtttgagaaggtcatttcatctctcatttcaaactccacactgtaaacagcaaaacagtgttttgcatggtctgctggccatagccttaaacatgaatgagaaaagtacagtctcaggcaaatggagaaaaacagttaaactacccccctccccgagtaatcatttttttcaacgccaaattcagcagtgcctactgacaaagcactaggaaaacacatcgatttttttctattgtacctccaacgcagttcatcggggtagtactactactagaccactttaccatgcttcattgttctcacaaggacggccatgtgactatgcccatcgatcttatgtggtgaggccgtgaaagtgaaacatctaccaactgtcctccaactgggtaccccatgtagtggtccaaagtccagagcactatagatcatggcgtggatgtgtggtgatgaaggtacgacataaaaagataggcatggacctccacggcactgggccatcctctgaacaagttatttgaccctcgcgaacagggttcaatgagcgctctgcagcagtatgcaaaggtcagctgtgccttgctgctccctctagatctgagtttactacagcagcccggatttccttttgactttgatctcgccctttagcggtggtgccataaataaaacacctattgaaagtgagtaggcgcgtgtttcaactttaaaataattaaaaaaaccatggatttatttgtgtaaactacgtttgtatgtgtgtgttgcattgtttcacatccagcagaacgtctttctcagcttgcaaggcagctcactttactgtcaccacccattttgaaacacaaaaatacatcacatgattcgcatcagcaagtgcgagccttaataagtggatgaactgcaagagcgagctcatgcagtatatagcagagagagatgaaagatttggtccacttccgttttggggcagagctggcacaagcaacagggcgcgaaatttttacagctcagcggttcacattttttgtctgaactcagtatgcccataactgcactgtgtttgaagctacctagtatctggttgatcctcgctgcctgtgaacaaccatttagaaagatgttactgtgcttaggaaaggaggaggatcatcgctttgcagtttgcggagcgcctcccccctaaggcctaaacccaaccaagtgcacaaagtaacgttcttgtactacatcagacaggcaaacactagtgccaacactacttttccg

SEQ ID NO: 77025 - DNA, 458 bp, Zea Mays
ctaatcctctacaactctatgtatcagtgcctaattgttctttaaccctaatcgtcgtgccatcggggttagatctagtgcttcgtctttggtaagttgctaatcttttgtttgtgcttgtgatttgtgtttgtcgcctctggatctgtggttgaacggacaaaccctaatctagtgccttatgttctgtgttcgcagccgtgagggaccgatttgagtttgaaccctaatctagtgccttcttgttccgtgtttgtagccttgagggaaggatctggtgctccagctttggtgagttgctaatcttgtgcttgtccttgtgatctttgtttgtgctccctaatctaatgcctttttgttctgtgtttgtagccatgagggaccgatctagtgctccggctttggtaagttcttaatctggtgcttgttcttgtgatctgtgcttgtgatatgtgttt

SEQ ID NO: 77026 - DNA, 746 bp, Zea Mays
gaaagagcaatatcataacaacttcggatgctacaactttgtgtaccggtctgatgtgaggtgccctatgccaattttttggaaaaaaatggccaggctcttggatgaagcaatggttttatgtcaagaatgatctgagtaagagggaagatgtaaagggcatatccagcgccacatatgatcagtctttggcatcaggaggccttcgattgcaagtggaaacaaagttcaagcatgtttgatggccttcaactcattgtgtacttacattggcaccagggatttggttcaagagcacattgcttataaggtgtggccgcttgttaatgactatgagacgccggaggagaccactgctggctccaacgaaggtggtctggtttatctgagatacacctatcgctacagaagtctgtttgatgagccgaatgatgattggcttgaagccgttgaggcgataagtgatgagctactgggggcttataggaaggcagaggatgaagccatgatcactgtcttcggtgcccgaggcaataggagactgaatagagtttttgatgtgattggatttatttatccggactattgttttcccgctcgaaagcaagggtcgaaaaggaaaattgtaactatgtcctcttccgccgcactgaagccgaagagagctaaggttttgactcttaggccgaagctacactctttagagaagacaactgcattgcctggtacagagaagatggagattg

SEQ ID NO: 77027 - DNA, 694 bp, Zea Mays
ggcaggtgtggtcggtttcagctgtggacaattgttcttgaagtgagtggggtcaccatagtgccaacaagcattggttgaaggttgactacttgcaacggactgagtgtggaaggaactctaactaggctggttaaaacgcggcagagcagatcctactggcttgctgaaatttgaccctttgggagggaaccaaaaagattggatcttctggtgcctgtcttgctattgagatcagagaatttgaaactttctcttgaggtgacctctttcttcttctcgggctctttccacctggatggccttgtttgagaggtgcgagaagctgagaaaatcttagctagcaagaatagttttgagctccggtcttaacccttttaggaaagggaccgtcttcttgacctttgaactaacatcatctggtgcatagcaagcaagctcgtgaatttgtggatgtattcactaacagatcgtcctccttgagtcaagtcacgaaattcctcttccttaagctgaacgattcccatggggacatgatgctcgtggaaagcagccttaaattctgcccaagtggcattttccacagcagcactgaaggtgtcccaccagaatagggtcatcctagagagttggtgggcagccaggtgaacacgctgatcttcagggcatccaatggcttctagcttcctattta

SEQ ID NO: 77028 - DNA, 554 bp, Zea Mays
agaagctctagcgttcgtcggacatgtagccagtaatcgaggccaagctgaacccagatgatgacgtggttgatgctggtttggaggatgtcgtggaaggtggacatggggtgaaaacgactaggtttgtggtggatgtggaagatgaggaggaggaagaggtacttcccttggttcggcgtgaacggcgctccaaggctcggagtaatacttcgagtcttgctgcccagctaggatggtggatatttagggtttatctatgtcggctgtcgatggtatacttgaagagggcgttcatgaggagctactgcttgagttacctgaaatcaatgttattgatgtctgcatagattacccggatgaagtaccttccacttgtttgatggctgggccagaggtaagtctgccagtcccttagggggcttctatattagtcaatcttgctactgacacagtcctgaccctagaggacacttctgaagggattactgggaggctacgctagcgcaaaacaaaattttcaaccccataataccaagaactactgcggttat

SEQ ID NO: 77029 - DNA, 660 bp, Zea Mays
gtgcactaccgtactccctatacgacgttcggtcctgtagcttgctcggtgtcaacgttgtggtacctggcgggtcctgtaaattgggctttcgatgaggttcagggttgtgtccaatgtagcttcattttccatcataccccttgcgtcacctctcatcatgcataggtatacacccgacatgggcattgtcccgtcttttccggtgctgaggtctctgtgactgggttgatcaaccccgcaagtcagtgagggtatatccgagggtgcacgcggggatgtaccatcgtgtttgtcagagaccttttggtactgtatgtacggtctggatgtggtttggtgacggtgtttcctgtcgtgacgatcatgggccaacaacgtcgaccttggttccttccttgtaggtccgcttgacataaacttggtcattcaccccacctcgtagacttgctcagtggatacctagacgctcaccccacctcacaggcttgctcagtgtggacttggtcgttcgccccgcctcacaaacttgctcagtggagacctggacgctcgcccccaccttgctggcttgctcggcgaggacttagtcgttcaacccacctcgtaggcttgctcggcggggacttggtcgttcgccccgcctcacagacttgctcg

SEQ ID NO: 77030 - DNA, 488 bp, Zea Mays
gaacagcatgggtacggtcacgaggtgctgcgtgggcgacgaagctccggcggggaactcggatggtgagcacgaactccggcgaggctccacggactccggcgacgacgtgcggatgcggacggtgaggcaacgagcttcacgacggcgattacgtgggtgacgagtggcaacggcacaacaatacgttgtcgcgagttgatcaaggacgtggctttgtgcagtgggcgagcaaggagcacgagagagaaagggagcttgggaggaagagagctcgtgcgtcggtttttatagggaggaagagggagagggagagctggggagggggagaaacggcgaccaaagtcttcaaggcaccattgatggcgtgcatcaatggaggggagagtggggatggggtaaaggccgagttgatgctccattaactcaaggagacaaacggacgggagctcggtgcgggcacaggctcggggtcgcgcggtcgctgc

SEQ ID NO: 77031 - DNA, 510 bp, Zea Mays
ctcatgatggggcgggtacatcccgcggcggggaggacactcccaatccgccacctgtacctcctaccctggacaaggctatcgctaccttggtcaacgccaccgccgacaacacgcgctttctgcacaaaatggcgggaagccaatttcaacaacacggaggaagaggtcaaccacaaggaccacgcgacaccacctatctagagttctccgaaacccatccaccactctttgtcaaggcggaggaacccctggaggctgatgaatgggtgcgggtgatggaacaaaaatttaggccaatccgatgtaccgagatacagaagcccctatttgcaactcagcagttaagaggccccgccagcaccttgtgggcaaacttttccgccatccagcctgcgagacatcaagtcacctgggaagagttcaaactggcatttagggaacattatgttccggaaggagtgctacaaatgaaactggaagagttcatccgactaaagcaagggggag

SEQ ID NO: 77032 - DNA, 984 bp, Zea Mays
aagaaattaagtggtattaaagagcaaaaactaaggaactgttgcgaggcgattccaacactaagtatttccaactagttgcaagcgggaaacacaggaagtctaggatttaccaattacgagatgggaataaggttatacaaggggatgaggctttaaagaaacatataacctcctattacaaaagcttgtttgggacacatgatgtaacaaatgttgctctagatgagacccaaatacaagacataccacatgtctcggaagtagaaaactccttgttggtctcgccttttactgatgaagagattcgcacgacactattccagatggagcataacaaagctcctggtccggatggttttcccgcagaattttttcaggtgttttgatccacaatcaaggatgatttagctgctttatttcaggacttccatagaggtgatcttcctctatatagtttgaattttggcacgatcatccttttaccaaaatgcaaggacgctgaaacaattcaacagtataggcctatttgtttactcaatgtaagcttcaaaatatttacaaaggtaattacaaataggatatattctgttgcttcgaaattaaaacaacccaaaccgtttcatccctggcagaaacatcatggagggggtggtagtgttacatgagacgatacatgaacttcaaagaaggaaaaagagtggggtaatttttaaaattgattttgaaaaggcatacgacaaggttaagtggacctttgttcaacagaatttacgtatgaaaggtttttctagtacttggtgttcatggattagctcgattatgacagggggacatgtcggcattaaagtgaacgatcaaacgggtgcaaattttcaaacaaaaagggtttgagacaaggtgatccgttgtctcctattctttttaatattgtggtagacatgcttgcaattctaattaaaagagcaaaagcggagggacaag

SEQ ID NO: 77033 - DNA, 382 bp, Zea Mays
agaaaagttgtactatgtaaccagaagatttcatcatcaataaagctttcattttccaaaggtgttcagattcttgattaacaactgacttcgattgggcttgacttgaaatcggcatgacttgacttagggtgatcactatgccctactaacggagcaatcgacttaagtcggaaatgccttaagtcggtgcgacatgctcacgcttacttgacttagggtgatcactatgccctactaatggagcaatcggcttaagtcggaaatgccttaagtcggtgcgacatgctcacgcttacttgacttaggatgatcactatgccctactaacagagtaatcggcttaagtcggaaatgccttaagtcaatgcgacatgctcac

SEQ ID NO: 77034 - DNA, 466 bp, Zea Mays
attgcacaaatataaatattcaaagtaaagagagtattaggaacatggggatgatttttgaggtaccagagagtcgacactcaccactagtgctcatcgaagtacccgtgcaagggtgaagctctcccttgattcacgctaggatcaaatgctttctatgagttgattcttcgttgctacaacatggtgaatcacccacaaccatttagaccatgacttaatcctttcacaatctctaataagagatcaccaagctcccattcactactaatgtgcctagagtaaaccctattgtagttcatactctggcgcaacacatcagactaatatgttgcctctagaacctctatgcatactatttgtttctcatcagataacacggtgctgagcatctgactactctggttactataaaacctctttgcttagaaaatcccgaccttagcaactgtgatgcttactctgc

SEQ ID NO: 77035 - DNA, 1232 bp, Zea Mays
aacaacttcggttgttacggacttattgcccgtcccaacgcaagccaccctgtgccaacatttcggaaaagatggccgggaaattggatggaagaatgattttatgtgaagaacgacttgatagcgagggaggacatcaaggaggttattatgcgccccatatggtcccgcttcggccttcgaaaaccgaaggttgaaattgatgaagccactgaagcatgccagaaggcatttggtactgtctgcttctttattggtacgagagatttaattcaagagcacatagcatttagagtatggccgcttgtagagagctaggagatgccgaaggagaccgtcaccaagtctagcgaaggtgaattggtccggctgaagtatacattcagatatggggataaattcaatgaaccaaacgatgactggctaaaatgcattgaatttataagtgatgaactacttggatcatattctaaggcagaagataatgcattatccactgccttctgaagtcgagaaaagaagagatttaacagagtttttgacgctgttggcttcatctaccccgactaccgctaccccgctacgggggcaagggaagaagaggaaagctactgctctggccgcctcggctgaacctgtgccgaaggctgcgggcaaaaagatgaaggtacttacctaccggccacgttatattgaaccggtcgtggttcttgagtttggcggggaggcctcttcagctgctgaatcaagagaaattgctcctcctgcgcaaagtactaaagggccaactacaatgtcgaagctaccctcagctgagctagctgggatgaagactgataaggataaggctgaagagtcaaatattggagaaacaaaaatgttagaaattttaagcccttcatcagaagtaacagcgccgaaggcacaaaaaagttttgctgcaactcccaagaggagaaggatggcaaatgtactagatgtgttagaaacagtaaagactttgaactctactccttcaaggaaaattgccgaagcttcgaaagcacaaaccgaagctgaaacaaagccggccaaaattgaagctgcagtaattcaagctgataccgaagctgggcctttagagtcttctaagatagagcctgtcgtaattgaagaaaaggcgagagaacaagttgcgcctgaaagggctgaagctcctgcctccgaagcttccaaagaaagcactgattaca

SEQ ID NO: 77036 - DNA, 275 bp, Zea Mays
ctcgttttatccgcccgccgctctggaatgtaatacactccgaatttgatgtgaacacaaactctgtgaattccgacatgtatttatgatccgctgtgctggggctgccttgtgcaccgaatcagtgatcgggcaacgtaatacaaagagggagcgcttgatcatctgagctggttttgtacagaatgtcaggtatagccaggtgctcgttgtcgttgcttcagttttaacgagtcggtcatgcaatgcagctaacgttctggcatcggccatgc

SEQ ID NO: 77037 - DNA, 507 bp, Zea Mays
ccatctttcttaggtactaaaatcacaggaacagcacaagggcttaagctttcatgaacaaaacctttatcaagaagttcttgcacttgcctttatatttccttagtttcttcatgattggttcgattggacggttaggaagtgcagcccttggaataagatcgatttgatgctcaatccctcgaattggaggtagtctagctggtgtttcttgtggaaacacgtcttcaaagtcctgcaaaagattagccacaacactaggacgagatgttatgtcgtttggagaaattaaaacatctttgttcacaagtacaaagagcacttgatatgggttgttcctcacttctctcagctcagattttgtggctagcataacttgatgttctccctcttccttctttttatctcttgaatttggcttgtagcacttgctcaccgaattgtggatgacactcaatttcttttgctcttctcctcctctacttgttgtactaatttcagttttct

SEQ ID NO: 77038 - DNA, 494 bp, Zea Mays
ccaagggttcgccccgtttggccttctcccaggtaccacagcacacccgttcgcctacagattatatggatatggggcatcaacgaccgaggggtgctgattctgggctgcgatcgctcggcaaattgcctaagctaccgtttccggcgtttgaaggtgagaaccctcgtttgtggatctctcgatgtcaatcatactttgatatgtattctgtggatccggatgagtgggtgagggtggcgtccatgcatatgactccccctgtggcttgttggtttcaagcagtacaacatcgttatgtagaagttccttggtcatttttctgtaaactgctgttggacaggtttggtaaaaatcagcatcagatgcttttgcgtcacctgtttcgcatccggcaaacggggtctgtagctgattatattgatcggttttgtacattgatggatcagttagctgcttatgaatctgtgcatgatccgttgtatttcacaacg

SEQ ID NO: 77039 - DNA, 341 bp, Zea Mays
caatattgttgtactcattgccttttgtattataatgcgtgctttatctcaacaactccaaactcgttgactcgcgtccctgctcgaggatcaaaccatatataatcaaaggtcacaaaccttagtgctttacgacctccaaacatatactcggatatatcttcaacaataccataatagtcaaacagttatttgtctacattatatgcacatactgatactccactgtttttggtggctacaagtggacagcttgctttaagtttatccattcaaaaatggtacccattgatatcataacgattgaatttctttgcgatcaattgaccatgtgatatttg

SEQ ID NO: 77040 - DNA, 639 bp, Zea Mays
gtcaagggttggagccagacgtcgggtgcttctgtaaaatccacgaattatcatatcagacgaaagcgactgggaaggaacaataccacaataacttcagctgctatagcttcgtgccccgctctggggccagttgccctgtgcctacattccggaagaaatggcctggcttttggatgcaggagtggttttatgtaaaaaatgacctagaccggagaggggatataaagggcataattcaacgttctatatggtcacgcttcggcatcaaaagaccttcagtcgcacatggaaatgatgtgcaagcatgccagacgactttcaatactgtatgcacctacatcgccataagggatttgattcaagagcatattgcttacagagtatggccccttgcgagcggatgggaaatgccaaaggaggctgccgctggctccagccaaagtggcctgatctatctgaagtacatattttggttcagggatcggtttgacgagtcgaatgatgattggttggatgccatagaagcaacaagtgatgagctgcttggagcctactcgagggctgaagacaaagctatgacgatggctttcggtgctcgagggaaaaagaatttgaatagggtttttgatgttatca

SEQ ID NO: 77041 - DNA, 502 bp, Zea Mays
ggaatgtgctgaatagatcaatttttaatcagggatggtagggactagtatttcctctatgattttccatgtaacacctttgaatatacaataataataagaagccaccaacctttgaattattatctgttccaatatattagatgaggggtgtatcggaatttgacttccgagttgttcttgcgtgtccgtacgctcgtacggtagctcgttgggttgttgtaccagccatcctgctactgcgcaacgaaatgcattggtcatctcaattaagtccaaagattgtagtcgtaaacatgcagccaataagagcaaggataatagtttagccattgatatgtcttctaaagctaattattactgtattggacccacctcgtactctcattctctcaccacttgtttcggaatctgtactgctacaaccagctcttagtcgactgataattaactacccgctttttctcttctctcccctccaactgcaaaaatctaatgtggc

SEQ ID NO: 77042 - DNA, 321 bp, Zea Mays
gttgtacctcaatccatcagaaccacaataaaggtcccgatggaacaccacgaggggtttgtatcatccccgctcaattgcagtgtaggatagtgtgggaggcaagcagagcaggtgactgcatgcaatagtgtaacaccccattttcccaaacacaatggatgtcaccaaaaacacttcccccaaatttttatgtataaaaagatgaagacggaaaggaaaaattcgggagcacctcccttgaaagttgcataacgaggaaaccacagtgtttaaacatgatgcaagagaaaggtaatccacagtgtataatcatgatgc

SEQ ID NO: 77043 - DNA, 644 bp, Zea Mays
caaggtttggtctagccacggcgaccgtggacaaggcggaccgatgagcgcgttcccgtggattcatggcggtcaagtacaattaaggggttcgggaagctttagaagagcctagggacgctagaacaatcaacagagaagtatgaagtcacctggaacaggctgaccatggggagtatacactgcacggtgttcttggtggatttgtgaagaatccaaaattagtgcttactagtgagggtttggggatacaggtaggtgcagtagatgctggaatccatggcggagccgaggaggtgctcaatttatagttcccgttgtcggtggtgtccaattccatgaagttgtgctggcggccggaggaaagcaggggtactggagcaagggatgggtggcgttcactgtggcgcttcctccggtgagcaccggttgaggagctacggcggttaccggtgaggtagtgcggctaggaacgacgtggtgaaaagctttaagcgtggcacaaccgcagtgaggcacggcaactccggtgacggccatgaggccacgtcgccggtgaaaaagggcaggagacagtgaggccacagtatctcatactcatccgcgacgagatctttacctggtgaacgaaatccctacgcccg

SEQ ID NO: 77044 - DNA, 786 bp, Zea Mays
ttcgcggtagactttggtttttcgcacttgttgtgctagtccggctgcacccttaggcgacttctgcgcggatttgtcgcacgcgagggtagctgtcgctgagcctcgcagtgactttgtattggtcgaatgtcgaagaccgtcgtcgcggtcttttttcgacgcatgttcttgcgggggatttttcacttgtatattacatggctccgcctcgttaaaacctcacccccgggaggaaaagagtgcgggccagaataaaattgtttttgcgaattacaagggcgaatcggccctgatgagtcaaacaaaaaatttgcggagattgtcgatgttccaggagtgctccaggtcttcgccgtttggcgttgcgagtttgtaagcgctgggggaagctttcgtcttgacaatgaaggggccctcccacttgggctccagcttgcccctggactctgtccgagctgtccggacgagtacgaggtccccttcgctgaattccctcaggatgactgcgtggtcgcgccatgcttttgtctgggcttggtatttatttagagcctgcaatgcgaagactcggtctccatcgatgagatccttcgaagtgggctcgtccacgtcggggacggccgacggaactgttcgcggggacccatgctttatttcttgtggggtcatggcctccaatccatatagaaggcggaaaggagtgaacccggtcgccctgcattcagtcgtgtttagcgcccagaccgcctcgggtaataaatcggtccacctgccctttttttt

SEQ ID NO: 77045 - DNA, 606 bp, Zea Mays
catgtccaaccattctttacacgggtttttgaattgtttctcaaatttgaagcggtaagcaagtcgaacgagttcatgcttcttccccgcttccttcttcttcggcattccccagccacttgatgtaggatatgttctattagccaaatattcttgcactaagtctctggtactgatctgctcagctaccactctaaattcaacttcggccagctgacagggtgaccctagttgcatgttacataaaggtcgggtcattccgaagctcaagctcagaggactcatgaccatggtcaccagccttcatataaaaccattcattttttcagccggttggccactttgtgcagtagctgaggactggtgccttcgtatccttacgatacgcaaaattgtaacaaccaaaattttcttgaagaccatctgccctagccttcatctaatagtgcaactcatgcacgcgacaaaaagcttcggcatccgtgctcatcccttggcttcgaagggtccagataaagacgttgagcctaacaatagcgttaggagtcagctgatgaagataaatttcgaagtttttaaggacttcccatatcatctcattcaagg

SEQ ID NO: 77046 - DNA, 1059 bp, Zea Mays
atttttattaaattatatggaaatgaggagcctaataaaattggtttggtatttttagcatttttctacaattttctaggaattttctaagtccagaagaaaaagacaaagaaaaaggcgctacagaattgggcttaaactggcttgaatcggcccacaagctggcgaaaacgtgcccacgcgcgcccgcgtgcagacattgcaacgaggaccctgtctttttgaataactcaaaagagtccaagacactatttgttgtagtcgctgacgtttgcgaataaacccctgcgtttctatcccttcacactacgtggtccacgacggtggacgtcgacgcgcagagcttccatcgagcttatgccggccgagatacgcaaggaccgaaccctaggctttgctggcacctaattctacccctgacaatcatttcccctcacctaattgcaagattctaactcctaatcactctgtccacggtgaccgtgcaatccggggacaaatcaaagtgttcccgtcgatctactcttgtttagagcaattggtcgggccgatgagctttaagaacacataggaatgctagaacaagagcgaggggaacacgatcagacctgtggagagctggccacggtgagctcacttctgtggtgttcttgaccgatttggggagaatcccaaattggagttctctggagactaattggaggcatgggtgggtgcgttgagtgcttgactacatggcggagccgagggcgcgcttaatttataggattcggggttggtggctctcaatttggtcatgacgtgctggcggccggagataggtaagaacacgggtggctgtgaccgtgacgttcaccggtgcaacggctcaaggattatactcctaagggtgccacgattactaccgcacagtaacaagctacggcgtggcacaacagaggtcaccggagcttccacgacgacgctggcggtccggccacgtcacaacggctacaggcacggtgataaacttcaatccgcgatcaaatccattcccccgtgagatattttaccttcccg

SEQ ID NO: 77047 - DNA, 399 bp, Zea Mays
ggccttgaaaataaaaggaaagaactgtcggaccacaggaggaagtaccaagggcagactagcagaaacactcggcaaaacaactcccaaggttctcagttccgctctaaaaaccagagtggcaacaacaactatcaatcacaactctctggacaacaaggtcagaggagcagccaataccagaaccagcagagaagcagcactcagaccggtcaaaggtgtagtggtcaatagcagaatcgttagggaagcgcagtgaacacaccggccaagaacaataacacaactacccagttcaacccaatggttgtttcaagtgtggtgaacttggccactatgccaacaactgccccagacataacccacagacaccccagaagaacaacaactagaggaatg

SEQ ID NO: 77048 - DNA, 1090 bp, Zea Mays
atcccctgttgcattttgggcctcgtgggatcgatgttgcttcggcacccttgacgggggcgtcgctggctactctgtgctttgatgtcggagacctcttcgttcgtgcatctgaagaggacggcgtgcaaaccctggtggttgatctaattctagacatcgcacaaaggcagggtggcacacaaacccggtggaaaaaggttgagaggaaaaggtcatgccaacttcggaggcaaagcatggtggggcatcaagttggcaagcgcaacaaatatggtgagtcgctagcttatataaagaccaaggcatggaagtcgaggggccacaacttctctcgctcattgccagtgggcgttcacacataaaattccattttcaactatgcacaatgtatttcggtttaaccattttcgataacaaactcaaaagaaggtgttttcggatattcggtggaagtcctctttgtcccaatttgtcgcggtttgagctcgttatggaaaatgaactaaccccgcgaggggttactggatagaagcctttgtagaaggtcctctcctagttgtccttggtccgtttcaagaacaaagtaagcttcggatggaagtcttgtcaagatagaaggggaagtaatatgttcatggcttaaacggaatgtcgatgaacgattggaggagatcctcgtcgttgtggagacgaagggggggtggaggagacgtgtacgacacatctcatgggagagaagacaaatgtcccctcggtgtttttttgtagatcatgtgtaatatgttcatggcttaaacggaatgtcgaggcatgaatgaaggatatcctcatcgttgtggagacaaagggggctagaggacacgtgtacaacacgtctcatgggagagaagacaaacatgccctcgatgttttttgtagatcatgtgtagtaagtgagggtattgatgtaagtttatatgaaggtatacattgtcgtatcatttttaataggtgtacagtgcctatgcacggacccccactttttgggtcagactcgcaaacgtctaacatctccacacctttgaagaactcaaaccctaaagcggca

SEQ ID NO: 77049 - DNA, 327 bp, Zea Mays
attacttgattttttgactgtgatgttagctgcttctgctgtgctattttcaatgtttaaaatgcattcatttctgtattttgatactgcattttttgctactgatttgtgccattctgatctgacctcaagttctaggagtagctaagtgaaataatattgtttctaattgtatcttctcttttgggcttgtgttctgcttggtattgcttccctgctacaatcctagctatgtaagcttgttgtctgatgattctgtttccttttcgttcatctcattttgccatatggaccacaaacagtaatatactatgaggtccctccttg

SEQ ID NO: 77050 - DNA, 844 bp, Zea Mays
acaatacttttagtatgcttggtttcacttcttcattaccttccttcggcttcggcattccctagttggccccggtggggaataccctgttcgcaagaaactcttgtagaagatcattggtgctgatcctataaatcatagtgttgaatgcaatgtgtgctgctttagcatccctgctcatattgcaaaggggtctcttcaacccgaagctcaccttcaacgaccccaatactatagtcttgaattcatctctctgtttcgtgtctaccttgatgtagaaccactctcttgcctaatcacttggccattttgttcgatacgctagcacagggaaactcatatccttacaatatataaacatgtagcatccaaaaatattgtgcaacttgtccgaaggtctaccatttgtctggtagtgcagttcatacactacaaaaacactgaacattcactcgcgcgccatggcttcataaaacccatatgtaaatatggtgagtctaactatggtgttcggtgtcaagtaatgcatgaaaatttcatacttcttcagcacctcggtaatcatcctatgcactggcaaacgatggactgtccaaaaaaagctcttgaacattatgacctcatcctcctttggtttgggggtactcttctcgctaacaaaatgaatcaagtctttgttttcaatgtatccaaacctcttcagaactttaatctcacttgactttagaccaccccatataaaaacactgggtttggagggccgaagatcaccttcttcttctgcgacaacgtcatctccctcagcagaaatatcgtcctttgacttaatgccttcttcagccgc

SEQ ID NO: 77051 - DNA, 695 bp, Zea Mays
gcttgcgtagttcatgtatgggagcttcacccaacctgccttttgggtcagaaccgatgacattgaagtatctagcagtgcaatgttacacatcacattactaccccctcagcacgaataatgtaacgatggtctagaaaaggggtagttctagtttcgtggtgtgtgttcaatccaatccaacctgagaatcatgacggccatcatgttcgatttcttcaactttgagaagtccagaatgatgtcctccgccattttcttggccttaccatatgggttgatcgggaactgcacgacatatatagtttatgctcagaactcgagaaggagaagattgtaaactttaacctcattttttgttaatgctagctagagaggcgttcaacttgattttagaaaggaactaatggtttcagaaatcagaactgaactgctgacctatggagttccttcagcgatgggcatcttgtcaggctctccataggtcgcacatgttctggagtagatgagagtcctcacattgtgtgcagccatggcttctagcactgctagagtgtttgcagtgatgttgcggtagtacctgttcgaagcaatttaagagagtattatgtgcaggcaggggactgaaactgatgtatttgaaacaacagtttgaacacattatgtatgttaaaccagaacaaactcaacttctg

SEQ ID NO: 77052 - DNA, 784 bp, Zea Mays
gtcaagttaagtgtattattcagatataattgaatatttgttatataaagttgctatatagggctaaatgggtccgaagcttcaaaccatactttatagatttggctgtcaagacactacatgaattgttaaatgtgaataaatatgtgcatatagattgttttaacatggctgttcgaattcttgcccataatgaatcgaagaggttgtctattgtaaaatgaaagattacaaaacactatatggacctgtgtttctgtgtaagtttgttatttaaatattgttatgacatgtatgatattatcttatattttttatttatttattatattgttatattttctctaggaaatatgtggttttgacgaagaagcgaattcttataaggatcctagcgcggtagagttggcagaaacattaaataattggcctcaaatgaattattacatcacgctttgcaaatttgtaagtcagagttcctttgatctatatagttaaattgtacaaacatataatgctaatgtctcatgtttgcgggttcttatgccatggagatactctacatgctatgtgcttttcgttattaatcatgcaaacaaatctgtgtctgtgtttaattttacacctactccataatggtgcaaagatataccactaaaaagattttgggaagctattcctcttatctcgaagaaatataaggtcgcatacggtgtcaaacgtaccagatggtcacatgatatttatatgtggcgacattcaattcgacctgatgctccaatcg

SEQ ID NO: 77053 - DNA, 554 bp, Zea Mays
agtttttttaagctgaggataccctcttagtcaaacatctctcccaactagctccaactccacgtgaagctgcttcagctagagttgagtggagcacaaatttatgaattttgagcggtcctaaacactccctaattcaaagcagtactttaacctttactatacttgttctatgggtgtgtttggtttaacttctaaaccaaattcgctgccaaaaatcttaaatctcaaccaaacaagtacaacaacacaatagattcctaaaattctatatgttcctctagttcgatgtagaattatcttctatcccagattttctacattcctgacatccatcttactaaattatcatgctcttaatctaaaccgttgtttcaaccaaacatatcttagctttttcatacccatcagttcacaacagttttctcagagctataattattttttcaaaaatctacaccttctattgatattctactaatcatttactatacttgttctaagttctcgatgtcctacataagggtattgatctatcgattctagggctacta

SEQ ID NO: 77054 - DNA, 1144 bp, Zea Mays
gtgttcttgacctagcaaaaacattgcattaaggcgtgcaatgttgttgggatactgctggatgacatgaaggttagaatccatattgggctgggagaatgtgctttcaaatttagacatagattgttagtagagcttctctcgggaccaaatggaggcctcatggatattaaagagccaagaccgcatagggtcggttaaggccacatgaaaatagtttgctatcatctctttgtcccaactagtggcaaagatagcagtggtgtagattttgaggaactcaatgaacttagtggtaccattgtacttctctataaggtgtaggtagaactttcatggccataccgcctcacgaagtgcatgcttaagtgccatgcacctaggcccaatggagtggaacaactaaatagtttggcctacaagtgatggttattcttaaaggattagcatgatattggcccctcattgcaatgatcttcatgtgagggcttgatagagacccacacatctgtagggcacacaactattataaatggtgtcacaagtcttgaggatataggtgagaagtccatggtggatgttgagccatgcgctttggctctagagcctagggagtgtccctggaaattgggtgctattaggctgcggatggtgcatgagagcacgtggatggcatgtcatgcatttgtaggccccatggaatgaggtcatatggtttaaaacaacctaaggttggcttggtccgtgactacgaaattgtcaatgttataccaccattgttctacattttcctccccaacgttaggcaccaaggtattgtagaggtgagcctccgtagcatcaataggtatgatagagacaacatctaaggtcaaggaattgtgtgcccaccatgaatttcactcctgagatgggacaacaagctaggaggacacctaagaaggaccctagagcaaagctgggggtggcacacgataaaggatgatggtctcccaacgactagggaggtgtccttcatgaggctctagaggcgttacacgcaccagaaggaacattaacaggagtgaagcgagcaatagtgccacatgactgcacaaaagggttgctagactggatcgacaaagggacttgtctaggtcatgcc

SEQ ID NO: 77055 - DNA, 456 bp, Zea Mays
gtgaatattttttagtcctatatataaaccctaaacatagaaaacttcagaacccaagccgaccgtccagagttttagatgcgatgagtaggagaaagtgcatgcatgccgcgtacgtggggagatttgcgtggagcgcggatagcttcctgatcagtcttcttgtgccaagcgcagcgcccaagccaaatcgttacgggccggccctccagaaaagtggcctctttagtaagccgaatctttatgggccgtttggttcttcggaattgggatatctttttcagtatcgagttgcagacaacaacagtgatgtgcacggcagcaggcaggatcgcatgaaagcggggaatggaaatgagcgaagcatttctgcatgaaaatagtgttactgtagagagacgtcgtatgggagtgggacaaagtgtcggattggccatggcggacccaggcacactt

SEQ ID NO: 77056 - DNA, 501 bp, Zea Mays
ccagcctctgggatgggtgctacagccagtgtttcagtaggggctgcatcagaggaatcttcagccaacatatccagcatggcacttatctctgcatcacttggattcaaaggtacctcgacatgaacctgcctctcgtcgtcagggattccaccaagtgaggcaaccaaagcactaacctcttcgggagagggtcgcactctaaggcccaaaccgctatcaccagcaggaggatttgacacaaaactggtaaaagccttggaaggaggcagattccaggctgagtatgcaacaggagcaccgatgttcgacaccttgcctctgagtatcatctcgagccggctgaccaaatccacaacagaaactcttctgttggtaacccgggttgaatcagcgaggcctcgatatagataagccgggtatgctctgtcttttagtggctgaatgttcctgaaaatgaaatcggcgaccacagcttctgcagtcagaaccctctctttc

SEQ ID NO: 77057 - DNA, 675 bp, Zea Mays
aagaaatgagctgtcttggtcaatctatccacgatgacccaaatggaatcgtggtgccgggaggtattgggcaatcccacaataaaatccatgcaaatctcctcccatttccaagatggtatgggaaggggctataaggtacctgccaccttcaaatgactggccttgactctttggcaagtgtcacactcagatacatatttagcaatttccctcttcattctggtccaccagtacaaggatctgagatcatgatacatcttgttactgccggggtgcatggagaatttggagaggtgaggttagtccaatattttcttcctgagctctgaatttttaggaacaaccaatcagtcttcaaaccatagaactcccttgctgtcctgatgaaagcatttgtacttatccaccttttgttcgagcatatccttgatgacttgaacacctttgtcaccaatctgtgccatgactattttctcatgtaaagtgggctccactgagatataactcaaggtacctaaggaaacaacttctatgttcagcttgcacaattcatcacatagagtggcgatcttggagtccatgatcacacaattgcactgggctttccggcttaaggcatctgccacaacattggccttgccaggatggtaatgcacttctaaatcatagtcc

SEQ ID NO: 77058 - DNA, 972 bp, Zea Mays
gccggcggtgggctgggatcttaatttcccgctagaagacaatgtccaagctcagccagcagacaacattcaaggagattgggaccaatggattgttaatgttccacctgttcagcaacctcagcagcctcatctggatctgccacctgacgagcaacaggtcagcaacccccattcggacctgtcctcagatagttcttctggtcacattcctggtgccttgctgcagaatgggcagattcagaatgggcagatccctgtggatctggtggctgtggggccggtgcccaactttaatgcccctgccccccttgccttgggtgacctccctatgattgggccccaggaggttgacggcccaccaattcagggtgttcttcatgtgcctggggatattgttattcctgatgcccagccggcggaacctaacgttaatggccacaacaacgtgaggttgaactttatgttttcgcaagactggcaaccggatcctgttttgttgagtcacttggaaaggaaaaggaatgtccagttctataggatctgggctaactattttgccccggctgataattcggtgacctcggtgcaggttcccaagaaatggacgccctttttcttatccaacttgatgcacgaagattcctttagttggtcaaaaactttcctgtcttcagatattccttccgctctgttggagccagagactgaggcacatccttttgtcatccccaggaagtgccctgatgacaagtttcttgattcggtcctttctgaggaatctgctgacgacacttctgttccctcggacctggcctcctccacaccaaaatttgctgtagtagaatctgacctgaggagaagcaagaggctccatgacgcccgggctggattcaggcagggttcctgccaaaagaagaactgtttgatgtgtcagcacaagtttgagggtcccccctccctttcagctaa

SEQ ID NO: 77059 - DNA, 1195 bp, Zea Mays
gatcatccagcacacgtacagttggaactcgtcagctaaccgaggcgcgaaactctgagcaagggctagccaattctttaccctgtgccttcacttccccaggccattgcttagtactcaatgtggacatgtggcctagtaaactaccatgtcgtaggatattcctagaccgaactggagtacagtatccatctgctcttcagtagggtaaaataatcttgcattggagatttggcgggccacatcctgatcactgatcagtcaccgcccccggccggatataaaggagtccatacgcggccatgccatctccatttctttactgcgtttcacacaatcacacaccggtaaagatgcaccttttctttttcacgtcgtcctcccccaagctcgatcgcagtgaatggatgagtgaagtagtgcagttgcggttggtcggtcaaatcctgcctcgagtgaaagccagccacaaccacaacaaccggctctccgcctcgtgcaggccacgaactgattcgcatatccctttcgctcgctttgccccgccgcttttgcgtgcatctcccccttgaatctttgtagcccagctttcgttcgccatggatttctttctttcaccccgctttactgcttttcgtttcgcctctctatcgtctgctgctgttcttgcttctcccctcttcttttcctttttccttggcgtttctttttttttctttttatcttttcagaccgcaaaggtctgccaaagatcgctgcctgctgcgtagtagtagcagtggatacgggtgtgtgtggggtgggggtggccggtctgtcggtcccactcccaggcaggaaactcctctctgcaccgtcgatttcaaagcgcatttgagctcactcgctgcccatgtggtgttttttttttacaatgaccacacttaaagcaggtttggtttgaaaaataaagtagcccatacatcattttcttattcatcctcattgtcttgtttggttttgggaataaaatgattttatccatcaccattttatctctcataggttaacaattagtgataatatccacattaatagactcatgatacatcatctcatgtcatctagaatgaattgattcttcaaccaaacaccctcaattaaataaggaagcacgtacgcatgcgcgacgcaagcactcgcacggttacttttt

SEQ ID NO: 77060 - DNA, 1006 bp, Zea Mays
gttagggtcatataactcaattgatgaattgtaatgtgtatgactgtgttgagtgttcaataaagcacatatgttttatattgttcttttgcaggctgctgcttcaataatgcggaaggttgatcgacccccaaccaatccgaagcgtttaatcattgagtcaagtcaagaatgtttcagtgttgacattccgcgctcgactgacatggcagaccctacaaatacgcggtctgatggtgatcctccatagcatagaaagaggggtgttgcagctgatgctaaaaacattgctatgcctaatgtggatgatgatgatgactttgagccaccaaaaaagaagtgcaatatctcaatggatgccccaaataagacacaggtgagtttacaacattgcagaaattaattgtttccaatattgtaatcatgcatctaatctcaatacataccttatgtgctgaaagatatagctttctacattaccttagctcattaatccaaaatagtcatagtacaaggaaatttgtataaataagaacacataaattgtgatatttaagtattaacatatttatccatctatctaccttttcatttcagagactcaacatcagatgcaacccaggagatgttcttgcgtccattccgatattgaatgaaaggcaacgtcaagctatagtcagaaaaggattctctagtattcttgacatgacaattgatgcaattggatgtcgaatacttctttgttggctcatgcagaagctagaccccagagacatgactcttcgtattggtccagacaaagaactcaaaatcaccaagcagactgtccatcagatattgggtcttccaaatttgggtggtggaaagccccttaatattgatgaagcgaatgctgcggcaacacttcgggcctcattgaatattagcaaggatgagtttgtttatttcaaagctccaagacagattgaggctaggccaggatgatgatctttctatcagatgtttt

SEQ ID NO: 77061 - DNA, 362 bp, Zea Mays
tttgtacagtggtatcaatgactctacctgggtcaccaacaagagaattcctactgaggatctggtgagccgactggacatgattctgaggggcagagtgtcaaatgttggtgctcgtgttgcttattctgcttggaatctgccacctcataggtcattcactgaatttgtgtccaaccctcctactagtgatggtggtatgggtcttagagtgcgaccctccctcgaggacattgaggctctgattgctcttcttcggaatcttcccaatgatgagaaacaaattcactttgagatgctagctagtccagatgatgtagagatgaatgttgtgcttagtatgttagctggggaatcttctg

SEQ ID NO: 77062 - DNA, 591 bp, Zea Mays
ggcgccgacaggtgggccacctgtgttggtctctacgattacgctcggtaacgctgacaggcggggccgagttggcgggatcgtctccctcccgtgatcctcgccaggttgttgcaagtgccgcgcgcaagcgatctcaacgaatctcgcgtgaccccgcataacgccgcttcaccgacacgtgggcccacgtgccagtccctgtcctccgtcttcctcgcgcgctccccgaacggactccgctttgtgcgaggcgattgcagggcggattccgcgccctggcgcgtggtatccggttggggccgcagctccttgggccataaatgacgaccgtcgtgaccccctcatctcatccacctgtgcccacatccgagcacaagcactgtagccgccatcgccgcaagctcggagaagggtgggccgccgccacgggcaattgctttgtgggtcgccgccgaccgcaccatcacagggagggactcagcatcgcgtcgatccgaggtaaacgcgcccccgcaagctttgtcaagctctattgcgtatgtagcacctctcggatttggatttgggcgcacctggcgtgatttggcc

SEQ ID NO: 77063 - DNA, 310 bp, Zea Mays
cgaatgcgatttattcgcgtgcgcggataaaaaaaccgttatgcacggattcgggtacgagtctatacttgcggatacgaatacatgtagcatttaatatcctcagatatttatagaacgggtatggaaaattagttccatacccaaatatccacagatatttggtcttgccttcaacatagtaaagaacacatgaaagaaggatcttgtgtgtcgactgttgaagtatatggaacactctaaagaccatgcatgaatgttacaagacaaggtcaccaagatcagcaaaagggagctcctagaaggggag

SEQ ID NO: 77064 - DNA, 344 bp, Zea Mays
ccagtctccacatcaacgtacagatcccgccttgcatggagttcttccttgcgctacccgacaacaaccttgccgagtattccgtcgcgctatcgtgccatacccggcctctccgccgggaggcctacataagtgtcaaactcttcccctctatagaacacaaggaagctaagagccagccagtgttctgcgtacgccgagggagagccgccatggacggagtagggcagcgaccttagggactgcctcggcaaggattggggtaagacacccatgcgaccaagctagtttccccacttcatattttgactaatagcgctgggttgtgggcatcgaggctcttg

SEQ ID NO: 77065 - DNA, 488 bp, Zea Mays
gtttcggaggattttgtgtcgcgggctggtctttcggtgcagaggctgggtcacccaattttggttagatctgctaatggctctattagtagctgctcagcttgtcaagggtgttctgtcattcttgctgatgaggtcttttcgaccaatctggtggtgatttccttgggggcattcgatgttatcttgggtatggactggttatcccagtatcgcgcggttaaatcctgcttctggaagacagtgttattgcaggtgccgtcgggtaaggaggtggtattcttgggaagttccccaaagttctcgctatccttgttggcgcaattgcttcctgatcgccgatcaaggaagtcggggatctttttctccatggtggtggagggtgaggctgcctcgcgggtgcaggacatccgagtggtgtgtgactttgctgacgtgtttctggtagagcttccaggcattcctccggagcgcgatgcagcttttga

SEQ ID NO: 77066 - DNA, 607 bp, Zea Mays
ctgggttggagcctagcttcgagctgagcatacccaccaccagttggagctttcttgagagagcatttgagagttcgagcactagctagcttgtaggggatgaagcaagcaaggcgtgggagtaacaagctgaagcaatggagcagagcggcgccggcgctgtggctcctgctgcctcttctagttttgatggtgctcaagacaaatctcctgccagtgcttgcacgatgtaagtctcaccgcatcatatcaaggttggacagaaaagatgtgtcagtttttgcttaatttgttacttgtttcactcccgtcgttaccatttcttttcaagaacacgcagttcattggaaacgcaccgtaagttgcgcttatatatatatagttaaagctagcgcagaccatctggttctgatatatgatcacagtgacacgcaattagaagcaactgtgtatatatactaggaatgatcaatttaattttgtccactttattttctcatacaaagcaaatagaatagtgatgttagcttcgcaaataagctaagagaccagatttcccaaagtcgtcataaatatccattcctcaatttgccgagctaagtttgta

SEQ ID NO: 77067 - DNA, 689 bp, Zea Mays
gtgaaatcaggagaaaattcgtccgcaacttagtctgtcaggccgactgaatgaacttcgcgatggtacattggccggattgggccgccagctcagagacctcgccgccggcgatccgcacatccgaatttgcgctggtcaccgtgattcgtgcttggcatgcagaggatatccatggaaaggtaaaagatctcataggggaatgaatttgatcgcggattgaagtttatcaccgtgcctgtagccgttgcgatgtggccagaccgccagcgtcgccgtggaagctccggtgaccttggttgcgccacgtcgtagcttgttactgtgcgatagtaatcgtggcacccttaggagtataatccttgagtcgttgcacgggtgaacgccacggtcacagccacccgtgttcttccctatctccggccgccagcacgtcgtgaccaaattgagagccaccgaccccgaatcctataaattgagcacgccctcggctccgccatgtagtcaagcactcaacgcacccacctgtgcctccgattagtcaccagagaactccaatttgggatttccccaaattggtcaagaacaccgcagaagtgagcttaccgtggccagctctccacaggtccgatcgtgttcccctcactcttgttctaacattcctgtgtgttcttaaagctcatcagccc

SEQ ID NO: 77068 - DNA, 630 bp, Zea Mays
gtcggatggagatgacgccttgtgcaccgttcgatcttgggccgacggtggtgatttgatcccaaggtacccttttcgtcaaatgaatatggaccgtagatcgtcgatcggtgggtggcgtgtggtttagagctcataaaatccttgtggtcggattttgatccgatggccacaatcccgtaccaattcggggtctgatccgagccgttggatctaatccgagtggctcaggttttaggataccccttcgccgagcaaaagtgcaaaagaacccctggagttttgtggaataaacccgccgtccgtatttgggggcgccgagtcttagggatgtttttaccaaaccccccctatgtttctctgtattattgcgcaaagtccagggaacagagaaaataaacaaataatcctagaaattggtttttagtattaaaataaacctaggaacttatttaatccttagaaaattcatattttgtccaaattgacccattctagttcctataatttaataataatgttttttatcacatggtgaaactactttaacatgaaaatggtattaaaatatatttcttaattaatcttgtacaaaatacataaaacctttagaaattcataatttaaaat

SEQ ID NO: 77069 - DNA, 466 bp, Zea Mays
gacccttcctatactggtcgtcacgcactgagcatgagtcgatggttattggttctctgttgaataccaaattctcgggtgcacgcaagcgcatctgctagatgtagcccccgagtaatccatgtggattgcttgggggtctgttcggtgtgtgtgcagtttaggggtagatcctacctataatggtcgtcttgtgctcagcgtgagtccatggttattagttctctgttgaagaccgaattcccaggtgcgcacaagcgcatctgctagatgtatcccccaagccctcaagtaatccatgtggattgcttaggggtttattcggtgtgtgtgcaatttaggggtggtcccttcctgtgatggtcgtcatgcactgagcatgagtccatggttattagttctctgttgaaggccgaattcccaggtgcgcgcaagcgcatctgctagatgtagccctcgagtaatc

SEQ ID NO: 77070 - DNA, 881 bp, Zea Mays
acaaggatcttcagacgttggtttggctctaaagaaaaaagaaacgcctgagaaagctaaatctactactcccgaagcaccttctgaagatcttgactttattatttgacatgtttcgggtaaaaggttgtctgaagaagaaattgcagaagccaaacactacgcccgggagctgaagtacccgaagggggccttggtgtacaatggcaccgatgaagatgattttctatactatctcctagacaacaaggaaatatctgtctaccaggagatggctagtgaagccaatcttgccgcgcagtccgaagctcatagagccaaaattgaagatttgaagaaaaagcttgccgagaagaatgaagatttcgaagtgactaaggcaaagcaggagataagtgattggactagcgcaagattacaaaagaacgtagatgagcttcgggaatcaaaagaaagatattacgaaaaatccttggattgtgccaagaagctgaaagatagttttgcaaaggtgggtgcctactcatccgagcaaaaatttattagaggcgatcccgaagggattatcgaatggatcgatgaagaagctgaagcttttgaagagatcctcagcgtccgtggtgatttttgcgcttttgctggtgccagaggggttgtagccatttttgaaaaatctggctgcgaacacgttaaagctgcaacccaaacagaggctatttttactgtggataacacgaaggatccttcggttgaagctactcaggtgggcggaaaattttactccaacatttggatgaaaggcggccgagaattggccgccgaagctataaagaagaatgagaaagaaactcatgaagctcgagaagaagccaagcgagtcg

SEQ ID NO: 77071 - DNA, 2367 bp, Zea Mays
ccgagcaatagggtgtatatatatgtgtaaggctatctccaacaaattacttatccacatctttttattttaaaagtctacagtacgaaacattattttacacgaccatatatataatcttgagatcatagcctaacatctgaaactagcaactactagcttttttagataatggaagtaatcatccagccttggcttcaaagaagctacagccccttattacaatactcaacacgccatattgaccaagttattgcagaaaacaaagtttgataaaaagcacctaactacaaatcctattggtgaacctccatccatacttgctgaaaatctccatgacgacattctccatcttcagacacgttgtctttatcaactctttatcatcttcagccttctgcatttgactccagaagttgtttctctgtaaattacctgcataaatgttttcattggagatttatcaaaaaccacatcatttctactaagccatattgcccaacaaatcgccgatgcacccactagtagaagttgtttcaatctacccccaatcccattaagccaggaactgaacatatgcattgtgttctgtggtggtttcaacccaaaacatatttcgactaaaccccatataaaacgtgcatttttgcactgaagaaacaaatgttgaattgactcattagctaggcaccaaacacattgcttgttaccattccaatttcgtttagcaagattatctttagtagagttactcccttatacatataccacatgaaaatcttaatctttaagggcatcttaagcttccaaatcattgtgtttctttcaaccaccccattattaataacagcaagatacatagaatgaactgtaaagattctattagctttcaaattccatttaaatgtatccttattatcattgagctgaatatgcattatactcataaccagctcattccaatttcgaagatcattatcttgcaatgaccttctaaaagatacatttaactggacagaactgagaacagaagctacaatatcattcttcttcctcactatattatataatgacgggtatttttgctgaaaagaaacattaccaatccaaacatcttcccaaaaccggatttgttgaccattgtttaaacgaaaggatctgaatctcatgaattggtctttgactttcataagtcctgaccaaaaatgagagtcgcctggctttctttcaattattccaattgggtaatttttgcaatacttatttctaagtatttgttgccatagcccttcctcattaattaatttccataaccatttggctaacaaacatttattcttaatctcaatgttttgaattcctagccctccttggtctttcggttgacaaataatgttccattttatcaacctatatttcttcttttgattatcgctctgccaaaagaacctagatctataatactctattttttgtagtactccttttggaacttcaaaaaaagagagcatgaacatagttaggcttgttaagacagagtttattaagaccaatctaccaccaaaggataggtattttcctttccaactgctaagcttcttctctattctctcctctactgttttccactccacatttctcaattttctaaagtgcatagggataccaaggtatctaaaaggaaaagaaccgtgtcgacaaccaaatagttgtacatattaagtttctgagtctgtagcctgaccaaaacaaaatatttcacttttatggaaatttatcttgaggccagaaagcttctcaaaagcacataacaacagttttaaatccctggtgtggtccaagttatggtccataaaaataatagtatcatctgcatattgtaaaatagataaaccatcttctactaaattaggaatgacacctgaaatttggttggctaattttgctctctttactaagatagctaacatatcaactacaatattaaacagaattggtgataatggatctccctgtctgacacctttctttgtttgaaaattggagccaatttggttattaacttttatagccacatgccctccttgcatgaaagatgctacccattgtcaccatttttgagtgaagcctttcattcttagggcctgttgtacaaaagaccaatttatcttgtcatatgccttctcaaaatcgatttttagaatgactccattttgtttcttcctatgcaactcatgaattgtttcatgtaaaactatcactccttccatgatattcctgcccggcaagaaggcagtttgtgtcggactaattactttttgagcaattttagtgactctattcgtcgctactgctagttgttacaca

SEQ ID NO: 77072 - DNA, 877 bp, Zea Mays
acgccctcaactttaatcgtcgccgccattgacagcatcgtcgagccgctgacgttgtcaatcttgcgcgtcccgcgtcacattggctcacgtccgcggtcgctatgtcgtccggaatccaaggtgctcgagttggtcttttaaatttatgctttacaatgcaacttcctaatctccttcctcccttccggcagtgtgaatcgccttcattgtccccgcgcgaactcaaccctaatcggcgccgccgttgacagtgtcgtcgagccagccgctgctgtcaatcctccgccaccgcgtcacattggtattttacacgcccgtcaacggtcgtcattgatcttactgttcttgtgcgattatggttcagttgtttatcatagagcctttagctttgataaaggttcacggacctgttgttttagactcattgaatgctcaaattgtgtgggtgaagatatatgcaatgatgtgaattatacatacctttatgaagtagtggttgatattttgatgtggaaacaagtgtgctgctcatgacttcgtgctactatatattattcagataaactgaaatgcatttcactttttatatacttactggatcatatttttcacataaatatggtcatcaatcatgtccaaattaatcactcaacaatcataaaccactacttcataacattagtaaactaataggcactgcctagatatatcttttgtgctacagctatatgaacatatatgttcaacttccaaaatggaactaaatcgaccataaaccacagagaaagagagaaacctgccatctatccacagagaaagaaaaggtagggatgagaatggcatgtttgccctctttagtggctctgaacaacaa

SEQ ID NO: 77073 - DNA, 416 bp, Zea Mays
tagcccacatttcaggttatggaagtacttgtaccactgcaaacccagaatggcaggggttagcatcaagtggtcgtccgtgccagccttgaactttgcccggggtaggaaagccaaatatcttgatattcctttgaaggatagcatcaaggggtggcgcttcgagtggttcactatggaaaatcacaagtctctgcctgctcgctctagaagacggcctgatatccgggtgtcaagttggatagaggccccaactgactcgaaggttgctgaagccaagatcctgctggtcgaggtcactggtttgaaggatagaggtttgattgttgaggttgtggtgattgactttgtcttcaagaacattcaacctttgaaggatagggttcaccctacctatttgtatactagggtgagag

SEQ ID NO: 77074 - DNA, 1058 bp, Zea Mays
caggttcatactctacgataccggtaaaaatatctgcgccaatgaaagaaaactcatcagctctacatggcagctaattcatgcctttggttcacagaatggagcataggaataatgtatttttttctattttggagggaaaatgtagaactttgcatccactcaaacctcttggtacaattgctatgtttttcctacagcctacccaaacgatcatttcttcaacattcatatgttttatattcctgacgaattcctatgtttttcctgttcttgtgtttttgtgttgctgtgttccaaatagaaccttacttggataaaatagatcatagacgcaatcgcattatatgcaatccattaacagagatatgacaactgacaattgttgctttggatatgcaaactgcaaacagtaattgctatggatgatgcttatatgaaactgaggcatcaagtatcatccgttaaattgtactgcgatctgtcagctgctttactgaagtgttcaatatacaaatgtaaagttgtatgcatccctctactaccattgttcaagttctacatcacaaagacaaaaaaaaacaaggttttcacataagcattaagcactgaaacagtgaggacaagcattctccaatcatcatgcaactggttatgatttatcactactagaaacataagaaaacttcatggaattaccttaaatgcaaggcattgaatttcatggaactaccgtaaacacaaagcatcaaatttcatataataattgattgtctattatacaaggatgcattttcctcatattatgcatgattttcttttgcaaacatttgtgtggtgagcacgcatgcttgtatgtaattagtgctttcctaaacggtttcaggcagtcgttcaaacctgtccaaacggtgaacggaggaacaccaagttatttagggccggcagtcccctaaatggttgacccgtctaaacggtcaaccatcggtctaaatggccaaaacggaacatgtcctggatagagctaaacggcgtttagcccgtttatcaggctgttt

SEQ ID NO: 77075 - DNA, 589 bp, Zea Mays
cgacttgagaccttttgaatatgtcttgagtaagaatctctcccaatacttcggttggagaagtagtggtcaaatcactccttactaacatggtcacaatagtgtcatatttctctggaagagatctgagaaacttgtgtgtgaaatccacatctggtacattaaaaccaagtcccttgagctcatttactatctaatttaatcagttaaacatgtcagacacactttcatcttccttcatgagaaattgctcaaattttcccttgcatacatacacctatgcactcttcagaattgtagttccttcatgaatttccattagcttggtccaaatctcatgagcggttgtaagatttttgatgcgattgaactcatttatgtctagagcatcatagaacacattcatgacttgatcattagttagaacattctcatttccaataggtgatggttcgtcttgcttcaatacaacaaacccatctctaacattaggccaaacctttcctcccatagctttaagatgcaatgacattcttatttttccaatagtcataattgttctcatcaaaatgttgtggcttccccatgt

SEQ ID NO: 77076 - DNA, 769 bp, Zea Mays
cgcgggcggagatctcggacgaccggtgtacttggccagctgcggactcggcatcgcgggtctacaagtaccctccccgcgacccgttcctcctctcttccatcctttcacgcggacccggacaccgtagccatcgcacgccattgctgggtgtcgaggattccgccgccgccggtggatctcgtcataccgtgtcgcctgccctcagggttaggtcgggggggttcgtcgtcgcctgcgtaaacctgtccgcgcccccaattcaagttggacaccaccgtggtcaagtagtggcttgccgtacttctccgccgccgcagacgcgcgcctcaccgtggtcaggtatcttgtgcatgttcctccccctgtaagtccttcccttgtatttgaatcatcctctgctgcgcgtagaacgtttcgggtaggagcattagtgcacgacggcgtggattgcttgcgccggtgatggcgccaccgtacaccggaagcggcgccgccatcggtaggaccggagagaggggagttagctgggaacccttgatctggcgttcgacggtcaggattagtcggtcgcgtaccccttcgcgggatgcaatctgggccgttgatcccgtaatgagcgcatcggattagattcgggattcttttatatcgtgaccgttaaaatttaaccgggcggtcgtgggaatgggtggttgagcgaggtgcgggatctatttgtggccctcggatcagatctgagcggcccagaattgagcttaccccttcg

SEQ ID NO: 77077 - DNA, 294 bp, Zea Mays
gtcaggaacacgacgggaaagactccatttccgcgggtgtacgtagaccaagctttagggtagcattccggttaaattagtgattcccagttagtcgccaaggtctgaattatgcgtagaccatattagggcgctgattattgcgtatcacggtcggtgtgagttcgccggagtacgcactccgtcgtccatcgtcagggacccgagtttgcgaagataagaaagaagaaggggcttggtgcacttgtcagtgagacagtgaatagtaactagggactcttcatcatatattcg

SEQ ID NO: 77078 - DNA, 912 bp, Zea Mays
gtggcgctgaccaaggcagcgatagcctcggccagagtaggaggtaccggtggcggattgggagtgtcctccctaccgcgggatgtacctgccccatcatatgcacgagtctaggatgacatctgaggcaaagtaacatttggaaaatataacatgccacacatacaccatctttatttcattgggaacagtagtaattatacatactccattatacaactccacttttcttacttattttacataagtacaatacttagactatactactctagtcttcttcatccttagctgttccgctgcctgcttcaggagaccgttcatctgcaagattcatgaaaggagggccccaaaaaggtcaattcccccatcagatcctccatttgttgttccagatggtccagctccccattgctgccacatcaggtggcaccttcgggtgcagccgatcatataatacatgcacttcttcatgcaaggtgttgcagtacgcttgcatgttttcgagggagaactaagttctgctacatgagctagagctttggcttcatagtcccaagcgaaagagcgcgagtgacggcccagtcaatggccgtatcaacgttccgaaatttcgtactgcaagcgattaacttcggctgttagttcagcaatgcggctactatcgcgcgcatactccctgcacccgtgacgtagttccgatctgaggtgatccactctggcctccaactccccaatagggtcattgcttccactactgctgtcttcatgcctggaggccagttgatgtcgaggcacagcctgagctccagttgatttgcggtgggtagttttagcgcgcgccatatctccataagaggggaagatttattagtatagtttagtcatgatgcatgcataacctaataatta

SEQ ID NO: 77079 - DNA, 384 bp, Zea Mays
tttaacgtacataccattctatatttaacgcaagttttttattattattatttttccggccggtccccccctcccctcatcacctgtgcttccgcgaaacaacgctccgaattcaacagtgtctaaattaagtgacacaaccctaaactttcatatgactactatataggatgtgttacacacgatcccgaggagatgatcgatgatggcggtggcgcaagtgaggagagggggaagggaagggaagggatgagggatgattcaaataaagtagttcatggggaagggagatgagttatccaactatctggaccgttgattttgatagtgtgttaagtttgagtacaatatgtttagtgaacttagtgggataatgagtatggg

SEQ ID NO: 77080 - DNA, 1051 bp, Zea Mays
cactgtatctctatcacttacaattgagcacagaataccatgaaggcgcacaatcccttcgaaaaatgccctagccacggtcactgcggtatatggatggtcaagaggaataaagtgggcgaacttagagaacctgtcgaccactgttaataccactgtcttgccaccaaccttaggaaatccttcaacaaagtccatggagatgtcgttccaaatttccgatggtaccgacaggggttgcagcagacctgctggatgtagatgctcaattttattccgttggcaagtggcgcatgcttgcacaaattctctgacccgtcgtaaggcctgtggactgtagaaggatgctctccatcgatgtacagtcttctcaatgccctcgtgaccacaattgtgtgctgctgccaggatttctgtccaaactgctgaagcgtccgggatgaagaccttcccttgaaatagtagcagaccatcagcttccgtccatcctgattttgcagttcccgctgtaatggcagcccgcaagcttaagacctgtgggtcggtggcagcttcattgcgaagggtgtcaaatagctgaaaatgtggtgccgagatgctgttaatttctgtggtgtcttcgtcgcgtcgagacaaggcatctgctgcaccattcaatttgcccggcctatactccactgacagttcatatccaaacaatttgctgacccatgtatgttgcggtattgtagacaaccgttgatccaggaggaatttaaggctatagtgatctgtccgtaccataaaagttcttccccataaatatggtctccaattcctcactgctttgactaaaccaatcaattcccgctcatacgctggtaatttctgatggtgtggtgctacaacacggctgaaatatgcaatggccccatctccttgatgaaggactgctccaaatccagtccctgatgcatcacaatccaccataaactgtttagaaaaatccggcatctgtaacagtggtgctgatataagggcttgcttgagttgaagaaatgcctcctctgcc

SEQ ID NO: 77081 - DNA, 378 bp, Zea Mays
cttttccacctttcagctaattcgtgttcgtatttctggatctgtggttaatgatctttctaattcaatatctatgtgcacaaactcaggcagtcaggctacatgtataccaccccctgtacccacccgttctccaatttcatatagaacaagttgttgcttgatattagcgtcccacttgaatgagtctctgtcaactctgtttgtctcttggtttctccgttataatgcttatatgctcccaagtcagttcatgtcaaccagtaagtgttcaataacattttgtttcaattgtgcataccatttgatatgtttttggtcatctcagcacaaaattttagtttgttttggctatctgttttatgaagaattaaacct

SEQ ID NO: 77082 - DNA, 314 bp, Zea Mays
gcctaatcacgttcgtgccccggttacctgctacattccctgaatatgctgtacaaaagggtaattagagggcgggacaccttctaccttagttacactagactttctacccattctgaggttgacaggcgaacccgttctagtctacctaggagtgggcccacctctaccaggtcatagacattgctcccatgtcctcactcccgccaagggggtgagatcaacacattcatctactgggaataccaccttgaagccttcgccttggggatccttcgccaaaataacactttgcagtcctttcccagccaggg

SEQ ID NO: 77083 - DNA, 1140 bp, Zea Mays
cttttcgtggatgagtatcgtgaccttggcgcgcagactgccccccttgatgaatcgggggaggaggtggggatcctctttctggggtggttgcaagatgagctggagtcgctcccgtctatcgtgacgggtctcatgtcctacacgtctctcattacttgcgagggggctgcgaatgctttgtcctgagagggatgcagacacttcgaagtcctcgaccgagcgaatgaggacttcgatcgtgaagttttccatattgaagatgacgtgctgaagcgctccgctggggcactttatgataggatatggggtccccatggctgctgcatcgtccgggaaagggcggaccgagcactgacacaagtattttgttggttttgcaaggggtgttgtgtgtgttcgttttttttaaaatgttgttatgttgtctacataggtgatgaacgaagaagatgtggaggacctcgctggccttgaaagctcggtgacccggagggatgctttggtggaggcgggagccgaagagcaaacgatgcttctaggaggtgccgctaagggtcttgcgacgacaaatgcttcagtgtaggttgagagaatgtaatatggggtagactgatagtgttagttttgtatgatactaaagatcggttgttgcgtaggttctggcgtccgggcctgcgcaagcaaaccctgataatgctatgagtgatgatgttatgatggatgcaaatgcgatgtctcttagtggtaatgtgtcgggggaatcagactttgggtcgtggtcttcggagggtggaaatttggggagcccttttttgtggatggatgatgaatcctcggaggacgatttagactattttgcggcattggatttagcagcagtggagtcttcattggggaccgccccccacgaagcgctggtgacttcgatcggtgcattctcaggtgacttgcgagggcgaaaaaggtggggtgtccaaacaaagtgtcggtgagtcttcgcaaggtgttagaagacatcgacgaatgggcatggagaggtcatgtcttcggatcggaccacggctggatcagggtgcctgtcgtgagttactggcgttgacgtctgggtcatgtatcgaggaaggggacctgcgagac

SEQ ID NO: 77084 - DNA, 406 bp, Zea Mays
gtgctacagcttcatgccccgctctgaggcaagttatctcgtgccaatatttcagaagaaatggtcgggttcttggatgaagcaatggttctatgtgaagaatgatctgagtgagagggaggatgtgaggggcattattcagtgtctcatatggtcgcgcttcgacattagaaggccatcaattgcaattgggaatgaagtgcaagcgtgcctaatggctttcaacaccgtgtgcacttacatcggtacgagggatttggtgcaagaacacattgcctacaaggtatggcctcttgtgaatgagtgggagatgtcgaaagaaattgctgctggctccagccaaggtggtttggtttatcttagatacaccttccagtatagaagccagtttgacgagccatatgac

SEQ ID NO: 77085 - DNA, 787 bp, Zea Mays
caagcgggtggaagcttacgtcgacgatgtggttatcaagacagaaaacttggaaaacttcatcgaggatctgcaactagtcttcaacagcctaaggcgctaccggtggaagctaacccagaaaagtgtgtattcggagtaccagccggaaagctgctcgggttcattatcagtcatcggggaatagaagcaaatccagagaagattgaggccatcatgagaatggaaccacctcgatcacagaaaaaggtgcaaaggctcactgggtgcatggcagcgctgagcagattcatatcaaggctaggcgagaaaggaatgccattctataaattgctcaagaaggtggacaaattttagtggaccatagaagcacaggaggctctagaggcactgaagaaattattgaccactccgccagtactcaagccaccacgccgagctacgcccggtcagccggcagaagatttgctattatatatctcttgcatgactcacatggtaagcaccgttagtagtccagcaggcggaagaggggcacacatacccattacaacattcggtttacttcatcagcgaagtcctcgggccctcaaagataaggtatcctcaagttcagaagttgttgtacactgtacttctaaccgctcgcaagctccgacactactctgacaaccacaaagtcatagtagtcacaggatttccaatatgcgatattcttcacaacaaggaagctattgggagaacagccaagtgggcgtgcgagcttggagctcatgatatagagttc

SEQ ID NO: 77086 - DNA, 706 bp, Zea Mays
acagtaaaaagtttgtttcctttgctgatattgctcgtaaacccgctctgtcgggtgcaaattatgtgcctctgggcgttcggaattttctaggctatcaaattcggctgcaaagtcaagatcttcagttttcaacaggatttcgtatatgaagcatcactccaatgatcgaactggtttctgtttaattattcttctcgttcttcgaagaacacagcgaagaacccgcgctggggtggcagaggggtttctggacattttcaaattcaaaattaagtaacgggcgcattgagagtcaatttaatctgccaaccttacgagattctcgctctcgtccttggacccctagaagctcttttggcggcccaagaaattattaggcccgcattctcattctcaagaggttattgggcaggtagctggttctaccaaaatattgcccctcaatttagggatgtgtgattcttgtaatggtttgggaccttctaattctatcagtaaccaacaaattttcgggatttctaacagaattgcatgcggtcttttgattccttccttagtaagtttgagaatgcagaatggaactcttccccacgaatttggttcaggtcctcttctctctcccttacttgtgggcctttgtccccgcctcgttataatagttttggtgagcttgcacgggcgatttcctcgagaagtgcctctt

SEQ ID NO: 77087 - DNA, 564 bp, Zea Mays
gtgttgaaaacactagtgatgaactacatggagcctactccaagtctgaagataacgcactatctgcggccttcgggagccgaaaaaagaagaggttaaatagagtttttgatgctattgggttcatgtaccctgactaccgctacccgtcacggggtcagaaaagaaagagtgcaacttccgggaaggatgatgcttcagctgctccaagcaaacccgcgccgaagagaaaaaaggtgaaggttcttactcaccgaccgcgctatatgaaccagccacagtgcctgaatttggcggtgagacctcttcggctactaaagccaaagaacctgcgcttacgcagaggattgaagagccggctgcaaagccgaaggcatcctcagtcaaattagctgagccgaaggccgataatattgaagagatagcggtcgaaggaacaaagatattagaagttacaagccctttggcagaagtgacagtgtcgaaggcacaaaaaggtcttacagcgacccctaagaggaaaagaatggtcaacgtactagatgcgctggagacaataaagac

SEQ ID NO: 77088 - DNA, 923 bp, Zea Mays
tgggaacttgctattgataaaaaatttgcatgacatgcttttcctgcaaaccatcaagttatagttgttactagtgagtttacccattttgcttctatttggtggcgcgaacactgcaacaaacatcccaccgaaattactaccacttgggatgatttaaaagtccttatgcaccacaaatttgttccctcatactatgctcgcgatttgcttaataaactacaacatttaaaacaaggcacacactctgttgaagagtactattaggagttgcaaactggtatggttcgttgtggtttaattgagaacaatgatgatgatatagcacgctttttgggtggtttaaactgtgacatttaggatgtgcatgattataaggagtatactattattactcgtttattccatcttgcttgtaaaactgaacgtgaagtgtagggacgacatgcgaggacacaagctaacacttttgtaggtcgcaccatgtcatcacactccgcccctacgattgttgtcgtgtcaccaccagcagcgccatcgtcatctagcagtactccacgtgacaaggccgtagcaaaaaggtctagcgccaactccagcaacaaaggtgcctctttctctagacgcaccaaggatattcaatttcatcgttgtaaagggtttggtcacatgatacgggactgccccaataagcgcacactgattatacgtgacaatggtgagaaattttgagctagttattccgaagaaaccatatatgttatgcttgccactgacgttgcagaaacccaagaagaacatgtggatgccacggatgctgacaagtatgagagtcttgttgcgcaacgcgtactcaacatgcaggttgcacaacccgagtagcaccagtgccacaccttgttccataccaaagttgttgtgca

SEQ ID NO: 77089 - DNA, 849 bp, Zea Mays
cccgggcgctgcacccacgctgtggatgttgtccagtgtccagtaccggagctccctctttcctttgtgatcagcgtcaaaattcaggtcggtggtgagcggcgtcgcaaactcaatgagtggcccggcaagcaggtgttgctgtctgcggagtcacagctcgtggagcagtccatggcgaagtaggtgtagacgtcgtgcccggtgcagccggtgcgcctgtagaaggtggtgtgcccggtgaggatggtgttcctagtgatgacaacctaggtacaagcacctcagcgtggctcctcaggttgtagtcgtattccaccgtgaaggagtcctcgctccctgctgccaatgcttctccccagtcccagtgcgcgctctcgtcaaagacggcgtcatgtgagacatggacgcgcttggtgacagggttgtagaaatgatacgccttcgacccgtcctggtagccgatgaagacgaccttttgcccgcggtcatcgagcttgctaaggcgtggacgtaggttcttgatgtaggcaacacacccgaacaccttgaggaagtgcacgtgcggcttcttcttgtaccatgcctggtacggtgttagcccgtcgagcgcgctggtgggcgcccagttgaggaggaagacagcggtgtgcaccgcctctccccaaaggtaccccggcatgctccacacacgcaggatactcctcgtcgtgttcactatcatctagttttggcgctctacaacgccattttgttgtggcaagtacggcgctgagtagtgtcgttgaatgccttctcctgcacagtatttgccaaactacacagatgtgaactcaccaccattatcgg

SEQ ID NO: 77090 - DNA, 341 bp, Zea Mays
gtttaactcagttatctaaaaatgttcacttcacatttacattcaaataagacaaataaacaggtaaccttccaaggacacttgagtaaacaccatatcaagataatcattatctccctaaaaataagaaatgttaaacaataatttaacaaaggcttcaacagctacaattacagtttacacagaccctccaaatatgatggacatataagctctatctacagagagcaagaatagaagtgtatgcaaatcaaaaagagagcacagactgtacgcaactggaaagccatcaaggtagaccatttcttcataagatcaaaagaaatctaggccataaggcc

SEQ ID NO: 77091 - DNA, 440 bp, Zea Mays
tgtcatttgcagctaaagtcggggagaaatcaatcggatataggtgtattcagatcaggcttccaaggaatcagacaaagtaaggtgtccgttgtcaccacgtcgtcctggctgtcgatgtcatgtgcgtagtctcccaaacctacgggacggagaaacgacaccctctcatcctctcacaagaaaccatatacgtataatatagtagcatgatttcaatgcttaacgctatatgcagtacgcaggtaggtcatcgagagtaaaccatacaattccatcaccatgtactcctacggtgaagacgattctggccttatgagaaggcgaggcccgacagcccaatacacatgagaggagctgttccgagagagacttccacgttcccagctgtcttgactcatacgagaggtcgagagagacttggatcgtctccacgcacc

SEQ ID NO: 77092 - DNA, 684 bp, Zea Mays
cactttcagcgactacaatgacgcatgcctgggaataacagctactgctcccccacgccgtctgccgagttcaaacaactccagatgggacgtgcgtatggcagagcacagtctcaccctcaggagggaactccgcctcacccaaagtcggcctcgacctcggagaaaactctgcctcgctcaagctcggcctcggtcaactgccccctatgaatcctgcaggaggccactccttgaattgttccctgcacggctgcatgtcctagagtaggcttggccatgacctcgggaagactttcttctcgcccgagcgtggcttcggccttgatagtattgacaaaaggatgcccaacgtaaccagaagctacatagccgacgtcaagatactaagtgctttttgccatacttatcactgtttcaaccactacgactaggacaatatgttctccagacaagctctggtacgcgattgagccccagaccttgccctcggctctctgctcggtcaaagatgcaaatacagggaccagatgtcctcctcctagctcaaatcaatagcaggtacaaaggccataccaaagtccataccggctacaggggctcggacacatcttagctcccatacgtgacaaaccacggcgctctgggagccctccttgaggttataaatagaggagcccaagg

SEQ ID NO: 77093 - DNA, 614 bp, Zea Mays
ggctttctttaatagttgctatcctattaggaatccttgcattttgttgaatgtaatttactggcatcctcaacattattctcacaacctaggttttacattttctgcatctctttatgctttcatgcatatccaaatggggagacctcttttgagggtgatttgtagtttctatgcttatgggcgatgcttgctgagtgcacttatcaaaatgggggagaatatacacatacacaaatatcttgttgaggaggcaatctttatgaagcttggagcacttcttcaaggggagttgtatctttcagggggagttttgggagatgttttgctagttgtgttgagccttttccttgctctcgagggattagcattgctttcggttttacgacaacattttgctatgatcattggctagtggtgttgagccactttctacctcttcttaagaaagatgcagttttgctttgttgtgttgagccatttgccaatgtctttggggagcaaactttgctcactcccaatgactttggtctctccaatgacttgtttctttcgcaaagtttattggttctattttctaagccagtctgctcctcctttctattcacttctcg

SEQ ID NO: 77094 - DNA, 531 bp, Zea Mays
gacgaagctacttccaaagcccaggctgaagcccagaagtgcgaaattgaagatcttcagaaacagctggctgaagcgaagttaaagtgtgcaattgccgaagctgaccgagacgccagtaactattggaaaaattattgggagaagacagttgtagaacttcggtcttcaaaagagaaatgttatgaaaaatccatagagtgtgtgcaaaaaataaaatctagcttcgccaatgttggtgcattctctagcgaggacaacttcataaggggcgatcctgaaggcccaattgattggatcagcaacaaagttgaagcctttgaagaaattttgagtggtcacggggatgtctgcgccttctaaggtgccaggggaatcgtggctattttggagaaactaggctgtgaccacgtgaaagctttggcccaaaccgaagctaccttatctattgaagataccaaagacccctcggccgaagcaagcttagttggtgggaaattcttcactgacatctgggaaaatagcggctga

SEQ ID NO: 77095 - DNA, 481 bp, Zea Mays
tagcctttgtgttgtggggcgtgggctaatgcatgtttcttccgatgaaagttatgcctgagtcattcagaaggctggttggatccttccaagttccaacccggccgggccggttgtctttgcccaagccacagctccggcatgcatgctaatctccttggcccatgcacacacacacgcacacgcaaatgcagtagggacgaccactgtctgtagatgttgcccccaaacatgccatgtgagtgcctcgtcgctttggtgccttaaggtcaaaacagttccgagggtatctgcaggctgatttcgcctttccctctgcaagtggtcgtttgccagttcagtacctgatggctgatgctactctacttgtagtagttcagttgcacttctcgttaggtacgtaggagagactttgcgtgccattgactgctaacatgaacgagcttgctggaaaaactttgcttattgaggctatctccag

SEQ ID NO: 77096 - DNA, 493 bp, Zea Mays
ggacctaaccttacccaatccgcctgtttcgttctctcattgcatgcctcccgccatcatcacgctgcactgcctgcttgctttgcttccatccatccctttcccttggttccttctcccttctccgatccatatggtattgctgctaccaggatattggatgccacacaaccatatgacgttggatttccggcagcccaaaatttagattgcgtacccctgcgctaatacgattgggagaggcctctgaatttctggttagattcccgccagccgcagcgcgcgcgacgtggctctaaatcaagagacacagacttgaatgctgctgctgcagcagcagcgacggtcaaggatcggtcactgcggattgaaaaggagtccgttaggtttcccgccggaggcatcggcggccgctcgttaatttgtggtacgcgccatgtcagggaggcaagaaggcgcatccgcagccacacgtactgtctcttccttcccg

SEQ ID NO: 77097 - DNA, 469 bp, Zea Mays
gaagatatgagttcactagaggtgcccttaccagcaatcgcgtagccgaagccctgctctattttctctcttcttgcatctctctcctccacggcggcttgttcgcccacacggttccggcgaccgagcacccaaggtggcggcgcgaaagaatgcagggcagtcgcagcgtcgagccggaacaggggttctccagctctcggttcgtggtgaagtatctcgcttgcttccatggactcaacgaaggatacgacacgaccctggcaggtttatatatcctggaggcgaactggcaaagcatgaaccagggaatcagcggggaagtttgttacggaggtagttatggttcgcgtttgttgcagtagcggattacggcgagctctatccaatctcgggtagaaggacctggcaactcggtctatcctatccacgcgaatcgtaaccacccccagctggcatgggcctggcg

SEQ ID NO: 77098 - DNA, 976 bp, Zea Mays
gtcacatgaaaaatttgaagaaaaatgagcccaaagtcgagttgtcacactaccttaagtctgaattcagactgacagtgtggttgagcaatcattgacccaggattcgatcatgatctagtaagaatttgtgagtgattgctatagcaagattgtagctggtttactaggctataactttggtactgagagttgattcagtcattacataaaatctggagcaaatcgatgccaaacatgctctgacacgccgactgaatgagctgcgcgatggtacagtgtactgatcaggacgccaactcagagatctcgccgccggtgatccgccattgcaatttgcgctcgcttgaaagattcgtgccacgagaagtatggataacatcaggtgtggtgagaatatccagcacggggtgaatccggtcgctggccggactagtcgccgtgtcccaccgtggttagtcgcgctggcatcatcagagtcgccgttatccagctaggctacgtgcctcaacgttttaccacgtcgcagtgagtcacagtaagccactctctgctactggttcgtcgccggtgaggccgccacggtgaaggccatgaatcaccgcaccagcgactcattccttctcagaccaccacctcgcccaacccaaattccctggccaccgctcaagccttctataaattgagtgcacccacggcttcgtaggataattacacatccattgcaccagtccttgctccggattatccaccagagcctcccaatttctctcttcccctaatttggttctccgtgccgccgtgtgtcggctcaccgtggtcagcgaactccaggtctgttcgtgctccctgcacacttgtttcagcaccaatacctgccccggatactcctcgaccaactcaatgagctaagctaccttagatcgtcgggaacgcgttggtttggccgttgatcactcggtcatcgtgggcatag

SEQ ID NO: 77099 - DNA, 782 bp, Zea Mays
tgagggtttttacactcaaaattgaatgtttttacgctcgaacctgaagatatgtcatctagtgtaccgtatgtcaatttctatgcctaccataattttttcgaactaaaactaatcaacaaattgtacatgccataaaatatcgtccctgttgtaaattagatctcgcatgcacgcctgatcaagctatccctaatttttgccacaaaatcgtatctgccataaaaccgcccctaattttcagctgggttgttggttgggcccatattagaactttttcatcgattatgatgcacggtgtagatacttatataactttatttaaggatatatgcttcatgcgatactttccatctattttttgcgtgtatgcagtggaaacaaaaatatcatccaaaatttgttcgcatgcaataaaaactcccacaacctgccataattataggatctattataagaatatgaatcacatgtagccggtggcgggacgcgcccgcacgcatgcatattcctggtgttggttgggcgtggtgcagggatggctgggacttcttataactattggaagctctgagctcccttcaccagggaccaagcacaccagctattaggagttgaaattggtccacgtcgcacttaatgaggttgatatgtccgtcgcccgcaacgcgcaccatcaagtatttagcgattcatggtttagtttatccattcgatgtttacttcagcaattcatggtttacttcagccattcgaggttcactttagccattcaagatttc

SEQ ID NO: 77100 - DNA, 650 bp, Zea Mays
attggaatggattaatttgggcttaatatgaattttctatgatttacccaagttttacaattatttttatactcaaaaatcaatttctaatcctattttctggttttatttaattcccggactaggcctcaattactgtaaagcgcagggggctcggggtaataatctgcagacacagggaacagtgggagtggacggcgggtttattctgcgaaaccagggggttctttatgtaaatgtgcacaccgaaggggtatgggaggatctctgccgttcgatctaaagggaacgtccccgattagactctacacctgcgcgaactggtacgcgccagagccacaagatctgaatccaacgccgcagatcaactctcccctcttttaatccacagcgttcatcaacacttggacgacgccgattcacctaggcgaaacggtatgtccccgtctaatccagaccgttcaatgaaggatcgacggcacaggcacgttcttccacccgacggccagggtccccagttcacccccagccgcgacggcgatacacgccggagaaggtctacctagcggctcggcgcccgacactttcgaagccggtacgattcacccctgcgtggcccaacgaagctccccaacaagattacgaccacc

SEQ ID NO: 77101 - DNA, 334 bp, Zea Mays
ctgatttgctcttgcagtcactagcgattgcacatatggttgaaacttcagatacacttgatcgtccacattgaaggctcgctcagatagtcagatctttttttgtcagcttggcgcttgatacgatcctgggtgcgaaggagatgttgttgcaccagtttggtcatcacctcacgatcctccagccaagaagtcgagtcggcattacgtactgctgaagtagaatgcaacccaaagtgccgtggaggatggccatacaatacctcgaacggagaccttccgaccgatgaatgaaaatttgtgttataccagaattttgcaaccgacaaccagt

SEQ ID NO: 77102 - DNA, 619 bp, Zea Mays
agaaaatgtagtggctgatgctttgagtcgtaggggtcaagtgaacaacatcactactcatttgatgtcacaggaattgtgctgggaaatggaacaactcaactttggtatgctcaataatatggaagcaacggttatggaagttgaatctactttggaacaagagattcgtaaaggacaggaagctgatgagaaaattaaggaaattaaaactttgattgggttgggtaaagccccagatttcacagaagatgatcaaggcacagtatggtttaaaaagagaatctgtgtaccggaaatcgaacacctacgccaactaattttgagagaagctcatgattcggcttactctattcacccgtgaagcataaagatgtactaggatctaaaggaaaagtattggtggtacggtttgaaaagagatgttgcttctcatgttgcattgtgtgatgtgtgtcagcgagttaaagccgaacaccaaagaccagcaagattactacaacctctcaaggtaccggaatagaaatgggaagagatcggtatgtattttatagttggactaccccgtactcaggatggctatgattcaatatgggtcatagtagacaggatgactaaa

SEQ ID NO: 77103 - DNA, 375 bp, Zea Mays
ggtgcagacatgaactgacttagaatatgaacaacataggagatatcaggacgagttatgccaaggcagacaagactgccaacaagatggcgataacaagtgggatccgcaacaggaacaccatcgatggcacgaagacgaaggtgaagatccatgggagtgtccacagaacggtgatcggtaagaccagcatgatcaaggaagtcctgaatgtatttgcgctgagagaggtaatagccatcaggtgtggaggtgacctcaatcccaagaaagaagctaagaggacctaagtcagacatgtggaactacgcacggagtcatgccttgacgaaggcaatgtaatcaagatcatcaccagtgatcagcatatcatca

SEQ ID NO: 77104 - DNA, 401 bp, Zea Mays
ctcgttggcttggctaggtaggtatgaatgtgtgtttagaacaagaactatagttgagtcacatttatgcatgattttactgtttttacaatttaaatgcgatgggcacgaagagattcagaatacctcaattgatttggaagtttacaaatatcgccaacttgatttgtgtatatctgatgtaatgtcgaggtacatattttattttaggagcatcctcaacattgtttcgtaaatcgtaataatatacattattttacttctagataccaaactttggctacgctcataaattgcaaattttaaacatatataaccatttatttctagcaatctgaatgtgtttccctctccctagttccacgacaactgtggaaccttaggattcaaatgcatcgaga

SEQ ID NO: 77105 - DNA, 552 bp, Zea Mays
gcaggcccaattgagattatcaaggttgtgtccgagttcctagatgtgtttccaaaggacttaccaggtatgccaccagagcggaaagttgagtttgctatagagcttcttcctggaaccgcccccatctttaagagagcttacagaatatctggacctgagttggttgaactcaagaagcaaatcgatgagctgtcagagaaaggttacatccggctaagcacctcgccttgggccgcccctgttctattcgtggagaagaaagatggcaccaaaaggatgtgtatcgattattgagctctgaatgaggtcaccatcaagaacaagtaccccttgcccagaatagaagatttgttcgaccagttgagaggagctagcgtgttttcaaagatagatctgaggtcaggttatcatcagctcagaattcgaccttcagacattccgaagacggcattcattaccaagtatgggttgtatgagttcactgtgatgtctttcggtctaacaaatgcaccagccttcttcatgaacttgatgaatagtgtattcatg

SEQ ID NO: 77106 - DNA, 350 bp, Zea Mays
cgagttcatattttttctttgttcccttcatcttcggcatcacccaatcactggatgttgggtacgtccggttggctaggtattcctgcaccaagtccctggtgccgatctgttcagccactaccctgaattctaccttggccagctggcatgctgaccctagctgcatgttgcacaggggtctggtcattccgaagcttaaagtcagcgggcacatgaccatcgtcatcagttcccccctcttcttctcatcgtccttgatatagaaccattcacctttccagccggttggccatttggtgcggtagctaagaactggagccttcgtatccttgcgatatgcaaaattg

SEQ ID NO: 77107 - DNA, 681 bp, Zea Mays
catgttccaaacaaatgagattttcaaaaagagcaaaatgtggaaaccctaataccaaccctaattgagctaattaagtagaattgatgaaaaggggcaaaagactaggaaaaatataaaatcatggcctaggccaaatataaacattgaagtatactaaataagcaacaataaagattatggaagcttggccaaaataatttaataaaaactctaaaacaagcttctcaagtgagggtttaatagggatttctgaaattcagaattctgaatttcagcccttgagctaaagaccgagcgtgttcaccttgatccctagctcaaatcctaatgaccccattgacaaaaatgtgcctaactaacctctctatctcaaatcagaagatggcatcgggacgcatgccttggacgcgtcaaacccgcgatcttctctctgtgcgcggcagtgagacaaaccagatttctcccctctctatctcttgatccagtcagcaaaacctgcaagcctccacacataaatgacaaaggaaggtcagaggaagagatctctcaacgggatcatggccataatctcaaagatttggagccaatccgcgcttgaactcaacctctctctgcgctacctcgtgctcgacgccgtgccaggcgccagagcgtgcactggcgttcgcccgcgcacgc

SEQ ID NO: 77108 - DNA, 866 bp, Zea Mays
catttgagtcctagaggattgggacgcttcacaagcgaagccacctaagagttttctccagaagctaaggcaagcttgtaaagaataatcaccaacaagaattcaagggctgacaatgatgaaataaaacaaattgccctcaaatgggtagataattgtaacattacagttcaaggtagttaggatttgtacacgtattatgaaggtaggaacccctataaatacccctagacatgtgatgttcatggacaagaaatatttatccaatagagtcattatggtaattacctatttgggttaattcattcaccaacatcggatgcccaatcatttgtgtgcactcgctaatagtgcacatgaccataaacataatggctagagtcatgaagaagacaacacctagtgtaaacgaaaacaattcccccataacaatgaaaaccaagacttcgcacaaacataccaaaatcaagacaaagcagaagaacaaagataaaattgcaagatcaactacaaaccaaacaagtagaacttaaagactagcagagaagagcaagggaaaatcattaaagcaaagaatctaggaacttgaagccactctttggcacctaaatgacaaaattcacaatattagccaagatgacatacatgacgataatccagaatttgcagcaaaagctttgcaagaaaaaaactcacaatgatcatccatcaccaataatccaacttatccactatcaacaaacctgttgatggcacaatggccattaggctagaaattcaacatgctcccaacttatgatgcccagtttaatccaagacaatttcagatgagctttgaagcgacagtaatctcagggggttgaaag

SEQ ID NO: 77109 - DNA, 666 bp, Zea Mays
gttttctattcgtaggctggctctccatgaataatcttatcttgtctaaaacgtatttctttcggagcgccagagatttggcttcccgtatcttcttcgtcttcatgcaccttcgatctgtccgtacgtgtgtctcgatgcaagctcttgaattagctttaatttcttctctggctttggccggtaataaccatgcatgtcatggaaaactttgaatatgcatgcggatttcatcaattttagactttcggccagagaccttcttcccagcaacgttagttccaaatgaatttgtcgaaatggagatcaatgatcttattacgtagatatatgtacatttagctcgagatttaaattttatacacaccggagactcttttatcctggttggtaagatagatcaaccgaccaaaaactaaaaaaaaaaaacttgcccgcgccctcctcctccacttcctttcattcgtacgtagccactaagatcgagaaggaagaaagctgcttgctttggccactttataaatttcgaccagctgtttctctcaaaacttacctacgtacagagacgacacacacgggaaaccaaaaccttcttgtcgatccggccggctgctgctgcgacgcaacgcaagccaccaccatcaaaattcaaaagcccctgccgaa

SEQ ID NO: 77110 - DNA, 330 bp, Zea Mays
tcggcacaacggctagttgaatgtgcatattttccagattttggccaacggctatttaggccatgggggctataaatagaccccctccatacctccatcaaataggaagcaagcctctacaagtgtatactcatattctagcaaatgtttagccctctctagtgtgttccttcgcaagatcaagtgattagtgtgtgatctagtcatagagagaggcatgtgtggtggagggctacatataagagctagtggtcatcttgggcaagcgttcgggttgagttcatcatccaatggagagctaccaagttgtggttagcctcaggatagttg

SEQ ID NO: 77111 - DNA, 386 bp, Zea Mays
tatacacgtggctcgtacgtggtctggtgatgtcgcgtcttgtccacttgacatggcttaattgaatggggtcaaccatttcctctcacaggtttggtcgctagggagctagtcgtctgccctgcctcgttttgttgcttggtggggacttggtcgcacgtcatgcctcgctaggttacatggagaggacttggtcgtccgttctgcctcactggtgtgctcggcagggacttggtcgtgtgtcccgtctcgctgtgttgttcggcggggacttggtcgtccatcccacctcgctaggttgctcgatggggacttggtcgtccatcctgcctcgctaggttgctcaacaaagatttgattgtccatcatgcctcgctgggttgctt

SEQ ID NO: 77112 - DNA, 291 bp, Zea Mays
gaagaatctacttcataatggtgaggtgtagctcccgtggatcatgcatatataagcacacttgttcaatggtatatgggatatctagactggtgaagatggggtattcaagagcgccaatgagactcctataagcagtggggtcactaacagaggcgccatcgtcagaggagaccttggaaggtgtatccactcaggtggagcaaggcttgcaattagcgatgctagcccgctcaaggttatccagagtgtacattcacggaggaacatgttgcgagacaggtgctcaac

SEQ ID NO: 77113 - DNA, 318 bp, Zea Mays
attttccatagcacgatgtcgcaattgagtcaacctcacctaaatcatcggctgcaaatgggtctttacaaacttagtcgttatacagtatgttgattaatacattcatgacgcaaccacaaccgcctcaacccatttgggacaaacctgtgagcctaggcatggccggaccgtttgggcctgagctcagatcgtccgtcccagcagtggctaccctcgtcttccaagatgaaccaacaagatccacgccaggaccaccatactccgcggaagggctaaagacacactcagaccatccttgtatcacgtcgaaccgtc

SEQ ID NO: 77114 - DNA, 1720 bp, Zea Mays
ctcgtcagcatggacctgaggatgtttggcggaaagtgccttcccgatcgggccgccgccggcggcacgtcgaagcggctttcgtacctccacggccccgtcgtcttgcaggtattgcataaaaactctaaaatcacagtccccaatgctctgcaccggttaataatgtgtccgaaactaaaggaaagtgcgttatttgtatagggatagggtacctattcaatttgttatatgtggctcgatttaggtggacattgcatttgtgctctacaggtaccacgacagtggttgtactaatactaggggaaaagagcattgtcaatgcagttctctgaaccgagtctgtgaaacctagctgtatgtttcagacgatggaacagatgacaatcatgtctgctttgcgcttgtggatcaaatgtgcattctcatgctactataggagattttttttttggtcatgtcttggatgtgtttggttcctttaatcctgtacctatgtttactatttccatgatctattatttttgatacagatagtctctttaagagatatatatcacagcagcattgatgcgtcctttaagaacccgcagcagcgtcgccttctgcgctttggtctcactgatgggatatgtgaagcagtagccatagagttttctcccatcccattcatcaccgaagagatagctccaggtaccaaggtcagttgaccgtgttctgcttctacctcaattgtttttgtagacaattttagtcaaatttgatagttttcaagtgtaaactgtacatactttcctccctctgccactgcctgccatctgggtattgactattgttcatgacttcttgttcagttctgagtattaatgccatcagtgccagagaccagagagtagcttaacaacatttgattaaattctgagcatgttagaaatgaataagtaaacaagaatactcaggtagctctttgtgcgacagtatactatccttcagaatgaaaacaaactttgaaaaagataaagtaggcacactaatatttcaacttaatgatgtaaacaacttatttttgatgatgtggcattaacatggggttgggagatagcattcaattgttcccattggttacctgccactttgcaccatggtctgtctaaattttcttatgctttttctaaacctcaataggaaggcctaaaatttggctaaaaatgatacattattgttctctgtgatcatttgaagactggtatttacacttcctcaaatatacagtcgttgcccgcctgcagttcattaaatactagcattgacatgcatttttttacttttcttgcccctttatagattcgcctcgagaatagggttccaatcaataatggcatattgtgcttaagcgcgaaaaatgtgactgttattgggggggctgtccaatcattgtatgaagaatggcagatgaaccagaaatactctggcttatcccgtccatcattgaggttgtctccaagtgatgatggagttgggcctccaccatttgagaagttagacattgaagcacgcccctgcagggaaaccaaagttcaagcatatcctggtaatggttaataccctcgttttcactcctgcactcatgctgttcactaaatagatgtggaagttatgagttgcttgccttaagtaaaatacagaaacacaacaacacagcctttttatctccactccc

SEQ ID NO: 77115 - DNA, 348 bp, Zea Mays
gtggtcttcattgatggaggagcagttggtggcttgctagatgatggttgctttctttcagtggctgtcctagagagcttccactgcagatgatgagttcttatcagacacgtatatctctacacaatcatcctcatcaacttgatcttcttcctagtcacctaggtacaatgttctacctctcttttcactgtccaaagttgccttcatttcttttgaaatttctattgtagtgttgtgacacttaacaatatctttatatccacccactaaacgctgcttcaacctcttgattcctcatgctaccttcttattgcaaagagcacatcggatcacctctcacttgtt

SEQ ID NO: 77116 - DNA, 283 bp, Zea Mays
ggagtatttcccctcactcaattgcgcttatgatcaactacggagctctggccacggtggccgtgagcatcgcgacttggcagtcgtgttcccggcgattggtggtcacacagttcaattggatgggttggcgagtatcacagacgtatgcaaatgcttaaacaaggaggcagaggagaggagctgaccagaattgggctgaccacggcggggttgagttctacggtggcggaaacagttttggggagaattccaaattcgcggattccagtgaacgatcgtg

SEQ ID NO: 77117 - DNA, 490 bp, Zea Mays
cattcttttaactacatatgattacaaagatacttttagaaatttgatggtagtttagagatgtttacgttgtacaacttcggatgctaagcgatccgagaataggcatatatatgaatagtagaaaagtgtcccatgcctgggcactgcattgctttttatagaggtggcacgacgtacaacttcatatgaaattacgcttatgtccttaaattctatatatatgatctatagtgactattgagggtgttgttgtctttttcacttggagacatgttatgcatgccacttgaatatcccttcgtctcctgatcgtgtgcttcaaacacttcagggtgctttgtctaagtattaattggtgattaagctaccacatatttccttaatctggagatcgctacgatgaaggtcatcctatcattcctgcaacaaactcgaagatgattgagattcattagtttgaggaccttcggcgaaggcacaccctaac

SEQ ID NO: 77118 - DNA, 499 bp, Zea Mays
cctcgccaggccagtcatccaatttctcctgctgaggggaagaaaaagaaaaagagacggcttcggcgagtgtcatgcttgaatcaggatgtcggcccttctgctcctgctgtcgaggaagtgccagtggagatttttacaggggctgaacccaatgggtgtgacccggctgatgctgaccccaatgggtgtgaccttgatgatgctgatcccaatgggtgcaatccggccagagctgatcccaatgggtgtgctgttcgcattattgacgaggatgaggaagaggaggaggaaatccctttaattcggaaaaacaatcggcgtgatatagtcagtggggagagtagtgatattccttcttcagctttgtctgctctcattggtctgcaagaattgtctttggcaaattttgatcagactctcgaggatatggtccctgaagatctgttgtccgagccgacagatggtggtatgatggacgtttgcactgatatgcctg

SEQ ID NO: 77119 - DNA, 486 bp, Zea Mays
gaagtcttggctagccagaattgtcttgagttccagcctgagtcccttcaggaaacggtccatctttttgctctcggtattgacatcatctggcgcatagcgggctagctcagtgaacttgtgcacatattcgctgacagatctgccgtcttgagtcaattctcggaactcgtcctccttaagatgtaccagtccttggggcacatggtgctcccggaaagctgcttcaaactccgccgaggtagcatctctgatggtgacgttgaaggtgtcccaccaggctaaggccatcccagagagttggtgggcagccagttgaacccgctgattttctgggcaaccaatggcttccagcttccttttgatcgtgcgcatccaatcatctgcatcgagggggttgcttgatccggcgaacgtgggaggtttgagtctcagaaagtcccccattctgtcttgcggtcttccaccgttcgaccgttgattttc

SEQ ID NO: 77120 - DNA, 748 bp, Zea Mays
agatcctgaagctcgcgaagcgcatcagcgagcggcgcgagcaggcctccaagcatggctcgccgcctcgtcgccgcctgtaaaggacaaggtcgacgaaggtgacctggccacgggagaatgggacctcgggtatcaggctcccgagcaagttctcaaggaaatcctcactggagactctgactccagtgatgacaacgaccgccgcaagaagctgtacgttatgtatggaggaagctgggaacttacctcccgtaggaatgtgaagtccctgcgccgagaggtcctttcggcgaccccaggggtcccgaaggcagccccacatcagcggtggcggagcactactatatccttcggggcatccgactgccccgaaaacatggaaggggctagcatactatcactcatcaccacccctgtcatcgccaatatgaagctgcatcatgtgctgattgatggtggggctgggctcaacgtcatcagccacgctgtgttcaagcagctgcagatcccaggatcccgattgggaccctctcgcccattctccggagtgggccctcagccggtgtatccccttgtgagcatcgcactcccggttacattcaggactgaggaaaacttccgcactaagaacgtccagtttgatgttgtggaggttaacctcccttttaatgccatcattggcagaccggcccttttccggttcatggccattgcccattatgggtacttggtcctcaagatgccg

SEQ ID NO: 77121 - DNA, 421 bp, Zea Mays
aaagcatagcaagatatgatactacataagagatcttcggagtgttataccttttaatgcctcttgtgctgattcgagtgtgcgggagtaatgcccttcagagatgctctcgtaccaaggtcataaaatacgcaagattacaacctgtcgaccctatattagtgtaacacccaaatttagaaattgggattggtagaagaaatgtgagcaaagtacccttgataaataattagactttataattcaccattttaaggtaaatgatcatgataaaataacgatagttaaaataaatcctaataaagagtagacattggaaaatgttcctatcaaaacaaagggagaatttgttttaatatacctttaatccaactacacactcaaaataataatgtggtgtgtgtacttcatgttgaaaacc

SEQ ID NO: 77122 - DNA, 953 bp, Zea Mays
gtcgagggccctgtcatcttcaagagccccaagacacagccgacccacgccacagtcactcagcattgtgggtgcggtcatcaagtcggtggaggaagagcctccccctattaccctaacatcctcgtcatcaatgggtgggagggggtagacgacgatcccattttgacgacgagcctaccgtgcaagggggaacctccaaagtgtgaggcacgtctccatcgagaatcagtgctgcaacatccaccgtcaccatgccaccggggagcaggacccaacccaacctatttcgaaggatgaggcgtccaaggtagacgagtccctggacgagcgcgtactccgcatgcaaaggaacacccattgtcggaactaacacgtcgatcaggaatgtgagcacgagatggctgagtgcaatcctaggcttcctcatgatcattagcttctcccccgcaattagcagcttgagtttactccggtcatgcagactccaagccaggttggtggagtactaacttggattgccaataacttacctcgcacgcccgacacggagggttaccgatagatcctcacttgggaggtaaatcaccttctcttgctggaccattcggaggatgatatgtgttacctcatcaacaaccaacatgatgtgtggagcaacattgaggcatcgtgtgcatgacaacacgaagaagaactaatgcgataaaagggtatgaccaggactacaccgcctcactctggggagccaagggctaggcagactccgttgctgccttgacaaataacccatcaccatgtcactccgctcgtgagcggttgcatgatgcgcaacatcagttgccaccatgggaccgacacaacaaccacgcttgggttgagcacccgggagcccagggcatgtttggggtctcagcctgcaccctccgtttgtgtgtggtccaatcaccgcc

SEQ ID NO: 77123 - DNA, 768 bp, Zea Mays
ttggttgaaaaagggtggcaaatattcgtccttcgataaacatcgacaatttctccctcctgaccatccattctgcctagacatcaagaactttacgaaaggtgtcgtagtgacagaccgcccacctgcaacgatgactggagctaaaattcgtcaacagatagatgggctcgtggccaatacagaaggtggttttgtgggatatggtgagcagcatatgtggacacataagtctggcttgactcggctcccctatttttacgacctgctccttccacacaacattgacgtgatgcacactgaaaagaatgtggccgaggcactgtgggcaacaattatggacattcctgataagtcaaaggataacgtgaaggcaagagtggatctggcagcgttatgtgatagaccacacctagagatgaagccgccaagtggcggaaagacgttgagaaggcctaaggccgatttcgtcctaagcagggcccagaggaaggaagtacttcagtggatcaagatgttgatgtttcctgatgggtatgcagctaacctaagtaggggggtgaacttatctactatgcgagtcttagggatgaagagtcatgacttccacatatggattgaacggattcttcctacgatggttcgaggctacgtccctgagcatgtctggctagcgctttcagagttgggctatttctttcgtcagctttgtgcaaaagagttagctcggaccgtggttgtagacttggaaagattggcacccgtgtt

SEQ ID NO: 77124 - DNA, 643 bp, Zea Mays
tttgataacacagagcactgtatctcgttcggcagcttcaagtgatctctcgttgcacctctcaagcccttagcttgaaggcttgacacctgaacatttatatctccagaacaaaatcaagtgtctgttgcttggtgcttctgcgcgcgcgtacgcgttgatctgcataggagatcgatctagctgatcaggttgatttcgtctattattagtcgtccagctctctggcatgtccctctccgatcctctctggccatgtgtgtctcactctcacctaacttcttgtttgaaattctacgcgggcacgtaggcacagccaactgatccaacaaaatcgaacagcacggagacatgcagacaccggatcaggtcggctcggaggagcaacgtcaacgtggggatccacaaaactgattgatggattggtttgtgtcgaatttgatcctgtttttttttctagttgtctctttgaaaacatttcgagaattaggccaattgggcaaggacacgtagaggttatcctataatcgataagaccatctaaatactgttaaatctcaccacattacacaatgatcagtatggtatagagatttgagagggtaaagagtgtagtatatgtattttttgacgattggatcat

SEQ ID NO: 77125 - DNA, 512 bp, Zea Mays
cactggaacacaaagtgatggagagagccggttgcgtcgactacttagctacagaatgggagctgctaaaccgtaatgtataccaacgtcatataaactttcggtttgacaaaagcttgtcaagatatggaggggaagcaacgaccactcagcaaaagtataacttaccgaaccaaaatgactggattgtcgaggaggtgatgaccctccaaggtgtccagcatgaagattactccagtgtaagatcatgaaagcagagctcgatgaaagcactcggatgttttactcaaattgtcaggtaatagttgctgcttgctgaaattgcagatccaattgaagtaccacatgaccagcacgcccttgagaccaaacagctgcaggatcaaggttttgttagggattgcctggttgaagggcactaagcatcagaagaaggctgcaaagaatgtcatgatgaactccgccaacaggctgagggagatcttttcagaagtcgagaaggaggtcacatc

SEQ ID NO: 77126 - DNA, 400 bp, Zea Mays
ttgatggaagcccgttgcttccaataaattttttgaaactgaagcaactcagcattcttggattgcaacaactcacggaaattccattcttcaatcgaaaggtcactgtgttcttcaataatatcaatgaactcaataatcaacttaatttgtctcacagttttgtcaatttttggcagagatcgctgccactctttgaggatctttctggtggacttgaattttactgttaagttcttcgctttgtccaaaagaattggctgaccagtccaagaattttggaaaacagtcataaactcatcgaattgcagccagaaattttcaaatctaaagatcttgggtttgaggacctttgacttgaaagaaatcagacaaggtacatgatcagagatatccctag

SEQ ID NO: 77127 - DNA, 1004 bp, Zea Mays
gggaattagaaggttagggtttcaaaccttggttgggatttttgggatgttacaaacctaccccacttaaaggaatctcgccctcgagatttagactggatttgagaaaagataagggtattccctcctcaaggagtcctcaatctcccatgtagcttcctcttctccttctctgctccactgaactttacagagcttcacctctgaggtgcgggtctttctgactgctgaatcaagaatcttcactggcttctcatggtactgaaggtctttctgaatctgcactgcctcttcttcgatgtgactttctggtgcttgcaggcatttgtgaagctgggatacgtgaaacacattgtggatgtcggacatggattccggtaattccagacggtatgctgcgggtcctaccctgccaatgatgggatagggaccgacgaatcgcggtgctagttttccttttacttggaacctcctgacaccacgcattggagaaaccttgaggtagacgaagtctccttcctcaaatatgagttccctccgcctgttgtccgcataactcttctgccgactctgagcttcaagtaaccttctgcggatcagagcaactttctcttccgcctctttgacaaaggcaggtccttctagtgctttttcacctacgttggaccacatgagaggggtctggcatttccatccatacaatgcttcgaacggtgacatcttgatgctggcctgatagctgttgttgtatgagaactctgcgtagggtagactagattcccaacttctatcaaatgctagcacacatgctcttaatagatcttcgaggactttgttaactctttctgtttgtccgtctgtctgagggtgataagcgatgctgaaatctagcttggtgcccatagccttctgaaggcttgtccagaacttggaggtgaactgggttcccctgtctgacactatctttcttggggtgccatggagtctgactatctccttgagat

SEQ ID NO: 77128 - DNA, 782 bp, Zea Mays
ttgaagtatggtgtagttaatactcgaggtagaccagaatttttcatttaaattaaaatagagaagttatgcaaccatcagatggttataaggtagttgcataaggccgagttggtcggttattcttaattagtgatgattgaatcacgttagcacaggtggatagggtctaatccatgttacaagtattaactgacctgtttgagtgggtcacattaggttagttcagattagatagaaactagattagtttagcataactagatttgactaaataatacctaattaattttggatcaatttaggttgaatgaggtctaggcatgactagattaatctagataacatcttcttattttattttagaatagatatgtcggtcacaccattacgagataagcaaagtggtggagataagtatgcttattaggacaagatgagtctctaagaataaaatagaatcttttgagattggttagatctattaggataagatgagaatcctttcgagaagagatgagtctaataaagtaagagagtatcttttaagataggatggattattttaggataagagagagtcttttaagataagagggatctattaagataagagtgagtcgtttaagataatatgaatccttaaggataaggtagaatcttttaagcgaagagagatccattaaggtagatacactttagtggaggataatctagtttgtttaattatcttatgaattctatttatgtctatatgtatatatagatgtaattgtggacat

SEQ ID NO: 77129 - DNA, 398 bp, Zea Mays
gttttataattctaataattgttttctagttggaatattgctaaataaaacatttcactttgaatctgttctggactagaggtctttctatttttcctaggttctctgttacttaagtagactaggaaaaataatttcatccgctgatcactaatttctaaggtctttctgatttttctaagttttgggcaaaaatggcttttaatagatatccccactaaatttttcaatactggggctctcactatttttaaacagtgttcaaatgacgtttgaacatctacaaattttcttaagttcagcacagaagcataactaattttccttaattaaacaaggtttggtcagtttctgtatttaattctaaactctaaaatttagaacagaaagcatggggt

SEQ ID NO: 77130 - DNA, 277 bp, Zea Mays
gggagatctgaggtcagtttgtggtatcttgttttctcataagcaacgtcattgccatgttgtcttatgttggcatgctctaaaatacatgatactggaactaggatacactgagactacttggttatatagtatcattgtgtttctattgtagagtaaatataaatatcaaaaccacttcaatttgcttgacaaactctaaaatttcatagctagctgatgtgaattggagctccgtcaaatgaaagctgggtttatatgtaatgaccaaaaattg

SEQ ID NO: 77131 - DNA, 411 bp, Zea Mays
gacagaaaaaacgacgaatgatgaacattcttcatacaattgagcaaaccccgcctctagcttcggcagacaaatctgcgaaaattactaatgccgaagctgttgtcataactggaggcgaagatctcatggccaccatgttcgaaattgacaaaattgtattagacgtggctgtggagaaggaggtggctacagaggtgtcaaataaaggaaagaaagataaagaaatttcttcggaagaagcggactatgttctacggcacctgggtggccagcagcttttcgaagaggatgcagctgagctaaaggactttgctatcaattttagctaccagccggggtccatgctctttggtgggttggacgaagaagttataggatgcatccttgatcgtgccggtgcaaagatta

SEQ ID NO: 77132 - DNA, 662 bp, Zea Mays
cataactaccctattcaatatttatgcgtgctgcatattttgtctgatttactcttcaggtacaagcttattgcatgtcacttgttaagaaaatgaaagactcgtatggctgccctggtgatgtaatggttgattctcacattggagcatggccgggttggacaactgcctaactgcttcaaggcaatcagttgtgaggatgctgctgcttctggctcttttcagtatcctaacacttttagccaagaaaatcaatccgagcaagtgccagttaatactaagacgtctcatttggaacaaaatgatagaacccaggaattttctctgcacaatattgctagttttcaggtacctcgtgtgacttataaaagggagttctttttgcagtagatgtcttttttatactgattatgtatctaatgagtctaatgtctatattcaccactaagaatgggaaagcaagagaatatgactgaaattcagcaaagctcagctcataaggtaactgaaactatatggaatataactgaaagcactatagagaatatgacttaaactatagggaactgtcaaccgatggatatgaaacattatttctctataacgagtgacattagcgggtaattaatctcgaaccccacgtttgacgtttacatctaaaa

SEQ ID NO: 77133 - DNA, 677 bp, Zea Mays
aggcaatgagtgatgagctacttagagcctactcgaggggtgaagatgaagctatgacagtcaccttcggtgcttgagggaaaagagactgaatagggttttcgatgatattgggtttatctaccctgactactgttttcttgtttggaaacaaaaggggaaaaggaaaactactacttcgacatcttctagtgcgccgaaggcaaagaaagtgaaggtcttgacacgtagaccacgacgcattgagacgaccgatgtgccgaggcttattgaacgtgcaggggttgctccttctgccacaaaactaggtcatgttgtgccagtcgaggctagtacaaacctggtcgaagagccaaaattagagaagacaacagatcagttgaaggtgttgagcccactgggtacaataggattaccgaagccatcaagcattcccgcagtgactccaaggaaaaggagaatggctagcatgctagatgctgttccgaagtccataaagacatcaattcctgcctctaccaaagctctcagcatgcagactacggatgcaaggaaaactgctgtcgcgagcgtagccaacgctcctgctgaagctggaccttcggaagctcctgccgaagctggaccttcagaaattgtatcgatagcactggagaaagagagcattcctaagaaac

SEQ ID NO: 77134 - DNA, 550 bp, Zea Mays
atacggatgacactatatatagcacaaatttggaaaatctggggtagtggtgatttcgaattaaactacagaaatctatttagaaacctgttctgttgttgacttgttgtacccatttgattgcaattacaggtttttaacagtgaatttagtttaaaaaactgaaccaaacacgttttaaatagacggcttctctttgtatacgggtgggctggctcaaccagatgcatccaacttttctagactaatgggcttctaaggaacctatttagcccagtgagcttctaaagcggcgtttaggtatccagtttagccctattgctcacgggcctcagtatctttaccttctccgataaatactaatgtgggtgggctgtgaggaactccatccactgcgctttactacattttacgaaaaattgaacaggcctacgctacgcgctcacgacacgagtactactcctaagcctctactctagcagtggatcgggttttattaggaacggaacggaatgggccggagcgattcgctcgttggggtcggcacttc

SEQ ID NO: 77135 - DNA, 672 bp, Zea Mays
attttctacaaattaaacaagttttaacatttatttatacattaagaatcaatttctgtgattatttcctattttcccaagtctctggattgggcctcaaattttagaaagcgcaggggcttccacgctaaactcccacggactcagatctcatgcacttgaggacagcgggttctattatctaaaaatataaggtctcttttgaataagtgccgaggcgaaggggtattagcgaaaactggccgcccgatcactgagcaagggcctagattagatcgcgcatcgtcgaaacggtataccatcaggatccctcgatttccaatccgacgcccgccattgcgttgcgtctcccggactcttcgtggtctcatgaaacggtataccaccaggaagccacgccgcgcccggactcttcgtggcctcatgaactgaaggcgagcggatgtctacgatcggcgatgtgcactcacgctctctctcctccgcgctctcggcaacgatcgattcttccgcggtgcagacctcgtgatctagcggatgcccaatgtgaggaggggaaagagtcgcaggtgcctgagtatttatcccagagccgccggtcatagagaaacggaatccggccggaattcacgccgcggcagtgatttcgcgtggcaatctttggttgaggga

SEQ ID NO: 77136 - DNA, 1407 bp, Zea Mays
cccagagcttagaggtcggacctttcagacgcggaacgtcgcgggattgagttcgacgcttgcggcagtgatggcgagcgaggacctgttgccgctgggcgcaacgacttgagggcactgaggttggttcttggttgtggcttgggtgagagcgatggcggctagcgcctaggatctggcaagacaactgctagcgtgagggcgctatgggctggcgcatgcgccgccgatttgccgaaggccgaagcacggccacacgatcgtgttggtcgagcagagcctacgccagtgccgatgacgatggctgaggaaggagtcatgtcggttttttctggaaggatcccgtatggtatgaccgtgtcgctgtaaatgaaacagactcgtgaacgtttgatgcatatcgtacggctgacgaagaaagggatgacgtggaccaacgtggagagaattttgctcccacggttaatatatagaaataatgaaaagaattgaaagctaaacatgtttgagtagtactgcaagtgaagtggcacaaataaaagctccatttccaagatatctcatgttggtaactaaatccaaactatatgtggagaaaaggtaaacaccataatcagctaacaacatagtttcacgcaatttgaatggatttgtacaggctgcgcttaacactcccgattcagggaaggagaagagactgacctgaatctcatagaagacgacagtgagtagcatgagaatggttccgcccacgacgaaccccatctgcgcgtcgagctcgtctatcatcccgggccggtaatcaaagctggcgatgtgcgcaaggaggtcgtgcgtattgatagccagcaacctggcgacatcagccattaagttgttagctgttaatctttctgagccaagacttcttcgagaaactaatctggaaacatcagctcacgactccgacacgaaccactgggtggaaattcatcaccgttgtggcaaagtattttctagttgagttgctcgccgtggcgcggtcgaccataccggggcggaggcacggcaaccctgtagagcgcggcgaggtggcggtgtgtgccggcacttgggacttgggagagctcttgacgggggtggaggggaggacgaagcacctaggtaacggcgtttgagggcggggagtggactatctagaaccttcacgacaaatagagatgccggataggggtagctgggggttgtacgaaaacggtcgcctaacggctccttcgtgcatcatctagaatggtccttcgcttggaggagaaagagcgtgtgttagagaccactaggatgcgtgagatgtgattatgaccgttggatttcgatcatgcggctaaaacagaaagtgctgacgtggaggcacctgtaagcagaattgct

SEQ ID NO: 77137 - DNA, 500 bp, Zea Mays
gcgtctcaaggtacctggactttgccttgtggaggacctccctgacgtagtagaccggcttctgaacggtccagacccctgtagccagtcccgagccctcaggttcctggtcttcttgtaccgtcctctcgacgaccagcaccatgctcaccgctttcgcagccgtcgcgatgtataaatacaacagctccctaggctctggggctaccagtattggtagggacaccaggtgctgcttcaactcttggaaggcttgttctgcctcttcggtccaagagaatggaccggacttccgcaacagcttgaagaagggcagcgctctctcagtcagccttgagatgaagcggctgagggcggctaatgaccccgtaagcttctggacgtccttgatgcgggccagaggcctcattgcctcaatcgccttgattttctccgggtttgcttcaatgccccggtacaaaaccaggaaccccagcaacttccctgcggagacaccaaag

SEQ ID NO: 77138 - DNA, 358 bp, Zea Mays
cgccaggtggttcgttctagtgtttggcgcccagatcggtgcgaacaatcatatcccatttcgattttgagatcctatttggtgtgatttaggcctgtagccttattcccttctttagttgatgtattggaagtctacatgcattggtagtatgccctgtaattgggagtgtttccgtttccactcatcttttgaatttggtgtgagcttcaattggttaataggtttgcactattttgctttcttgaacatgtctagtctaagatcaaatcattatctcagtcagaggagccactcactattatttcaccagctcgacatccttcttgttctactaaacaagaggactacataccac

SEQ ID NO: 77139 - DNA, 980 bp, Zea Mays
aaatcatccttttatcttcgtcgaatgccttagagttcagcattatatcgccagctttatgctttagaaatcagcatacagttttgtctttgagatcaacaacgcggtctacccatgtcctgttaggttttgaaatttatttgatctgcaatagattggacatccggtagatggctcttggctggtcttcatttcgctttgtgcttcaatgctcctattgattagacttgtatttcatcagctatttttggctttccttcgatctccattgatatcttcccccgttagaattcggtgaaggaccaagtctcccactgcgaaggatcgatgttgtatggtcttgtcatgatagcgcctcagggtttgctggtacctagctgattgaattactgtattcaaccgttcttcctccagtatatcaatatcctccagtctagtagcttctgcctcatctacgttttcaaagatcagccttggtgccccaaatctgaggtcaacaggtagtactgcctccgaaccatagaccatgaagaagggagtatttccatgcaaagctcagctaggttgagttcttaagctccaaaccacatacgacaactctctgatccacttccctgcgaacttttcattcttgtcgaagactttcttcctgagtgcttccaatatcattctattagccctttctacctgaccgttggctcttaggtgtgctactgatgcatatttgatctggatgcttctttgttcacagaaatcaaagaattccgagctagtgaaattggatcccaggtcagttataatgctattcagtattccaaacctgaatattatatcttgtatgaattccactgccttagctgaagtcagagaagcgatgggtttgtactctatccatttagtgaatttgtcaatagcaactagcacgtgagtgtatcctccttgagctttcttgaatggtccaatcatgtccagtccccagc

SEQ ID NO: 77140 - DNA, 1035 bp, Zea Mays
cttggtttcaccactgctggctgacccccaccttggcctataaaaggaggaggtcagtccccatacaaaaagggggcggacaaatgggggtcaaagacacacacgaagaagtctaacacccagacggacacgaagacgacggaccgatgggaggaaggaggacgcactgatgaggacctagaggtcggagcctcgtcactaagccaagacttagttaggactccactctatagcccttagctccacttcctccaccacaagagacttgggagtctctcctccctcactcgtccacttgtaacccctactacgagcattgatcatcaatggtgccggtagcgcaagccacgaaagactggatgtagggacattatgtcagaacatgtataagtcttgcgcccactgcgcacaccgtccgaagccaggaacgcacacacagaagtttacttgtcagagcaaggttcaaaagtccgacactttttatcagcaattcttacgagtggccttaccataccccgctctgtccttttcattgagaatggggcgtcatcctcctagccccatggatctaggcaaacatccagcaaaggatcgtccccccatgttgaggccagttagatagcacatgattgatttggggtatgggttcccttttctatcatggagtcttcatgtccttggtcctactttttacctttcgtgccttccataggcaggtgatctcgatgggccagaggagggaactcgggatgcctttttgctaaggcaagctttctattctctcgatacagactcaatcagacctctaggagagtctagccaccactcacacagccttcgaggccactgatagtgaggtggttagtcttcgtgcccgtctagaggaggcggtccaccgcattcggggttagtgtcgttttatttcctcatggagatactttctggctcttctggccccctttttacgctttgcctttcctagagttagagttggaggtgtcgggtctccgtgagggcgcgaacagggtcattggc

SEQ ID NO: 77141 - DNA, 468 bp, Zea Mays
gagacctccagagggtgtgtgccagggagctggaggtgacctagagggagaagaaagtgtctcggagggaggaagccgttacctagagggaggccctcacgacagagtaccaggccaagctgagtgctctggaccagactctggaagcccagcgggcccagcaggtgaaggccgtggaaaggctccagaaatggcagcaagagctcgagggcaaggccagcgacgtcgccctcgccgaggaaaaccttaaggagaaggagctgtccttggacatgcgggagatggacctcaccaggcgagagacaaatctcgccttcaaggaagaaatgctcacccggcgaggcgagttgctggccgagcacaagctcgaagcagaggaaaaagagaggaagatggaggagcagatccgccagttcaatgcggcgcaggcggcgccgggcccccaggcattggaggccaccagaaagg

SEQ ID NO: 77142 - DNA, 932 bp, Zea Mays
aacaagagtagtgtatttggttaagtggtctaaactaatcgaaacgtgagtgtgtttgtgcaacatgtctctttgcttgttgcttaggtgtgaggtaaggagacaatgttcgatggtgaaggtgaaggtcatgcgggttcgtaatgatggaccgagagcagtgaaggatgagcgctaggtcttgaccatgggattggagctataatatctaacacctatggacatgaacaagtgcaaggacatggagaagcagatcgtgttgccaatatggttgaggatcgacgggacacacgtccacgacatgaggaacatgtatggagtacgctacgcacaaacttttggtaattgagccacaaaatctctagtgatagttcacaagttttgccaagtttgggcctcaaacctggtagcacaattatagagggaattagaggtggcatatgacgtcatcgtggagggtgcgtgaaggcgaaccaacttcgtgaagagtgtgtggtcattagatcaatacttcaagagttggtccattttgcccccagatgaatggataaactttttatatctaggaatagtttaggacagagggataaccttctataaataggagggtaggtttgaaccatccattcatctctctagcttgtattctccattttccacattcatcttgttaggagaaccttatataagttgaacccatgtcatctgagttgttgtgttttttaggaagtgtggacgcaaccacactttgccctctacatttttaattcatgacaatctgatggtttttgttcttgagttattctctcttctctctgctcttcttgtttgcaattttgagttgatatttgcgttggcaagtttgggaagtgtcttgtggttgatatatggtttaaaaattgtcctggagtcattgcaatctctagtataag

SEQ ID NO: 77143 - DNA, 1558 bp, Zea Mays
gcgggcgagcggcggcctgcggagaagcgagacagcggggaactcacagagaagctactgctatggcttcttagcctcacgcgcaaactgcgaccgacagcgaagcggagaagatgaatgctttggccagcgcgaaccaaggccatgggccagaacaagtatggcgtgcgccatatctatccgcgttcgtccgatcagggcgggtagttactcacgatatgcatgcatgtgattgaggtgatttggttagcatctccaaaaggctgttaatctgaccgctaatatgttttttaggaagggaaacataaaaactaagctccaacagataccataaatctgccccaaattttcagcgacgctaatccttcgcgacgggttgcgcatatcttcgcgatcatgatgcgccctcaatctccccttgcatcttctcctgcgcgccagcaaactattctcgcgtgtttccctttgccacaagcctctcccccagtcggaggtcctctgtgtggtggtcgcggcttgaggttgcggtggcgacagtctgatgaatttgagatgcagccaccgaggtcagttggcccgggccagtaggggcaaggatgacgcgactatgagcagatgtatcgtgtctagtccgtcggtgtccagcacacccaatggatcagcagcgacgagcagatgcatcctgtcatggtctcatggaaggtcaggtaccagaccatcctcatctggctacccttggtgacgagcattcagatcccctttggcagtcccgttcccttgcagcgacgacctgtcagcaaccttcgaacacgcgaacaccggcaactcatttgtcaatggtatgaattttggattctttgttttgatgaaatgatatggataatttactaccttgcccgcctagcttacacatcaggtcttttttcaataaccttgcagggtctataagtttgtacttaagttttgtccatttagaaattctcagcttgttaaacattcttagatttaaatttcgggtgtgctcagaatggctcataaatggtgtttgttttgtgtagacaatagacatatttgtagtgttgcaaatgcagaagtgaggttgtctctgcaggtgcgaaggtcctgttgtcctcttgtcagccacatattgtgctagtgattttatattgtacaccgtcattgaaaaatggctcaccatttatttgccatggtcacacttatagctagctggtttgcttctggaagtaatgtggcaccttcatccataaatgaacagaactgcaattattacattattttggctgaattaaagttaacaagtagcccagtacgtgatgaaacatatgttgcatgttagctagtatcgacagatcctgcatgttcaactgttctagcgcacaacataacatgaaaatcacgtacgtgaatatgggccaagcccttccgtcaagtagactacttcatactctagaaatttattagttggcctagttttcatttaagtgttctattctgtgaactgatggagtaaaattataatctacaactaataaatttt

SEQ ID NO: 77144 - DNA, 457 bp, Zea Mays
gcaaaaacagaggacccagatttcacgtttcttgaactaagtggatggcgggttaattaggccaaaggacaggggctttttaaaaaattatctcagccgaaggggtacggggatagttgagacgttggatcatcagcagacgacaacgattagattctagatattgtgaactggtacgccataacggttgttagatcaaaacccgacaatccagatcaccggcgcggagggggcacgactagagtcacacatcaaccaatctacggcccagatcaggtcggatcaaagcggcagacctggttctaatccacaccgttcgcacagatctggtggtcacggtttaacggggcacgactttaaacctaactcgtccgatcccgatcggacgctcctcgtccctccagaatctagtatgggcaactgaatcggggccattcaaacctgaatcaaggatccc

SEQ ID NO: 77145 - DNA, 488 bp, Zea Mays
cagcaaggcatcgagcttgggcaagcaacgcagctagagaccaggcagataaggactccaccgcagatactttgaacctcccagggcactctctaaccaaaccaaccaagcaatgtcggcataatcgtggggctgagatctttccttttctccatatcatgaatcagcttcggccaccagaacctgcactcaaacttttgcctctttctactaccgacgccgagcacacaggaaacaagcaagtaagcagaagcctgcccaaactgagacaaattcagttaactgacaattcttcagttacctacaactaaacttacaccaccgaactgaacttgcatctcgactaccacctaatcccatgattttaaatggtaatgcgggatcaaccttaatgccaattgtttaccaaactatcccctaacaattagctacaggtactgcaggtcagaacaccactaaatagtcacaacaaagctctaagaatcgaa

SEQ ID NO: 77146 - DNA, 425 bp, Zea Mays
ccgtgtcttcacggcgtccgaccggtacagcccctccccgtgcccaaacttaggcgtagagcactcctaccctctgactgaaacccatgccggcctcggtgcaccggattgccccccactgcggcggggattgctcgctggagcgctctacggtccgcctgaggtcctccttcgccgtctacccgtctcagccccattcttgcaacccaggctttgccatagtgttcgcaaggtcctccctaacctccctggctaccccgaccaccacagtgcccctataaaatccaggtatgcctcgcctccggtggctgcgtcaccacgggcgtgaacggcgcctcccctgtttggccggagctgataaacaccctaaacgcccgatcctggccatccaaccttgatccgatggtccaagtgttcggataacg

SEQ ID NO: 77147 - DNA, 526 bp, Zea Mays
gccgggtttgtgagctccggtgtgtgcgccgccgtgcggtgtcctgcacctcgtgtgccagcgtcgaaggaaggcgaaggtcctctaaccatcgattgaggagaggacgacgccgattagaatggggataccctttcggggtgtggaatcccgaccgttgggatgtaatccaagggccagtagcggatcgtggatcttaaaaccgtagtcgtagatcctcaatccgagggcggtcatcgtgtactggttgatgatacctagatctaatcgtggcccttgattcacgatcgggcggccagaaaccgtgcattccccttcgcgggtacattttataaaagagaccctggggtttcacctattcaacccgccgtcctgatacgcgtaaatgaattataaaacaggcccagaagtttgcgcagagcaccctaggcttagttaaaatagtgtccacagtccagaatccttgggaaactcagattttatttagaaaaaaggatttttagtgcaaaaataaatctaggaattt

SEQ ID NO: 77148 - DNA, 970 bp, Zea Mays
ctggggttcaaggtgatggctacagtagcatttataggtggacaagtgaattggcggtggaaagcctaaaggggcgccccctaatgggctctaaaggaacaacctacaacctaggttggatggctcgacttcccctagactactctgatctgcttgcttcgtatctcactagctcatttgaaagtagactttctgatctttccaacatgtccttaatcaccttctttgcatctcgtatgatgaagttatggtcacattgatgagtttattgttgttggtttcgggaagagcggggaacatcagtgcattggaacttggacttaatgatgcttgctagccaatcttgaccctcctttatcctttgtccgcaaccatcttcatcctctccatcattccttaagatgatcatcacaagactttagtagcatccaatcttgaggtgaggttacattgtttgctagaaacgattttacctgataattaagtcgacgagcgcgagcacgtgtcattggtccttgctgcccatgtatggttgtctcacttgaagaaatgtcctcatcgctgaccgtgacccaacattctcgcgcccctgtccacgtacgagatctcccccagcgaagccgacactgcctcctagtatcgctacgcccatgcctcccaccatcctcgtgccctcgtccacgtttgagattctcccacgaagccgaccacgcctcctagaatcgccgcgaccgcgcctcctgccatccttgccgccatcctcgtgccctgtccacgtccaagatcctcgtgccctgtccaccatcctcacgccagtccctgtccgccatcctcgtgccctgtccaccatccttgacccgcaacacataggtgtccttccatccatgccctcagtccgcgccctttccccccgagaatcccttgccatcgaaggcgcgggctttccatcgatgccgatccacacctcgaa

SEQ ID NO: 77149 - DNA, 902 bp, Zea Mays
gccgcagcgaggtgtgtttcacggcggcggagaccgaaatttggggagaattggaaattcgcgcgtgctggtggatgatcgagggtgggagcgggtgctatagcttcgggatgacttagcgcaatagcccgagccatcaatttataggaagcttcgtcggtggcgcttgaattgaggatggcgcggtggcggccggagatgaagaagaacgagggtacggtgaatacgtgtccagtgtcgtggcagtaactctggtggtcgacgggaagttagagggagtcacggcgatgtggtggccagattgggacacgtggcgcaagaccggagaacggcggtcaccggcgaagctatccgcgtcagccgcaaagccgaaaaggaagacgacggtgagtcaccggagtgatgtccagcgcacgggcggtgaagatcttttaccccgcaaggttatccattagccacgagcgcgaatccggacggcggcagcacgaatcacggcggcaggtcaccggcggcgatagcagctgcgctggcgatctgatctccctggtagcactgtaccatggtgagtgctccttcaaacaacctgacatagcaactttaggtcctattttctccagattttctatggtaccaagcccaaacatctatagcaaagttgttcctctttaataactctacaactttgttatagcaaccctaggtggattctcactggatcatggtcgaaatggctctcaaacttgggtccaggccactgtcagtctgaaattcagacttaatcagcctgacagcctgacttcaggcttaattatctccaatattttcttaacaactatgctcacactcttcagcaaagttgttctcctatgattgggttacaattttgatgtggtgacctaggg

SEQ ID NO: 77150 - DNA, 442 bp, Zea Mays
gttgctgaaggcgattctgatgattctgtgtctaagttttttgagtctgatgattctgggagttcgattgtgtggttggaggggtcttcggaagaggacttggattattttgcagtgttggatgtggctgcggcggagactcctccgcgtgtgatgggtgctgaggatcatccgggtgcgagtgctgggcgtaggcggcgaagagcggtggcgaaacggagagtgggtgagttgtcacgaggtgaaaggcgtcatcgtggtgagatggagggtggtcgtcttcgtgtggatgggactggcaaacgggaattgttgtgctcgccggctggggcgagtgtgggtgagggggagctgcaaagtctgtttgtgggtgaggaattgaggataatgttgttcaactatagggaggtgggtatcatcccgaaggttgagccgatgtaat

SEQ ID NO: 77151 - DNA, 349 bp, Zea Mays
gccttcggaattcttgacagtctttgttctaacccgtctagacggagggagcacccgacccttcgcccgctctgttcactccctccaagagctcactcttcagtcttcgcgctctttagtcttcgcttgaatcattttaaacatgttctacttttcagcatgtagttgatcgagcgagggggcgttgcgccttctccccaacacatcgtttcttgctccttcggctttatcatctgacattttccaaagcttctgtttccttggcctgatggtgggatctacattaagagaatgttcaatgaggttcctgttaacaccacataggttattcgccgaccaagcaaagaca

SEQ ID NO: 77152 - DNA, 765 bp, Zea Mays
cgggaagattgatgccttcacccctatccttcggcttaagaatgatactgaattcgcttgggggcagagcagcaggaagcatttgatctcgttaaaaaatacttgacttccgctcccgtattaaaagcaccacgagcaggagtaccattccgattatacattgcagctgaaaataaggtcattggggctgttctgacacaagaaactgaaggaaaggagcatgtggtgacatatctaagtcggaggttggtggatgctgaaacgaggtacacttttattgagaagttatgcttatgcttgttttatgcatgcaccaaatgtagatgttatttattgtctagtcattgcactgtttctggtcaagccgatgtaattaaatacatgttgcataacccaattatgagtggtagaattagtaagtgggctgtcggtaccttgaattaggggtacccccttcctatagtataaaggcgccattaccgtgcaacgccccccccccccccccggtcgcacgagaagcagcacctgaccccaccacaagggcagggttgggagcaccacgtggcaagagaagataaaactccccagggtgcatcgataggtcctgacctccacagaaggacgccggacctctgtactaacgggaccggggctcccaaaagggcatactgggtccctcgggtaggtcccaggtccctcagggtagggaccgggccctggcagggctccgagacctgggagaccccggcatgaatgggggtccgg

SEQ ID NO: 77153 - DNA, 702 bp, Zea Mays
accgcgaggggcagcgctagccaccctcgcgtgcgacactccgcgcaaaagtcgcctaagggtgcagccggactagcacaacaagtgcgaaaaatcgaagtcttcctcaaaaaagactacccgtgctaaactctacaccaaactgtccgcgcaaagaccgactacaggcgcgccggaccgacataataaacgtactagaccaagtgcgcaacgcctttatgagcatagccggatgcgcgcaggcgcacaacctcatcatacaaactatagttacatatgtacagcgagggcatcacaccttacatcggttcaaccttcggaatgattcccatctccctatagttaaagaacattatcctaagctcctcaccctcaaaaagacttcgcaactccccctcacctacactcgcaacggccggcgaggacaacaattcctgcttgccagccctgcccacacgaagccgatcgccatccacctcactcactctatgcttcgcaaccgcccttcgccgcctacgcccagcgctcggaccaggcacaacttcagcatccgcagcacgcggcgaagcctccgccgctgctgcatccaaggccgcaaagtaatccaagtcctcatccgacgactcttccgtccactcaaccgaactcccagagtcaccaaaatcagaaaacttagaagcagactcatccgattcattcccc

SEQ ID NO: 77154 - DNA, 368 bp, Zea Mays
tggaagtaggtgacacaattgctatcgtcacctgtttgttggacggtccagattagtctgggaaatcaccaagcgttggggcgatctggtccgtaggggcagaatcggacgaccgtgagccatcagctaataccgcttcacttcgatcaacgctagcctttggatcggaatcgagtggtgccaatagggcgttggtggaatatctgcggcgccgttgattccggatccaaggatcacgaaggcataccggttcggtatgaagatagattcagctgcgccgtccggatctaatccaatggcccacatctacggataccccttcgcgacacatttttcttaaagagcccctgatgagttagtaaatgaac

SEQ ID NO: 77155 - DNA, 640 bp, Zea Mays
aaaaagtctagggtctggtttgtaagaacttggactagtttgtaatgagcctcgtatatgggcggactgtggaaaatagtgaaaactgcaaggtctctttcgcataattgcgtcgacgaaggggtacactctattcgaggtcgttagatcaattccggatggtatagattaaataaggcaagacacgaaccggtatgcgttgaacatcgttgatgccgagatctgcggccaagataagatctcatcccctggtgaaccggtatgctatgactgccctctgatcttgatccggcgtccaggatctaatgcccaaacaggtaaacaagacttctaatcctggccatctaccaacgatcccatggcgtggctatcatccatccaccgaccacccataagcggcggcgcagacgccgtggcgccatggccgacgcacgaccgatccccgctcccgagtcccaaacttgagcctagctggtggtatagggagagaagggtaagtctaatgatgtggtggattcctcacctcaggtctgggcggagatgatccagtcaatgcgacacagcggctccatgattcatggtggcccgacggcgatgcccaagcaccggtgtggaatccctgggcctggctactcccgcg

SEQ ID NO: 77156 - DNA, 1281 bp, Zea Mays
aactttgcttaaggttgtgagcatagttgttaagaataaattgaagataatcatgctcaaaatcaggctgtcaggctgctaaggtctgaattttcagactaacagtgaactgacatcaacttcaagtctaaattcaagcatgatccaatgggtttttgtggcagcatcatatggcaatattgtagatggtatgttgctttacaactttgatgcagagtttgagttgagttgtcattcaaaaattaagagaaaaccaagctccaaagtgctctgtcaggctgtctgaataccactcgccatggtacagtgaatttggggatcagaccaccagcgcagggtcctcgccgccaatgaccttgtgccgggatcgtcgccgccgttgagattcgcactcatgggtaactggatagcgctcggagtcacgtaaatatcctcgccgtggataactccggctataaacaagtccggccaccgtacaagcgtcaccgcggcggaattcgataagaacgccggtgaccgccgcttcccggccgtacgccgcgtggctcaacccttccactgcgtcgccataaacccccactgctgtctaatcaacgccggtgagcctgccacggcgatggacacgaattcaccgcgccaggttcttctccatctccgactgccagcgttgctcgaccaaattggccaccaccgcttaagtatcctataaattgaagcctcagcctgttccgctaggtaatcgtgcgtccagagaacccgctcgtagctccgatcattccccacagctccccaatttccaatttcccccaaatcgactctccgccgacgtaaaccacccatcaccgcggccagccctttccaggttagttcatctctctctcccttgtttaagcaccctggttactctgtgatgcttgccgagccttcaatttaaactaggagaccaccagtcaccgggaacacgacgatctagccgccatgctctcggtcaccgtggccagagctccttagttggtcttggatgcaattaggttgggggaaatgattaaggtagccccaatttcatgtctgttgctcggagaacctagccgttgccccaatcggccggtctgctagctcgccggagttcgtccctgtgcagttcgccgccggggacttcggacggagaaagggtagaagtgcggggttgtttttgtagatgtcagagagacattgaatagtggccaggaattcttagcagatatccaaaacgttgaggacctctgcgcaaatctgccccgc

SEQ ID NO: 77157 - DNA, 1062 bp, Zea Mays
gtacaaattgtttgacaaaacatgtagtgaaagcagagtcgagacaatgttcttgtgaagagtggcagcacacaggaaaaccttgtcagcatggattggcagtgattattgcccaggatgtaaggaatgttggtttggagtactttgtcgatgattattattctgttgaaaagtttagaaaagcttacatgcgaaggattccaccgattggtgaccgttctttttggccgaaagtggatattgcaaatgaagtatttgctccaatggcgaaaagaggggttgggcgacaaaggaaaaacagaataaagagttgtctagagggtggtactgctaaaaaacgaaagggcgtggaaaatgctcaatgcacaactaagataaaaagacagtacacttgcccaaactgtggtcaactaggtcatcggaaaaccagttataagtgccctttaaatggaacaaagaaaaggttataactgtcatactaattgtttttttattccattgtccattagtacttgttagtaattgttttgttgctttgtaggaagaggaagccaagaaagaatactacgaagaattggatcccgaaagagttgcggacttctacatctcaaactagtgctcctaacgaagaaacaactattgtacctcaaactgctcaaactgtggatgcagaaacagttgaaatagaccatggtagccatgaaaatgtcagtgcagatgcagcactagtctgtgtgcaaactcctacttctccggcacggagtgtcaagtggcttgttaagaaaattactccgaggaaaaacttgaagcgtgcttcgacaagggagtagaactacagatggtgtattgtgctcccagaattcggaatgtgccaagaattgtgctcccagaattgtagttctattaagatgtaatgtttgtgctcccagaattgtgttatgttagtgctcccagactaggaaacttgaagctgtgtatgtgcccaggctgtgtatgtgcgcagtttgtgtattgtgcccagactagaagctgtaatgtgaacagaatgtgcccagtttttta

SEQ ID NO: 77158 - DNA, 718 bp, Zea Mays
ctttggttctttggctgattttgagcagtcaccacaaactggagtttctggaccttttggctgggaccaagagatggctaactacactaatatgtcctccaacatctctgcatggtcaccacgcaagcccacacacaatgaaaaactttacaccccgtggctgtatgtttgacaacaaggtgagcagtgaagcagctgagtcaccaatttggatgaggctcaaatagtccaaccttagcttcaggatggagaaatacatcccacgttacccccctctctaagttcaagttgttcttatctacagcctatccagaatcacctagagagagtagtggttagggatatttttggctccttctgatctgtttcagttctaatgcggtaccaacttcatcacttcttttctccattttctccacaaggacaaagctatctgttcacatcaaacttgttcaaaaaacattggtctttcactttgctgtaaacttctagggtcactactgcacaggtctcgagttatagtaccccaaagtgaagcgcatccctcagttaccataatttcagttaactgaactgaaatatgaacccacagactgacagggtaacctggggattgctctactcccctttttgtgtggaatcaacccaaactcatttaaatagacttactctttaacagatgaccttcatttttggtatacagatctcaacccaaaac

SEQ ID NO: 77159 - DNA, 732 bp, Zea Mays
catatatggatcaagtattatataaacttattaattaactaaaacgaatcttaaataatttaagatggagcgagtattctatataatattgtctacatacctatttattgaccttaatctagtgtgtccgattaatctttagggcgttgtttgaataagtgtatattgtttatacacacatgtattggtcttagttatgtatgtaaaactagtatgctataaaaactaacctaacctacacatatagattgcgatatgtttgggggagaggggggagagagagagaaaccaaaggtttcttccgctttccctcctcgccatggggcgtcctagatcgaggaggttcgcgaaagacacctaccccgaccatatatactcatcgaggtttcaccagagaatccacatggtgtcatatgcctgagggcaggggcggaggaccaaatgtggcgataccttagcccgacccattagcagcactagatcgaagacccttggtctttcttcgcgtctgacatctgcctagcttctttgttgcgtcgtcgttcgcagacatacacagttgctcgcttctccgtcacccgtttagcttcttggctgcgtcgatgttcgcacacgcaggtgcaattgctcgcttctttctttatcgtcggctatcgctcgctcgcttcgcctccgcacctctaaggacagtcgctcgcctcttctaatcatatgtaaaatcatatgtaaaac

SEQ ID NO: 77160 - DNA, 320 bp, Zea Mays
tagagataagaaatatgcgaatgtaccaaaggaaagagacatgattaaaaggatatgtcaattaagcttaaacaattctatacaatatagattgctccccctaaatatgtgcatagagaggaaaacaaattttttgtctaaaatgccaagtgcacataattaggttaatgaggtcatatctatatcataaagagtgtgaagtgcattgtgtcatagtataggtgtgatgctcatgacaatttatgcacttatgaaagcatgttgtaaacacctcaagcattcacccttaaggatttcaaagaggcttaaggaccatccac

SEQ ID NO: 77161 - DNA, 282 bp, Zea Mays
catcaacaactttcttgttacgacgaggcatcactactgctgattggacaagctagagcgtgagaacgaacacatcaaaattggggggaagaagaagaggatgcgagcgcaatagtttttggcacgaggttactcgtggagaagaggtgagcgcgggagatggactcaacgccgggagagggagagctgagcgcatgacgcgcacgagattagaaactgtgtagggatgaaacgattcgcgtctcagtccggtttcatctggcttggtacccgtgacaggcg

SEQ ID NO: 77162 - DNA, 674 bp, Zea Mays
ggaaccatgaaaattgatttcatatatttcttcgattcgtccaaaataatcgacatcgtcaaggccgggcgtaaagactctagaacacgttgtttttcgattgggtcgactttggtcgtagcttgttgtgcaaaaatggtatccattgacgtcatacatagaatatttcctgaccctataagcaaagccattggctatttgtctcaactcagcactgatagacggatctatttggccctgcaagtattcacaagttaaaagacactaaattgagttcatagacggatctcttttacaaactaatcacgtaccttatgtttgaaccaggaaatgaaatcaggcaatccatttctagcaccctttcagagaagggtatcatattcctatggtgttgtgtcccttgattgacgccagaattcatgaagaaattgtaccatgtatagcgtcacctcttcaaggttggtcaacacatatagcatgatatggcgtcactcttcatgtcttagggtcttggtggtcgaaccacttgcgcttccgagttggcctcgaaatatgctgaggttcgattcattttcgccgtcattgtaacgagggggtggattatgcacgctcagcagtttgtcaccatagtaagttgttgtgaagtttgacacctcctctagaatgtatgcctc

SEQ ID NO: 77163 - DNA, 704 bp, Zea Mays
ttaaaatctgaaggttaattttgttggcgttctcaccgtcgaattggctaccacttggcacatcttctgggatccgatcgttggctgtgaggggaaccacctggtggcgcatggatctgatagtggagtcagcggactctccctccagatgatatgcctcttcttccacccttcctagaagaaactgggattgactctctgcagatccgatacccatccctttttctccactctctattcgacagggtcgcggcggcctgaacattgcggcggcgatggaagattgcggcggccagagcgcaacagcatgggcgtggatgcgagtgggatggcgcgaaagcgggagggcgtgggagcgggagcgcaggagagcgtgctggcgggagaatggcgagttggagctgctcggcaaagatggccagcgacgggaacgcgatgccgagtgagatggagaagcgagctcgatggcgagactgttggatctagtttttcacggtcttttctcttttttggcgaggaaataatgtttaacgagtctgttgcagttgctcttagccggagtgggctatccagcatggtgttcgcacgaaccaccgtcgtcaacggctgggtgccaaactgccaaggaacgctcgccggccgcatggacccgcacagcggagaggcgagcgtcaattactgtggtggcctccacctcgtactcg

SEQ ID NO: 77164 - DNA, 319 bp, Zea Mays
acattacatgtcatctaccttcctcatcactcaaatctttccctctcccacttacaagcggaccacactcgttaactctttcttctaccttccttatacaatgtaggttgtcgactcatcgtgagggttggtcgtgccacgacggagcttgccacactgtctttggggctctcttcatgagtctacaaacagagaaagaatgaaacgacatgtacataatcaatggcaggtgggtaattcatggaattttctaactccatagcaggtgaaagcaaacaaagctattatgaaatttgtactaggcaaaactacttttagt

SEQ ID NO: 77165 - DNA, 594 bp, Zea Mays
ggaaacttggtttgaacctgatacatttgccgagaaaaaagacatcaggcgcaaaacaaaacaacaaacacactcacatacacacccaacgcacaacctatgccgcacaccggcatgcagaaccaagacaataacccttcctttagcccttggatgacaatactattgaagcagttcctccctaaatccatcctctaggttcgaatgttcttgatgcctgccaaagtccatagatgcagttcctccctaaatccatcctctagggaagataggcaaggttgtgctctatcaaaaacacattttgtttctatgcttccaaatgctccatgctcccttggatgacaatctctactactctatatgaggccagtgtaggcgtgcacagctcctgtgttctgcctcccgcgatcggctgccgccgcgccagctccgcaaaactgccgcgccgctcccgcaaatcccgccgccgtcctcgcggccgcatcgcccccggacctcgcgccagccacgcccgcggatggaaggttgccagtccaccaaatcgcgcggatggaaggcccacctgctcctcgccgctcccgcaaatcagccgcg

SEQ ID NO: 77166 - DNA, 461 bp, Zea Mays
gtgacagacagggacggacatttcactcggcatccatggcagcagcagaagcagttcgccatgaactgaagaaggcgcgataaaaaaggctagtacgggcaggcagtacgtacggagccccgaattgatcgattgatcctacggctagccgagccgagagccaaaagcgatagcggcatcacggtagagacagagtaatgtgggattcgaggacaagaactgaagaaggcaaggcgcgatcaaaaagggctagtacgggcgatccatctgtggctaatgctagctagtacgagatctctgccccgtccgtgccgtgctgcgggccataaaggaaggccgaggcaggcaggcaggcaggccgaacgctgatccggtcttgcattgctcctgcctgtgcctggtcccgcttgcttcgatttcgatttcgattccttccatcggttctgcactgcacagactcc

SEQ ID NO: 77167 - DNA, 430 bp, Zea Mays
gaactcgccttaatagatagaaagtggaatcttattgtctgggggcgatgaattcggcagctcagcgagaggcatttcggcgccggcggcatctgtgcactaataactaatggggtgatgatgaacggttgctggttaaaagtacaggtcctccgtctaagtcaagagaataaaacagctcaaacatacagttcataatatacatacacacatacgacggcatatatgtatctaaaagtccgttatatattccattccactcccgatctctcgctctcaggacctgccgttttcttggacgaaagttgagcgttccgtgcgaagttgggcgcgccaggccgctagtcatgtgcgtgaaggctgaagccatgaaaaccactctagagggtgtcgacactccttgacgagattcagatcccaaaggtaaaaa

SEQ ID NO: 77168 - DNA, 1355 bp, Zea Mays
aaatgcgaggtctatttgatatttctgagcaaatgtaatatgtcaatgatgtgcttaatgttatcttaaccgtcagtttcatactattagtgggtttgggaatgtttcatttataatagtgatcgagttccttcatgccaaagatgttaaaaagtatatgctgatttgttgtcctgttatgattaagttatgccctatgttgtgttgcacatttttagatgacttcaaaggagaactatgttcattgtttaggcagtaggtcttatcactacaatgtatgcattaattatggtcaggattagagtgcacgaagaaactaagccttatataacaatgcccaatgagtgccatggatgaggaaaggaaacaaaatctggataaaatacataactacaaagatgtagagtgtgtaaacatgctacgcatgagaagagtgcccttttccatctatgcaccttgcttagggagagaaacctatcaagggatatcattcactgttgtgttaaggagcaagttacgatgtttttgcatgttgttgttcacaactaacgttttagagaactgatgtgttgagggataggcacatcctaaggatgttgactacttgaacaaaccaatagagaactaccaacagattcctaccatctctggcaatgggttagcaactgggaagtagggtatggggtcaaatgaggctataggttcaccttctgactttactgaatgctcacaacatagtttgtcaatggatggggcaaaatgtggtctaaaatatgaagaaggaccaaaaccacatgaagaaataactaatatgaagacacatgaccaaggatcacggggtgggtctgcatctcagcatctgcaagcaagaccaaaaagaggtatatgctaactaaggaagatacatttgtgcatctaggaatgagtgttgttgtcaacaatgtcactaaagctattagtgaacctaaggtggtagaagtccacctagatctatatggggcggtgatgttcatgactggattcagtgatgaggccttaatggtggcatactcccacttgattgacagtaagacctaggggcgaggacgctacatctgttagtatgaatgaggctcatcgtgtcctctggttacacacattcctagctaaaaactgctacacaatttaggttctaaccgacagtgccgtttctagaaatatggggctccgaagcgaactcaacgataggccctaaataaatatgaaaatttatatatatgtatagtatagccaaagtatgctttaagtcacttaaataacttagatatgtattgttccatatcaaatactaatattaaaatagtaaatacggtgtt

SEQ ID NO: 77169 - DNA, 472 bp, Zea Mays
gtggtgactaagctagatctctgtaccaaaattatagcctgacaaaacagctacaactttgtcacagcaatcttgatcaaattctcaacaattcaagcttgaattcacacacaaagctggctctgtttcactgaaaatctgaatttcagaatggaaccagcctgacagccaaacttgaggcttaattatctctgactttttcttaataactatgctcacaaccttaagcaaagttgttctcctttgtttgctctataactttgatgtggtgacctagggcaaaaacccttttgtttagaagttacaaggtcacaaagatgagcacaatacactgaaattcagacttagtcaaaagtgttcaaatgtggttcttttgcaaataagtccaaaactcagggtttggcttgcaaatcctcctaaatgtgaaccatgtgactttatatatttaaacatagtagtttttacactttgg

SEQ ID NO: 77170 - DNA, 480 bp, Zea Mays
gggaatttcagaacttgtgaatgacattcttgttttatctatatatattttgtcgcccagtgtttctttgacttcggccttaacgttctttcattcttttttgcttgcagcaatatttgtcgattctgaacaagcaccgtttgatgggcccggcaaagggttctcgaacaattaacaagaccatagtaaaaggatatgaagatcaacagcagcatgatgacccatctagttcaagcaaagctaaacagaaagtatgcatatttatttctattggaagctctatgaaaaattatggttgatggtctgtagatagctaccagtaattatgacatcatatcatctaaattgacattctagtattcagttctctcattcatcaagctattttttattttgcagaagaggaaaatttcagatttagatcccaaatggagcaaggatgaacttacacgcttttatgaagcctaccgtcaacatggg

SEQ ID NO: 77171 - DNA, 577 bp, Zea Mays
gtacccctaattatggtccccgacaccttgtaactccacttggtaattaattttctttacttcaaccattttgttgaaccttacctatcttacccttgcttgttttctccactttgtcagtcttgccttaaatctgtccatggttatgcttttcatcattatcacctttacccttatcacctctatatcttaccttgatgtttatctcatacctgccctttaaaatcgcccctcttccgtctcgtaccttctttctcttggtcgtatcctcttttttggctcgcgagtttgtaacctcatcatttgttgtgcttttgcttcttattgcctttacccttctcatctctcaatcttaccttggtgattacgctatgttcgttatctaaaacctccaatctcccaccttagttcaagcgtggtctcttacttatctcacccgtggttatcctatactttacctcttgcaagacttatcttatctctattcttgattgtacctagattcctggtttttttatgcacatttacctcttcctttatatccttgcctattatcacctttgacccttgacctctc

SEQ ID NO: 77172 - DNA, 443 bp, Zea Mays
ttattttgtattaaaaagtaatttctataattaaataactgaatttaaagagctatggactgggcctcaatttctggaaatgccaggggttctcggtgtaagtttcctaagacacagggtatagtggctatggacggcgggttgatactaaaataacatagggtttcttatgaaaaagtgcctggccgaaggggtatctcaagatctcggtcattggatcggacgcgaacggtgtggattagattgattttatcacgaaccggtatgcaatctagtccatcggatcaactaccaacggtgacgattttaaatgagcttgatccgatcgtgcccctgtgttgacgatccaacggtcgcggaacacacaaccctaaacggtacgctgggcgccatcgcagccacccgagacggatcgaacggcccacgagccttcttccctcccc

SEQ ID NO: 77173 - DNA, 833 bp, Zea Mays
gttagggcacaaaaactgggggatttggagaaacaggggtcaaacgacgcgagaacgacgttggaacaatgaattgtgccaaaggaagtttaaaatttgaaaagaggcatgaaatgatgtggaattgagttgatacttcacagatatgtatgtatgagtaaatatgagtgaagtgtgtgcttggtttgaaattttgcggagaaaatgaatttgtggcactcggcttagaaacgatcgctataaatgggaaacagtagaatacccggtgtctaggatatcggataggcgtgaattttggcgaggaagttactagaggtgtcatgggggtgctggaaaaatttggggtcgatttgagcaattttgactggtttgggcatttcatcgaacacgtgatgtgagaggttttggattgtgggtgaaatggctattttgaagtttgaaacctcccaaagggagaagattacctgcaggggaactcaaaaggggtactaggaacacactcatgcacaagattcacaggatttggacagaatttggattttgctcaaggggtggaagacttgaactaactggacgagaataaaagagagagagggaagaagacaagggaagctcaccagggacaggaggagcatgagcacaagctggaggaggtcgccggagagcagtggccggaggtcgccggcagtgaggtggaggaggaggaggaagccgccagagagcaagagtgagcagcacaactgggagagaaagaagactggccacgagctcgggcagagataacctttttaaaaacgggttatgggaacaccggatagtctatagtgcctgtc

SEQ ID NO: 77174 - DNA, 447 bp, Zea Mays
atttgggcggttctgccacaaaaaaggtcccacaaaatcatcaaattaatcactcatgtgggaagcacaaaagaaaaccccctttttctctaagtctaatttcagccctcttctaaagatcacatgtgttcacttagttgcagacgccaaatcaacatggtccaattaacaaaagggcaccaaaatacccaaggaacaccctggaaaaatttgaactcaaaccaaagccgacatgaattgacatgggttttgtctcgggatgaacagtccagacagacctgacttggcgccaccatatctcccacacccgaccatatcttcacttggaactgacacaagacagataccccttggcatagagaagagactttacacaggatttttggcaagatttgcatgtttgcttgctcagcaagcgtttgaaccagggcagaagcaaacgtccac

SEQ ID NO: 77175 - DNA, 712 bp, Zea Mays
cggcgacacgtggatgattattccatgaactaatctcagcacacaaaataatactactcacacgtacggactgccaattgtttgtcaaattcatgcgcgcacaaatgtgagaaagaggaaaatattctccatgttctgctagctacttgtttgtgtacgttgctccccattattggccaacatattgattggcaaatgtgtattatggctaagatcgaagaggataagggctggaagaggattaagcactatgtttacagaagtagcaagaaccaaacaaccgaagcaaagctagctcgaaaggaagatggatcatcaggaccactactgcagccctcgtctgcacagttagaatgatgtaaacgattcgccccccaaaaaaaaagaggttagagcgatgtaacacctgatgattgtatgccgctgctgctggctaatctaaatggtctacatcatctgtgtgtctgctactatgttgcgttcctaatgtgcaacaacaagctttcaaagtccatgtccttgtcagcactgtgtatgaggtacggacccctgcacagtgtgctgcttttttggcgttatttaccaaaaagatgagggtgtgagtgagaccatataataagccatcgcatgccttgtccttgatggatcagtagacttgtttggccgttgttgttggcacattaacgtaagcaaagacacaaatcgggtgtca

SEQ ID NO: 77176 - DNA, 583 bp, Zea Mays
atccccaagggggctcgctgcagccccacgtacgtgtcccgaaggctcaaactctttcacaaacagtaaagtccaagtcccgacgaagtcagggacgcaatatcgcggggtcaagggtgccatgtgcaagcgaaggccatgccagattatagtggggctcaggctcaacctcatcaccattcgggcccatctgtaagccccttcacagggtagattttatagtatgtctaggctactatgcttcaacccactataatgacctcgtcgaggtgaatattccaaaaatgtagcaagtaaccggggtataacgatacttggggacctgcctaccttctcggttacctataaatactcccgcactgtacaccgatggtacacggataacaagatgctacagttctccacctactgttttgttgtgcacctgagctctcccattcccgagtgttggacccacctatccacgtgtcagttggtcacaaaatttggcgcccactgtccgtgctatgacaacccaaacccgtgatggcccccaagaaagtgaccaccagagctagcactgctctagatgatgctacagaag

SEQ ID NO: 77177 - DNA, 460 bp, Zea Mays
cttggcaaatattccctatgagttggtcccaaggatgattaggaatgttagaatgggctaggttgatctccattttgatagtgtttggatggaggtgacttgtttcaaggggaatataccccttagatttgtagtagcttcatccataaaatttaggggatgaactcatcccaaatccatgttgtgatgcttcatcgactaagcatgggtcctcggcttcacacgctagtgcgacacggggcttagggcggctgtagagacatggatcttcaagctctttgcaacacatgggcggccaaccttgtggcggatgggaagtgctagtctctaggtagcgtagggttggccgtctatggtgcttaagactgtcttcaacggcccactctaaattccacacctatatcctatatctcactttcatgacacgtcagcaatctctcttgccctatatctcatcttc

SEQ ID NO: 77178 - DNA, 513 bp, Zea Mays
gaagaataggtatactgatgattcgatgcaggaagagatcgagcagtcgtgagcagttgtgtcgctgacactcctaaaaaatgtgtttgctcgtcccttaaagaaaacaagaaaaataagagatatacctagtggcaaacatatgtcgattgatatcgatatcgacgtgtggttggtatagtaatgattcgatgcgggaagagattaagcaatcgtgtcgccggcactattaaaaatgtgattgtctggccctcacctgagtagcaaaatgcaggagtgtatgccccttggcccttatataggtgcagggtgagtttagttcattgaacctgaatgctctttggtgtgtgttgatggtcatcaatctgccacatcacgcctacgtcctagcccgacctgactcggtgaggcgagggaacgcgcatgcaagtggcatgccaatttgtttttctccaacttcatagaaggtgtacattaagtccaccttttatgttggttaatttttttctttca

SEQ ID NO: 77179 - DNA, 455 bp, Zea Mays
aacgaacttgccttcagctagcttctcttgtatgaggattgaactcactatgtgatgagaggccactaaatatagcagcaagtcggatcctaaggtcgggctggacaggatggcgagctctaacaagtatgatttgaggtcctcggatgctgctgcttgctctggcccccaagcgaagtgcctcacacctcgcaagacttttaggaatgggaggctgcgcttgactgattttgaaataaacctgtttaaggctgcaatgcgtcctgacagcttctggacttctttcactgtttgcagtgggtgcatttctgctaagacctttgatttatcagggtttgctgcaatgccctttcttgacactagataacctaagaactttcccctatggacgtggaaggcgtacttgtctggatttagccagagtctggtttctctcatgttagcaaaggtctccg

SEQ ID NO: 77180 - DNA, 568 bp, Zea Mays
tggggcgccatgggcggtgatcgacgacatggtgcagtacgcaggccgcctctacatcgcgcctgcgtctcccctcctacaagagatcttgcgggcggtgcatgaagagggacatgaaggggtgcaacgaactctccaccgtcttcggtgcgattttcatttccttaacatgaagcaggtggtagaagactttgttcgcgagtgtgtcacatgccagcgctacaggttggagcacctgcatcctgccagcctacttctccctctgccagtaccgcagggcgtgtggttggacatcactgtcgacttcatcgaggcgctccctcgcgtgcggggcaagtcggtcatcctcaccgtggtcgaccggttcaacaagtattcccacttcatcccactcgctcacccgtactctaccgagtccgtcgcccaagctttcttagccgacattgtccgtcttcatggagtgccgcaatccattgtgttagaccgcgacccgatcttcacgtcgacattctggcgcgagcttatgcgcttggtgggcaccaagttacacatgacgactgccttccac

SEQ ID NO: 77181 - DNA, 615 bp, Zea Mays
cgaaaatatatcggcctacgaaaatttaggcgtttcctgtagtgttatcttagctggttgttaggcgagaagtggagcaggggaacagacttataaacctcatacatgatgcatgacgaccatagaaaatggtgctttataggagtagaagatgcagaagaatctaagtgagggaggtgaagacgagaagagagatgagaagtttggggggttaatatacaatgaccacaacgaggaggaggaagtgctcgtagtggttgcttacgcatgtatgcaagcgagagataaggcttatgttagacgagaagagggaggagaatagacttatgtgcttcgcatgcaagcaagacataagatatctagtttgttaggcaagaagatgaagaggggaacatacttatgcgtgtgtgacgcgggacaccatgtgctcatgcaagcaagatatatgttatcttatctggtttattaggcgagaagcgggggaccatcgaaactggtgctttacagtagtagaggctactacaatgcatgcgtgttacgacggcatgcacaaaaggacaaatattacactttattgtagccaaaagacctagaaagctacaagttgaaaaggag

SEQ ID NO: 77182 - DNA, 895 bp, Zea Mays
cgccgacggtggggagcttggaggggcgtcggggcacacgagtacaggatttgggtttgaggaattttggatggagaggggtcgcggggcctacttgcaggtcacggtaacggcatcagagtcacggaaacgatggccaagcagtgttctgatgtttttttacgcgtgggagggtagaaacgaggagttcctcagactaggggcaaaactgagcacctggtcacaactaaggtcacccatgtaaaaacccctagaatatattcgctaatttcttttttatttgtcgcgttttagtaaaaataactaacgaacatcgaatttgtgtgccttcgcaacgcacgagtattatactaatcagtgtatatatcacgactgagaaaaatccacatgtcaactctactactagtggtttagatggacgtcattcacatttgggcagtcagatatacgcaaggatctcagggtagtacatttcaacaaacacaacacatcctgatcctgcagcttgcatgaaacaacggacaagctcataagcgaaggtaggctgtccaccacacccggaagcaagctctcaagctcatcatgcccagaaatctctagcacctcgatgctcgacaagcgtcgagtggagtcacatagctttatgcgtccggtgaccgacaaccgtttcaacgaagtcaggccctccacatccagaaacaagccctctagttcgtcgcaaccagaaatctccagctcctcgaggcctgagatgtgcatggatgcttgctctaaagaatcacaaggggtaaatagcctgtgcaacttgctgcatctggagattgacaaggttttcagtgaagcgaggttttccaccaagcctgaaggcaagctctcaagttcatcacacccagag

SEQ ID NO: 77183 - DNA, 531 bp, Zea Mays
gggggtcactgggtgcccttagccgcttcatctcaagactggctgagagggagctacccttcttcaggctattgcggaagtctggtccattctcttggaccgtagaggctgaacgagcctttcaagagttgaagcagcaccttgtgtccttgccgatactggtagctccagagccaggggagccattgtacttatacattgcagcggtttcagaggcggtgagcatggtgctggtcgccgaaaggacgacacaacatccccagggaagtcagaaagttcccctagaagaaggtggtggtccgaccaccacgatgttgatggagttttaggactcaggaccgactgtgggggtccgaaccatccaaaagccggtctactacgtcagcgaggtcctccatgagccaaaggccaggtatcttgagacgcacaagcttatatatgctatacatgtcgtgtccagtaagttgcgccactattttcaggcacacatagttgtggtggtgtcctccttcccgttaaaagccattctcc

SEQ ID NO: 77184 - DNA, 805 bp, Zea Mays
ggtgcttctaacaatcaaagtgtatgcatatgatgagatgacctatgggatggagtttagggagagataaaaaagggttaggagattagggttccaaaccttgggttgaaattttgggatgttacaaacctaccccacttaaaggaatctcgccctcgagatttagactggatttgagaaaaggtaagggtattccctcctcaaagagtcctcactctcccaggtagcttcctcttctccttctctgctccactgaactttatagagtcttacttctgagttgtgggtcttccagactgctgagtcaagaatttttattggcttctctcggtactggagatcttttctgaatctggattgcctcttcttcgatgagactttctggtacttgcaggcatttgcggagctgggacacatgaaacacattgtggacatcagacatggattctggtaattcaagacggtacgctgcgggtcccactctgccaatgatgggataggggcccacgaaacgcggtgctagctttcctttcacttggaaccttctgacaccacgcatcggggagaccttgaggtagacgaagtctccttcctcaaatatgagttctctccgcctgttgtccgcataacttttctgccgactctgagcttcaagtagttttttgcggatcatggcaactttctcttcagcctctttaacaaaggcaggcccttctagtgtcttctcccctacgttggaccacatgagaggggtctggcattttcgtccatacaatgcttcgaacggtgacatcttgatactggc

SEQ ID NO: 77185 - DNA, 1028 bp, Zea Mays
atgcgtttcccatcagtctacagaacgagggtatttatagggcattggagggcaagtagacttaagtgcaattatgcccccggttacctgctacattctcagaatattccatacaacggggtcattacagtacaacaaaacccatcgacccaactacacctaatactctaccccgcttgggggcttacaagtggggccaccatcatcgggtgaagcatgagcttggttatatgcctcctccaggatcttgccttcgtccgtggtggcttgaatggcgatgagccccctttcttgcatgggcctctacatggtcgcccttggcgaggacgaccgagggcctccgtgtagatacgacgaagtccccccgtttcgcgggggcacccaaatgtggttagctctgtctagtgcagtttaatcgcggtcgggctcgaccttcgctccaacagtaccccccacccgagggatcgtttcaagttagtgagctggccttgaagtattttttcaggcaatggtcgaacgatgccttcgatcacgagttgagctgacctcaaggggtgtttttgtgaagcaacagttgtgatgtgacctggcgactgctgacattttactgtgcgtatttttgttttttgatgggttttgttgggtataaaatctggtgtggggcctgtagggttacttttcttttgcccgtcctcaaactattgcgcaccaccgccgccatcgacgcatccgattttcgtgtgtttatggggcgatcgcatcgctggcttgtgcatcattgttatcctggcccgcgtgaagcaaactgcgtgccgacacagatggtacgtaatgcctccctcttcctcctcatccaatgtggcctcgtcagtaggctcaccgtcgtcggaggaaacacttagcgtgttgttgttggtcgcggattttctcgggacacgtgcaggagatgcagcagttagggtattttggatttggagttgggcgtgctctgaggtcaaagaggttccagagcctgaggggcagttggt

SEQ ID NO: 77186 - DNA, 655 bp, Zea Mays
accttcaacgcttgtgccggttgtagttgggtggcaccttggtgggtcgggggtaggggtggtgctgaccctagaggtgtgccgacgaattttttgagtaacaccacatgaaacacatcatgaatgtgtgttgtggccggaagtttgaggatataggccacctcattgatcacgaccatcaccttgtatggactaagatgttataggtttgacggtagggaggaagaggcaagggctcgagcgccggtccctggcttcgcaggtggcgaggacgatcggctagacgctgatctatgttgacagcaaaggaggaagagcggattaggagaggggaagatcttggaacaactttcttcttcatccattaatctgactttgattgcatttatataggccagctgatggccgacatctaacctgctaaaaactctcaactactaatttgctatttcttcctagattctctgaactactattatgctattctttccttgattctctcaattatcttgttgaacctagtgcaagcgttgtaaacaccacaaacatgtcccttcaatacatggtggcggtcacaccacaaacttagttgatatgaactcacaagtctacatgtcccttcgagtacaactccaatggtttgagaaaatcacga

SEQ ID NO: 77187 - DNA, 467 bp, Zea Mays
aaatattgcatttactataaagagtgttagtaggatgtgtttcacttgtaggactgtcaggggaaagatccctgggtctctagggcccactggtcagagagagcgcatgagataggagcctccgagctaccaggggccacttgttagtgagggagtaagggaatcgtctacctcggaagcacccacccccggataagccccaggcaccgagcctgggcttgggcgtggtggagcagtagatgggggtcgggcgaaccaaaaggaaaccacccaagtgggtttcttgcctggcccgagaccgacccactataagtggacgaccgcattaactacgcctgacacctggacacagtagagagtcggtccgcctcccactcatggcatgcacagccccttggcttacagcgcactcatgacctacacagccccttggtcaagtggtgcactcatgacctacaagctcctcg

SEQ ID NO: 77188 - DNA, 2125 bp, Zea Mays
gatggattgtgtttggaaataccctgcctagtgcaactggcattgctgggtcttaatctgaaatcataaattttcacaacattatgcaacacattaccaactatagttgcattcaatccaatgatagtagaacgtaataattgatacacttattaatcatacctgtaagtattactcatggtccttcaggtcccatgcacgttttgaatgcattgaaaacccactcgaatgtgtctacagtttcgtctcccaacaatgtgaaaccaaatacggtgcactgtagatggtggttacaaccaacaaacattcccaggggtttatcatatagatttgtcttatgagttgtatcaaaggtaactgcatcaccaaagtcaatgtaatctgcttgctggctagcatgggaccaaaaaatactcaaaatctttccttcttggtccagttggaagtcagagaaaaactgtgggttatcttttttacacaatgcaaaaaaagataggagcttagatacatcattggcatttctttccctttgacacgctttcttcctgtcaacatttaacaatatatcatacgtcaatacgtacacaacctcctaatgtaattatatcagtataaataacaatattacttacaggttaatcatgtcttgtgtagttaacgggacattctctggtccaccatgcatttctgaaacaaaatccataatacagtgttgcagaatcctgctttcttgcatcgcactaaggaactccatgtagtcgggatcatgtgtcttgttgcactgtaactgattcttttatgtatccttattgaagaactcatgattatgttccaaatgaataagatcaatccgcactgaaataatattctctttggcatcatcatatatttttttagtttcataccagctttgcattgtgttggcttggaacttgtattatgcacttttggattaccatatcctctttcggcacgcttgtcttccattgaacaattcaaccacttgcatttttttctctccctatatctcttcaacggaaatccaacttcatatgcatatcagctatagaatttgtatgcctcgtccacattagtaaatgtcataccgaccttaggtaccaatcgttgatctatactatcatcctattcaattaatggagttgtcatgtagtgcacatattcaaaataatattacagcatgctgaatttctatgacttcataacttacagtataacaaatacatgggtattcgatgaacttacatggctttggagaatgtgtggtgtgtcctgctcatgatcaccaattgtcctcatgggtatccgttgaggagctccaaccaaacttggatgaactgtgttgctgtcttcaaggattcctggcgccggtaacgcagccgggggagttacatcatgccgaccatctgacctacagggtaatgtcgatgttgtactctctccacactgcaccgatccgctagccatcgccatggtgtatgccctaaccctcccaggtcaatgaactaaagctgcggctgtgtgtaaccctgttttattttttggagttatgctcctggccgaaaccatcgtggccgatattcatggtttgttcaaaatatcccgcgtgatttgcatgtggcgagatttctgtgtcccgacccaattacgattacctgcctattctgttacagcaacataaactcatcaccccacgcgcgaccccaccacaaatccacgatcccggtagacccactcgccacccacaccacgatatgcatgcgtcagatcgttatgcatttgttatcggcaatttaaacaagcataaacgcccaactacaacccgctcgcgtcccggcataccactatgctaatttacgcatccactaacggtaaaatacacatacataaacgcgcaaatcacgcctgaccccaccatgatcccgatgcacccgcgcggcacccctctattccctattacgcatccgtttcagccaaattccttatgcacaatcactgcagtccacacgcccgaccccaccacgtcccggtgcaccgcgacgtcgcatcacgcccgcagacctaccctggccggggctctctctagtaatggaagcccagggcttcc

SEQ ID NO: 77189 - DNA, 489 bp, Zea Mays
gttcgggccagtggttggcccggtacattcaggcccaccgggtgaacgggccggcccggcacgatttatgtgggggacatatatcccccgggtccactagaaggttagaaggcctcgcgaacagctttgggcctattgtctcgcaaggccatcacttcgtgggccatgggagaactactggcagaatgggccgacacagggaatgagcaaacgcgagccaaggtggctcgtggggttttaagcgttatccatagctctgatctgattctcctgcacgaccaccttggacatcggaactaagtgagaataagtcagcaagattataggaagataagttcggttggttcactattacttaggcatacatcgttatcgtacacacatgtaagtgccccacggtcggatatataaggcctagagggcaccccatcgagggcaagtgattcatcagccatctacttggttctctagcattcttcatactggaga

SEQ ID NO: 77190 - DNA, 524 bp, Zea Mays
cgcggaccagagcgagctcggagagcttccctactgctttaatctccggtaataatgccactctcgagttatgcattgcctgcacctactttttcgcccagctgtgaccgttggggagctcggcctcgatgggtgcttctcgtcgatgccgccgtcgtggtctgcatggccaccagtcccgcgtcgccgtctgttggggttgtgaggtagaagaggactgctagccatcggatctgtgatctgcgatggagatgagtgggtgccattcatcgattaatgtacggtggagatttgatcacatggcgatagaacacgagccttcggattgaaatcgtgcggttcggcgcggataagagcgttggcgtcgcgtgggccgttgatagttcgatgtgtggtcgagatcaaaccgcgcgcctgttctcatcgcaacgccctcacgtgtaatcttagccctccatccgtgatcgcaccaccagtagttcacgatacccttttggcctgtcaatttagcataggagcccctg

SEQ ID NO: 77191 - DNA, 811 bp, Zea Mays
ggagggttggttggctgattccaccctgtcagattccctttaagggtgacgacaaagtcgatggtgccgaaacgcacgctcgctcctgggacccagaacatagcgtgattggccatccgcggtcgtgtgatgaaacttgtattgtgatgtgcaaaaaagcccctgcctggtgcactaattgtcgatgttctgaaaataccagctagtgattctgagtgtttcacgcgtctgatgcgaatggtgagcgaatgagacacaagatctttctactggttcaggttgaatgtccttatgtccagtccggtaccttgtgtaccctacactcgatttgcaatgggggtggattacaaactgattcaaggaagggcttgatgcccaagcctttggtttggaacgtgggtggagtgaggtgcttcgtggactacaagtgacggatactgttgtgtgattgttgcccgtgtcccagatcgggactctccccttccttttatagatcaaggcagaagggagcacattacataaatcttatggagtcgggttctgtcgtttgcttcatgtccttcggtatttcagctgacagaaagactcttatagagattcttcctttctcttctagggtttggtagcaacatcgcgatcactgttgcatattgtcttatcctatgaccggttacatgtcatcctttattgacttctgtgtgagggagtggttggtctagtgtcagggcctacatcatgacaagtgacgcctttgttctaacacaccttcctctgacctgtcgaccaatcgcatgcttgtaccaaagtatga

SEQ ID NO: 77192 - DNA, 1051 bp, Zea Mays
caatctttgagcacaggattggtcatcggaaggtgtcatcatcgcgacatggtcggaggtcgagatctgctcagtttacaacttcaccaagggtgagttttcctacctgctgttcgttgtcatgtaggatatgattagaggcgttcgggctgtagtttcgggctcggatggcaagcactgaccagcttgctgccgcggcaatgtcgatccgccacggtcggtcagccgagggagagaagaaggagccaggggatgaagatgcgtactcgtggtcggtctggtactgaatgactaagattagttggtgcatacccattcgatgcattaaatctatggcatcaaccaatgatcagacaattttggagtcgcgtggatctctgaccgaagatccctgtctgtttaagacatttcagtttacatgcccttgaccacccttgtttcgtaatgatcaatgagcggtcattttattttgcacacccttggtgatctcattaataccttgtaactttcttcggtattgaatttttacttcaccttttctgtcgaaacctcacttatcttatccctgattgttttctccatttcgtcactttgcgagtcttgtcttaactctgtccatggattatacttttcatcattatcacatttatacttatcacctctatatcccaccttgatgtttatcttataccagcctttaaaatctcctcttttcatctcaatctgagtgttacactttacctattttaaccttggtcgtatcctcttccttgtcgcttgcgaatttttaactccaccctttgttgtgctctggttgggtattacctttacctttctcatctctcgaccttaccttggtaattacactatgtccattctctaaaatctccaatatcctatcctagtttgagaccggtgttttacttatcttacccttggcaatatcctcttctataccacgtgtaagcgtggacgtaactccattctttgttgtactcattccacttgctcttctatgccttcatcctttccctcatacccttgtctgtta

SEQ ID NO: 77193 - DNA, 923 bp, Zea Mays
ttcaagtcctagatgtgatgcatcgtaatacacatcaaatcctttatgaatatcagacataattaacactggtgcagtggttagcctttcctttaattcctcgaaacatttctgacatgcttcatcccacttaaactctttacctttctccaacagtgaagtaaggggtttaactattttggagaagccttcgataaatcttctgtagtatcctgctaatccaagaaaacttctgatcttggacacatctgtgggtagtttccaatttagtatttcacttattttactggggtctactttgattcttccattggtgataatatgacctaggaaagcgacttccttcagccaaaaatcacactttgaaaatttcacatacaactgattgtctcggagtttttgtagaactaatctcagatgaccttcatgtgcttcttcagtctaagagtatactagtatgtcatcgatgaataccaccacaaattggtcaaggtattccatgaatactttattcatcaagttcataaagtaagcgggtggattagtcagtccaaaagacatgaccaaaaactcatataatccatatcttgtggtgaatatgttttaggtatgtcttcagtccgaatcttcaattgatgatagcctaatcttagatctatttttgagaatattgtagctcctctcatctgatcaaacagatcttcaatccgaggtaacgggtacttgttcttaattgttacttcgttcaagcttctatagtcgatacacattctccttgaaccatctttcttgttcacaaatagaactagggctccccatggagacaaactggggcgaataaaacctttttctagtaattcttctatttgtttcttcagttcaattaaatctttgacatccattcggtaagctctttttgaaat

SEQ ID NO: 77194 - DNA, 719 bp, Zea Mays
gtacaaacatcataaattgttcaaaacgaatccatgacatacaaatgcatcatataatcttctaacatggttccactcctggccacaattattgtctattacaacataacacgacataaaatacagctattatgtcctgcacgttttatggttcgaactaagtagaatgttctcaacaaagatgtcacataaaaactgtccacgccaggaatgatgtcgacgccatgtgacagaacgttacaaattactcaaacttaaaaataaactgctgcaacttctttttctgttccttcatgagaatccaaacttctggatcaacatctgcctcattcgttgaacacaacatctgtaatcgtgattgggccgattcgagttcttgaagtttcaattccctttgtctaattatgactttctgtgcttccaattccaacctcttttttctcaaattccctgtcttcttctgagctcttgtctttcttttcacacttttcaattgacctctgaatttgtttttctgtcatttcttgcaaacggcttaagtattctgtagaagaggaagatgcacctttctttctctcagatttactgtaatcacgacctctcggccgtttgcctgtcaacccagcagaaccactatcagtttcaagtgcctcaacagatggattacctgaagatccaatagattttgcatttaagcctcggaaggaatgtccttgaca

SEQ ID NO: 77195 - DNA, 828 bp, Zea Mays
tgttcaggattgcctagtgctgcagttagtatgtcattctccctgaggcttaaattcgcccttctttctcttttctgcatattcttgaatttttgtcgaaacttcgcctaccaattctggatgcaaaagtttgccgtcctcagtcaaacctgcccgacctaagatccaacgaatagctcgctcatcaatatcttttaatattgagtcaaaagtgtcattagctatagcttcctcgattatcctgttccactgcacaactttatggtgatatccagttgaccctaggcgatcggggtgttcgttcatcttcgctctctgagaattagtttcgcccagttctttggccttcagttcggtcttctgacgaataaattcctcccactgagcttgagtgattttccccattttcttgggcggaggaaccttattcttcttaacaaaatccctattcatctcggtcttccacccatgaaatatcttggccataacagagagcatcgacttccttactacatcctctgtgccttttgggaccttgaatgactcagacaacttagcccatagcttattgcgggtgtcttcatctaaatccttccatttctgaagtgtgattggcactatatctctaacagtagacccgcagaaatttcgaaactttgtaaccacgtcaagtggttcttcaggaaacccctctgcattgagttttgttacgtacataactgcaccttctttcatctgattgggacctcgtcgccctcatttccgcttatgtgaaacagatgattcaggcatcggagcatcctccgtgtttcttgtagaacatgcatc

SEQ ID NO: 77196 - DNA, 601 bp, Zea Mays
ataagtatcaggcagttatcagttgtgataagatgataatcaagttgatgtctccactaggagaggaagtggtgaccgagttagtcccgcctgagctgaagaaaggaagttgttatcagatggttgtcgatagcagtgaggtagatccacttgggatcatcaaggttgtgtccgagttcccagacgtgttcccaaaggacctaccaggtatgccactagagcggaaagttgagtttgctatagagcttcttcctggcaccacccccatctttaagagagcttacagagtatctggacctgaattggttgagctcaagaagcagattgatgagctgtcagagaaaggttacatccagccaagcacctcaccttgggccgcccctgtcctatttgtggagaagaaagatggcaccagaaggatgtgtatcgattatcgagctctgaatgaggtcacaatcaagaacaagtaccccttgcccagaatagaaaatctgttcgaccagttgagaggagccagcatgttttcaaagatagatctgaggtcaggttatcaccagctcaggattcgaccttcagatattccgaagacaacattcattac

SEQ ID NO: 77197 - DNA, 751 bp, Zea Mays
ttagaggtggcagccgtattatgataatctaaagtccaactaaactctagttgctttggttgtacttggataatatttatttggatttaggatgttgtcgtggtaaagacactagggtacccaagagtaccagagaacggttagcaagaggagtagtgagcgagtcatgataacgaagaatatgtctatgaagtcttgatatcacaacgtaaaacacatggaattttacaatgtgcataagacctaacgtcctcttgttgattatatattgatgtatacaaatgatatagaaattacaaaccctaacactagggaagcccaagacccactagataataagtttggggtggtaagctagactaccaccaattgatgcttatttgactggattgaattgatttcccttattggtgtcagtttagagatgaagtccatgttgaactctcgttaaatgatactctagcctcatttttatagttcaagggagtggctaatcttatatgtatgcactacttgtgggctctaactatcatgggccagttgcccctatcctatgatagctttgtacaatgacatatcttctacagtgtagtcatgtagtgtatatcgaacattcacttatataatcatacctattgagagaccttctgggatgccgtccggagtgaggatgggtgcattaatagtgttcggtatggttcctcatacttgttattacgagaaagcataaccatgccatctagtcatggct

SEQ ID NO: 77198 - DNA, 545 bp, Zea Mays
gtagacggtagtactgctgctactttctgtcttgacgggtctggccgattgtgtaattctgcacgcagtaaaatattctccctgcaattaattctgcgcgcgcccccagcaccagcagcgagatcttctgggggatccgagccttgatttcgtaaagcctgcgcgcatgacagagcgaggactaggagtaccctggtactactgtacgtaggactgggtatccatcgggcagccgtgtcctagactgccaatatacgcctgttgcctgctactctggaattatacggcctgacaaaataccaagcagtcgtagtgtcgtacgcgaatgcatgacaaggtcatcatcaagcccagccggctatgtgacagcactatttcgaggtacaaaaccgtagataccacttgcacataaaagctatagtggctgtcccacacctatttgcactagcattttcagtgatgtcagtgctatgagacaatggaaatcggtatttttattgttggttgttttggaaccaaaccgccagtgaaaacatcatatccac

SEQ ID NO: 77199 - DNA, 705 bp, Zea Mays
caggtttttcagctttctataaaaattcagcttttcttaaatttggcttttcggaaacttgacggaaaaactagctgtttgttttagctttcaggctgggaaactgtcagtagagtcttagtaaaatggaaggagaaggaagcaggtgtttatcatccgatttttttatgtctaagagctagtccgattgtttaggaacgatttttagccggattgcacgtgtaatttgaataggttttaatcaggcagaacgatttgaattagaatccggaagaaactaagaaggcctaatcgagaaggaaggaagcagatgtatcgagatcaatcgatgtttctgacgattcaatgcctcggtttcttggagacgaatcctcttcctctcctcgctgctctggcaacccgtgtggtcggtggtcctgcgtccgtagtactcaaatctcttttgccaggaattagccccgaccctgcgctggtttttgcatcatgttgcaattgcaagttatgttgtgtctgactgaatcattcgtcgcgtgctggtgcggtgctgccacctgccagccttgctgtgatctgatcacgcgcgccatgcatggtccagatccgataatggtcacgtgctgatgccgcgtagaaatccttggccgtgagctgtgacacgtactgtatagatgctgttcagcgcaaatcaaatgggtccacaaatgc

SEQ ID NO: 77200 - DNA, 304 bp, Zea Mays
aatgtcaaaagttgcttttgtcgagaccgccgaagccaaaggcgccgcagttgaagccaccagagtggaagcccccgaagctgaaaccggcgcagccgaagctaccggggccgaaaccggggtcacaaaagatccgaacctggaagacacacttgaagttattgataatatactcctgaaaatggctgaggaagaaactgttgtggctgcagcgagcacagctactgaaaaggggaaaaagcaagttgaagacattttggaagaaagagattttaactttcaagatttacttgggcaagaattg

SEQ ID NO: 77201 - DNA, 1108 bp, Zea Mays
gttgtaaataactgttgtaataggtaccatatcttgatcgatgacatatggtctgtatcagcatgggaaagcattagggattctttgccaaaatgcaagaggggcagctgcgtagtggtgacaactaggttcagatctgtagctgaagcctgccgccgtcaacaaggccgtgtccatgagctgaagccactcgatgagtacaactcctacaaactcttccgtcggatcatcttgagtgctcctgatgtaccctctaatggtgcaagagctcttctgaagaaatgcggaggtttgcccctggccataattctagtcgcagggctagtggctagtaagctgagatcagcgtcagatgttgcccctaaagagaagaaggaccattcgactcaagtggactgggatgtaagtgaaaagttggatgaattcatggtaaaagtggagaagcaggacgttgttagtacccatatagaacaggacaatgagattattagtgaacggttggacaaattcatggtccaagtgggcgaggatttaagtgaggatctagagaaaaatctctccacagaaggagtcacagagatagtgaaccactgctatacccaattgcctgcagaccttaagacctgcctactctacctgagcatgtttcccaagggttgtttcatcagtagaaagcgtctgatcagaagatggatcgccgaagggttcatcgctgagaagcacgggaagacagtggaggaagtagccgaggactgcttcaacgagctcatcagcaggaacctaatccgagcggtcaacaacagcagcaacggcagggtgaagagctgccaggtccacgacatggtcctcgagcacatcgtcgtcaaatcaaacgacgagaacttcatcacggtggttggcggccactggcacacaccgttcccaagctacaaggtgcgccggctgtccgtccagaagagcgatcagccagagaaggagacggtggagaggatgaagctgtcgcacgtccggtctctgacggctctgggcagtttcaaagctctccgttctaccctgtccaagtttcagatactgcaggtgctggaccttgagagctgcaaggatctat

SEQ ID NO: 77202 - DNA, 1532 bp, Zea Mays
cgatgccatttaaattttaccaaataacatcataacaacaaaccttattgaaccacgtatatccactttatatccatctcataaatttttaacataataaacaatccatccaacacaagtacaattacatttcactatctgacttatcactcgtctctagactcatcgcatgcttctttgaagtagttgttttattccattctggagctctcgacgtattaatgttcctcgaccttggcggacaccctctttttcttgggttagcaaggattaccaaacgagctctattttcttcgattgaaaggaaagttctgctattatgaccatctgcaactccgcacttcttgcgccttctgttcatcttttttctcctttggcgcctaattttacagtccttacatcatcatttctaattgttcttccttttggtttcgcatttattggtttatccatacttactcctccaatgttaaaatctagcttatgcataataaattaatatgtacaatattaaaaacacacacgtcagttgtgccctttaacacattagttgttatcgatactacattgtattttcttttattaccttcctagattgtttgtccattttgcaaccaccccatccttctattccaatgccaacgacatcatgtcaacatattagagtgtcgtaatttattatggtatttaacataaatacaattattataatgcataaattcttacatgttcaactcttactaaagcatttgacgcaccaggctcacccacgttttcatcaccaatgtcctgcaacacagacttattctaatacaataaacattaccagcaatgttacaataaaaatttattcatatcagtgatgtaacacataattttcttacattttgatcaaattgttcagtttggccgcctgatcccataaccccaggaaatacacccacctcctgcactcaataataatacaataaattattaattacttattgtatatatatatatatgaaatcaagtatatcaaagttcacccatcacctgattttcatcacaatcaatatcgttgtcgctgtcatcacaccctatatcaggttctattcttgacaaaattcggaccagttcgtctaatgtatcaagtgccttttcatatcctgctttggacatacttggatgatgaacaaccttcattgttttcgttagcgacattttctgtctatatgatttggtaatcccatctttttctttagaatttttatatgatctctcaaatggaacgtcctgcctagctaaactagtatatctttgcaggatgtactcctttggtatttgatctatctgaaggtgcataaaagctttcaataagtgtacacaaataagacctgcatatatcattatgtaatgttttatcaggttacctatccagcatgtacaacattaatattattaggtttagataactaacatgtatgttcccaattcttgcactcgcaagtatacttatcgtcatccacgtttgctacaactttgaactggtg

SEQ ID NO: 77203 - DNA, 523 bp, Zea Mays
gaccgagaaagatgagttgaaaaagaacacaatccctatttttatagagctctctgtagctcgtcctccttcagctaacggggtgttactatatgtgtacaacttcctgtcgtattgggcttggtggcttctcatgatttatatatggtgtaacagccttgatgacttatacttcaagacattgactccatataaacacacggtatgactgccggttttaaggacccacaacatcttccattgaacatatgcccttttattttcttttagacacacgcattaaacacacaattcatggacatatagaaccataaagatgtctctagctattgcacaataatctgatagagaagaaagcatgcctcattaattatcaaacagaggtcatgcagggattcatgatgcagcatgcatgaaccacacatgagttgagtggtgtccaatatcttcttgcgtcatgcatgaggcctggttaattctgatccagctaccagaaacagatgggctaataaaccaaatgcct

SEQ ID NO: 77204 - DNA, 809 bp, Zea Mays
aaataacccaagtggtaatctagcttgagtaagagtctcgtatttagacttatgttgtttagttggacttgtgttgcacttgttgataggggcgaaaatggacgagaaaaatttcattttgttcggtatcgtatttcgttttacctggaccattttcgtatttgcggaaaaagcgggatcaggatagaaacgagatggtatgaacgggaataaaaacagttcagtgtttttccattcgtattttcgaaatccagtttttactaggatattcccattttagtcggctagtcaagcaaatgggataggcagcgtaaaaaaataaacaaaaaatgttgtcttagccctaccctttatggcctgcttgattaatctgtaattctctactcttgttactcaggactataatggtttgaactaactttggtgggtaattctgttgtgatctagattttattcaactatcttgtgcaacttatggtggataattctactgattttttgtttttgcttgtgaattagatgcctttggaaatgaagcccgtgaattgtgatgcttggcatgtccttggtggattaggacttgcttgcataatctttgacgttaccatattagcttgttctaccaaaccatatagggtacttgttggaatcggaccgccgacatatggaatgtcagttgggtcgcccgcacacacggcgcacccacccaaaccgtcgggacacaacacacgcgcccgcacacataacattgggcttaaggtctattgggccaacactcaccctcaaaaagctagcccattagggatttc

SEQ ID NO: 77205 - DNA, 752 bp, Zea Mays
aaataaacgaacaaacatcggttggttagcttttgggatttagtttcacaaagaattgggtgaaaggcttggactcatccaatctatgtagaaagaaaaactaacatatggaaaaatgccaaagtgccgagcaaggtctaagcggttgcaagtaaacaaccccttggtgcgtaaccaccagtccagctccaggtcgtcgttcgtctcgtcgtgcatttctccgcgaggatcggcatgtcggtattagattgcccagggccgaccgcatgaagccctcgccgaacaggagctcctacaacaccggcaggcacaaggatggtgttagcagcaggtgaagggagcggagaagtagataggggaatcactggaagaagaagataggaacggcgacggctaccgcgaccgtagtgttctattctcttaattctttgatatccggttatgttgtcacgattaccttttaaggcttacaaacaggcttggcccagcacgaattacatgacccaatcgggcccaatgacacgggtgttttctcgcctttcatgacggggtcgcgcctggccgtcgtcttctccatgttcctgcgtggttgacatcgatgcttgcttggcttgcttctcttcccgacctgctgcctcctcttgaagtgctggtttgacattccccctcccttgaggcgctgcttgtccccaagccggcgcgcacgggaaacgctccttcaatgcggttgtgtcctcccaggtggccagagc

SEQ ID NO: 77206 - DNA, 341 bp, Zea Mays
gtgtggcttagtgaatgttatgcctaaatgagtaaaatactattaagaaccaaaacctagggagtaaacattcgactcctaaaactacaaattataagaactcaaattccaaaagaaatgaagctcaaccaagagtgaaagtttgggaaatgggttaaagaaatgggaacaacccttatttttctaagtctaatcttatacctcttttcaaatgcccacatgctcatacaaaaataaaatccaatggagcaatcacaccgaggaagaagttacatgggaaacaaaggattatctaagcaaaaactaccccgaatttctatctaaaagtgttagtacgtaat

SEQ ID NO: 77207 - DNA, 498 bp, Zea Mays
gcaccaagaaaaattcccatgaaaaaggaagaatttctatccgactgatgtaataacttattttctaagaataaaagagtacaaatggacgaatcaaaattgtgtggagaaaacagaaccttgtattttcaggcacttcagtcagtatttcgcttcgaagttctgcaactctgaaaattccaccgtgctgaatactcaatcaattcttcaacacttctgccaggactcgagagaaggaaacccctgattgcccacgcaaacttcggcagccaccatgttctttttccagtttattatgagcatttagagcacctgccagcacaaattggactatgtaccaacaacaaaaggtaatagaactgtcgaagagatttccactaggccgccgcaaaaacaaaaagaaaagattgcacatcacatcagacacaacagagcacaagacaacaaatcggtggataaatttaggtgtccacatcactgcaaactgccttgagaagt

SEQ ID NO: 77208 - DNA, 590 bp, Zea Mays
tcagagtggggtatcgggtacctggaatgcaagactagccttagtgcacgatgcggctaccgtgctcctgcgacatgaacttctccccctccagcgcacgaattgtgggccatcctctctcgccatcctcgtccatagaccaccgcacaaacatgtgagagcgggacgatgcagagcgtgaatagaccaacggcgagcgggggaggagatgacaggagacaagacgatagagtgggtgctccctgcgtttgccgtactcacgctcggtgactcctcgtcaccgcagccacgggttagtccgcctgcatgtggggcgctcgtaaccgctgcttctcaggacaaaaggggaagcggggaggaggacaaaccgatagctgatcaggtgggcttcggcaacgagacgctgagcgccgggctggatcggccccaccgcgatgatttgacatcggtcgctgtctccgcctcaccatcggccatgatggtcagtggatgataatgatcttcctctatagcagaccatgtgggaggcgaagggaaatccgggagggataacgaccgatggcgatctgctagggtttggcttaggcgcg

SEQ ID NO: 77209 - DNA, 371 bp, Zea Mays
agaagttttggtttagaggaaagatcaagcttagggtaaaatagggttttgtggtagctaggtctactcttagctcgggtctgacaattagcaaggcttcaatatcacttctatcacactcggttttaaggacaaaaccaaatatccactatacaagtaatcaacacaaaaatcacatgcatagcaacatcatgtagtggattatatcgaatcacaatactttattaataacgaaaagtttattaccacataaccaaaatgtttgatacaaatccaccaacagaccatcatgtagtcgattgtttgatcatatgtctagaactcgtcgtaatcctggagctcttgagtccgggacaccttttattctcctt

SEQ ID NO: 77210 - DNA, 1400 bp, Zea Mays
tcaatataatcaaaatataagaatggactccccctcaagatatgcatcaagaaatttgaaagaattgattttgatacattcatttttttaaagacataaagggagatccattatataccttgatcgaggcttataaaatttacaataaacaacttaagcctggtaatctcataataaaaaagatttagaatgcttacaaccacaccattgattgttgtgaagaccttattgtccaagtaggtgttgttgttcttgatgttcttcctttttttcatttgagtgtcctccctttgtagttgtctctttttctttccaaacttattgaaaatactcaagagagatgtcaatagcgcaagggagtatatgatgaatgatgatttcttttagaaaaataaatatgaacaattcttcatccataagtcacacagacatgaagtaaaatccctagcattagtgcacataataggaaaagaagaatatgcactaattaatcatttgatcaatcataggaatttacttcttcatattgagtttattaatcattattttaaaaacaagtcaatatgagaacatttatagcaaaggtatgaaatagattctaatggacaagtgcattaaagagattgaggttgaatgcacgtcttagccaatttaaattcaataaagaatctatttcttcacaaagatataattatagtaaacaatcattgatgggaactacattaggttaaggagatgagttcccatacctttgctttttacctttcttcctatgggtgaagatcaactctttgaggcttgtggtattaaacttgcacttactctcttgtcgattttcataagtaagctcaagtgaaaagttaatggcaacacaagcactagtttccctttttgtaatcattttgataaggaatgaaaaactagattactaaaagcatggaaacttcatagcatgaactagattatccatagaagatgttatgctcaattttaactcataaaacaagcataaccaatcctttaagattatggaaatctaatccataacatggagagcgataaatgtagaagaatcatatccaatttaagcaataggacatacaacataaattattggattgatttgtctcgtcatgataaattacgcatctccgacaagaaatttatttctataagtgagactacttaaattacttagataaaatattagtctcacttttctagctatagagagaattttccttttataagtgactaagtgtttgaattccttacaccttattcttttaagaacatgaaatatctctctatatctagaacatgacaataatagaataattagtgtaaaccatgccatgggaaaaagcaacaattttaaagcatgtagattgtcataatat

SEQ ID NO: 77211 - DNA, 717 bp, Zea Mays
aatggcgggtggtagcaggcgagtgcggcaccagcagcacgacgcggaggaaggcaacgcgaacagaggaagcagggtgaagagcgtgctggagacagaagaatggcatgctgctctttttatataggtgaaagggaaggagaaaggacgcccaattaatgcagatttgatggctaattgatgcgttgtgaatttccagagaaatgaaagcttcaaactccattaatggagaggcaggaaacgctcgacacagtggagaagaaacggatgaaaacggacacaggaagagcaagggcgacggatggtccaagagcagcacggagattaagaaaagagtaattgctgggaagggaaccggcacgggcaaccatcattgatggcgaaggcagaaacggtgagatagtggggagggggaaacaaccgtcgacgtcacagccatcggggagacgaggagccgagtggcgctgtcctcagcagagatgaggagcgggaggcatggaggccgacggctctgtcaagcgatggtgactgcgctcgtacagagaagacgaacgaacaaaaaaattgagaaagggtgatgacgtgtgggtcccacatgtaagggagagagaggtgagagtagtgtgtagtgtgtttcttggctggctgagacttgctgagccgattggtctttaagcgtgaggtgagttcgttgcttctcttttttttcaaaaatct

SEQ ID NO: 77212 - DNA, 470 bp, Zea Mays
gaaaaaacaagaactagggttcagaggtcaagaggacatcagcagaagtatgggttggcacactaagtcgggcgcaaaggggtaggccgatagctcgggagagttttggtcacagcaaaataacatcactcagggattacctttaaatgctagcgaactgtaagacactagagcggagtatgcaacaaaagattggcacgagaacaggttttcattcaccaatggggtaatcattacaaaattgagatcacctcattatgagtcggcctcccgcccctcgatcttacattacattactacttagactacattacactagtagttaaactacattattctacaactaactaccactactactatgctatactaatatttaagcaggcaacactatgccactggccttgctgtcgtcaccgcccttggcattgccgccaccgcctttgctgtcgccttgtcgtcgctgtggc

SEQ ID NO: 77213 - DNA, 1107 bp, Zea Mays
gggatcgtttcaggcaactttctcgctacgcaccggaagaagtcgatacagatgagaagcgccaagagcgattcttagaaggtttgattggacctctaaattatcagttgcaaagccacaactctcaacaaggcaattggcctagaaagcaagagaagggaattgtctgatcataagaggaaattccaaggacaatccagtagaaacaccagacagaacaactctcaaggttctcagatttgctctggaaattagagtggaaatagtagttacttagtgcaacgctctagatagcaaggatagagaaacaaccagaaccagcagaggaacagctctcagaccggtcaaaggtctagtggttatcaacagaatcgccaaagaagcgtcgtgaacaacaccggccagaaataacaacaccactacaccagttcaacctagtggatgctttaagtgtggtgaacttggtcactatgccaacaattgccttaagcgcaacccacaaacaccctagaggaacagcaaccaaagagctgatcagaatacacctgctcgtggaactgcacagaacaagactctacagaaccagagtaagggaagagttaatcatgtgacaacagaaacagttcctgaggatcccgacgtggtgtgtggtatgtttcttattaactccatacatgcattagtttttttattctggagcatctcactccttcgtaacaaagtaatttgtggaaaagcataatatattaaactatcctttgaagaggaaactattaattcgatcaccaggaggtgaacttagagccactcactcatgccctcagactaagattgaagttagaggaataagatttctagtaaagttgataatcttggaatcaagaggaatcgatgtgatacttggaatatactacttaaccaagtatgatggagtaatatcttgtgcccagaggatggttacattaaccagtccacaagaagaaagaattgaagtcaatgttagtatgtcagcaatagtacaagccatggtaaatcaattggaggagaaatcgttagacaacatcagaatagtgtgtgaatacccagacgtatttccggaggaattac

SEQ ID NO: 77214 - DNA, 447 bp, Zea Mays
attgattcgtggatgtacatatggcgatatgtagctctggtcgcataccagttcgagaaataatcttggccgccagatgtggatcgaaggaagcataccggctaataccccttcagtcgcgtccactttgctaaagagtccctgacctctcacgatttcaacccacactccatagcaatagaaaaatcattacatctaggtcctagattttatggttttaaccccaagcaactaggtaatctaacccgcaatccagaagatttcttattcatataaattaaatttaaaaaatgatttttagtatgaaaataattcctaaagcttagaaaattcataacttctaccttttaactatgtttttagtggttctcgaacctaccgtctcgactacatgtttggtgtaatgttattttttatttattgtttatatatttgtatgtatttatg

SEQ ID NO: 77215 - DNA, 1943 bp, Zea Mays
gcaaggaaaagggcttcgagggactaagcaaaagagaatgtcaagaggactgaggtaccaaggtgtcactgtttcgaaccttcgctccaacaagtaaatttctatgtgcacgttttgggctccgaacagtgtgcttggtgggcacaaggtttatactagttcaagcataacgtccctacatccaatcttcggtgcctcgtgctaccgacacctttgttgcttgatgcacatagtaggggttacaagcaggttacaaggggcgagagagggagaaagggctcctaggtctcttatgcgtggatgggcctaaagactacgggactagagtcctacactaagccttggcctcggcctccaagtccttaggtctcgtgcgggcaggtgcggttgccttccatcaagtgtcttctgttccccgtgtttgtccatctccttttataggccaaggcaggggttggtcgtcggtggcctccttgagaaaggggcttaatactatggtaaaactgggtgttttaccctagcggggccgtgttgtccacatgcgtcttgtcgcctgatcgtatccattcatgctcattatgacgaacaacgtgggcagtgtggggccccagcgtcatcattactacctctatgccacgctgacccttggactccatagcctaggtcttggcatggctcatcacgttgcggggcctatggatgacctacgcactcaggcctaggctcgataggttatgagtgcgccgcagcccaaggggctcataggtcataagtggaccataggccgagtggctcataggtcatgagtgggaggaggaccatccttctactatggctcggtgccaagcgtagttaatgcagccagctacttatgatgggtcagtcttgggccaagcgaggaatccactcgagtgcattcccttcagctcgcctggcccccttctgtagctctaccatgcccaaccctgggcttggtgcctcggggtttatctagcggcgggtgcttctagggtaaatgattcccctacccattcgctaattggtggtccctagtagtttaggggcccttactcgcacactctctctgaccagtgtatcccaggagcccaaggatcttttcccaatagtagcccctgtcgggagagtgtctccccttgggggctatttctaggctgggcgacgtttgccatgtcaccttttgaatggtcatggtatatacgtcctcaagagtccgattgatttcgacgcggttagctctcactcggtgtggggtcaggcacttttgttctttataaattcgggcaagcgtccacttatagtcatccctgagccttctgcattccggttctttcctcgaatggattctatcactaggtcgattgcggatcacaggtcggaaggatgccacaccacactggtcaggggctaaggtaaggcctcttcttgcctgagtgcctccttcccttcttcattcgcaagtctgacactttcccttctttgtcgtaggacgcccttgcctgaccaggaggcgtctccttccattgggtcatcgcggtcgtgcccactgtccccctccctctcccctgggagtcttggagagctacaacgtctttaatgtggcgtaggaggctgctaaggctaaggccgagctactttttgtgtagctcgtcgagtctgacggtcgtgtaattggtgaggcgattatccctttctcacttcctagctttctcgccccttctcttaccctaatcgtctctcctgacaattttggaagtcaagctagagaaactgtgctaccatctgggttagaccctcgactacgttgaggcccatggttcctctctggtggaatgtctggataatgtcccatgtcgtatctaggacatcattgattttgacattcaccgaggagctgcagtggcgctgctcgtcggggatctctg

SEQ ID NO: 77216 - DNA, 530 bp, Zea Mays
cgccggaaggatccgtgccggcgctgtcccccttggcgatctcgccgcctaggagtttgtgttgttcacctcatacatttcttgcgggttggcgctgccgatttcgcccttcttcttgctactgctggaggagttcgggcttcagcttcaacacctcacgccccactccatcctccaggcagcgatcttcgtccacctctgcgagatgtttgtaggtgtggccccctgcacttccctcttccgctatttcttcgtgctggtcaagtctgggaagactagggaccacatcggtgcctactactttcagacgaggccagatccggccatagtctacatccccacctttggtggtgcgaggtgggaaaactggcgcaacgactgggtgattgccagcaccgaggccaacgaccaccacatcctgccgagcaatgggccagcactcgtccgcaagcaatggaggaccaagccatccctctcgctagagttcctgcccgtattggacaggatcaaggtcttggccatgggcggcc

SEQ ID NO: 77217 - DNA, 404 bp, Zea Mays
gcgtcagcgtcggcggctcagcgcgcatgggccatggcgtaagcgtaatgcctcaagacgaaacagtttttggttggcctccctggctgcttgtgcgtgtcatcacgtgtacgaacgaacgctgggcctatatatagtagttgccgggaagcacagtgaaagcatatgctgcctgtgcctttcgcggtgctggctggcttacgtggatggataagcgcaacgccagatggacgtgccatgtgtctggttgttaacaaatcggaggaagcggtcgcatactcgtgtggactcatggcgctcccccctctccctcccccttcccttttttcttctgtatactgccaggtccggaccggcataattcaagacccggtacggatttttttttctttgataaggatcaa

SEQ ID NO: 77218 - DNA, 370 bp, Zea Mays
ccgggctggttggttgggacgcggccgccctggctgccttccagactcccactctgactccgttgatgtgtcccgagtggatcgcggacaccggtgctacctaccacatcactcctgaccctggtatactcacctctattcgtcccccttcttcctctcttccttcgtccatcatggtggcgaatggctcgtgtcttcttgtcacatctgtgggtgccgccggcactcccggctcttttcgtattcccgatgttcttgtcgctccttctttggtccacaatcttctttctattcgccgttttaccgctgataattcttgttctgttgagtttaactcttctggtcttactgtgaaggactcggcaactcg

SEQ ID NO: 77219 - DNA, 347 bp, Zea Mays
gccggctctggagagtcgccggcgatggtaggaggtggcgttcatcttgatccagagacagagggaggagttgatggtaactcactggtcacaccacctcctgctctactgggtcctgtaatcgacgagatgagcataggggaagaaggagaacaaagggtccgacctcctatgtccaatattagctccagggagatggatacgcctcaaatactgcattcacatgtaagtccaattgttgtgtttgattcttgattgattagattgttatgatcatattccatcgtacaaacaacaatgtcaaataatttgcaggaaaaaaacattgatccaactatagtgccaac

SEQ ID NO: 77220 - DNA, 298 bp, Zea Mays
caaaaccacaaatgcaatactactgtaggatgagctcgatatgcaaacatgttaagatcgagcaacccaaccacaattgcaattaacgccattcatatatatgattctagcttcgattttttccccgtaacttataaacgcggatgagaatgataatatgtgctaccacaatacaacacgacctcaaattactactagcatatctataagcgtacaagccatggcacaggacagtgtgtatagtactatgagcaattatgatccttgatagcactagcggatattgtacagggcaggc

SEQ ID NO: 77221 - DNA, 1394 bp, Zea Mays
cagaaccttaattactctcacatcgcttgaggatgtatacttagccgtagttctagaaaatacctttctttctttcgccattaagcatgtgtggcgcttgttggggaagggggatgatttgtcgaaggtgatggtggcgaggccctcatcttcggagttggaggtgctacagtccgagttccactccttgtcgatgtgggattcgcctttcttcttgtagaatttcttcttttccaccttctccttcccgttcttgttatttttctggtcatcactttcactatctggacagttaacaatgaagtgaccagtcttaccgcacttgaagcatgcatgcttcccctttgatttgttgttgtagtccttgcgccccttcaatgtgtgcttcaagcgcttgatgacgatagccatttcctcgtcgtcgaggtcggctacctcaacttgcaccaccttgctcaggatcgcctcattctcatttgttgctttgaaagcaacaacatgcggctcggtggaggggttgcttccatcgacaacgtcgtcgatctacttggcatccgtaaccataatttgtcggctaaccaacttgccaagtacctcctcgaacaccatctttgtgtacctgggattctcacggatcaaagaaacaagagtagggtctaaaactgtaaatgaccttagcatgagttgaacgacttaatgattcatccatctattgctctcgtagttctgcacttggttcaccaggaacttgagcctgttgtacatttcttgtgtcccttctccccacttcatggtgaacctcccaaattcaccttcgatgagctacatcttagtgattttggtcatcgtgttgccctcgtgtgccgtctttaatgtgtcccatatgtccttggcattctacatgccattcaccttgttatattcttcccttcacagagaagcaagcaatactgtggtggcttgatagttgtgatggatgagtgtcgggtatcgtaattaggggtacctggattacgcccctaaaatgcgattaaccccaaggctactgttagacccattccccgaggtcaagagagtgtgaaccatggttcacccaaggccccactcggcagtcactcaaaactctgcctcgcccgaacctgccctcggatgagtaacgtactcggggaaaccctcgtctcgcccgaggtcccctctccacggaaccgctgttttcgccatgcccaagcccgtcttaggcgagcaagacaaccccaagccaggcctcagcctaaggccgcagaaaacatgagcattcaatgcgcatacctaccccacgcaacgtcataggagaacatgagcgataggaccacagtcctgtccactttcaccaactacgatgacgcgtgcccggg

SEQ ID NO: 77222 - DNA, 690 bp, Zea Mays
tgtggaaggtcaggacaacgggtcgacggaggtggtgttcacgacggtgcggagagtggatttggtggaattcaaaattagggcgctacgatggatgatcggaggcgaagagtggttcactgggttcgtaacaagtagatggaacaagccgaggcatcaatttatagaggacggccacgaggagggcgaatttggacggggaagcgcgcggggtgagaagggggaagagtcaccggagtttgctaacgtggcgttcactgggttacagtctatagcggtcactgctgagtcttcacggcttgcgacgagtggtgagatgacttaaggcgtgtcacaaccgagctagacggcggcacaacagcgacggtctcggaaccacgtcgccagtgcaagtgggtatggcgacagggcaaaacagtgccccaagttcatcccctgcgcgagatttttcaccctacatagttatctgcactccaccaggcacgaatcgtaacggcggcgaggatcacgacgtgggatcactggcggcagtgcgctgaacctagcgatcttcgtcaggttactgtaccatcgcgaactcccttcagggcgcctgacagagcaaatttgagagcgttttactccaaaaatcgttcagcgcctggtcaagcttggtataacaaagttgtttactaatgtttgagcttcaac

SEQ ID NO: 77223 - DNA, 554 bp, Zea Mays
attttgtgttccaagatgacaaacacagacaaagctgctctacaatctgaatctgaaaaagaacaataacaattctgattagtatgacagcaagctgataaaaatggtacagtaaatgagtatgatgttgagcaatgcaaaggaaagcaaagatcaatatgattctatgttccaaggtgacaaacaccataaaaaattcagctccaaaacacatgcatcagagaataagagatctcaaggtataattcaaacaatggagtgacaatttttaaatagtaaggtgccaatcaacaggaaatatatgatataaactgaaactgatatccatgaataatattaaccgaaacacaacactgaaaagtaaattgttctagcagcatcactaattaaactaaatactgtagtagattttgatctcaaccacaaccacaatggtctgaattcccatttgatacaagtaatttctgtatacacttctcacatatcagccactatgcctcacaattaacatataaacttgtgtaatctaactaattaacatatattctctgaag

SEQ ID NO: 77224 - DNA, 611 bp, Zea Mays
ctgatgaatgggatttgagattctttagagctcgcgctgttgtgtgatgaatcacgtacgttcccggcgagacttttcttgtgacgtgttttgcgcatcgttatattacttgtcgatcgctgggtaatgtgtttttgcgtgaacgtatatggtgagtgtgtcgccattcgtcaagtgttattaagttcctcgctcgttcacaccagggagagaggtcatgcatggtaaaagagctagggtaaaaggtctagtactagtagctaagcatagttatcaacgaaagggaagcgtttgtggcaactggtggcaacaatatacttcgcctttctattggcatcatgccattgcatgcccgaagtatattgctcaatgctgcctgctgctcgttgctgcccactgtgagctgagaaagcgagcagaacgagttgaccccaacaaatactattttaattagctcttgcttttcaacatgatctacgacgtgtgtggatgccgagatgtgatgtgctgcagaggctggacatgacaccttgaccaatcatggaagctaaggcccggattcgccctctctgtatctctgcccgcgcggaagccagattgaaatgcatgta

SEQ ID NO: 77225 - DNA, 336 bp, Zea Mays
atttggaggtgcactaccatccgggcaaagccaatgttgtggcagatgccttgagcagaaaggcccagtgcaattgtatgagcatggatgcaagagttaccaccttgtgcgatgagctgtgcaagctgaacctggaagttgtttcttcaggtgacttaagttatatctcggtggagcccacattgcaagagcaaataatgagggcacatattgaggataagggtgttcaaatgattaaggaaatgatcgagcaaaaggcagaaaaatacaagtgcttccgtcaggacagcaagggaattttatggtttggagaccgattagttgttcccaaggacc

SEQ ID NO: 77226 - DNA, 444 bp, Zea Mays
gacgttgggttgattcatgtatttgccaggggctcatttacaaaacgtctgtaccaaaagggtacgggcctacggggcttgctgagccgttggatcaacggcgtgtggtccagattagattggcgtagttaaagaaccggtatgctatacgagtcctcggatcggagatctacagttcgagacccacatgacattctaaccgccagataacctatcgatggcccaaaatgcttccacccagaccaacacccagatcaaatctcgatcattcgttgagatccgacggccacgcggtgcctcccatcaccccagccagagacggcggtgccacgctcagcacgacggcatttcaccgacgaacacgcccaccacatccaatcatcccccaaactcgaaattgactggtgctaaactcttaagaccttgttcgtttgtgtcggattg

SEQ ID NO: 77227 - DNA, 841 bp, Zea Mays
gtatcgacgatagtgggccgttggattacgatcgagcggatcaaattagattcaaaccccaccaaaccggtatgcagctccagccgtccaattttgatcaaacggccaggaacaccccacaccatgatctcatctgattcatccgtgggtcgatcgacggcacgaattaatctcaggaaaggggtacgtgcacatcaaccgcaaccgcggatttcaagatccatggccacagtacttcttctccacgcgaataccaggtgtggcagcgccgttcccccccccccctacggcggacgccatagccagaccacccattcaccactcccgggcccgaaattttaatctgaggtacgctacgcgcagataagacgtaggggaacaggaagaaggctccataccggggtattatcgacggtgaatcgcggatcacactggcaacagccactctggatgccgacgctgagctccgagtgctctgtcgcggttgcagaggggaaagaggaagcggtggacgtagggagagggaaggggtttgtattttatactcccaggtgaccgaaacttccccttgaaacaaccggatcgctcaaacggatctgcgcgattcatggctctcggcaattgtttttcttcctcggtctctctctaccctcgagttcttggcctcaagattctaggcgacagatagtggagcggggcccgatggcgcacacatatatacgcgggcgaagttgggtgtccatccaatatatccgccagaatctcaactaaccccagccgacgcagatcacggagccccgccgcggtattcgtttccagcttctgcgcgtttccgtttcag

SEQ ID NO: 77228 - DNA, 764 bp, Zea Mays
caaagctatgttaactctaggtcgttagactagttagaaattgaaagtcaagtttgttcaaaatatgcttattatgctcttaaaatttttattttattaagcttctctcttttacatcaacttaggttacaatttcttattgtagatggtgtgcacggtctatacctctcgtgtgggcacccttcgcattcccccacctcaataggcttctctttacctagttgtggtgtaagaagaccctgaggagctgcaccagcctgttggagggaatggtgtgattgtggaggacaattctacagagtttctggctacacccactccatcactagcacttcatgcctttgctgctggagctttttctttaacaccacttgtgccagttgccgaagttaagcccctactcatggaggtgatgatctagatgactatggtgatgatgaaggcaatgataatgaagaagaagatagcaatggagaggatcatcaagtagaagataacccaaactacaacaatggcaacgtcaacaacaacacttcgatggtggatttgatggaatgtagcctatcgttgagcactacacttcaatgttcgagacatgccacttcctaaatttgttgcagaatatgttacatgagctgggcatctatgttcgtcctctttattacacatgacatgttttaagccccctcgggcctgctactatatcacccgtctacatatctgggtaatcgatgaaggatatagagggtttaggactctctcgg

SEQ ID NO: 77229 - DNA, 909 bp, Zea Mays
ggcaaccactcatcaaaagcctctacgcaactctaaggagttgcacaaaggctcgagggctactgtcgggtacctaggaaccgggtgcccaaagaaggcccaaaaggcctcccaaagacagacactaatcgaccaacctgcctgccgagtgactcagcgaggcggcccaaaaggcctcccaaagacgaccaccaactcgccagtgaggcagagttgccaaccaacacgcttgccaagcaacatggtgagggaaagtcgtcgaccatccgcctgcatagcaacatggcgaaacagagttgtcgaccaaccctctggcaaggaggcccatagggaaaaggggctaacccagtaccactgagcaacatcggcatgataagacagaccatcaccaaaccacatccgggtcatgcgaactatgtcaaaggaacgtctatcaaacacgacctcaatacattctcaaatgtgcccccgctgaccggtgggaccagtcaaccccgatcgtagggacctcagcattggagcatctacagtgaccaaaatacctgaaagaatgggaaagtacaccatactaggtgtatgccaacgcgtaccgaaaggtgacacgagggtcatgacgaaagatgaagttgtactgaatacaaccctaaacctcatcgtgaagccactctacgggacccgccgggtaccgctacgttggcatcagacggaatgccacatcaagaatacggttgtgcgccccctacggacgatgccaggagggctaaggcaacccaaggcaacaggtcgaactcctcccaggaagaatatgggttctcactataaaatctacccttgagaaataaaagggtaagccaacccccatcttctacacacaagcactcatctataacacgctccaagaaatactac

SEQ ID NO: 77230 - DNA, 469 bp, Zea Mays
aggcggcccgaggcccaaatctatccatgtctgtctccattaaccttaaaagaactagcccgaacgtccaatctagcccaagcttaggtcctgatctaggccacacgtcgttaatatgcgtaacacagacatccatctacacacgatcaacatcgacaacatatatttgactgtcgccatcatcaattcacatccatcatcattgatctacatgttgtcattattgatctacatgaccaagccatcaatctacatgccactgttgttgattcgcacgctaccactagatctgcgtgggaggttgagagagagagagagagagcacaagtagatgagggataaagatggaaagggaatagatcttacctgcttttagggttgataatggtctttgaccagtggcgaagctagagtaaattaggggagggtgcatataccttgagggtgcatgataacaatttacaggtgg

SEQ ID NO: 77231 - DNA, 542 bp, Zea Mays
cccttctttgcagacattatgaggcatcttcaaaaggattttcgaaagtcttacctaaaaaaaatcttatctcttcttacctaagtattctgaagagtctatcttaaagaccagataagaagagtgcaatgtatagaaggttgaatcgactaaggttgattctgtacttattcatgcatcatgctaagaattatgctaataaattttcccccttagaaagatgccgccacgcacaaggctaacggcacgtaagtcaacgggaccaattggagtaccccggcatcaactagcccctcgacacgaaaacagcagcagcggaagtaatgaccctataggagaccttgaagcccgagtgagtcgacttcaagcagagctgcaacacaggaccgatgtttgggtcgcagacggagatagaatcaatgaactaagaagggacatccgtcacctgcaggatcagcttgctgatcgagacttagcacttgactgggcagtacagtctcatttgctggcatgtgctaaggaagcaagggctcaggcccgaa

SEQ ID NO: 77232 - DNA, 459 bp, Zea Mays
actcagaaaggagccaccgggtgaaggtaaaactgagcgttctaccatgggataaagccacgtgtgcttgcggtcgcctggctatctcgtattctttattgcggacggcgtgtgtagcgtggggcctgagccatcattctagctacgccgacccctgtccttcgtagcctagggctcggtgcagttcgtcatgttgcgctcttgtagggtagagatggcggactagagggggggtgaatagtcctttctaaaactaattacaatggctaacacaaataaatacggaattaaaactattttggtttagccaagactacactcctctaactataacaaacacctgacaaaagattctaattgaagcaactaaggtgccaagatagtgaaagtgctctcccatacaaatctagttagcaacgacatacaaattatgcaaatgtaattctaagcacaccgata

SEQ ID NO: 77233 - DNA, 346 bp, Zea Mays
gagaggtggagcatagactaggtagaggatttgaggaaaggggaaaccaccgtgggttcccggtgtgccaagctcaggcgaagctcattgtggccaaagtgctggcagaagtccaccggcgacaacagaaaggtgaagcaacagcgggggcgacgctgcggctgggtgagtgcgagggcagggaaagagcgaatgtgaggcaagggcgagctgagggattgtgtggggtcttcacctagcactcgggtgacgtgggtaggtcgtggggatgtgggcgcgctttgaccgcatgggcgcacgccatgggcgcgggcacgacagttgcaggggaggggatgggtctgac

SEQ ID NO: 77234 - DNA, 492 bp, Zea Mays
cgccaagggtcaagggcaatggggagcaggaccatgattcgattcgcaccccacactgcctgtagttccttctttccctctctgttttcctctctcagtgtggcacgtcgtcaccgatggatgcgcaggtgctcggtgatgcggcgtctaattttataggggcaagcaaaacagactcggcggaatccgcgtgggggaaatcgggttggtgaaggcagcggcgagaatctcacgatttgttggcacctgcggaaccatagcagaatacgggagggagaagaagaccctggctttctgggcccagctattagcgaacccgagcggcggacgcgtcagtggggtgagggacttacagacggggcccaccagaccttgactgacggcgcggggagggaaaaaatgggctgcgcaggagtgtggtacaggtgcactagttgggccgggaaatggagattcggcccagacgcaggtttccttctctttttccttttc

SEQ ID NO: 77235 - DNA, 967 bp, Zea Mays
ctcaacccgtttttttacgcttctacacaatcatagccttcgaagtctattcctgagattggctcatgttcgtccgtgtcccacatgttcatatcagcgaatgaaatttcgcacgagtcttccgcagggaccacttccactttgtcttcgtaccactgaatcaggaaccagtgcattgttgatgggatacaatagttggcatagatccagtcccttcctagcaagacggtgtatgcagtatggctgttggtaacaaagaatgatgtagggatggtcttgtgtcgaactgtcaattccacattgagcactccttttgctaccgttggctggccattgaagtcattccatgtcatgttagtcttgatcaggtctttagtatatcgccccaaatggcacagcacatgactttaactgctaccctgatgtccaccatcattctgttgaggggtttaccattgacataccctttgaggtacaatgccttagatggttgtacacttttttggcggcttctcgaatacaactagctgtgggtcgagatccatctgagccactgaagactcctcaggctttggtgtatgaacctctggcggagtacaaacaccatattcacgtcggtcgatggtgtcctcttggcgtcctcgtcggcttccaactagctatcgattgcttggggtgccattccctcctccgtgggtgctgtctcgctttcccgggtatcgcaccttgagcactaggtccgggcgtgtcttcctgagcacctcaaggtacttgacttcagcttgttctaagttccgcaactgctgcaccctacacttctaggtgtggctgaggccatctggacaccttcgtgggtcagtgataccgatcttcttcttcatcaagacccctttcaagttgcggtctagtctgttcaccttggtttgtcatcgggcctaggaggtgaaacactaaaacatcattggcc

SEQ ID NO: 77236 - DNA, 755 bp, Zea Mays
gatttgggcttatttgcaaaaagccactatatgtatctcatgtgtctaagtccaaaaccagttgattgaggctgactttggggccttacatctcaggattcttgaagtttttgctcaaagtcaatatagcaaagttgtagagctatcatagaagaataagtttgattaagtgactaagcactggtgctgaatggaaattagagtaaaataagcacaaagttgggctgtcagtcaatttttaaaactgaaacatggccaccagtgccattggccaaactttgggatcaagtttgagtaagatttagtgctcgattaaggatagttgctatagtcgaattgaagatggactgttgagctacaaacttgttacagaaagattaacaaattctcacacaaaaatccgagatatgagtcctgcaaattaatcagacagaagctctgaataggatttctaatggtaccgtactgaaaatatcccaggatcagataactttgccgccggtgaaccgtgcgctcggattcacgccggtcgccgtgattcgtgccgtagggaagtagattgcgctcggtcgtaaaaagatcacgtcgcggatgagttcgggctactatggcctcattgttcctcgaccacttgcaccggtgacgtggccttgcggtcgtcaccggagtttgcacacttcaccgcgattgtgccacgcctcaggccattaaccacgtcgccgtgatttgtgatcgttacccagtgaccgtcgtgg

SEQ ID NO: 77237 - DNA, 498 bp, Zea Mays
ctggtgaaaggcagttctttggacctaaaattatacaagaggcagaggaacaagtccatcaaatatgggagaatttgagaactgcacagtcaaggcagaaaagctatgctgatacccgaagaagattattagagtttaaggagggtgatcatgtctatttgaaggtgtcaccactccggggtatgagaagattcaaagtcaaagggaagttgtctcctcgcttcattggacccttcttaatcctaaagcgagtgggagaggttgcatatcaattggagctacctgatcatcttgcggatgtacacgattttttccatgtatcacagttgaagaaatgtcttagggtacctcatgagcagctaccaatggaggaccttagtgttcaagatgatctgacttatgctgagtatcccatcaagattcttgatacactgactcgggttacaagaaataaggtgataaagatgtgcaaagtacaatggagtcaccttggagaag

SEQ ID NO: 77238 - DNA, 1116 bp, Zea Mays
tgatctttatgtgtacatgaaattcaatatccgtgtgattggtggtgcgcgtccgagcgtgcaaaactcatttgtttcaaaaatcccatggaccagtatgtttggttgcttgaatatgttcttgggccaggcagtgttcatgcaaaaggttggcctcagccaggcccatgggatacgcccaaagactgcgttcttcatgagccttgttgtgctcatcactggctagaccctcctcatccccgaggctgcatcagcgtgtgatagggtttctcatttgtagctgtcactgtcgaggtttccctctcccgcatcctctcgccctcgtgctctccctcaagatcttgcaccctcccctcccctcgctgttgaggcttgctccttccagggatcgtcatgagtaaggaggtttgacactctcttgacctctccccctagacacgagctctttgtctagatctaagaatcttgagtactatctattcccctgagctcttcatctagatctaagaatcttgagtactaatggtagttgtggttgtgtacatcatggtttctggtttttatgtagtattgtgcaatgatgttcgcatatttgaccctctcccggtggaagtaccgtttgatgtacttaggaccttgggtgtctcctagaggggggataggcattaataaatactttaactctattaaactttcttacttgactttaaaagtcgattgcagcaaaataatgtcttgtccaaggtcaacctgcacttcacaaacacttataacaattataaatgagaagtgcaaataagaaataaagcaatgagaaagacacatcgattttttccgtggttcgaccaagtctcaaatgcttgcctacatccacgttggggttagccaaccggcttggagtccatttcaactcctttgtccttttactcaagtttatcacgcttgtgataaacccagacttccactatcacttgttgtagttacaacaatcctgaggctaaccacaacttggtagctctccatcggatgatgaactcaacccgaatgcttgctcaagatcaccactagctgttatatgtagccctccaccacacatgcctctctctatgactagat

SEQ ID NO: 77239 - DNA, 346 bp, Zea Mays
catatcacatgcctatcctatttgttcgcacactagcgttctcgaagatgtcgctctagcaacaaaccccatctatttagcaacaacctctgcccgcttcttccgccgttgcactaccaccggcgaggaggattagggcgctaggtaataaaagttgcatcgagtccaaccaactctgaacctcctcgtcgtccctagggaccgcgagcccgtctcctagctcactcgtcttctgctccagcgcgagctccgctcctcccatcccatgggcgacgtggcatcaatggtagatctacctagcatgcgcttcatctagtcatagttgttctcgttggatctattattg

SEQ ID NO: 77240 - DNA, 614 bp, Zea Mays
gtggaagctggagtggtggaggtggtgggtatagcggaagtggtggatggctttggagcgacaggagctggtgaagtgggaggtggagtagacacagtggcgaaaggtgtggagggagcagtggagcgaggccgagatgcgaggcaacgaacccgataggctatctaatcacaggagatcttcagttgtcctcctcgctcagcctgctctgctgccgctgcaagtgctgcacgagcggctctgtccatacgacactttttcttgccctcttgttgctcgaggtaaacagtcttccccttgacctgcctgaaggggcaaggagggtcctcatcgtctcctccccctgacgatgagacgttctacgtccgcaccatcctgacctgactgctgcacgagtgagtgaaaagataagcagaagtagagagcagccgataggatctcaaatgaagtcatagctacctagaaatctcacgagagagagaaaagatccaggaaggataggagatgggcacacgggccggcgagatcactgaaatgacagaataggtgagcacgtattagtcacatagtcataagtatatgaaatgtgaataattacatacacagagagtgaa

SEQ ID NO: 77241 - DNA, 743 bp, Zea Mays
ccgtgacacaaaatcctccgaaacaaacgaatagctagcgctagagtcaaaaagagcatgggctgcaaacgaatcaactgaaatcgtacctgtcaccacgtctccttgctccctgccatccgcagcgggtagcacataagctccagaaatacctgcagaagaggaagctcccagagtgaaattaacagaagatccccactgagccaccgggtgaggcagacgcggagctccaaactgagacgacataggagtagacggtgtaggagtaggcgcggcctgatactgaagaaaaccctgcatcggcacgaactgagaagtcccaggcacataaagctactgtggtggaagaggaactgaaaactgctgctcagcacttgacatcatgttgatagtgccctaagaagaggaggaagtcaccgactcccatctgagcttcccattaggattcctcctacacaccacatccttgtggtcctgactgcagatagaacaccttccaccccactggcactctgcacggcgatgcgcatcaccacagcggaaacataccagccccagcccgggcttaggaatagtccgaaacctctgagtacttcctcccgaagtacccgagtcagaagatttgccatggtaaggatggtggtgctggtgctgagacttgccccctcttgtgggctggacctcccgtgttgcccctcctcgtgtcctggccacgaggctgatcaacacccgaagacttctac

SEQ ID NO: 77242 - DNA, 434 bp, Zea Mays
aaacttggctgatgatgccaatttgttcagaagaagaaacactaccaggaacaaagctattagtaatatttctgctgaacctttcttgtgttccatttacattcgagcaaatgaaaagaaaaatccctatcaatgtttatcaatgtgatgtttgatggtagaaacaccgtcatcgctagagtacaacctccctttcttttgggacaaacacagttacattttaaagttggtgccatttgactgattattactctaaagttatgtagatagtgttataataatggttactgttgcattcatatttcaaagtactttactattatcatgattttattgttgtgaacaacatggtattttttaaagttagctttggagaactgcactaagccaagcaagcttaaatcatgaaacctatgcttgtagtttaaactcca

SEQ ID NO: 77243 - DNA, 424 bp, Zea Mays
aaagttttagaaccatggctaagctaaccattaaccataacaagaaagagagtctacccttcatacaatgttcacccacaaacaagattctaaaaccctaactatttcttaagccttaaaccctaacaatgggattaaagggggaagaatgagtaaatgatcaaaacaacaaaaggaacctttattaaagatgaagagtattagtaaagctacaaaacttagtaagagaaatattacaaaaaggccctacaaaaaccccaaatcaattcactaagtggagagcacactagagccctgcattttctctctaagtccccaaaactaccctaatccaatgatcagaagtgttcacctttttaatggtgccaaaaccataaggtctaaatagcaaaaaggagccaaattaccttaggagcaccctgga

SEQ ID NO: 77244 - DNA, 297 bp, Zea Mays
agagaccaacacagaaaagattgctcgcgagacacttgctggaatatctgaaagtttcagtgacagtgaggattttgacatagaaagtggaaacgaaggtgccgaagatcggccctggcgaccaagtcatactatcttcgggaaatcaaccatcaaacaaagccaaattgatgcaatgaagggaaggtatttccgggatatttctattgtgaggactgggggagatagcagtgcccctttgcccgaagctgacgaagtagtcgtttatagaagtttcatgaaagcggggcttcgttc

SEQ ID NO: 77245 - DNA, 459 bp, Zea Mays
caagtatctcattgcacatggtcttaatcatgtctagccattctttgcaaggcttcttgaattgtttttcaaacttaaaacggtaagcaagtcgaacaagttcatgcttcttccccacttctttcctcttcggcattccccaggcacttgacgtcggatatgttctgtttgccaagtattcttgcaccaagtctctagtactgatctactcggctaccactctaaattctacttcagccaactgacagggagaccccagttgcatattacataagggcctagtcattccgaagctcaaagacagtggactcataaccatggtcataagcttctccctctttttctcatcagccttcatatagaacaactcactcttccaactagttagccacttcgtgcggtagctaagaattagtgcctttgtatcctttcgatacacaaaattgtaacaaccaaaat

SEQ ID NO: 77246 - DNA, 547 bp, Zea Mays
agcaccagtacttcttttatacactactttctccccctcgaaacaggccgggaccgtttctatatcttaaggctgcccgcctgcccggcacaaacgccgcgtcccaaccggggtcaggccaaaccaccagagtccacatgatctagaacgggttggttggttcgcgccctcagcgtcaatatccccagattgccggcttgatcagtacgcgggtcactcacgtatacggtatacaaatcagcacaatacgacacagcagcatcctctcactgctgacctcaaacgggcggatcggtcattctctgccacaccgtcaaaatcaggttataaacaaaggcagacaacacgagaacttttacaattgtcacttggaacaaccataccccgcaataaaaaaaaagaagaagaagaagaggaacaaccataccccgcaataaaaaaaaaagaagaagaagagagggggagttcatagtcggtccacaatctgccccaagacgaattaaaaacgacggcatggattggcactcgctaattaatgggttagcga

SEQ ID NO: 77247 - DNA, 550 bp, Zea Mays
attgtttagtggcttggggcagagtttgtaggccccttgagcttggcagtcttggcatttcgagtcttagattgggatgtgcattgagattgagatggctatggcttggtaaaactaaacttgataaaccatggtcctcactacctatgcaattttcaaaaaagatgatggccttcttctccactaccatgctcactgagattgggtgtggatcttcaaccttattttgacaagatcgttggattcatggaaagaaaattgaagaccttgctcctagattgatggcagttgtaccaaagaagattaagaacaacaaaactgttcatgaggctttaatagatagaaaatggttgaatgatatttaagaggccttgaccattggagtgttggttgatgtccttgatctctgggatgcacttcaaacaatccagctacaaccaggcatagatgacaagcatatattcaggtttgctactaatggaaaatactcagccaaagcaacctatgatggtctcttccttgggtcgtcccgatctgaacattgcgaaag

SEQ ID NO: 77248 - DNA, 1512 bp, Zea Mays
tttgcaccaaaaggactggagacgcaaacgggctcacgcttggggtgatcagacctgatttcaataaatctgccacttgcctctcaatctctgtcttatgatgaggtgaatatttgtagggccaggcattaaccggtatggatctcggaagcaaaggaatgtgatgatcaaatggttgggatggagataataccgtaggtgtagcaaaaatgtccttgaactcgcccaacggccctgtaaattagtgtgtatctccttgttgccctctgcagtcacctcttccaatagagcaaacacccagatatcattccctcttagccacttctccacttgtaaagtagacacttcctgcactaccttcggctgttgaggattccccaccaactggacctccactcccttatccataaagcaaatcaccttgccttcctagtcacacttcatagggttgtgtctccttaaccaatcatagcctagaataacatcgtaggccaccagccccagcactctcatatcactctggtatgtatgcccattggcccaccattccaatgatctcaccatcgtgtcactatacataatctctccatttgccaccctcactttacatgaggcacaaggatatactggcatccccattctatcaaccaactacttgttaatgaagttcgtggaactcccaaatcaaccaagaccaacatcacctgattctgaaataatgctctcacagccatacattcttcatttgtggtaccactgagagcatccaaagacaacagaaaattctcctcttcccctttctcctccagctcaatctgtgtcaacgtttgctctgatagtgtcatacccaactcctcgacagcgagggcattcaactgcatctgcacttttttaggacaacgagattggtggctaggttcgaacttgtcaccacaagtatagcagagacaattttgtctcctatactctttcaccaatctctctttagacaagtcgggcagcgaaacagagcctctaatgtcaagtttgggcacattactaccaaatcgactctgattgatagtcttgaaaagatttgtgtcgttgtttatccaagataccctgctgaatcctagctaacaacgttgcatgttcgacagaagctagcacatgagatttaacaggtccttgtagctcttgcttcagccccttaataaaatgggccacatacaaagtctcatctaaatcatgattgtggacagaagtggcatacctcgcctcatcaaacgcctttgtgtactcctccaccgaccttgattgcctaatctcttgtaaggactgcatagcctgtgaatactcctctgaaccaaatttcaatagcactgcgtcataaaactcctcccacaaacacagaccatactgaatctaaaaaatctgaaaccaccttttggcattcccctccatgttcaacgatgtcgacaccacagagaccgattcaggaacctgatacaaagtgaagtaatcaacacactg

SEQ ID NO: 77249 - DNA, 558 bp, Zea Mays
ctgcttgtagttctcgaggatgcaatggtagagcttttcgatggctctctccttatcgtaggtgtcatcgctgaactgcgccatcttctgcaacagagtgttgaggtgaagagcaaagtcatcaacattctcacctggcttgaaggccaggttctcccactccttgcgaagtgcctgcagtgtggtcttgcgggcacggtcgctgccaatgcgggtcgcaacgatggcatcccaagcttccttggcagcccacttctgggaaagcgaaaactgcatctcgagtgggactgtagtaatgagggcatctagcgcccatcgatcctcatagtagtcaatgtcgtcgtactgaactgcttcccacatgtggcgaacttggagccgtaccctcatcaccgtggcccacttgacgtagttggtcttggtgagggtaggccacccactgctgggaccgatgtccctaacaacagcctggaccccacggtgaccatggtaccgatccggggagggagagtcgcgtcgcctgtagagaccgcgatctccgtcgacccaaccgctgcc

SEQ ID NO: 77250 - DNA, 412 bp, Zea Mays
tcattatgtgtgtaagctagagaaggcattgtatgggctaaaacaggcaccccgtgcctggcattctcggctgagtgtgaagcttcagtaactcggttttaagccatctaaaggtgatacatcactctttatatttaagaaggcagaattggccacgtatgttcttgtctatgttgatgacatcatagtcgctagatctagccagaggggacaacaaggctacgtcgggcgctcaggtctgagtttgcactaaaagacttgggtgagcttcattatttccttggtattgaggtatcacatatgaaagatgacattcttttctcacaaggaaaatatagtaatgatatacttagaaggacagggatgttgaattgcaaaccgtgcagtactccaatgacaactacaaaaaagc

SEQ ID NO: 77251 - DNA, 331 bp, Zea Mays
aagcaacagcgttgaaggcagaaaagagttctgccacaactcctaagagaaggaggatggtaaatgtgttagatattttagaaacaactgactccataagtcccgctcccacggaaaaggctgccgaagctgacaaaacgcaacccaaagctgatactaggcagatagaagttgagagtacaataacccaggctgaaaccgaggcaaggcccacagtgcctgctgagatgaagcctacggaatttgaagaaaaggcaacagaagaaaaggccacagagcaaatttcgtttgaaaaggttgccactccttctcccgaagctttaaaagaaag

SEQ ID NO: 77252 - DNA, 343 bp, Zea Mays
taaacaaaaccaatggcatcaaaaactctgttcaatctcttttttcctcggccctcgaaggatgtggataatgcgttatcttctgccttggagtatgacccaagcagttcatcacttgtggcttcgatacatttcagccagtcgtcatttggttcatcaaatttatctccatatctgaaggtatacttcagtcgaaccaggtcaccttcactagactcggtgacagtctcctttggcatttcctagttctctacaagcggccatactctgaatgctatatgttcttgaatcaagtctcttgtaccaatgaagaagcatacagtaccaaaggccttctggcatg

SEQ ID NO: 77253 - DNA, 340 bp, Zea Mays
caataatggtacacacacacatcaagtggtaagaggcatgcaaactttactaaacagtaacactacacctaaacctagagctatgaaacatataagcgatggtctagctagcctaacactttgcaaaaacacccacgctaaatcaccatgtgtatcactaagcactatgcaactggagagcattataatggagcatcgactcctttggtatattcctcggctctcataccctataaattaccgataggagtggtatttatagcctcaaagtccaaaactagacactgtcaaaagctacaacaatctatatatgtatcagatatgtttgatgatagcatca

SEQ ID NO: 77254 - DNA, 456 bp, Zea Mays
caggcatagagcactcttccccacccccaatcacccactgtgacctcgccgacgacctcactaccgcgggagcccgccacccgtggccaaccccccagcttgccactagccaaattgatatgtaccgagttatattcggtactagggtggcccgatcttcatgacagtaggttgataaaaatagggtggttgggtgtaaaagtaacggaagaacaaggtaaatgtgctgaaggacatcgggtaactgactttatacctgatcgaggtcggaggtgaccaagcgacgaggagagagacaccgaaaccgtgtagacttcaactcgatctccgaacgaccgcagaaccacaaccggagctaatccacacaatgcgaggcagccgtactggaactcgcaaggcatgaactagtggatcctagaggaatctcttcacaagtccaggagaacaaggaagaac

SEQ ID NO: 77255 - DNA, 2102 bp, Zea Mays
ggaccatcatggcgtcctcttccttcaaggcagcctacacttgcaagcaaggcaactatgagctcgcctcaacactggccacgacaaaagaaatgagtcgagcttcaagagactgcccctaggggcaccccaggcgctcccgcgactagcttaggcacctccaagtccgccaaagaggcgaaggacgcatggaccagcgcggccaacgcaaccaagcacactcgtgttgggacatcgtcctccgacaagtgagaaggctctctcgttatctgccccgagctctccctcaacatccggtcaacggccgggacagtcgacaagaaaaaagtgcaaagtcgttagcgagaaggacgccaaaaagttcttagaaacaggatttgtaacagaaatacaccacccgacgtgggcgacgaatcctgtacttatcaagaaaaagaatgagagcggctagattcgagcccttttccactgctacgcgacgaccaggctcaggcttatgtttttgctaccggctgtgagtccttccgggatcccgtcttcatctacacgcccgaataagcagaacatgacgattaagtcaccacgctctgctcgagggtgggaaacagggatcactccgtgaaaacgtgcccggacatacgcaccagctaccgtgaccaatcgcaaggcccatgactcaagcaagaagcaatatcacaccaaaaggcacgaacatatgtttagccccatcattcaaacaaagtttattacaagacaacgatgtaacgtcgtttagatgccggtggacggctccatactccaagggctcatcaggaggaacttcgcgtcgacccaacttgcaatcaaccgggcgtgaaggtgaatttgttcttcaatacgatatagctcctcgtcgctctgtccggcggcaaagcccttcatgatcacgatcgtgttggtctcgtcaaaatgagagccatctacctcaaggctatactgctcccatagactacaccctcaaggaccacgtattccacgtggtcaggtagcgtccgcagccaatcgggcagggcaactttgaccggcggagggggagaaaggtgggcgcacaccgtgctcacggccgccctgagagcctggagctctgtgctctgctctgagagtgaagcctccgcttgaactctcgcgataacaatgatgtctcgggcaaacaagagcttctgggcctcgtcctctgccatggtctttgcctctcccaccgtcttcttggcgtcttgggctcgggggaacatcttttggagccatgctaaagaagggaactcaaataacttaaagtaccaaataaatgaagcgcaaggacataagaaaagttaacctctggccgcattgcgctctctcaaaagctctaaatttgccatctccagacgagcaaagacctccctgaggatcgacccaacctcctcaactaaaagattagcctcgtgaaggtccttctaaagctgggacctcgcttctcgaagacgctttgcatcgccccacacgttgtcgcgctctttgcacaagcgcgcagcctcatcacgaagccatgtcagcctcggagttgagaacatcgaacttgtgctccctctcctcaaaacagatggccctagcacatagctgatccacctcccactaggtgaccagtagcacttccgctcgagccaccgaccgcgcgaaaaggcgctacaagtggtgatcaaacagtcaacaaaacatcggtaaaaaagaaacaaccgaaaaggagcacccaccagaccgtagggaatctaatctcgtatcgtcgatgctgcccagattggtcacttgtcaccacaatgcccgaaggcaagggagcgtggggcggcaacgaagaagcaccaacttccatttccaccgctaggacctccccgggctggctgtaggggacgacggctcagagaggaccgtgtcaggaatagtcgctcccgacatcccctgagtgaccagagaggtcggcatgcccgcaacagaaggggtggtcgctgcattaataggtggggtggtcagaatggccgaaggaaccatcctcaccagcgctagcggcatgagggtgttgaaagagaaat

SEQ ID NO: 77256 - DNA, 779 bp, Zea Mays
aaactcctgatcctcataggtcaggaccccttgatctcaagggaagctgggagatacatagtctggttgattccaggtctctatgcatatgccatcagccagcctctcacaaaatttctacagtctcagagcctgataattcctatgctttggtcctccattgcaactctgctcttgcacattcctctttgttggttactagtgttcaagaccagtatggggtacattggagcttctttggcaataagcttgtcgtattggttaaacgtgatgatgcttgccgcttacatcagatactcggattcttgtaaggagacccgctcacctccaaccgttgaggccttcaaaggagtcagtgtgtttctacgcctggctctgccgtctgcactgatgttgtggtaattatagtgatgttattaagcatatttctcttcttccgtgtaagattccatgttgggttaatgaattgttttctacaattttatagtttcgaatggtggtcttttgagatccttattcttgtctcaggaattttaccaaatccagagctgcaaacttcagttctttcaatctggtaaggtctttcacatctgcagtgacgtgcagttgttgtacattgcttttttatctaaaaacatttgtgttctcttcatcagtttgacgactatcacattaatgtatactataccttatgggcttggagcggctgcaaggtatgaagaaggttaaccactcctagctgttacttctatataccataactttgttcatgttgtcca

SEQ ID NO: 77257 - DNA, 700 bp, Zea Mays
ttgcgatccgttcaacatgcatcaatttcgaccacaagcaggcggatcgagcacgctggacctaggtctggctccgtcaggattgttgcgcccccctgtgataggcatggagaacgctcacgggcaccatctgcagcaaactccccgagatgttggtggtgggattttaggatcccatccaccacccccggtcacgggtatgaatttgtcccatgatctcctagattttgatgcatctatgggttctcgagatcattcgactttaattctgaaaatggagtttcctaaattttatggaaataatccgcgactatggcgtgatcagtgtgaaatgtttttcgaggtttattcgatggcggagaacctgaagacccggttcgcggcgctcaactttattggtcctgcagcgacttggcgccagacgttggagcgtcgtgggcgtatcctgaattgggaagtgttgtgcagggaagtgtttcaacgttttgacaaggatcaatattcagtgcacttaagacagttggactctcttcggcaacagggttcggtgtcggattatgtgcacacatttgagcagttggcacatgggattttgttttacaatagcaactacgatgatacatattttgtcacacggttcttgggagtgctcaaagaggaaattcgtgcgctgattgcgttgcatcgtccgagagatgta

SEQ ID NO: 77258 - DNA, 382 bp, Zea Mays
cacaatttatcttatcgcaaaggaagagtccattctcatgttgctttgtaagtagaaggtacaaggctaacctaactgtccgagtactactgcaagtccaattttaagggcaagcagtggcacgttatgccttgaagatagctaagggcagaactagatggagtctgctactgctaccccgcacgccatggggctcgtgaccgacgagtaatgtcttgctgcctgcattgaataccatcggagcacatgttaggcccccatgggggtctatcccggccgacaggctacccacgttgtagcgaggttgatgaaggtgtagccgctgccagccttttttctgctttgctagagcgctatcgtccttcagacttgaagggcaagc

SEQ ID NO: 77259 - DNA, 461 bp, Zea Mays
atataattctgtttgcaattgagtggttaggtacgtcgtacgtaggcacagccgcacacaggtgtctctgtcctacactgccgccgactgccctactccaaacacacgcttttggagaggctagctgcacacatgtgagtagcagagacagccgacgaaagccagtgctgaccagaccagcgtccagcccagcggcaacgaagggatcgtaccgtgcctctctgcgatcacatccaccagcaaatgatttggctttgggtcgtctcgcagctggtttcatggcctggcctctggttgggctggcgctatcaacctcctcccattgtcatgtgacctgttgttgttgttgttgtgaataatcaatcaagctgcggctatcagaggagcgctagctgcgttaatcatgaacagcatctccagcgctttaccgccttttccttttgcaattgcaccctacaaac

SEQ ID NO: 77260 - DNA, 400 bp, Zea Mays
attgtttgtaacctgggtagagtcattgatgccactgtacagataagccgggtacgccctgcccttcaaaggctagatattcttgaagacgaaatcagcgaccatagcttcagtagtcagacctctatctttcaacaaacaaacctcgacaagtagtacttttgcctctgttatctccgaaagggtcagagattctacccagcttggagtatgaacatctggctacctccccgaccgagggggtagggacttgcaatggttctccacaatgaaccactcgaggcgccaccccttgatgatatccttgagggggatgtcgaggtactctattttcctcccgcgacacagctctagacttgtgctgtcaacgagctggtgctgtctgccagccatcctgggc

SEQ ID NO: 77261 - DNA, 393 bp, Zea Mays
ggcccttctgctcctgctgccgaggaagtgtcggtggagatttttactgttgatgatcccaatgggtgtgacccggctgatgctgaccccaatgggtgtaaccttgatgatgctgaacccaatgggtgcaatccggccagagctgatcccaatggggtgtgttgttcgtattgttgacgaggatgaggaagaggaggaggaaatccccttaattcggaagaacagtcatcgttacatagccagtggggagagtagtggtgttccttctccagctttgtctgctctcgttggtctgcaagaattgtctctggcaaattttgatcagactctcgaaggtatggtccctgaggatctgctgtccgagccgatagatggtggaatgatggaagtttg

SEQ ID NO: 77262 - DNA, 428 bp, Zea Mays
gaaagtgaagatgaaggaaatggaagtgaaagtgatgaggagttggctctctttgtgaagaaattcaagaaattcatgaggaagaagaagggtcaacctagaaggggccaaacatcaagaagaaatgcttttaatgatagaaaatattttgagtgtggggaacccggtcacattgccatgaattgtctcagcaagaagaacaagggcaaggatggagatggtaaaaagaagaagttctatcacaataaaaaggatggcaaagcctatcttgttgaatgggatttgaatgctagctcagatgatgatgatgattcctcatccaaactaaatgtcggaatcgctatcaaggaggctccttcacttttctcatctcctcattgtctcatggcaaaaggtgatgctaaggtaaaaatcataaccgatttaaa

SEQ ID NO: 77263 - DNA, 451 bp, Zea Mays
ttcaagactccacaaataccataatccagtgaccacatatgcatatgttgtcactacatctatcaactgcacagatagatgatttactaccaataatattgtatcggaattttactactcatagtagaggagaatttatagcattaaaataatgcttgggtttgcatataaactgagttgctactagccatgctttctcaccacctcattgtttccatttccatgaaaacttgtatccacagtaagataccttaaagtggaaataattcaacacttctttccggtgagcaaggctatctctgcaacattgtatcactcaacaagatccagtttgagcatactcgtgctccgctatggccatagtcttttggatcacttggagtgcatatacaattgctgagatgtatgtgtcgacacttgtagcttttaaattacacaattctccagttga

SEQ ID NO: 77264 - DNA, 517 bp, Zea Mays
tggaccagtaccccctcctatgcaatctctttcgttcatccaccacactcgtccttcccttcgatcagaatcttctttctgttcatcagttcaccactgataattattattccatggaactcaacatgtttggtttatttatgaaggatctagcgaccaagacccttatcgcccactataacagcttgtgacctctaaccttcttcgtctgcctacatcctctataaatccttccactatgcatgccctaactgtagctgcgtcatccaccacttggcaccatcatcttgaccactctggtcttaatgccctatctaagttgtctcgtagttcgatcatctcttgtggtcgaggctcttttgagcacttgtgtcatgcatgtgagctcagtcaccatgttcggcttcctttccccccttcgattctatggcagcaagcatttttttattttgtacactaagatttgtggacatctcctctcattagcatttctagatataagtattacttattcatt

SEQ ID NO: 77265 - DNA, 326 bp, Zea Mays
gagatcaggagcggatcagagtccatggcgcccggtcgaccgttgcaaccggagggggaaaaggcggggctatggtgggttcgccatcgggggcgctgtaggcagtgcgcctgcaactcattggggaagacgaggtgttaactgtggattccgtgatcggtggctgaggttgagcgcgcgcgctatgtgagtgggatttaatcttggcccctcgcgcatgatcggacgacatctgatggagcagtggttataaaatcggggttgtcaactcgactccaacggttctgctgcgtaccagttcgcatgggagtagaacctaattggag

SEQ ID NO: 77266 - DNA, 417 bp, Zea Mays
gggaaattgaggtgcctttggaatcgaaccgaggcaaaggtcgttaggactttctcgaagaatgttggcctaccgaagattgaggcggacctctgcagataccggcgacagcatatcgccggtagcctgttctatgctaattttaaggtaaaactcttaacattttattattttttaaattaagatgttttctgatgaaggttgttttggtagagtatattaataagtaaagtgctgaggatgcaacaagatctcgaagacgagaaaaacgaagctacaattaaagatctagaaaataaagtctaagatcacgaagctactttggagaaaaaggacttcgtcatccactctatggagggttcgctggcagaagctcaagccgaaattgacagattaaacagcgaattactcatgaaa

SEQ ID NO: 77267 - DNA, 343 bp, Zea Mays
agttgtatcaggagaggctatagtcttgcgagatcacatcagttgcacttgaggcgtggccaccaccatgttcttgataggacaaggcctatggcgttcaaccaaaagcttgatagtagagatggtggggagcatgctagagaggctagaactggagcaccatttgcacatggaaaatccctaggctatctatagagttacctgactaggagtttggcccttgcattggctttccttgtgtggggctccaacaaggactattaagaagcttgtgcagttcttgatacctaaataaaaatactagcgcatcaatgagagtttgtatctctatcgcacctaagct

SEQ ID NO: 77268 - DNA, 780 bp, Zea Mays
caccattcaaccccttccatacctctccaccacacaacgggttaggcatgcttcgtgatcccttgcttgttttcaggatccaatgaggtggggcccacttcagacttgagcagtcatctcaccgaggcgtcgctgattgtcggcgctcttgtggcactctggtgtgccctagctctcgacgccatgtgcgaggccttcgacttgtagccgtgtggtgaggtggagcaagttttgagttctaggtaagtcccacgtttgttcgggactttcgccccgggaagctcgcataggagtactacagcagctgtaatgttccgacatgtctgagggagccatggcgatctaaccttgctgtaggtcggatgatgcggggagcgagctgcttcgatgcgtgcttggcaaatgccccgctgcagcttccctattcgccattgcagtagtactcgcttcccagtggaggtacctcgactgctctaggcaggtaccatcctagtggcgatcctcgacatggcgagtcgaggtgagttggggttgacaccatggcatgtgccatagtgtcagtgaggttcccctcgaggtcccctaagatcaaggaggggctcctgatcgatgagaccacgaggcattctcgggtcgaaacgtgggtggtcccattcgacggagaactgggactgcctcccgatcctgatagggggaaaccaaacaacggtcctagaatgggacccgatgcctctaaggccttggcaaaaatgggttgcggtcatccaagcggcatgttcc

SEQ ID NO: 77269 - DNA, 334 bp, Zea Mays
gaaaacacacacccaagggagcccatcacacatcatcgttgttgagcttaccacacatagtaaagcaactccacatttcccacggtaaccattagccaatgaccttgacacgaccttgacacgtcgtcacatactagcaccaagccttgacctcacaataaagtgaaagcattgtgtcatcgttgccaagatttgttgcacctagaacataagtacctccgacttcatcactacatatcacccctatgagagtcagagatgcatcgtaggaccacaagcaagtcgcaaacccgaaaaaggatggcttgccaaaaactagaggcttgtagtttag

SEQ ID NO: 77270 - DNA, 635 bp, Zea Mays
gtccaaagcattcacaacctagcacaaagtgaggagaagacaacccagtctcaggggcaaccaagccaaaaacagcagtcaaacactcagaagaagtcctcccaaagtacctttcgcctactagctccaagagggggaaaaggaggccagagctttggtgacagatttaatgcacaaccaaggaagtcattctatctgctctgtgccaaagataaaggttgcacaacaaggacctgtcagcacaccatccataagcaaagggagattgctactgcagctgctcagtcatctcaaccaaaggaggtgttccgtacatctttgtactgctcaccttacacaaaatgtccaaccctaggagcctaggctacatcagcccttggcttcaaatgctttgaacaaccctatgatgagtgcatggtcgccatctgcttccttcaatctaaagccacccctatgatcaggtccctgctagtcatcccaagttactggtgcatgacatgcaacaacgggacagaagggaggccttcgaagcccgcacggtcaatagtatggccccagagacaaaacacatatactaagacctcaatgggctaggtgagtagacccaaagctatctaaatactcttgagcatctt

SEQ ID NO: 77271 - DNA, 486 bp, Zea Mays
ggaaattcttttcgtagctcttcttctctctcccaagtagcttcatcttcactatgatgactccattgtactttgcacatcttaatcactttattcctcgtaacccgagtcaaagtatcaagaatcttgatagggtactcagtataagtcagatcatcttgaacacttggttcctccatgggtagttgctcttctagtaccctgaggcacttcgtcaactgggatacatggaagacatcatgtacatccacaagatggtcgggtagtttcagttgataggcaacttctcccacttgctttaggatcatgaagggtccaataaagcgaggggacaacttccctttaactttaaatctcatcatatcccggatcggtgacaccttcagatacacgtgatcaccctctttgaactctaactgccttctccgggtatctgcatagctcttctatctagactgtgcagttctcaagttctcccatatcaac

SEQ ID NO: 77272 - DNA, 458 bp, Zea Mays
aaaaaatacttacatgactaaattcaccaaatagtgccacatacctatttagcctggagacataaagaaaaactttgggatggaggatgttaaaatagtatggctcaattaatttagtgttaagacatagtatgtctgcaaatacatatattccccattacaaagctaacccaagaactgctacctgccttgacatagatgattattaaaagctatagattcatgagatgctgtctggtttaggccccctgcctccactaagtgtgacataatccaattaacaaaatcatgtaatcaatatgttgacatggtgacaaattctacaatgctaatccatacataggtcgaggacactacagctacccacagatctcaccagcacatggatgttcacattgaacacacgttgcatgatgtgcaagaattcaataacagaaggggctgctgccctatcttag

SEQ ID NO: 77273 - DNA, 439 bp, Zea Mays
aatatcgtccccgagatttgtaagaaaatgaatacaaaagaattggtttgtaattccgctcttagtctatagttggttcaaaaatccggagtctcatttttttatagtcaataggggttgattaggagagcctaggtatctagttacctattatatagggtataagctggacaggttgaggtaagaaagattatgacaaggaaaagacttcaccagcaatgtttaagtcttgattcatctcaagattcactttgattgttttatccttccttgtcgaggtcgatcttctcttctctggtcttggtctcattgattcgaggttagtgtgtatcatcggggttggggaatatggttaagatagatatggatgagatagactacatgatgtaggtcaaaatattgtttgatgttaggtggggatagacagattcgatataac

SEQ ID NO: 77274 - DNA, 922 bp, Zea Mays
cagcaccctggggcaacaatcaaaatgcctcgcttcagaatcaccaagggaatggcaacatatgcttcacttgtggcagtactggccattatgccaaggagtgcctctagaatcaccaaaagcagagacaaggttccgatcagaacaaagggaagaagaaaattgtccaggtcaaaaacggggaagctcaacttcaccactctcactgacttactggaaggatctcttgtgatgagtgataccttctatatccataaccagcctacaattatcttgtttgactctggtgcatcacatagtttcattggccaaaagtttagtgtcaaatgccagttgcccttctgtcatacaaaaggggcctatatgattgcaacaccaggtggtaaggttgcagccaaccaactcactcggcaagtaccaattgaattaggttgtaaaatattcacaaccacgcttcttattttgggtttagagagtgtagatatcattttggaaaccaattggatgactcgacaccaagtcttaatagatgtcacaacccaagctatagagatacattccccaagttgcgcaaaacttaccctatatctgcctagacagaaatgcacaaattactgtgccttttccatgatagagtctcccttggaaggaattcatgtagtacatgaatatgctgatgtttttctagagaatttgcccagaatgccacctgacagagacatagagtttgtcatagagttgcagcctggcatagcacccatcactaagagaccttaccggatgccactagtagaattggttgaatcgaagaaacaactacaagaattactagacaaggatatcatctttccaagtacttcaccttgggtatgttttgccttgtttgtaaataagaaggacaaaagcttgacattatgcatgg

SEQ ID NO: 77275 - DNA, 1001 bp, Zea Mays
atttaaaacagtcactaacactttgcagaaataccgtcgtacttcgatttcttctctagaaacatccctagccacggcgcgctcgccgtttgtcttcgacgtggtctgtatcggccatggccggcgatgactgctatggttaactatcggggaggcataaccgatcaaggataatctaggaacatcctttaatttgacataaacttcattgggaactgtctgcccatgatcatggcggaaaccaggatcacgagcacacgttcccgccaaatcatggccgaattgagcaaactagtgccacagtaagcttcactagcatgcagagccacaaaaacaacattcgagatggatagagccttacccgaatgggctggccacggtggcgaggcgacccaatttgggggaaaagggagattctccggctatggtggctaatcgagggtgggagcgggtgcttcggcttcgcaatttagagacgaagagttgtgctcggttgatttgaacggagggggtgaggatgcggtggatttataggcgcagtgagccactgtcatggccatggtgataaccatcgccggccttagctggtgatcaacggcggcgtcgagcgctatcctttcctacgagcttgccacgttccgccgtgatagtaactcggtcaaatcagtgagggtgtggatgaacgaagaggagctgcgccgatgaccggatatggccggagtgattagtggccgcgtggcggccggaatcatcacgctccaccgcggcgatcttaccgggatcaagaagatctttgcgaggagatgcacgccgcgcgcccatcccgaccctggcgcaaatcacgacgcggattggtcgtcggcggcgagggtctgaagcttatcctcctgggtactgtaccatggcaatgttcttcagtgctcctaacagccaaagtttagggtggattttctctaaagttttcatggcaactcacccaaatctctgcagcaaagttgtag

SEQ ID NO: 77276 - DNA, 283 bp, Zea Mays
gaccaacaggattgctacaaactctcaaagtatcggaatggaagtgggaagaaatcagtatggatttcatagttggactacctcgtactcgagatggctatgattcaatatgggttatagtggacaggttgactaaagtggcacactttatacctgtgaagacaacctactcaggagcccagttagcagagttatacatgtcaagaattgtttgtctgcacggagtaccaaagaagattgtatcggatcaaggaacctaatttacctcgcgcttttggaaaag

SEQ ID NO: 77277 - DNA, 510 bp, Zea Mays
tacaagactaacaaaccattttggacactgcaattcaagcatgggtagaagcggattaattagcttttcttaaccatttcttaacttaaattggataacacacgagtcacataaaacaccacattttaggtgatctaacatgtggagcatcaattctatcacaagcaactcaatctctaccatacttgtccggaccggtcgactaaccgttaaaaacaataccaaacctatccttcacattttaaatttcacaacataaacgtaaattattctagttcgcaaaagatactgacaatacctattatatccctttgcttaaaccaacatttctattctacttatcacttcaaacagcacgacttgtctgtttctctgatttaccaacgcaattacgctacttacgtgcataagagaaattttgccaaatacttcacgcattacaaaataacatcaaataatggttggaaagcacaagaacatctcatttatcctcgatctgacaagtggaac

SEQ ID NO: 77278 - DNA, 882 bp, Zea Mays
cagaaggtagcaagttgcccttcatcattcaccatccctacacatatgtagatatgcaagtgtcatttggagagagaaaactctaaattgaagagaaagaatatgagctacataagagatataactttgtatttgttttggatccaatcttgtgagcgcattagagactccaacatttgagaagtcaacctgctacgatgctcacttaggactcgatcgctggtgctaaatgcagattctgaagcaaccgtggttattggaatggcaaatatatctcttgctatcttcctcaaagtagggtaccttgttcctgcaaccttccaccaatctaaaatatcaaatccagctgtatgtatgtccaccatctcatcatctaagtagcgatctagttcagatttgttcctgaaggatgctggtttagtgcttgcaatacgggcactaaaggaagacaagaaccctaaattgcctactgaaggtgtcgctgattttgcactactaccacatctaccttcattctcttccaaattgtactgaagcatcaaatcaaccaatgagtttttaaccttttcaacctcatactcacaatccattccaggtgtaccaagtaacacctcaaagcactgaagcaacatgatttgtttgaaacatggatcaagcatagtagcaatccccatcagcccttgaatattagtccaatatttcttaaattttacatccaagtgcatagtcctacccagtgtctctcctccaagcttggtgaagcagtagttacattttgcctttatttttccattccatctcactctcttgaactccttccaaatgactgatgtgagcttcctctttgaacctacctcagcaccatcttcttatgcacactcc

SEQ ID NO: 77279 - DNA, 512 bp, Zea Mays
ttttcactcccttctctctattccacttgacctaagtacgacacatattagatctcataaatgactgatatacaaacgagtttgcctctcttaatagtacggtcatctattataaacttggttgaactcttatgtacacaacctttaactagtgaatgaaatgccccgcaagtcatacttttgccttatgcattccatttcatctttttcaatgacggtattacacgagcatccaacctccataaatgatattgtccactccatgtcatcatgtagctttattggttcattgctgacaactttacttgcccttcaccatagctttcgcccaccagcacaaagtcttttgacttgccttcacacttgcaaccatttcatcgtagccaagccctacctcctgatcttctccacctagccacataacaccatctcatgcctcgtattcaatggtctcctttaacacttagataagcatattcagcatgtccgagacatttcctccttcatggtta

SEQ ID NO: 77280 - DNA, 469 bp, Zea Mays
aacaatcttcgtatgaagaaagtagccacaggccttgcgatactaggacacaaattccatggaaacgacattccataacattattgcatggtagaagtgatgacgattgtccaaggatccgaggataacatgctagacatccttgggccccgaaggtattgagacacttggacatgctatcaagaatttcatcctttagcctcgacggggtatctaattggctgatccaccaccgtcaccgtctcatgcccaacccctaacacaagagtaatcaccttctattccttttcacctaccatcgccacttcctcatcctctttttgacacaccgtctccgccacaaagcatgtccattaagggctccaccaccttctccacccctactcatcctctctgtgacccattgtctccgccaccagcatcgccatcaagggctactcctccacagtcaaagaagcctaaattttgt

SEQ ID NO: 77281 - DNA, 400 bp, Zea Mays
tctttactgacagcttctcagataaagagggaagtggaaataaagggattacccaaccaaataactgactttattaatagctacaccaagtggtaagggatacccacaccttggtgacaatcattacaaagatccaacttcattacaattcatcacgacaagcatcaaaacatatgataagcaaaaataactctaactaagactgactgagactaagacactgaattaagcattattacagactccgactccgtcgatctatggatccaaatctatctgggtcctgcagtcaggggtaccataatcaaagcgaccacggggcggcgaatggtaaggttgctgaatcccgacatgggcgggagaaccgccatccaaatagtggtgcgctgcgcactcagca

SEQ ID NO: 77282 - DNA, 921 bp, Zea Mays
ctccgcttcgtgcgcaggcaacgcgtcgtagctctgctggagctccctcctccctgtgcaatgacggactcggaaccatgggattccgtggattgcactcccttcccctcgcgatgcggtcgttccgcgtctagctgcaacagaagcgcggaagatcggccttcaacagtcctgtgcctttttctccgctcggacttcgccgccggtgtataaatcgaaccatgctctttcccccttctcgcctgctctaatcagtgcaccgtgatctagctcattgccgtgtgcggagaagaggagattccggtcgccatggccgccgtggggaaaaaagctagaaagcgggccgccgacgtagatccacagcctcaccgtcgtcacggcctcgatttgtggctaccaagcttcggcggatggctctggtggtgactgtggcctcggcgtgctgagaagatcaccagaaccccccccccctcaatttctcactggaggaggatctccgccacaacaccatcgctcgcgtgaccaggaacccccaagcttcgaccttcggtaagatatcgcgcaatagttcgtcgtggtcttgggattgttttacaccaggccgttgtgattagctcgccgggatgcatggaattggtcaccgggagggagaatccgctgctgggtcgctgttcacgtgggcaccgtactcagggtcttaatcaggattatgaagcatctagggtgattcacggtgtttttttccttcgtgtgggaccttgccgtgcttcaatctggtggccggtgcaccgtggtgcctacccaccagtgagtccgccgccgtgagggccggtggtgcttctgatctctgctggcgagggtaggacgatgggccatggccgttgatcggctaatgattggccacgattagattaggagatg

SEQ ID NO: 77283 - DNA, 501 bp, Zea Mays
caaggatcctgggggatacttcaaatccttggcatattgcatagcttcggcaatctgctcttctgatagtttttccctaccgcgtgacgcactataaattccaatccctaagtaaaagctccagcagcaggggattcagactttttgctagtttttgtagcatctgaaggtcttgctttgatattcttttcaacaacctccataggcactgtttctgcgggaactgaaggctcagctttagttctagcctgagtcatgacagcttcggcagtttccttcgcattcttttcacctatgttaggtacttctgtagaagcaggagtcagtacctttgtcgattccatgacagtgtctaatacgctggccattcttctcctttttggagttactgcaggaatttttaacaccttcggtagctccgtctcttgcgacgggctcagaatcttcggttgctctgccgacttccttggttctggtttttcggactttttctccttagtt

SEQ ID NO: 77284 - DNA, 271 bp, Zea Mays
agtctaagggacatttcaataaggaggtgttcaaatagaagtacctccacaagaccaagctcaaggacgcaacttcctagcctcccttagtgaccttgacaatgaatctgaccacacttcttcctcgagcgacgatgagcttgagaggtgggtcaaggacaagctaaatagactttgcttcttcgtggacaccacgagaggcttctgcaccatggaacttggtgaggacacagtgggcaccgaaagtaagagcatcggcaaggagtctaca

SEQ ID NO: 77285 - DNA, 467 bp, Zea Mays
aaataaggaggtaaattcagatagaaggccttggatctcctgagaaagaagttgtatgttgggagtttccagaactggttgcacttccatagtataccatatgatataactgaaaggctgacacttgttccaacttggagcaatcagttcactaaccttgtagaattaccagctgctgctcatggtaaaaacataaccatttctcctgccagtgaacctgcatcgggctatgggaagatagccaatccatacccaagatgacatcataacactgtagaggtaacaccttgaggttaacacagaagatatggccttgaatgttcatttgacatcgaggaatttgatgagtgcaatatataatctgaccattcgccactttgacagtaacagactaagatagagctactaatctaggaccaaaagctgccaagggttggctaataaaagaggatgaactacctaaatcc

SEQ ID NO: 77286 - DNA, 542 bp, Zea Mays
gtgggtaggggtcgcatagaatgagtcttgacatgtcataatctagcttcctttggggtctagcttgattcctattcttctttaatgagattgatctcttccttcttcagtctttgtctcattgattcgacgttagtgtatttttggagttagggaatatggttaagatagatattggtgagatggactataggtcaaaagtttgtttgatgttaggtgggggttgatagattatgcaatccatcgtgactctatgggttgggttagacctcatgcatgtggctgagttggtctagggcactagtttaagttaaccctagctagtagggtctaatctcttctacctgtatcactagtctgattaagtagaccacattagattagtttagtagatggctatgagttaaatgagattagttagaatctagtttggctgttttgcttcttaatggtttggataggttatgtaacctattatgtaggtcaagttattgggtatgaccgagttgatctaagtcaccaatttaggcgtaagtggatta

SEQ ID NO: 77287 - DNA, 1074 bp, Zea Mays
aaatagtttattgccgcgcgacatggcacgcaacacactaaacaaggtgcgcggaacggcgtacgcgacagcgcgcgtcgacacgtgtggacgacacgcacgatgtgtgcgaacggcacgcgctgacttaaacgtgccacgcgaacagtacaggcgggtagtgtgcggacaacacgcgacatgagtgagcgacgcgtgatgcgtgaagcagaatgcgaacatgcgagaatcactaactaaatgttgtttttatactaaaaataaattagttaaaatatgtgaaacaatgaaacaatattattaacacgtcgttacaaatctaaaacaactggaacgcgacgaaatggatctacgacgtaaaatatattcaatatttactagttcacgtatttaagatgaggtagcgtattttagttggctaagccgaaaccacaaggagtaccacaaaatcgtggctgcaaccaatcctgcacaacactttttctacgtgagtggtgagccaattttattaaagcgcgcgaatcgcgtctcgctcgaacggcgaggcgagaacagcacaggcgagtcgtgcgcgggttaaaaacggtaaatcagcttcaatggggaaaacaatattaaaaccttagttaaataaatatttaataaaatacctaaaacatgtgaaatgatgaaatagtattagtaacacgaggacaacgtcgttgcaaatccaatgcacttaaaacagattgaaacgagtaattaaagcaaaaggcatggaataattacttaatcgcagattaccgatgatgtagtgcatctcactggtgacgaagtggccgcacaaagggtcacaagaagcaagaccacaacagatcccggaaggatgggatcagtgtggctatgggcatttctcttctttcttcagccaaaagcacgaccaggagaaaggggtcatccatggttgatttgattacacggagagagcacgaccaacagctgcagggggagggtctactctcctgctgccctgctgcacagaacggtaggacgcagagtagcaggtggccatggcgagtgggggagaagcatggc

SEQ ID NO: 77288 - DNA, 448 bp, Zea Mays
atttgtgtatatctttgtcccactaatcttgaattgttcctcactaccaatccatcttcattatgcttgttgcaaaacacccatttgataccaataacattatggttattgggtctttcaatgagctcccgaacttcattctgggtgaagttattcaattcctcatgaattgcatttacccaatcaacatcaagcggggcttcatctacacagttaggttcaatacaagatacaaaagggaaatgttcacaaaatgaagcaatacaagagcaagtttgaacacccttactaatgtcacccacaatttgatcgaccggctgatcttttgcaatagaatgatggatccttgatacaatatgagagacacttgatgaagcttgaggagggaccgggcgacttgatgtaccatgatcatgagcgtcctcaacttcattattttgttgacttt

SEQ ID NO: 77289 - DNA, 389 bp, Zea Mays
gcatgaccttcttccttgaatactcccacgatgaatgatgaccatcattgatcgtcatggcatacggtgtgatgtgagtccaatccttaagcacatcaatctcatcatcaaagctcatattagcaaattattccacaaagatgaggtgttatgggtcatcaagctctatttgtttgaccatcctttcatcgtcttcaccatggccagctttcatgtgccaaacatattcttcctcttctgcatcctctatcatgttctagactacctcatgatcacaaatacatatgtgcttagtatttgtgacctctaagttctctactactagaactgtgttccaattgtcaccatgcatgctaccatctaatactcctcaacaagcatgctatttt

SEQ ID NO: 77290 - DNA, 518 bp, Zea Mays
ctcactcataccttaggtataagaaggattttggagatgagtttcataggacttatcttgatttgaagttctgtccgagagatagataaatcctaataaaactcagaatgtaagaaaagcccccctatgtgtgtgcatgatatttcaagctgaagatacaacacacataatagattggagttttgatggagaccttcctacagtcatggttatcgaggcgtacaagagataatatgtaaagtaagcgcagcaattataatcactcctcgattaaccattcacagagtaatttgaactaagcatagttcaacccacaaaatattacaataccaagtgcatagttccacaggcataagacatagagttcaaagttcaaatagtagcccaataccaagtgcataagacataaaataatgcatgcaacataaaatggtaaacatgcacatgcacggtctcaatgtccacataaacaaactccccctgaatatgacaacttctcttctctttcttcacttctc

SEQ ID NO: 77291 - DNA, 517 bp, Zea Mays
gcagctgctgaaggatgagatcgagaaacaatgcgaggctatgctgcagcaaggcatcatccgggaatgctcatcggcatactcctccccggttctcctggtccggaaagcggatgggtcatggcgattctgcatcgactatcgtgagctcaacagcaaaacggtaaaggactcctttcctgtcccagtagtagatgaactgttggatgaactccgagatgcgaggttcttcaccaagcttgacctccgcagcggatatcatcaagttcgcatgagtccggacgacatcaacaagacagcattccgcacacaccgcggaaaatttgagttcctcgtcatgccctttgggttgacaaacgcaccctccacctttcagtccttgatgaatgacgtcctcaaagcttatattcggaagtttgtcctggtattttttgatgacatactgattttcagcaagacatgggcagaacatttgcagcatgtgaaacaggtcttccaagtcctacgcgacaacaag

SEQ ID NO: 77292 - DNA, 334 bp, Zea Mays
cgaactaacattaactagtaagacacataaacatccatacgttaacgctagctacctatacgtcattgggcacaacaagtcaacattactggaaagacgacgaacatttcctatatttaaccaacacaacacgacatcacgagcacaagcatttaccacgttcactttaatcatttattagttactctattattaaactacttaagtacacataagtttacgatgacttacacatagacaaacttaacttacacatagacaaacttagttaaaaaggaatagttacttaatcaggtttcacaatcattcacaacattctactgcaagcatacac

SEQ ID NO: 77293 - DNA, 354 bp, Zea Mays
gctccggggatgggtgtttgatctgcttgccgtgaaccttccctcgccggcgatctgacagacactgacaggtgcaaccacgccagacggttctctcctcccatgctttggcagctcatgcacgggtgagaagctgccatacgcgctcggctgcttaaatgtttgcccactggcgtgcagccagtttggttacgctggcggagtggaagctgacaagagagaacgggcggcagctctgatcgacagggaaagatacatgcatcccgcaggccccggacattatcagatcatcaggctatcatgcatggatgatgatgggtcggtcggtgtccaatggatgccatatataatttt

SEQ ID NO: 77294 - DNA, 412 bp, Zea Mays
attgcttatgatatgatgtggtgtggtgtcatgcccctaggggcggttacatggtggatacgagtaggttacatagtccatgacggttctaaactagtaacctagtcgtatgagaatctaactcttatggttacaagtgtgtcttcattatccattaagatcgtgccatatctgattatgatctatgccttatctcttctactccaataagatctttgctatatttgtacttctggaatcctcctcatggtagatcttcccttgatcaagatgatcaagtccataggatctagacggagcccataatcctacccatatatgttcttgtgggtacccctaacagtagcacccgagttatatttggatgaaccattgattcatgcagatgaaactcttctattgaatctttttc

SEQ ID NO: 77295 - DNA, 620 bp, Zea Mays
aaccgagatctgaaatgtaccatagtctagttcccatgtgtcctcaataaagctaaaaatgtactaatctcaccagtttcatagtctatggcctcacatagaacaccactattttgtgacacgttgttttgtccttggacttggtacaaaatgtgaatccactaatatcataggttttccatgtcgtgacatggcgtgatggtctagatgccaatctttgatggtttgttcttctattgtctccccatgtggaatgtctttcaccattagccatgtgttgaaccgatgcttgtgttgcttcattgcccaatcatacatatgcccaggattttgctcacgaagctcattcatatgttgttggataaatggctccattatcgatagctgatgtaggatgctatgatgtgcctctagtactgtattgtaatctggtgggatgaaagatttttgtgccatcctccctcttccatacaatctaacctcgtgtcgtgacataggcaaatctattgcaacttggtcttttaggattctattgtagaatggatctctagactcaatggcctcttcggtacagtacccctctatcatggatgcctcaggacgagcacgggttgatggat

SEQ ID NO: 77296 - DNA, 352 bp, Zea Mays
catgatggtatagggagtggctgtaaggtacctgctatcttcaaatgacttgctttgattctttggcaagtgtcgcactcagatacgtacttagcaatttctctcttcatcttagtccaccagtacaaggatctgaggtcatgatacattttgttgcttccaggatgcatggaaaatttggagagatgagcctcgtccaaaattttctttctgagttctggatccttgggaacaacaagtcggtcttcaaaccataaaatgcccttgctgttctaacgaaagcatttatacttatccaccttttggttgagcattctcttaatgatttgaatgcctttgtcactaagctgtg

SEQ ID NO: 77297 - DNA, 538 bp, Zea Mays
ttccaaactatactttttcggtaggaaaaaattctctatatgccactatacaattctgttcagtgtcttatttgccatcgtagatgtcttaatcctttatatgtcacttttatgcaatttcttgtccttctatgtcaccattgttaaggtcaatggactgtccataatgacatgtggaacgataataaattgcatccgagtgacaaagattctggacatttgtgattttatcattttactcggtctggcaggtcaaactaacagtagattgatggcagtttcttggaagagtaacaaattgcatccgagtgacatgaaatagattagaatatttgtgatggcaaatgaggtactgaaaagattacagttacatgcaaagatttttccccttccggatactacatagcaagttaagaggaagttgtacaattgtactcgaatatattgatggaacatgtccgacgaaaatagatatatccacaaaattgaatttgcacagcgtgtctctgtagtagggagccatgtgggaaactgaatg

SEQ ID NO: 77298 - DNA, 676 bp, Zea Mays
tggaggacgtcgatatactagaagaagaacgattgaatacagtgattcagtcggcccgatatcagcaaactctgaggcgctatcatgacaaggccataaggcatcgatccttcacagtgggagacctcgtcctccgccgaattctaacgggggagggacggcacaaactgtcgcctctatgggaaggaccattcatggtagcggaagtcactcggcctggatcatatcgtctcactcagatggacgacatagaagttgggaactcatggaacatagaacatctcaggaagttttatctctagctatatctcaaaagctattgggacaacaatgtactctgtaaactgggaaatatatcatcaataaaaagacttcaaaggcactcgaattgttcactatcaacctgcacgcttacttgactcggggcgatcactataccctactaacggagcaatcggcttaagtcagcaatgacttaaggcggtgttacatgctcacacttacttgactcggggtgaccactataccctactaacggagcaatcgacttaagtcggcaatgacttaaggcagtgtaacatgctcacgcttacttgactcggggtgaccactataccctactaacggagcaattggcttaagtcgacaatgacttaaggcggtgtaacatgctcac

SEQ ID NO: 77299 - DNA, 779 bp, Zea Mays
cgcacacggctgtcgtatccccaagctctgcactctggcgccgcctcctctagccctgcccgcttgtgccgacggcccggcgccacctcccgcaactccacacggcggtaaccccaactctatccgctaacatctcagcacggtgaacccgccactcgcagccctcccgtctcagatccagtttgattagttggttatttgtgcagatcctacagtttgattagttagttatttgtgcagatcctaaccaactgtgatcgctgctgctgcggcttgatcagagcgcgttctctggtgacatacctctggagattgggcggctgcagcagctctaaggctgaccttaacagcagcaagtttgaggacaactacagttagccaatatgttttctgtctatgtcctcgcgaagtactagagcagtagctacataccgtggtttgtccatatcctgttgttagatgatcaagggtgattagatacatgttctggaaccaatgttcagatgacaaattgcaaactaaacacccttttgttctctatctttttttttttgcaattgcaatgcgtgtaaagtacattatcaatgtcagccccaggcatatcaatcgtcctcatgcccggccgtgtcctagcgtggaaaaattgctgtgcctgcaatggacccaaacgaatctgtttgcaggaatcgatgccgccgaccgcgaagaaggaaacaagacgtgcgccataggattggagaaaaaattggcaaccttatagatgagcagaacgatacgaa

SEQ ID NO: 77300 - DNA, 698 bp, Zea Mays
ctgacgtttgcagatagccccttcccttttctatttcttcacacgttgagacccctgaccgtggacggcggagcagcggctccggcgagcctgtaccggccggagaacacaatgaccggtgctccggtgtggctgacacctaattccgcccctaacaaccataacccctccatcaattgcggagttctaactctaaatcgctctgtccacggtgatggcccaaactaaggataacctgaggcgatcccggcgatctaacgcggtctaattcaattggctgggccgataagcatcaagagcacataagagagctgaaacaagagcgaggagggcaggatcagacctatggagagctggccacggcgagctcacacacgacggagttttgactgatttgggggaacttcaaaattggagcgctctggtggacaatctgaggcacgggttggtgcgttgggtgtgtgattacctagcggagctgatgtcatgcttaatttatagggcccgagggctgtggctcttgaatttggaatggtgtgctggcggccagagagaaagaaggtcactggcgcaagggatgcgtggcttttaccgtggcaaggtcaccgacgatgaacgggcacactaaggcgagttactccgacgtggtagagcacctaggcacgtggcacccgatcggcaggcggccaactccggtg

SEQ ID NO: 77301 - DNA, 653 bp, Zea Mays
gagattccagcgcagccattatatctgtcttaatgatgtgccaagcagatttgtagaacctccctgtgaaaccatcagggccaggagctttatcattgggaaggcttgcaatcgtatcctgaacgtccctttcgaagaaaggagattctaaatcgcttaggtcaactggatccctatggcaatttggcaaatccagagtgaaaggtctctggatttcagtccccaaaagatctaaaaagaaactatccaacaactcctgcatctggtcatggttagtaacagtcctgccctcatcctccaaatgagaaataaagtttctcttttttctaaaacaagcctgcatagggaaaaatcttgtatttgcatccccttccttcaaatattggatctgagaccttaatcgggcgattgtccttagtaaagaagttaggacgagacaatgttgtttcagttttctcatcaaccaaaccttttctacagccagaatcctaacatcctgagcaatctccagtctgtgtaacacctcgcgagccaagccgaattgagtcccaacattacctaccattttgtgcccccaagactgcagtcttttggacaatctcttaagcttcatggacactttctcaagaggacagtaacaaggagctggctga

SEQ ID NO: 77302 - DNA, 849 bp, Zea Mays
ctttagggtttttaattagggttgcacattcttatcttttcaaagactcaattgttttgatcatgttacttttaagtatatacttggtgaattctctattacttaagttgttttgatgctcatgcttactttggttcacataaaatgatggttcttggtttggcatttgagaaaaaccctgagtgacactggggtgtcacagtacgccactagggccattggatgagagatctaccgcacagatttaaaatatccaaactgttttccatccgccagatcgggatcgaacgaccacggttgcatcatcgccaaccggtacccgaatcagatcttgaccgttaatccctatcaacggtcgcactccttcccccaaccctcctacctacgacgcacatgcggcgacggccgcagagcccactgcagaggagttcgccgtcgaactccgtccgacgaattggggccccaaattccaaatcaataggtgttgtacgtagagaaggatgaggcgaagctatgggttagcagactacctgcgagaaaggcgcccacaaggctggccacggcatggtgtgatcgtcggtgatttcccaagtctggtgagaaattgggttggaaacgggggtcgtcgtcgtccgtcaatgccacgatgagccagcacacacccaggcggccatccctgaccacagtgcggacttcaatcggcgatgcaggccaaggactgcgacggtgactccattctcacctcccagatcaacggacggagtcgtttcttccccataaactacagagcggcggcgggctttagtttgtacggcggcgagcccttgtagctggagggcgagggcgagg

SEQ ID NO: 77303 - DNA, 329 bp, Zea Mays
cttaactctatccatggattatgcttttcatcattatcacctttatccttatcacccctatatcttaccttgatgtttatcttataccatcctctaaaatatcctcttttccatctcaatctgagcatcgtactttacctacttttcccttgggtgtatcctcttctttgtcacctgcgagttttaactctatcctttgttgggtttttgtttgttacttcctttacccttctcatcactctatcctaccttttgattacattatgtctgttatctaaaatctccaatctcttatctcaatttgagagtggtgttttacttacctcacc

SEQ ID NO: 77304 - DNA, 759 bp, Zea Mays
tagccagtgtggcgccctgtgcagctatgtttactatcccagtgggagctattcgtgggtcgcctgaccttttccgcattagcgttacttcatcttatgatcttttcgaattgtatatgactgagatatgcggtgatcaatactacctactctgtggctcttgaggtggattttccttcgaaatgttaggtgcactttgcattagcccactagaaacaatatgtatttgcaccaattattcttgttttcttacttctatttttgcagatcatcaatgctttcaatagtattagtagcattagtcaagctagcattaccctattcattccccatacaagataaatttgattgtaggttttgtggtaggaggagaatttctttgcaaagcatctacatttccatgtagttgggagaagggaaacacttgctcatgaaagacgacatcttgagagatatacacttgacctgttttgggatcaagccacttaaaacccttgtatatggaactataaccgaagaacatgcactagatagatctaaaagcaagcttataattgttgtaggatcttagatttggccaccagacacatccaaatattctagggttggagcaggtaggttatggccaagaagactttctatggtgattttcatttggattacactagatggtaaaatgttgataagatgcacaacggttagaaatacttcatcctagaattttaaaggcgtggaggcattagctagtaaagaaaaaac

SEQ ID NO: 77305 - DNA, 373 bp, Zea Mays
ggcttacagatactctgagataacaaggggcttcagaggaagacttaatccaagacacgtcagaacaatccacaacctaggccaaagtgaagacatgaataaccatactcaagggcagcagagccacccccaatcaatagggacacaccagacttcctttagaccgccagccccaagaggcagaggaggaagaagctttggaggaagatccaactctcagccaagaaggctattttcctattctgtggagaggataaggggcacacaacaaggacatgccaagtcacaattcaaaagcagaaggaaatagcggatgccaaagcgagacagaaccagctgaagcaggttcttcatactgcttcgtattactccc

SEQ ID NO: 77306 - DNA, 352 bp, Zea Mays
cccgaggaacgtattcaacacttctagaaaggttgggaagctcaaaatcaacatattgctattttggagctagtttgagcaaaagaagaaatatgagtgaaagaatcaaaatgttcatgatccatgacttagactagatggaaaaccacttgagatatttttctaagtcataggatctctctcaagtttagccaaagcaacttggagaagattgttcaaagatcaacgagaagttagaaactcaagttctgaaattgcctagcgcggaccgtccgaccccttctggtggaccgtccgcgacaccgtttcgacttcgtccaggaactaaaatttgtggatagtccgactaaac

SEQ ID NO: 77307 - DNA, 533 bp, Zea Mays
ggctaatcagagacaggagcgggtgctttggattcgtgattacctaacgaagctagcggtatgctcaatttatagagtccaagagcggtggctcctatttttggaatggcgtgctggcggccggagagaaggaaggttactggcgcaagggatttgtggctttcaccgtggcatgtcctctggcaatggacgggcttgctacatacgttcactgcgacgtgctaagcttccaagatgcgtggcgcacgatcgttaagcagctaacgccggtgaggatcatcccggccaaccgcagtccaagtgggtacggcgagctcaccgtcgaccgggtccgagccaatccgagcgctaagatctttactcccctcagttatccacttgcactgggcacaaatcgtagcggccggcgcgaatccgggcacaagataaccggcggcgaggggcgatgaccctggggatctttttcagttactgtacaatgggatccttattcagagcgcctgaccgagcacatttggggatgatttattcca

SEQ ID NO: 77308 - DNA, 373 bp, Zea Mays
gcggttttaagaaacaaagttactaaataggcccacagtgttcctgtaagcttccttttcatgacctacaacacactatctagctagtcagtcaaagtcgattgcacagattcacacgatcacgggcttgggaatgaacaatggatgaatttagccgccgctgttactctcgtgttattaattatctgtgtgaagaaaacgaagggacacagccaccaaccgtggcaacacaggggaatcaatgaatgcatgcactccactggaccgttcgttccattccagcgcttgacactggctagaacgccatcgaccacgctccgcactctatatatagagggaaggcctccactctcctttgcgggagataccagta

SEQ ID NO: 77309 - DNA, 845 bp, Zea Mays
cggagttgtgggaccgccacacaccatgagcagcatcgtatacacctcagttaccgatgagggcttctcctattaaactctttgcctgctccatattcatttgcactaggttttatggtcaggtagtgcatccgggcgcgaatgggcgtggcgcaggcgaggtggccgtcacggctacgattgtgccgcctagttgagtgctggggaagacgatggtcgtgcgacggttgatcgtttggtgaacgttctagattagaccgatgggagggtgtagatgggtgaataagagttgttggatgggattgggcgggcaagatatggggcagtgtaccgtttcggatgaaaacgctatgggctgctcgatttagatcaggcgtgggggaatcaatcgggatactttaaactcttgtccattcatcatggatcctgtggccagcgttgcatacccgttcgtgaaggttatagctctaattctaaccgtcgggatcagatcaatcaaccagctagcccccgtacccctttggccaaacccgtttttacataagagcccttatactttctagaaatcaacacgccatccacaacaatattagaattgtaacagagaggtcctgaaatttacatgttgaacctcgagctctccggaattcatacccccatccccaactgagataaaaaaatataaaataaactctaaaatttctggtaaataatttatagtgtagaaacaattctaggaatttcataaattcgtaatctttgttttaactcgaaattgaaccattctaattgcattgactcatactaatattgtttaccagttagtaaccttattttactatgta

SEQ ID NO: 77310 - DNA, 676 bp, Zea Mays
aaggcgaggaagccaacacccgtgaggcctatcggaccttgaagatagactttgacaagaagctaaaggcactcgcccccaaaaagaagatccagaagaagaccactaaccaaggatgccagacagagaagaagaagaagaaggcccctctagccctacctccccccagaatagatgactggtccgacgaagaagatgtatccctagccagcctcgatgatcttctcaaggcatttggggacaccttagacaaggaactcgctagtacctcgaagaacgttctcgtgtagtctccccctgtagtagtcttatgcttgtaatgtgatggtgtaatgaataaaataacttggttgaaaacaatttgcatgtgcatgatagtgactctcttccctggcagatggcttcggataaaaccacgcctaccgcctcagggattggagcaggtttcccccgaagagttgaaggggaagtcgttagagaagagagtgaaacccacctccctgcacctccacccctacccttagacctagcccaagttctagccaatcagacccgactcatcgaggtcctcgctcgaaatctggaaaatcaacggccaaatggtggaagaccgcaagacagaatgggggactttctgagactcaaacctcccacgttcgccggatcaagcaacccc

SEQ ID NO: 77311 - DNA, 645 bp, Zea Mays
gtcgggcaatacctcggtcgctagggccatcggtgtctggtgaattgctcattggagctccaaatcgccgcggcgccgctttccattgtgaccggcattccctgctacaacaccgacggtaactttccttcacctgggttaacaatcagctgctctctgtgttgtatcgtcttgcgtggggattgccgtgggtttggccggatggccatcgccggtgtgacagccgccgtgatggtcggcagcgcctctgctcggccgtcgggtatggacaaaacacagtgaccgtgggatccattcagcgactgggattggaagggggtgtccaccgatggatcttggacgaacgggttagattagaagtagtataccccttcggtgggattatcttgggtcgttcgatcaggatcctgtgacccagattcgatctcgtttcattaaaccacaaccgctgatctcggatccaagggctcgtattgcataccgtttcatttaaagcacgatctaatctgggccgtctgatctcgatcgggcggctctgagtgcgggataccccttcgaccgagaagtcttacaaaagagcccctcggcttattccgaattaacccgccgtccacctcgggtcacaccgtgtctagggaattcttg

SEQ ID NO: 77312 - DNA, 486 bp, Zea Mays
gtttgttagggtcccttagatctcggtaaccaccatggtgtggtcctcccgcaccagccgggtgaagggtatcctcagcccttggaacaataaaaccgaaatcatgttcgccgtgagtgccatcaaccaaagaggagggaagtgaggctgcagacgaggactgacattgttgcactcgttccatcagtggagactactcagggcgcttcgtggaagcacgacgggtgtcgtgggggagggttcagaggccacgattgatcagagcacacagaatcgctaactagagtcaaaatccgttgtggagccgcaacacgtcgagagcagctacctcaacgccaccgttttgggtaagcacacctccgatcacttcgccttcgtctacacttcgcccggcaccaatccacgttgggaattaatcctagggagactgtatttcacctcgccggtgaactctcggtcatggggtgcggcggtgccggcctcacg

SEQ ID NO: 77313 - DNA, 286 bp, Zea Mays
gttaaaaatatattaacttttgcgttagacatctgaattaatatgtttctattgagttagcttcgtaataatatcatgcacacattaaacatattatcttgtcataacgtatgtttgttttacttaattgtaagttggtctgttggttattaacatagcaatttagttaaaactattttatggttttaagttacgcttttataaatatatgttaaaatgattaataccaactcaaataagtactaatttaattattaccaacttaaacgtttggattcgatactgg

SEQ ID NO: 77314 - DNA, 525 bp, Zea Mays
ccgctggtaggaattgattcaaattaatgtgaatgcaaaatcctccgagttgtcgcagagggaggaatctaccgctttctaaaccctaaatcgcacagacatcttcatctttcttcacacgcgggtagggatggtaatttgacccgtgcattcgcatatccattgaatatccgatccaacgaagccgggtattgatacaatttttgacccatgggtaaaacttgtatccgatctaaagttgggcgggcacgaattaagatattaccttccacccgtgggttatcgttggatatccgaaatcgatcattagctttttttgcctagcccatattacacaataaagcaaaccctagctccatgaacctaatgcctaacgctcccaattctccaccgttttgaccgcccttcttgctggcttaccgcgctctgccccaatgccctcttctatagatgtccaaacagtgcgggccgcccgtttggcccgtggcacgacacgaatttagcctggtccaaacacggcctgac

SEQ ID NO: 77315 - DNA, 807 bp, Zea Mays
taacctctgatcgaaggttgttgagagctatagtgcagctctcgtcttcagcattcttttgcgcccttagggcgttgctaagtattaagccctgcaagaaagaataaaggattaacatgagaataaaagacttcatttcagagtccataaacttcaaaattcacaacttttgtaccttcagactgttgtatgcaagactatctgcgagatcggccttcgtcatggcacaaaggccagcttcaagcttcggaaaacccatacttctggccatctcccgacagacggataattctttgttgtctaggaggcagtacaaaaagtcatcttcatttgtaccattaaacactagggcccccttcggatactgcaattcccgggcataatgtttggcttcagaaatttcttcttcggatagtctttttcccgaagcatgtctaacgatataatcaaatcttttggagagtacttcaggagtaagggattcgacttctttggccacacttttctcaaaagctatattagtatctggagttattccttcagccctctgctcggttgtggcaagcttcgtctcagcaggcactttgggccctgcctcggtttcagcctaggttattgtagcttcaacttctatttgcttagtatcagctttgggttgcgttttgtcagcttcggcaaccttccctgtgggagcggaacttatggagtcggttgtttccaatacatctaatacatttaccatccttctccttttaggagtcacgatagaacctgtttgtaccttcggtaccgtcgcccttgttggag

SEQ ID NO: 77316 - DNA, 1076 bp, Zea Mays
taggaaaaatggaagaaaagaaataagaaaatagaaagaaagaaaagaaaaagggacagaacactgttgggcccgcggatcccttttctcggcccatttcacctggtctactgcgcggcccaactcccctaacccacgccgacgctgacttgggggccccgcatgtcattccgttcctctttcctcctcacagaaacaagcgagcatggagatcggtcgttgaatcggccacacatttttttccccttccgaaccggatactgcgctgtgattaagcctgtcagcgtttcttcctccatgaaaccaaaaagaagcatgccgccatccgcgcaactgaaatctgtttctgcgccgcacatctaccaacctccccgcggactcgagctgagccgtacgcccatatctgaaccaccatgccggctctatcttcttccccatgactgtcgctaacggaaaccgtgaaatctgccgcgatcagggtgttccggtcatcctctcgggacatatattggcggggccatagacctctttccccatcctagtaggagctagcatagtgttgcctcgacaaatcgccgggcttcatcaccatacacggagagaaaaaaaacggggcccccatctactgtaaaccccgccgtggtggccgttcgaagcatgcagcaggggtaggatgtaccacgtgcacgtgaggctcgtgcttggtgaaaccgcgggatgcgctccgccgccgcgtctggccatgggggaaaagttagagcttgcgcagagaatggaggaaggatgtgacgaggtccgccgtggactgattttcgtccacgcccgtgccagggcttcgattgtgaccaggtagcttcgcagtgtcgtggggaagcgattcctaccactgaatcgtcgtgtgggtggccggagctaggccaatggctcgacggagcaattggcgccgctgtggatcgctccgcgccgtggccgagggccacaccaactccaaccactggtaagccacctcgattcagatcactcggatttcctccttgcgttgcaccgacctcgagagcgaatagggtagtggatag

SEQ ID NO: 77317 - DNA, 403 bp, Zea Mays
cgattacagacgtgtgctcgagattagatcaggagtggccgtttcaaatattgaatctggtccgtgagtgttgaatccaagggctagagtggtttgatgcggtggaatgattcctgcccgtggatcttggatcctgtggtgtctgtcgtttaccgcttcacgatttaatatgagccatgcaaaagcaatctagcggctctggtgcgcgcataccccttcgccttggagtttatgctaaagagaccctgacaaacattatcaacccgctatcctgcgcggtgaatactgagtcttgggacattttgcaagttaacccccgagcttctctgtattttgtgttcaccccagagaacagagaaaatcagataaatatttataggaattgatttttagtacaaaaata

SEQ ID NO: 77318 - DNA, 436 bp, Zea Mays
gccttatatggacgacggtgtcatactccattaaattggtctgaaccaggagaaagatggtttttcaggcctgatatggtgaaagaaacaaaagagagggttcaacgaattatacataatttgaaggaagcccaagctcgccaaaaaagttatgaagacaaacaacgcaaacccttgtactttcaagttgaagattatgtctacctgaaagtctcaccaatgaagggtgtatcacgtttcggggtaaaagggaagcttgcacctcggtacattggtccttttcctattcttgaacaatgtggaccagtggcatatcgactccaattacccaaaacattgtctgatgtgcacaacgtgtttcatgtgtctcaattgaagaagtgtcttcgggttccagatcgaaccattgaagtaacggatgttgccttagaaccgg

SEQ ID NO: 77319 - DNA, 576 bp, Zea Mays
ccctggcgacagagacccttgacaagagagttgtagacgacaaggtcaggcttcagatcttttgcttgtgcctcattgaagagttctagggccctctcaatgtcaccctcggcacacagtccgttgatcagtgagcaatatgtgacccggtctggtacaaaacctttaaagacagcatctttcagaagctcagtagcttcctgcagcatgccgctcttgcagtagccatcaatgatggtgttgtaggtgaaatcatctggtatgcagccctgattcatcatcctaccaaggtactgtgcagcttcctggaccttggagtccttgcaaaggccacgcatcaatgtgttgtaagtgacaacatctggcgcaacgtaggcacccatcctttccactagcgcaacagcctcttccaacctgccgtcttcacagaggccacggatccatatgttgcaagtgaacttgtttgctgacatgccccgcttgaggaccttggccagtagtgcccccgactccatgacatcccctttctggcaaagagcatgcaaaacattgttgaaagtggcaacgtcagggaag

SEQ ID NO: 77320 - DNA, 447 bp, Zea Mays
acgtgcatgagcttgccaggcggtagcgagagacggatgacaatctccgtcgtcagtttatcaccatgggaattccctttgctcctcgctcgcccgatgtgcctcttcatgcaccccctctagatatcaatgaatggcaccagcaaacctatggtgttccatttatggctgccgaagatgaagatgttgaggaagagttctttgatgatcgagatcagtttgtcccgcctccccaccagggtgatccgggcccctcatcgtcttatcttcccccaggaaccttcaggaagcactcctccccctgctaaccccggggaggaaaacattgttgttaatctggcgtctcggttcttcgacccctctccatcttggtgatatgtggttgtgtcttctcccgtttttttggtgctcgctgccaaaaagggggagaagggttggtggtggttg

SEQ ID NO: 77321 - DNA, 683 bp, Zea Mays
ccgtcgtgtccaaagcttgcctttcgccgaagagtaatgaactttggcttgcgactttgctttgtgcttctatagacgaagcctccatattcgaggtctagcttcgtctatcctttgtataactgaaatcacacttgtttatttcaaagcaatggatgtctgaggaccttcagcacaggtaggcccccaacagcttatataatgtgaattctatagcccctcaatatgtccgctcatgattgttgactttgcaaagttcacatgcctcaactttgttggctggatgtcattattgtcctcatcaatgtccaaatcctcactatcatattcggacccctctgccaagccatctagattaccttcaatttcacctctagctgccttagccaaatggctgctttcagcaattacaaccccttccttcacatcagcaacattctaagccatcgccagggcgagtttagaagctactttctctccttccatctctaacgagtttgaaggtcgctcgcgagtttgaagcacaactaaataagtgttgattcgaagcaagctttggaggcaaagaaaaaaccagtagcacgacgcaaaagcagtgattgtcgtgctcaaccactcaaatttttcctctttttatacaaaaaggcacgataatcgattacctgcccatcttctctcactgc

SEQ ID NO: 77322 - DNA, 678 bp, Zea Mays
caatatttcttgacatccataatacgacggacaggattcatcaactcatttcagtacttgagcaacagattgataactgaattaaaaaaacatcatccagcggcggcatattgcagttacagtactaaaaggaaccttgacaagatgcggctgagactcgaattcaccgaaaattgttagttatgctcttccgggattcttgtgaactgttacagttatcccgggatttcacaaatagcaatggaccaaagaggcattatctgactgttcgtttatacgtggacaacatcgatcgacaaggcaaccgagccacaaaactacagaacctgcatcattctactccagaaatttggggctaaccactagaacacacgtattttagtgtttagaaataaacaataattatatttgcagcctaagcgcccctccacacgcctcccctctcccgcctcgtagcaacgcacggacacatacctagtatgcacaataattactggaattatcaatatttcttgacatccataatacggcggacatgattcatcaactcatttaagtacttgagcaacagattgataactgaattaaaataccaacatccagcggtgacatattgcagttgcagtactaaaaggaaccttgacaagatgcggctcagactcgaattcactagaaatt

SEQ ID NO: 77323 - DNA, 533 bp, Zea Mays
gtgaaagctaggaactcatttagtttgtggtctatgatgccaactagaatgtggtgccctttgaaagctgctttgaattcatcccaggtcactacgtggtctgctggttgtatggcgaggaaatgatcacaccatgtcctagcgggtccagggagctattgggcgacgaatctagttttggccgcgttagagcatactctagtaagtagtggaaatttggattccaccactttgagccatatgttcgcattgagtggatctttcgctcgagtgaatagcggaggctgggtgctgagagattcctggtaggtcgccattaccggtggacgctgctcatcaccccaaagtgatggggctgaggctggcattgcatgagccgccgcaaaatctcattctgtgacaccatcagctcctgcatcgtgggaggttgtggtggcgggggaggaacttgttcgttctgtccatggcattgacgtccagccatctaaaattttggaatccctattgttatactcatggttcatacttgcgaa

SEQ ID NO: 77324 - DNA, 863 bp, Zea Mays
cctcctctagaatgtatgcttctgcaatggaagcctcgattttgcatttatttctacatttctttcgaatagtctttagacatctctcgattggatagcaccaacgtccctgcacggcccccccattcgtgcctcataggggagatgaagaatcaaatgctacattggattgaagaagacgggtggaaatatcttctcaagcttacacagtaacacgggtgccaatctttccaagtctgcaaccacggtccgagaatccgttcaatccatatgtggaagtcatgactcttcatccctaagactcgcatagtagatatgttcaccccctactcaggttagctgcatacccatcagggaacatcaacatcttgatccactgaagtacttccttcctctgggccctgcttaggacaaaatcggccttaggccttctccacgtctttctgccacttggtggcttcatctctagttttggtctatcacataacgctgccagatccactcttgccttcacattatcctttgacttattaggaatgtctataattgttgcccacagtgcctcgacaacattcttttcagtgtgcattacgtcaatgttgtgtggaaggagaaggtcgtcataataggggagccaagtcaagccagacttatgtgtccacatatgctgctcaccatatcccacaaaaccaccttctgtattggccacgagcccatctatctgttgacgaatttcggcaccagtcatcgttgcaggtgggcggtctgtcactatgacacctttcgtaaagttcttgatgtctaggcggaatggatggtcaacaggaagaaattgtcgatgtttatcgaaggacgaatatttg

SEQ ID NO: 77325 - DNA, 423 bp, Zea Mays
ggcgaagtgaggctgcgcccgatgcctttcttgaagggtcgataggtgttgagtcctgccttcaacattgaactgcggggccaaaacgttgtagcttttgtctgggaagtggaagcggaggctgtgaggattgtacggaaatattcgatgaagacggagatgccaaggaactgggatatacgcggtccaaacgtcaggttgaatcgtgtctttgagctgaatggtcttctgcacggtgcgtatcctgaggactctgctgaagctggggatgatcgaaggaaaaagagagtggcgacacgggtggacgaatgctgctctaaatagaaggttgtggttacagtagcaagaaaaagaagaaagttggtgttatggcgaagggtgcgacaaaagtatctggggctgatggggcctcagacaaatttg

SEQ ID NO: 77326 - DNA, 376 bp, Zea Mays
gtagaccactaggaatacccgtcagaacaactcccaaggttctcagttccactccgaaaatcagagtgggaacaacaactatcaagcacagcgctctgaacatcaaggtcagaggagcaaccaatactagaaccagcagagaagcagcactcagaccggtcaaaggtctagtgtcctacaacagaatcgtcaaggaagcgtcgtgaacacaccggccaagaacaacaacacaactaccctagttcaacctaatggttgtttcaagtgtggcaaacttggccactatgctaacaactacccaaggcataatcaacagacaccccagaagaacaacaaccagaggactgaccaaaacacacctgctcgtggatctaca

SEQ ID NO: 77327 - DNA, 777 bp, Zea Mays
aatggtggatgcttataattcatggaggtgagatttggacatggaagtagtttggagatctagcggtggaggggtgaattaggtcaagaatgtgcttggggtgatgaaatgaatgatgtgatgtgcactagaatgagaatgcaaatcgatggcccatgaaagtccatgtgacatggcatgaattcttttataaaaaattgtggaatctaaagcatcatacattaattttctttatgaaacgacgaaggaagttgaagcaacacaaaacaatagaatcaaagagccaatgtggtaaagtgacggagtcttgaataataagtcgagtctcaaactctagggctgcatgatagatttgtagacaaccaaaagacatgacaactcagacatagtaagatcaagacattcaacgagattgaagagaagagtcttatccgcccgatttaatgatttggacaaataagattcaagggctattgttaataatatgtaccttggatacctagatcagagtcatcaataagaaggccaaatacagatgagttcatgtgctcggcctagacactagggcgtcaaacaacaagatgagaaggaaggcttctccttagaggattgtagaaggataaacgtagcaaatatcctataagattataagacatgatcaaaaccttattgaatatgtcaatattctaacacataaagaagaaacacttgtaaatatagagtttgactacctattagttcaaagtaaacacagttatggctctagctacgtaacta

SEQ ID NO: 77328 - DNA, 812 bp, Zea Mays
gtggaaactggtgaagtgttctcctctccccttagaagccctggactcctccttttatagcttcaatgagggatcccagaagcgccaccgtttgtcgtgtatgggagaggaggcgagcacaagcctctgtagccggtatggacgatggaatggcctttgtactgcggttgacttggaccagggggaggacatccgacccttgtatctcgcatcttgactgagcagagagtcgaggccaggaactggggctcggacgcatacctgagcctgtctgatggaggtgttgttcgagtcgtagttgttgaaacagtgataagtatggtgaaaagcgtatgttactctccctgtatggtgtaaagcagacttgacgttggttctgtagccatcctgttgttagcaatcttcatggaggagttgatgacgtcctttcatcgatgttatctaggccgagtcgaggctcgggcgagatggaagttcctcccgaggccttggtcgagcctctcgggtcatgcaaccgtgcagggaggggctagtacagttgttagagtgtccttctaagggctagtacagttgtcagagtgcaggcggagagttctcccgaggctgaagccgtcttcggacgaggcgaagttctctcccgagggtgaggctatgcccaggcgcgtgcatgtcccatctggagttgttcgggaacagtgaccagagtgggggagcaatggtcgttatttccgggcgtgcgtgatcgtagttggtgaaagtggatgggacccatcgctccctctttgactgtggcatcacgtggggtaggtatc

SEQ ID NO: 77329 - DNA, 595 bp, Zea Mays
cgcttgttttttatgggccgggcttatttccagaggggagggatccacatgatttggtctctattccctgccggaaaaagcctaaacgaacatgcccttaggctctctgtcacatgtttcaccctcctccattctttcagcggccagatcctctatccccgggatgttgcggcagctggctgactggcgtatgggccaaccatggctggggcccacctagcagctgccgcacgttactgcagacaaaacgctcgcgttccctccccttctcactcgcgtggagctccacagtcgccaccgatcaccgtctttgagcaccggtcatcacgtcccctaaaccgcatcgacaacgcctcatcccctacccccacccgagctagtcctcgcacctagatcgtcacgctctgttgtcgcctgtcagtcaagtcccatcatgagggaggcggccgggacctggtcaacctcgttgtggtcccccagcgcctataaattgaggcttgacatgcttcctcccgccacatcgaacgtggaccaaaacatctcttccctcactaggcctgccccacgaccactagagcaccaccattggagcctc

SEQ ID NO: 77330 - DNA, 607 bp, Zea Mays
agcctcagacgctcagcttttgagctttagctactgctcaaaccaattgcaaaatagttaatattaaccttttgaacatagtgagttagtgatgctggaatttgttacgtatttcctttgagcttctaatgttaattgtggacaccataccaatattggttggtagctgagtgttcatttattcttttcagtcaataaaaatttaacaagcttgagtattgttgctagctgaatttgatctattaaagctttatgatcttttgttgtcattttggtttccatgattggttaatctaaatgaatgtgcactatactaaatattgtagcattagtgttcagagcctcagacgctcagcttctgagctttagctactgctcaaaccaattgcaaaatagtaatgatttataaatgaactttgcagaccaagtagcttctccagaaatggcggatcatcagcatgtgcacatatactgaactttgcatgtgcacaaaatagtaaagatttagaaatgaactttgcagaccaacctaaaatcctagcaagtctgtatgtgtgcagcacaacttccaatttccaattgaatttatactttcccacatcctaac

SEQ ID NO: 77331 - DNA, 536 bp, Zea Mays
cggtttggggttttggtgaagtgacacccagcgagagctccaaggacgctacgggcgcctgttcgtatttttttaacaagaccgctctggcgaactcctcgaagcaggcaaatatgggaggggccccagccgtcatagaccccagggtagggcggaaccaggagccgtaaaccgggaaatgagacgtcccttccaaaaggcatttgctttcaaaggaagggaacgaagcgaggagaaatctgaaaaccattttcttaagattgcaaaacaattccaaatgtcccttaactttacaaaagtggcagagaaacgcagagggggccacaccagacaaaccagccttcacagagatggaagaggccgaggggccaggcccagacatgaaaggcctgttgcgcagaatgggcctccaatgaagcttacggatcccggggagactagcatttgaatttgaaaaagggcgatcatcacgcccctgacgaccacgtctaatcaagcttccgttgtgcatgggaaacctcaccgaaggagaaagc

SEQ ID NO: 77332 - DNA, 347 bp, Zea Mays
aacaacattgttcttctacttggacattgagcagcaatgtgctcgcgaccatggcacttatggcatacgatttctcttgtacgggtagaagaagtagcaaatgaagcttcagtcgggtctgatgtactagcagaaggccgctgcttatttgcagggaatgatcctatagaagccaccatatttgatgtaccattggatggagaagacctaactgcatttccttgggatcgtcctccaccaaaagaagcactagattgttgtttgcgccaagggacaacattataatgacttgcataagattttccacgtgactcttgttgaatttttctctctgtacgcattgcttg

SEQ ID NO: 77333 - DNA, 864 bp, Zea Mays
aaagattgttgtatgtcacgacaattggcacgatgttcaccaaagtcaattatatttctacaaatgaaaagattgaacatacaactacggaaacaactgttatttgtatatatgagatacataattacataatatatctgcaaatacttaacagtgtataaacattgaatttaatctactaaatgggaataatgatttattgccttcaaacattgaataaaacttagcagtatctatactattgccacgatgttgatcaatttgaataaataagaattaaacattatgccaagtaaaacaatttgacaagtatgtacctgtccaattcaatgaccttagaacacaagtaggcccgaagagcgcgagcacattctaattcagatagaaagatgtctgatgcacaaacactcccaataggagtcttgtcaaatactgggccagagtcatggtcaactatgccacctggcactgtctgaccttgctgcacaaaaaaggtgaagtatacgttaatcataatatgtaaacatgaaatgcacgctatcaagacaaaaaaatatatataagtcaagcttaaatactaatagtattaggtgtaacagattcatcagcccgaagaacctcatcaatcaactcttcaaatgtagcagctagcttagactgctttgtaccaatattattcaaacattgcttcatagtggcaaatattttgccaacctctaagtcataatcaatcaacttagcttggaacttctggcgttgatgtacaggaagcatctggatcttatttcccatcaggtcttgcataagaggcagttggatgtttatattgggaagtcgaccatgttcatttgggtcttcatcaac

SEQ ID NO: 77334 - DNA, 436 bp, Zea Mays
agatgtgcgattatcggttgcagccatggcccctcagggtggttgtgtctgtcccggtgactcataaggatggtggtggcgccgctgaatggtgagtttgtcaacttcactgtggagtgcgactggatgctcgtcggcatcaaaggttaaattattttttgtatatatttaggggaactgttggagattaaaagaaaatccattcccaataatttttaggctgctcccaaaaaccatgtttttgggtgattttctggaagtcttttggaatataagtccatcacaactttgtgatatcttttatcttcattcttccattccatgtctacacttgcttaaaggcgccctaatcaattcagtgaatgtgttatctaccattctaccttaacttagcaacaattggtggcagtagggtcattgtattccttaccttaat

SEQ ID NO: 77335 - DNA, 595 bp, Zea Mays
cgattcctcctagccatccttcctggtatggactacctccactagttcgttgtgtgcgtagcatcgtgtttctcggtccaatttggggtttggcactcgggtgaggtcaattgggcgcctcgccggcgtgcaccgccgtgtgaatagggcggtgccaccgcgctttggcttaagcggggatgattgtgcggtggccgtcaatcgggtaatctggggctgagatgaagatgatgccgcggccgctggatcagtatcagacggccaggatcgctcttggcatccaggtcgggcagacagatcttgtgcattgatctgtggatgaacggttctggggcgatcaagcgattttaaatccgagccaccgatcgtcgatcggacggttgccactccatacctcttcgtggggagtctggtctaatcctatccgcagattggtgatccaacggctcaaaatataagataccccttcgcgaccgatcaattgcaaaagagcccttcgctaacttcgaaattaacccgccgtccatcagtgggttaatatgagtctagggaatatttctatgttagcccccgtgctttctggaatttgacgctc

SEQ ID NO: 77336 - DNA, 1188 bp, Zea Mays
atcaccctaagtcaagtaagcgtgagcatgttgcaccgacttaaggagtttctaacttaagtcgattgctctgttagtagggcatagtgatcaccctaagtcaagtaagtgtgagcatgtcgcaccgacttaaggagtttccgacttaagccgattgctccattagaatggcatattgatcaccctgagtcatgtaagcgtgagcatgtcgcaccgacttaaggcgtttccgacttaagccgattgcttcgttagtagggcatagtgatcaccctaagtcaagtaagagtgagcatgtcgcaccaacttaaagtgtttccgacttaagccgattgctccgttagtagggcatagtggtcaccctaagtcaagtaagtgtgagcatgtcgcaccgacttaaggcgtttccgacttaagtcgattgctccgttattagggcatagtggtcaccctaagtcaagtcatactgatttcgactcgagcccaatctaagtcagttgtcaatcaagagtttgaacgcctttggaagatgaaagctttattgatgatgaaaccttctggttacagagtacaattttccttcgagacttttgaggcatcgtaaggatagaactttctgaggtgctcaatgttccacgagttccccacttctgtgccgtccatctgagtaagccgataggatcccggtcgtgtgacctctgctacgatgaacggtcctttccatggtggtgacaacttgtgtcgtccctcccccgttataactcggcggaggaccaagtctcccactacaaaggatcggtgctgcacaactttatcgtgatagcgcctcaaggtctgctggtacctggccgactgaattaccatgttcaatcgttcttcttccagcacatcaatgtcctctagcctgattgcctctgcctcagctatgctttcgaaggtcaacctaggcgccccaaagatcagatcgacaggcagcactgcctccgacccatacaccatgaagaacgggatatttccatgcagagctcgactgggctgagttcataggctccagaccacgtacggcagctctctgatccactttcctacaagcttttcgctcttgtcgaatactttttcctgagtgcatccagtatcattccgttggccctttctacctggtcatttgctcttggatgtgcctctgat

SEQ ID NO: 77337 - DNA, 562 bp, Zea Mays
tgtcatgacatttggtctgaaaaatgctggtgctacttatcagagggctatgaatttgatctttcacgagctgttgggaaacactgtgaaagtctacattgatgatattgtagtaaaatcggctgagtttagttctcatttagctgatttgcgtaaagcctttgataagatgtgtcggtatggtttgaaaatgaacccacgtaaatgtgcttttggagtgtcggctggtaagtttttaggatttgtcatccatgaacatggtatagagatagtccctgaccgaatcaagtctattcggaatgtgggacctccgacctgtaaggtcgaagtgcaaaagtttctcggcaaggtgaattatttacgaaggtttatttctaacatagctaggaagattgatgtcttcacccctatccttcggcttaagaatgatgccgaattcgcttgggaggcagagcagcaggaagcatttgatctcattaaaaagtacttgtcttcggctcccgtattaaaagcaccacaagcaggagtaccattccgattatacattgcagctgaagataag

SEQ ID NO: 77338 - DNA, 874 bp, Zea Mays
aactttttaacacaacatccttaaaacatctaaccatctctttcttcaacaatttcttgagtgcccctattccaacaagaccaagctttctatgccatagccacctaagtgatattttggtgaatatgcatgtcttcaagttggcatcttcgaaagtgaaatccactaggtatagattattgtatccaaatcatttgaatattacatgattatcgtccttctttaatacaacaacctctttctcaatgaataggcaatgaaagccaagatcacacaactgtccaatgaacaacaatatgaaactcaatgatgcaaccaaaagcataatagagattaagtgatcttttgaaattgccacttttcccaaacctctgactttgcttttgaattgtctccaaagattatcttcttctggtcgtccacttcattcagtgaggtgaaaaacgaaggatcgccaatcgtgtgttggatacatccagtttcagttaccccatgaatcccataggtcatgtagttcacttacattaaagtaatattgatattgatgtataggcacccaaatttgattgggatacaaccttgacaatcaaagatgaaggaagtacgagtgtgggatatgaatgtctactcagttggttgcaatcaatttgattaatagtttctcatagattgtgagaagcatggtcgttgtctagcattgtagtaactaatggaataatatggttattttgattatgttaatctttatgtggttactattgtgatggtaattaatgttaattaagtgcttgctacggatgacttgatattaaaatattggaagtaaggacatatattggtaagctcttttgcaaagttatgttatccatcttgc

SEQ ID NO: 77339 - DNA, 403 bp, Zea Mays
cccgccttactatcaaggccttggaggatgaccacgtcgttatgaaggcaatgtgtgacaaggcaatggataaggttgttcgcgttgggcggatcctgatgaggaggcccggtgtcgtggtgcctgaagatattgtcactgatgtcgtggttgcgcctgatgctgcaagccgtccatcttcttctgttgctcctgcaaacgatgcttcctataagaatactccagcgcaatgatttgccttgaaaaacacttgttttatcgagttatcatcttttagagaaaaagtgtaatgtgagttctgtatgtgtgcaacaattatgtttgaactgactgttcagtcggtagcgtgctgaaaaacatccctgacgatgtaagcgagatatttcttttttcgaagtacttc

SEQ ID NO: 77340 - DNA, 816 bp, Zea Mays
cagctgaaagatacggcaactgatgactctttgcaacttcacacgcattgcaaatggacctagtggactcttgaggacatgaaatattattaagccgtaaaatagactgaactacttgtggggacggatgaccaaggcgtgcatgccattgggcacgactcgggagggagcgactggtgagggcttgcttcaactgcgcaacatccgaaggagtgaggtgatagagaccccctttacatcggccgcccaacagtgttttccttgtgagaagatccttaacaagaaaatgctacgggtgaaattcaaagtaaactttgttatcaagggtaaacttatggacaaagagtaaatgtttggtaatctcaggaacatgcagaatgttacgcaatgcaagaggccgatcacaagtattaattaaggaatgactagtatggagaattttcaaacctgtgccgttcccaatttggacttgatcatcaccatgatagcgttcccaaatggccaggcgatctaaatcactggtgatgtgatcagtggcgcctgtatccggaaaccaatctgtatccaccttgtacgaggatttggcggcaacattagcggatggttcttcgtcatcaagggaggcatccattcggtaccagcatcgacgagcagtgtggccggcaacttcacaaatttgacagatcggaggtccagagccacgaccccgtccacgaaaaggcgagccacggctccggcccctagactaaggagtaccacgaccacggtcagatcgaccgcgaccacggaacgagccacgacgcccaacaaaatttg

SEQ ID NO: 77341 - DNA, 549 bp, Zea Mays
gtccagggggtccggacacacaacttggcttcccagactaaatcctgcaggtcccgtgcctgtatcaaaggatggctagtatcaggcgatgggccctatgggtgtgctactaacgctccctagccgaagttgtgttcaggtccaggtcccagtcgaggttgcctcctaggggccgttgccaactcttttaggtatgctggtatccagccttgacacgtcgagcctacatcccaggggcccaggtaccagggaggagtcgacaacgccacacacagcaagaacaagcgtcatacagataagagctatttaattgatagttcccaaaagtatcttacaaaaacaaagttattacatccgccttcaagcggggccctagccttatgtctacaggtatgacctactcgacattagtagggtcgcgctggaagcgcgcggccgccatctccacgaggctgatgaacatccttgaaatagatgggccagcggtcaccgtaggaggcggcaccgaagccatcaaagccaaagatatggagccgcagctcagctcgc

SEQ ID NO: 77342 - DNA, 713 bp, Zea Mays
ctcttttgtgtcttttattgacggatgatcttctcgtggtgatccactatgaagtgtgatagatacttttccttcgccttttcgcgtcgttcgacaagttgtcacaacacttcttcctcctcgctcacgtggtcatcaaagtgctacttatcatcagccgggagtgcctccaaggttggcttgatgatgttagtggtggagacgtcggtgtgatctttagaaccgaccatctgatgactgtttttagtagatctaaacacacttgtgtcccagcgaagtcgctaaaaagtgtattggcgcgtcgatttggtaccaaacactagaaagaaccacatagcggtgttctctgctggagcgctgacggagcacggctctgggctggatggcgcgcgactctcgttgtatgagcaggtcatgtcgaacgattctcgtgtacatagatggtcttcttctttatgaaaaacaatagaactcgcactaacacagacccgatcgggggaggagagttgtagtaggagctacgggattgtactttacgaaggaagaaaatagaaaaacgtagctggaattacgttgattggtagtacctagaagtgtacttatttttaaaataaattctgaacgtgcagacggaaggagtacaccggtcgataaaagtggagtggtggggttggatggtcccgcgcgtgtcaggcgtttgcagtgctcccgtg

SEQ ID NO: 77343 - DNA, 433 bp, Zea Mays
cttggatcagcgtcttcgcaaggtagaccaccctccaaggccgatgaagcactggaaactacacgggttatctcttgcccggcaggatcacgtggcagaagaccatcatctgggacctctgaacagatagtgggattgtcagcttcaggaggctctgatagaaggtcctcaaggatgatctcttccaactcttggtcaaaatcagatattgacaacccctggaggctgacgagcgctaacaagacttgtgtgggaatgtcgttgaccctgtggcgatggctattcttgcggatcagcggaatttcttcctcttcttcctcctcttcctcatcaagcgctccgccggcaacctgaacatcgtcgcaacctccgacattgtcctcgaggatggtgctctctaggccatcgccaaggaataacgtggaggggccag

SEQ ID NO: 77344 - DNA, 447 bp, Zea Mays
gatatccataatggatatcatgagtctgtgtagattcggaaaatttagatcgttaatgaccattaataatgaattgtcacttccaactagttatggttggtgttaagaagtttttgcacgctcttgacttgtgattaactacatgtactatatgtacaagttcccccatggttttagtatgtgggatccatgaaagatttcccatgcgtacattgggtatgttcccaatctcaccaccacagcgtacatgcatgggcacatagaaagttggagatctatgtgagaattcattctccgtcgatcattaagttttagaatcttttcacgagaatctatttacggcccgtacgctagcttgaatcatgagcttttccaggcattagggggagatttcaagtaccaaaaagaacgccagtaaattataatgaatacactaagcattcaggc

SEQ ID NO: 77345 - DNA, 1261 bp, Zea Mays
gtggcacatgcgcctctggtacgtagctccaacgctcttcaagccgaacgacatggagacgtagcggaacatggcgaagagggtaatgaaggtggtggcatgttggtcggtctcatcatggcgatttggtggtagctcgagtatgcgtccaggaaggaaaggaactcacacccgatggtcgagtctatggcctgattgacacatgggagagggaagggtctttggggcatgctttattgagccctatttagtcgacgcacatcctccaattcccattcttcttcttaacaagcacatgattcgttatccacactaggtggtgtatttcccttatgaatcccaccgccacaatccttgctacctcttcgccaatggccttgcgcttttcttcatcaaaataacgaagccgctaggtgactggcctggccgtaggctagatatctagggagtgtttgtcgacctccctcgagattcctggcatatctgtggtcttccaggcaaaaacatcgcggttggcccggaggaaatcgataagggcactaggcttgtgttcgagccttttgttgtttgatggccattgaagtgagggaagggggacctcgctcttgctagtttgttgtgaacaacgaagactacctctacttttgttatttgactatgatcagtgaaggtaaccttttcttttgttgcattgccagtggagtgtgccttcattgccgtggacttgagagtaggctatgattaggtgctcatcttcttgggatgcatcgcgggcttgttttctgtagtggatatggtgggtgccaaatgttggattcttacagatgagaaacaaataagatggacaactatgcaaaaacaagaaaagtgaggaacaatggctctcaaaatatcttgtcagctatcctatcaccctatctgggtaggggtatttatagggtaatgaaggggtagcctcttaaagtatggcctttcccttggttagctactacatcataggaatatcctgtacaccaatgtaaatagaggttgttacaacccaagtattacatgcacccattattgtaccatctctagtgtaacgaagtgcacgatgccgactaatgccccctaagacaggtggcccaccatgcctacatctcttcggcgttgtctctaagtgtggtcactctttgcccaggtcgaggcctaaaccctttgagatctatatctaggcctcacctgcctaggccatgagtaacgaactttgcccatgatatgg

SEQ ID NO: 77346 - DNA, 644 bp, Zea Mays
gcccttgttaatgaatgggagatgccaaaggaaaccgctactagttcaagcgaaggtggcctcggttatctgaaatatacctaccgctatagaagtcagttcggcgagccagatgatgaatggcttgaagccattgaggcgactagtgaggagttgttggggcttatacgatggctgaagatgaggccatgaatattgcttttggtgcctgcagaaagagaaggctgaacaatttgatgttattggatttgtctatcctgattactgctttcccgcacgaaaacaagggaggaagacgaaaattgcaacgatgacctccttcgccgcgccgaagctaaagaggacaaaagttataactcatcgaccgaagtcatatttcttagaaagggttgttatattgcctactgcaggggcttcaaagatagaggctgccgaagctgctgaagtgaccccctcagctttggaggcaataattttcaaagaaagggataagaatggccaatgttctagacgctattctaaggccttcgaaagtggctatgcctgcttcgaaagtggctatgcctagagaattggaaaaggctattgacgaaaatattgctcctgattgtgctagggctggaccttcgaaaagtaggccaaaa

SEQ ID NO: 77347 - DNA, 438 bp, Zea Mays
gtgtgtagtagcttctgtccttggattgttagtgctgctggggtttcttctcgagcggtttggcttcactggcaccctgtctgcacacatagccatagattgaagactactcgttcattctgcactcctctgcatgtggattaggagggttgggtctgcgcaaagcaagcgcttgtgagcgtgatggcgtgcagaccgagaaaatttcgtgttccagtttgtacttgtgtcgttcagttcttccctgcgtcttccaagtctaaacagctctgcctcgcgtcggcgagttctttggcttgttgggatcggctggctccagagtgaattcccgtcctcgttcctttcctgttctgatttggatttgggaattgggacatactatcccctccgggatttggattcccgggtaaggaaaagagaaggggcccctttgccatc

SEQ ID NO: 77348 - DNA, 925 bp, Zea Mays
aaatgccagtgggtggcctcgttacatgagaaccgtgccgacgccagtgttgcagacatcagtataaatgcagaagggaactagaaagtctggcaaagcaagtactggtgctgaacttaaggcctgctttagtaactcaaacgcatgttggtgttccatagtccaaataaacatcacatttttctttaatagatcagtcagaggacgagatatcatgccaaaatgccttacaaacttacgatagaaaccagcaagtcccagaaaactgtgcaactctttgctatttgctggtgtaggccattgttgcacgacagttatcttgcctgggtctgttgagacaccctatgcactgattatatggccgaggtaggcaatactggtttgagcaaattcacatttggacaacttcaccttccactgatctttccgaagcaagtgtaacacagacgacaagtgattcaaatgagaatcaaaattgggactatatattagaatgtcatcaaagaataccagagcacatttacgcaatactggcgctaatgtagtattcatggcctccagaaaagtgttgggtgctccagtgagtccgaaagccttcacccgaaactcaaattgtcccaaatgtgtttgaaaagctgttttcgcttcttctcctgggcgcaagcggatttgatgataatcggccttcaagtctaatttgctaaaccacttagcatgagtgagtttgtccattaactgatcaaataccggaactgaatattttcctttaactatgatagcattgagataacggtagtcgacataaaatctccatgtcctatcctttttcttcacaaataaaactagggatgagaacggactttgacttttctgaattactccttgggctagcatttgtttcacctgtgtctcaatctcgtccttg

SEQ ID NO: 77349 - DNA, 398 bp, Zea Mays
aaagatcttatccaaagtgttgttgttgacaatatatgctagttatcatgtgtagtttcaatctactttttatgtcaagcttcatgttattagattgatctctcgttcggttgctaaactcaatgatatgtgacctcaacatgtgcatgcgataacttaagaggacgatatgtgtctggcaccctgccttacatgctttagtcacattatttattctggatggacttatttgaaggtcctaatccatgctcgcatgcatgatcattagctcataatcgtgaatgtttctagggttgctagtgtgatacatattgaagattggatctggaacgctcctataaatggtttatcatttatctggtcctagatttggttaatagtgtgaataataatggtga

SEQ ID NO: 77350 - DNA, 960 bp, Zea Mays
cacgcattagccttccttgttcatccacctcaaacttataaaaaaaggctgaattcacttctttctttcgctcaagttgagccacaaacatctgtgcatctgcatccttgatttttgacctaaggtcacggtaatagttttgaaggtccctcagtgtgcaaccaacattctcaaaacccccatcactgacatgaagtaatctatatgcaagggacgtgccaatgctagctttatggcaattgaataaagtattctttgccctctcggaaacatgactgtttgatctaagtaaatgccaatgagggggtgatacaagaccatggttgtgctagtcgaccatcctagtaattttgaaccttctgtctttaccaaggctaacataaatatgtgcgtcacaaccacaccttttttcactcaccttatgagtcttctttctctttttctctggggtgttaataactttttcatcttttggtacattgtatccttctcttgcacaataataatacttgcctactatctctgaatccttcttcttatgctgcccaacacgaactgagaaaccaacatcatgtgcatagtccttgtaaaacttctccacatcagcaagattatcaaatatcattcccaccgttggcttcaaattttccttaacattggaagatgattttatcggagtttctgcaacattgcaatgaagaaaagctccatcagatgggccactgagatccacagcatttgcaaccaacacacccgcgacggcgccatccccctccacgacagttgctgacgtttgggctaccacgaattggctagcctcttccaccattttacccatttataaaacaattaaacctgacgcatgaacctcttcttcaacctcataattaaacctgacgcatgaacctcttcttcaacctcagaccaggaccaccgatagggtggtgcggtggactcaga

SEQ ID NO: 77351 - DNA, 514 bp, Zea Mays
tttttattgatgacatatttcccattttatagagtacattatcgtcccgatagcttttgaaatacagctaggggtaaaacttcctgaggtgttctatattccaggagttcccaatttctgtgccgtccatttgagtgagacgatatgatcccggccgagtgacttctgctactatgaatggtccttcccataagggtgacaacttgtgccgtctctcccccgttagaattcggcggaggacgagatctcccactgaaaaggatcgtcgtcgtacgaccttgtcgtgatagcgtctcagagtttgctggtatcgcgctgattggattactgcgttcagccgttcttcttcgagtacatcaatatcctccagcctagtagcttcagcttctgctatgctttcaaaaaccaaccttggcgccccaaatttgagatcagcgggtaatactgcctctgacccatagaccatgaagaaaggagtgtttccatgcagagctcggctaggttgggttcttag

SEQ ID NO: 77352 - DNA, 404 bp, Zea Mays
gcgaaaggagaaaagaagaagaatcaaaagtgccaaaaatgtggcattgctgatggacacaacagtcgcacctgcctgtccgtggagaaaaatagggttaaattggctagccttgctgatagaaaaagaggacgcccgcctgggtctagaaacaagaattcaacaatggcccccagtggaatgagacatcgacatcaaagaagaataaagtggttgattctgtagaccatggatctgatgatgattatttgacatgattgtgaaacatacatgcaaaagttttataaaggattatatgaaaaatgttatgatcgtgatactatatgatgattatttacgttaaaagctcattgtatggattatatctattaatgcaacgtagttatttcctatgcaatatgcta

SEQ ID NO: 77353 - DNA, 385 bp, Zea Mays
ttagaaaaatttaaagtataatcacacatgctatatagaaaccatcgtatccatgtatcagcaatatgaataaattctcggactcatctacagcttttcatacggatgtggggtttaaatgataaaaataagaaaaattatgcacgattattggctctaaacccacgttcacatccacatagccactagaacacatgtttttatgttttatgcgacccgacgacctaggatgtgtgtgtggcatgagtcaggttcaccgtggagggagagcctagatgggcgcaagggaattgaagcacgaagacgcctcggacactgtcgtgtgtagcttctccttccaccatcttgcattcttgcccacactcatcaccatggaagcagttgc

SEQ ID NO: 77354 - DNA, 394 bp, Zea Mays
gtcggtaggagccaaagaggaggcgggaggcttcaagagtgccctggaactgtggtggccgaatcagctgagtaaagatgtggcagagatagtgagcatatggcagctgtcgtcgggcacgaagaccatccagtacggtgtcctcgatctcacaaataaggaagtccatgacatcaaactctgagtgagagatcagggcaccgaggagccagagctggatatgagtggctacctccctgtaacccatccgtggcagaagcgtccgtctcatgagctgatataaaaacttggccgctgtagtgtaatctgccagagaacgtcgcgacccatctgagaagggcggttggaacaaagccgtgacgtgagttgtaccaggagcaactccgccgtgagg

SEQ ID NO: 77355 - DNA, 419 bp, Zea Mays
gagatacctcgtgccttggattctttcacctattatgccattagcagaccacatacaccagtgcgatcagtcgaccaggcattattatcaaccaaatagctaggtccagtaatgaaaccattagcagggcaacttcaggcgcaatcgatgcacaattgcagacaccatagattcaggtcatcgcccaccatgcattccgtcctgtagcaagcatctcttacaagatactgctgtctcactctcatttgtccttttctgaaatcttggtttctgacaaagtgagcagtgcaagttgcgagctgcatatcgctgaagcctgaagggataggttggcttgatcacacggatgattcttcatggctaggctggtcgagtggttggtcaacactcaactcaacctcggactcctcgttcgttcg

SEQ ID NO: 77356 - DNA, 564 bp, Zea Mays
agaccgggtgaccttcaagaatctggggatcttcagctctcatgggttgaactgggttggatggagcgggctcttggatccgcagggctctacgttggttatgggttaccaagtaggcctccatcaacttctggacgtgctcatccttggcttgcttcagggcttcaacagcaatgacttcacgactctccaaggcagttgcacgggcttgagctgtggtgagatccacatggagcttacggttgagcttctctgcatcttctgctcgggcaatcatctgacggtggtgccgagccaagaaatcatactgcgcatcccaggtgagcaggtatgcagtgaggtacacgattgaggggtcgtcctcaagcagctgctgctcttccaatgcacgcatcctggccatccaagcgagacggtctctctgaaagggcggaaagaatctgagcggggtgtcgaccacttcttcttcatagatctgacacagggccctcaatgccttgcgagcgacgacttggcaggtgtctctgaatctgtgcccaacagcagtgacactccattccacat

SEQ ID NO: 77357 - DNA, 451 bp, Zea Mays
cggggcgccactagtgctgggtatggatcacacttaaactcacacgttgttactgatttgttcattacagcagcttccaatcacccttgctacctgcaccatcatcagagcctgaaatcgtgaatgttgttttcgcgggcccaacagtttcaatttcttccccgtccatgtgtgctcttacacacgtggattgagcaaaagccatgaacagaattaggacctgaaagtcactcaacacagtttatgcaccagacactttgtgtgatactgtgatgtgtaagtttcatagcctgaaatcagactaggtcgatagcacaagactactgcttgtccggtgcatccgtgcatcatgccactactttctatgacatggtccttcattcttgtattcggctccccacacctagcaaatttagttcttggctagcacaagtaataaacatcgtttcac

SEQ ID NO: 77358 - DNA, 388 bp, Zea Mays
aaatggtctggattcctcgctggcgtggaactccaccacggatctgcactccaccgctcaacgttgcgtgatcgccggtaaggcatgtcccattaagtgctgtttggtttggtctttttgtcccggccagtatcagcttacaacgcgaatatattgcgttgctttgtgtttggttggtccactccgtgatgaatcactgcagaatgagttcccatatgtttcgcttctgcctttatccaatccctcacgaattgcctccgcggttaatccaaccaaacaaatggcgctaatgaatcaaacgcagcagctagcgccggcaaccattgccattaccgttaccactccatcaacccaaccaaacagcccataagttttcaacgttgcccgc

SEQ ID NO: 77359 - DNA, 287 bp, Zea Mays
gagcaactccaacagtctctctaaactgatcagaatcggtaaaaaatagaaaagtctagataaaatcgcatccaacaggctcgcttttagcctatctttttcatctggctcgttatccacgtcccttcgctaggcatctttggctagtgcatacgactcgtcattttccttcatagcgctcaaatgctctcccgccgttgaggcaaattccagctctcgctcgtcctctgactcccgcgtgccctctcgctcccgtacgaccagaagtttgtgctgggtgtcagctc

SEQ ID NO: 77360 - DNA, 587 bp, Zea Mays
ttagccccaaatttctgaagcagggggtgtgggttcgagtgctcgctctgcactatttttgcacgaacgaagtgaggtgctggacaggcgcagtagccacgggcgctaggcatggggtccatagggcacgacgctgatacggggcatgtggggcgggcccaaagtgtcagcgcgtaaggtgaagtcgtggtagcaccaggtgtccatattaggtttttaatagagtagtatagatgtgtgtgtgcttctggcgactaggtggacggctaggggcgactaatttccttgatcattgccctaatcacgactaatcgactcatcgcccaggcctgaaaaatccatgacacacacaagagatctagtgtcatactgccatgcatgcaccccatgacaatggatgcgatagccgagcaagacagcatagtcatttcaattatctcccaacaacttgatgaggttgtttacttagaccgtttagaacggttcatccatatggtcaatcaaaacattgttttgcactatattatattgtagactacgctattcgcagagcaaaatttgaatatatggatagggatgggtaaact

SEQ ID NO: 77361 - DNA, 542 bp, Zea Mays
ttaaattaggaaaaaacccaaaccttattaatctacagaaaaataggaatacttctatactaggctgaagaaaaattgtagagatacatacccaacatacacattgtttaaaaatactaagcagcccagtatacatgaataacccaagaatgttcattaaaaactattttgaccaaaacttagaaaaataagaaaggtaatggaaaatattaaccagaggatgaacatatttttcctagaatacctaagtgataaagaacatagggaaaatgcagagaaccctagtccagaactaatccttatttattttattaggcactaagaaagcaagaaaagccatgattaaaattataaagaccattgcaaaaatggcaagaaaaattcagtagactcctaactgatagaacaccactacaaaaatgacaaacaccccaatccgtcaaaataagtggttgaacaattaaaacttgaatttggcccatgttttaattaaatcatgaaaagcctaaaattgtgcaataatgggcaaaacaaattttttc

SEQ ID NO: 77362 - DNA, 437 bp, Zea Mays
gtcagagatcatcgccggagtgtatcgtgcatagtggtggcagttcctggcataggaggaggttgggacggggaattgctcgccgaaagccgtcatcgccgtggagccagcgggcggcgcgacaagcgtaatctgagcatcgtttgtaggtatgtcgttgttcatcttgtttgccatgtcctcctctctcttcctcgagtagtcgtgtgtaccttggtactctggggcgcgagatggtattgctccggcggacctccgtcgtggctctaggggtggcggtgcctctgctcggctcctggtgggagagaacgcatgtggccattgatccgtgcatgtgcggccgtgattagatcgtagggttgtcggtttgggtaggtatatgtgccgtcggttgtgaaatggtcggcacagatcaaatatctcttcatagaatcctg

SEQ ID NO: 77363 - DNA, 610 bp, Zea Mays
gcagcagcgagctcgtggaagatctgcagatctctggagctcattatagaaggctagctgtaggtgtgctctactccatgtcgctatttcttaattaattaacctcacaaaatgcacgcagcacatgcatgatcgatcgagagaaggcattaataatttgactcttggatggagcagaacatggatcacttatttacatatgaatgtgaacaaagctgtgaagactatttctgtagtttgtgacgacaaacccagggttgcattgttcttgttcgtatatatgagaagtattttataatcattagcgaaacaagaccgtgcatgcatgcatatagatacaataatccattttccgagactgtgcaggttacttatgttcaaagtctagtacgtagtacttgaacttatatattaggtactgtagaaagttgcatgccctgaagcctgaagttaattagactaaagtctaaaccacatatttattggttgcttatgaaaaggctagttcattgggcgggccaaccaaacccacaaaaaggacaggggaccaatctagtatgggagcagggatgacatgataacaaaagtcaacaagaacgcaagtgttttc

SEQ ID NO: 77364 - DNA, 620 bp, Zea Mays
tggcctttgcgacctcacaattttctttggctttggcaagttgtttttgaaggtcttcaacctcggctttttgggcttcggcctaagcattgtatttacctctgtcttctttcattttactcaccaatgaaattaaaattttgtctttctccaaaccttcgtttctcagctcaattacttctgagcgaaggttgctgagagctattgtgcagctttcgtctttggcgttcttttgtgctctcaaggcattgctaagaattaagccctgcaagaaaaagaaagaattaagcatgacaatgaaatacttcatttccaactttaaagttaacagctcatgtacctttatactgttgtatgcaaggctatccgcaaggtcgtcctttgacatggcagcgaggccagtttcaagattcagaaatcccatacttttggctatctcccggcaaacggatatttctttgttgtctaggagacattacaggagatcatcttcgtcagtgccattgaacactaaggccccctttgaatattttagtttctgggcgtagtgtctggcttctaagatttcttctttggataatcttttccccgaagcatgtcgaataatgtaatcaacatct

SEQ ID NO: 77365 - DNA, 1077 bp, Zea Mays
gaaaagtctagagaaagtgagagaaatcatccaacatgaccatatagtacaaataaccagaggtacttagaacaggggatgtccaaaggtcatagtagatgaggtcgaaggggtgagtagctcagggcatggaagaagagaagggtaagagagtatgacgcgcaagctggtaggcatgccaaagcaaggtggtgtcatcgtgagggcaaggaatgaccgaggtggctgagagtcaagagaggtcgtcgtggccgaggtggctaatgcgatggtgccaagtggaggcaagggcagtggaggcaagggcataggattggacaacatgggcgaaggaaggtggggtgggcaagcgaatcgggtataggtgactagagctgtcgtagtgagcaaccacaacacgagtggtaagatcctgtatggtgagcccaagggatcaaactccatagagcatcggttgccagtgatgaagcgacagaccgagaggaggttcttgattatgttaggggcaacaaggatgttgttgaggtacaaaggactaggaaggattatgtcacctactaaggtgacaggctgagtcaacccattaccgatagtgatggagaagggaaggtagggctatgggcgtggagtaaagtgatggttctagggttgggaatggcatggaatggggcgccagagtcaacaacccagtcaatgggaggacggggcagtgaagacaagggttgtgagaagagagacaagggaggcacccctatagagccaccaggaggagagctagggccaagagtggcgagcatgctgacgacaatcatggtgggagatgataaggtctcaatcgtcatggaggcaatcgcgacactagggaacacaagcggcttagtagtgtggcgacccgcctgagggtggagctcaacgcagacacggaaaatagggttcatgacccgatcaaagaccacgaatgtgccctagagaagctggtcgtcgtgaagggggacacacacatggtagggaggcacggaaaccacgatagaagcaggggttggcatggcggggaagggggtcggggcgacatcggtg

SEQ ID NO: 77366 - DNA, 746 bp, Zea Mays
cttgtctccatttaggaacctgacgcttgtaaccacctgtgccaaggtggtggtggtatttgttcttcttagatagttccgaatttgcctcacttagcgatatgaaatcagggctactcctctgctctagaaatactgcccactgacctgctgagattttatatttttcatcgggtctaggtctttctttgcaaactttgtattcatctcagacctccagtttcggaaattgattgcaaactacttcatcgtgtattttttcacgagttcttctgaaccccgaggcaaaatgaacctcgttattagcttattccacatttgattcttgacatcatctgatacatctctccactgtcggattgtgatgtcaagattatctctaactaagaacccaagtgcattccggaacttaggcagtgcctcttctggagctaggggctgaccattcgggctcacgtctgcgattttatatgtcttgtcaggaaacttgtttagccccctggcacctctgttctgatcgctctgcttccttttcccttgacctctcggtggttgtctcggtcgattctagtgcgccttgggtcggttctggtgcgccttggatcggttccggtgcgtcttgggtcggttccggtgcgtcttgggtcggttccggtgcgtcttggtatcgtgccgcagctttttcgagcatcgcacaaaattgagacaagacctcctattcatgtaataaaatgcacaagaaatca

SEQ ID NO: 77367 - DNA, 509 bp, Zea Mays
aatgtctccaaatcttaggggcatgcactacgacggtcagttctaggtcatgagtggggtagttaagctcgtgttttctcaactggcgagaggtgtaggctttgacatgtcactcttgcataagaacacacccccaatccttgacgagatgcatcactatatatatatagcaaatcctttttgcagatctggcataactaatactaggggtaacatcaacttcaacctcaactgattaaaactgtcctggtaggcctgagtccactgaaattatttccccttctctaacaatgaggtcatcagctttgctattttggagaatcccttgatgaagcaccggtagtatcccacgagtcccaagaaactccagattttagtgaccgactccgatatcttccatcccactatttcttttactttagctggatctactgcaattcctccattggagatgatatgcctaaggaatggtatttcatccaaccagaactcacatttgcaaccagaac

SEQ ID NO: 77368 - DNA, 367 bp, Zea Mays
cccccacgggtaggccagcctcaggcccggcgccattgccgccgacaactgaaggaaagaacagcactcgcgaagcggcgaaggtaagggaacaccagcaccactgacacttctgttctcaccggggccctctgcctccacctacccgccgtcggtgctgccgagaacgacgcggagcgagcatctctagcatcaagagccgcctcccgccgcctgggatcgcggaatgcagctgcgtctgcgcgggtgggtgggaatcagatggattcacagtaactccccgagcttgccgcgggctcaattcctaatcttccaccgccgcaggagagatgagcggagcagtggtactagtagagctcagcggcgt

SEQ ID NO: 77369 - DNA, 414 bp, Zea Mays
atttatgtagcttggtggagttggtagtggtggtggaggtagtggaagattgggagagcataggtatccagctactatttatgtgggatataaactgaacatgtagaggtaaaaaagattatggcaaggaaaagactttatccaaaatgtttaagtcctgattcatctcgagattcgctttgactgttatacccttccttgtcgatgttgatcttttctccttcggtcttggtctcattgattcggggttagtgtatattatcggggttgggaaatatggttaagatagataatgaggtaaaccacatgatgtagatcaaaagtttgtttgatgttaggtggggatagacagattatacaattcatcatgactctattggttgggttaactcttatactcatggttaagttggt

SEQ ID NO: 77370 - DNA, 923 bp, Zea Mays
gttaagaaccccaggcgactgtttaacgtctcactgacagtttgcagaaacatccccgtgcttctaacctttctcagtctgagtccacagcggcgaaccgtgctgggagctgagctccggcgagctagaccggccggacgacgcgacggctggagctcccgagcgacaggaacacaattggactcctacggatcatttcccccaaatcaattttattgttgggactacgaatcaatcggtccatagtgaccgagcggatgggtaagaggatgaaggcattccgagctcaatttataggccgtcgaccggagttggagaagaagcgcggactacggatgcgctagcaagcttttccgcgcggcggattccggtgagggcacgggggtcgccgtttaaccggagttcgccacctcggtaaccttttgccccgacgcccaaggatatttaccacggccaccgacgaccagtcacgccgcggtggcgttcttatcgccggcggggggactgatcctgatccacggtgggatatttcagatgacagtgaacagtgtgccagcttcagtggacagcttaactgacagaccaagttggagcccagttttctcaaatttttatgtgaaacctaagccaactttctgtagtaaagttgtagaactataatccatctataactttgctacaatgtgctctcacaaaaagtcactggatcccattcaaaatcgagctcaaagttcatctcataacactgttactctgaatttcaaacctcaagcagtctgacagtccaacttcaggctcaattatctctggatttttcttaacaagtgagcttactaccttaagcaaagttgttcttctataatcaggttacacgtttgctgtggtgaactaatatgaattctcactattttgaaagctacaca

SEQ ID NO: 77371 - DNA, 762 bp, Zea Mays
gttttttctagcatgcatgcatcataaaacatgaaaagattagaaatcaaaggaaaatgcatctaattaggagtgtaacaaataaggttaataataaataacataagaagtagaatctaatttaacccacctcctgttaacaacccgagcaatgtgttttcctttttccaccaccataacatttatatctaaccctctttcacagattacttcacccacccccatcaatggaggagacactcgtttcagctccgactacctttcccatgagggtttcccttccatcttgtgggaggtgctcagctccaccggttaccctacgccccctttgtatacggtgtagctatacgaggagcatcaggtgccacgttgtagggtttggctgactctggaggctcaccctctacagtcgggctggcgttcccttgactctgtgactattagattcagggcagacaccaccaccgaggctgcagctatgaagactctgatgactttctgcggataccatcccttgaagatgctaatgcacccactgggactcttccccgctgagaagagggatgaccccatgtggtgcaaccgagtgagccacgtgaaggaagtgtgggccatgcatcccaaccaagttgggaggatcactgtccagtgtatgagcgcactgtaccgcctacaggcccaacagagcgacaccatggcacacctcactaaccttgctcagaccactaagctcaccctcgatagttgagaaggcttcgtggt

SEQ ID NO: 77372 - DNA, 388 bp, Zea Mays
tcggacgccacgcctatcaccacattgcgccgatccttatacatcaagtcattgtgattcaactaactaaaaatagtttcctgctaaggagtgttcggctccttccgtatcttcggagctcgaagctttggggatacatgagaagcaatcgatgacaacgggtgtcgctgaagtttctaatctggcgtatactcgccagtaagatcaagatcaacaaatactgagtgaccttctctcatcgataagccaggaagtccttcatgacatcgtcaatttcaagtcttctaaagaggcctggggctcgctctagatgaaatttgactaatccagacaggcgcactgtgtaaatccatgttaaacttgctacatcgacgaaacatgatttgtc

SEQ ID NO: 77373 - DNA, 1185 bp, Zea Mays
tgattcctcgggaaatgacattttcgttttttttttgtgagcgacggattacaatactcccatatgctgatatgccccttcacaccttccacacggcaaatatagggggaaaaaagaatggcggcaatgaagccgaccggccggtgtgaaaaaaggtcgtcggctggtgcctaactgcgcataatttcagattctaccaccccgccccccagtttccaatctcttcttgcagggcgacgtttgggcggtgccaaacctgacgttgcaaaaagggcttagcttgcctttcctttgcaagaaagaaaaaatgttgcccgaaaggaaaccaccacccattttctaatggtggagcgttgaattctgccgcgataaaatgttcgcgtgttgctttcgcagccttttgatttgcttgtgacaagaaaaccgcgaaatttccactcccgtagttgcgctccatcttgcttacaactgtacccaagctcgagatccaatgtctttttttttgtccccgtttcgtgcaggtggcttgcgcaaaatatgttgaagcaacggggagtatcatggaaacacgctcgacagaagttaccgcaagagcaaggacaagattcccgtcgcgggcatgactactgatgcgtactgtgtcggttttatccaaatcccatcctcagcaaagcagccgagatgcagtagtacgtgtacgtggacagacgagaacgacacccgggcctagctagaaaccagtcgccgtctggtccacgcgacctcgacctcttgccggtttcacctgcattattatgcacactagtagttccgagaggggggaggagggatttaccacttaccagcggtttgggtggctgattgagtggaacgaacaatggaataaggcccgggtacctcatatgaaagccatcgcacgtccgttcagtgtgacgtgcctaggctgcgccgtaaacgtaacagaaagcagcagcatcttcccgccgttgttttacccatgaatgcatcggcggctgcaggtgggccaggagccgtttgggcgcaataataaaatctggaaacagctggcgcgacgcacacccacggagtgaacagacagagtgtgccccccacccccacgcgaggaaggaacgagaccagctgtaaagcgggcccggcctactggggcggccatcgaaggtctgc

SEQ ID NO: 77374 - DNA, 556 bp, Zea Mays
cacaactgaagctctagcagactcaagcttcctaagcgtgctctcatcttcaatttaaaatctttcctctcatgagcagcaagcctaagaagcttatcctgactagccaaagcaactgtcagctcctctacctcagcgatgagatcatcggcggaatctgacacctcacacgtagagccatcgctgatgtcctagttgtagctgcccactgcatcatcaccaagggctatggtgcaaaggccacctatggtgttcacgaggaagcagagttcgttcagcttgtcctcaactcgtctgtgggtctcctcgtcactcgaggaagatgttgcatcgtcggagtcgtggtcgaggtcgccgagggaggtgaggaaggaatgctccttgatcttggccttctgtaggtacttcttcttgagcgcctccttatcgaatcctcccttagacttatgcttgcatcttgcttgccctacttgggagtgtactcatgcttgcccttgcgctgaccagagtggtcgcgcagaccagcatcccgcttgccctacttggggcaactggc

SEQ ID NO: 77375 - DNA, 383 bp, Zea Mays
attgctatgagctcgaggattacagatggttgccgaatgtcgaagatgaaagcaatctaagtctagcagggtctaatggagtctaacgtttttgtaggggtacctcttcagccttatatggccgactgaagagataaccttgtacaaatcagagcactatatgtatctacccacttcgctataaaacgtgtcgcgtcttccggtgttcagttggtttctcatgaggtttaggcacggctgcatgcacggggcatgctttcggagatctccttgactcggcgtgtgactccttcaatcgtcctcagttacatccggttgaggcccacgatgcgccccaccggtgacccatcgagggcctcataggcagcctttgaagcatattt

SEQ ID NO: 77376 - DNA, 396 bp, Zea Mays
ccaccataacacctcaagccatcaatcaaagactcatctcatccatagcctcgcagcagccaccgctcgccggtgggcctgctaccacaggtaggatgccgcagccctgttccagtgtgaacatgatcgtgcaagggagaaacggccctggccgtcgatctagtgatgagcgctcatgattgaatctcaaataccccattgtgatcgaaaaccgtagacgttgatctcagatctgttggccaagatcagattgaaggatcctttaatctcgagcgttaattttagattcaaccgctatgatagaataccaattcaggttagataagtctctgatccctgccggcggatttggatcccacgactagcaatccatcgtaccattttgccatgtccacc

SEQ ID NO: 77377 - DNA, 518 bp, Zea Mays
cagagacacaactaattggtttcagtgttttatattttaggtacgatctctatactgcattctgattcatggaaaaaatttgttcttaggttcttgtgttgtatataaaaaaataaatatccccctttgcacggcgttctagcacttatgtgtgtgtttctttgactgaaatagtaattaccaatttatcaaagccatgatttgttaatgttctttagtagctgtgtagttaaatcaacccaaatccgagaacttcagaccagaagaagattacactcatggcgtcgatctattgcctcaatttgctgattatgtacacgattagcctcgatggtgattccagctagtagaggcaagttgcgtacacaagggagtgaggacgaactgatccctttaggcataaatgatgcaatctacttcaaccccttatgaccaattgttctaatcaaaccgtgcatcaagaagatctatctcatgaacctagatctagatcaaaagctacacaagatggctctaat

SEQ ID NO: 77378 - DNA, 1049 bp, Zea Mays
ctaagggtaaaacttcctgagatgctctacattccacgaattacccacttccatgctatccatttgagtaagccgatatgatcctggccgagtgacctccgataccatgaatggtcgttcacatagcggtgacaatttgtgtcgtccttcacccgttagaattcggcgaaggagcaagtctcccactacaaaggatcgatgtcgtatagccttatcatgatagtgcctcaaggtctgctggtatctagctgactgaattactgtattcaatcgctcttcctccaacacatcaatatcttctagtctggtagcttctgcttcagctatgctttcgaagaccagccttggtgccccaaacctgaggtcggcaggtagcactacctccaaaccatagaccatgaagaagggggtgtttccatgcagagctcgactgggttgagttcttaggctccaaaccacataaggcaactctctgatccactgtcctgcgaacttttcattcttgtcgaagactttcttcctgagtgcttccagtatcatcccattagccctttctacctgaccattagctcttggatgtgctactgatgcatatttgatctggatgctccgttgctcgcagaaatcaaagaattcagagctagtgaagttggatcctaggtcagttatgatgctattcggtatcccaaacctgaatattatgtcttgtatgaattccactgccatggctgaagttagagaagcaatgggtttgtactctatccatttggtgaatttatcgatggcgaccagcacgtgattataacctccctgggctttcttgaagggtccaatcatgtctaatccccagcacataaatggccatgttatagttatggtctgcagctgctgtgctggtaaatgttgttgctttgacaagaattggcaagcttcacatctctggactaactcggctgcatcactctttgctgttggccaatagaaactagacctgaagactttcccaaccagagttctagatgttgcgtgtattccacactatccggcgt

SEQ ID NO: 77379 - DNA, 2468 bp, Zea Mays
ccatgcatcctagtgcctcttttgcctctttcatcttcctactgtgcagaagcttcaacatttgcttggcgaattgatgtagtggcgtgtttgcatcgacatgagcactttttacgagtttgttcatgctctcgctacgttgtgtagagaccattaacccacaataatcatgtttaaaaaaagctggtatccaatctttacgaatttcatacattctggaaagactgatgttatcatgtagaccgaaatcatcaatcagcattgcccaggcagtctcaaactcagttacagttaaaggatgatgtattatagattggaaccttgttttgaaatcctcttcctcaaatctagcgtacaactcgtttaaatacggcatatacctgttttgaacatgccacaaacacaaccgatggattgtgtttggaaataccttgcctagtgcaactggcattgctggatcttgatctaaaatcataaattttcacaacattatgcaacacattaccaactataattgcattcaatacattcatagtagaacgtaataattgttaagcttattaatcatacctgtaagcattactcgtggtccttcagctcccatgcacgttttgaatgcattgaaaacccactcgaatgtgtctacagtttcgtcacccaacaatgtgaaaccaaatacggcgcactgcagatggtggttacaaccaacaaacattcccaggggtttgtcatatagatttgtcttatgagttgtatcaaaggtaactgcatctccaaagtcaatgtaatctgcttgctggctagcatgggaccaaaaaatgctcaaaatctttccttcttggtctagctggaagtcagagaaaaactgtgggttatcttttttacacaatgcaaaaaaagataggagcttagacacatcattggcatttctttctctttgtcgcgctttcttcctgtgaacattaaacaatatgccttagtccatacgtacacaacgtcattatgtcattatatcagtgtaaataacaacataacttacaggttgatcatgtcttgtgtagttaacggtacattctctggtccaccatgcatttctgaaacaaaatccattatacagtgttgcggaatcctgctttcttgcatcgcactaaggaactccatgtattctggatcatgtgtcttgttgcactgtaactgattcttttctgtatccttcctgaagaactcatgattatgttccaaatgaataagatcaatccgcactgaaatgatattctctttggcatcgtcatatatttttttaagtttcattccagctctgcattgtgttcgcttggaaattgtatttcacacttttggattaccatatcctctttcggcacgcttgccttccattgaacaattcaaccacttgcaattttttctctccctatatctcttcaatggaaatccaacttcatatgcatatctgctatagaatttgtacgcctcgtccacattcctaaatgtcataccgacctttggtaccaattgttgatctatactatcgtcctattcaattaatggagtcatcatgcagtgcacatatataaaaaaataagcttatagcatggtgaatttctagttcttcataaattgcacgaactgtataactaatatacatgtgtattcggttaaatcataacttgcactgaaatttataacaaatacatgggtattcctttgaacttacatggctttggagaatgtgtggtgtgtcctgctcatgttcaccaattgtacgcatgggtatccgctgagttgttcccaccaaacttggatgaactgtgttgctgtcttcaagaattcctggcgccggtaacgcagccggtggagttacagcatgccggccatcggtcatacagggtgtcgtcgtcgctgtatcttctccatactgctccgatcccctggccgtctccattgtgtatgccctaactctcccagatctttgagcaaaagcggcggcgactgtgtgtctaccgttttttgcagctattctcctatactcgcctaaaccgtcatggcctatattcatggcatgatccaatatcccgagatttactgcgcagtttgcatgtcgctagatttacgtgaacgatccgttacgattacatgcctattgtgtcacatttccataaatatggctcaccccaacgtgcaaccgccccacgttcttggatgaagcgcgcgtcacccccactacccgatctgaccacacacgtcgcgttagatgattattcatttgtacttagtaatttaaacaagcataaaagtcgcgccacctcccgatcacgtccaactataccaatttacgcagctaataacggtaaaatacgcaagcataaaagcgtgacccacgtctccgtacccgagccccccacgttacaatttacgcatctgtttccttcaaattccgtatgcataatcgc

SEQ ID NO: 77380 - DNA, 359 bp, Zea Mays
gcgcaagctcttagcatatcttccaacacttggtttgttctttccgtttgcccatccgtttgcggatgataagctgaactaaagtttagcttgatatccatggactcatgtagtcttttctagaagcgcgaggtaaattgggtttctcgatctgatacgatcttctttggtactccatgcagacaaacaatccttgacatgtataactctgctaactgggctcctgagtaagttgtcttcacaggtataaagtgtgccactttagtctacctaaccactatagcccatatcgaatcatagccatcccaggtacggggtagtccaactatgaaatccatactaatttattctcatttcca

SEQ ID NO: 77381 - DNA, 572 bp, Zea Mays
cgcgcagtcatcattcgagattggaacaacaaaagccacaagtgacaagccaacaagctccgtcagtccgcacaaacagtactaaaatatctgaaaagagccggtggccctcgtgtttcgcagttcgcccgagttcgacgacaccatcacctctccagctgaagatctccgcataggtttccctttaatcagcgtaatctcggcccagagaggggggtggggggataacggaaaggcgttcgtctttgctcaccataaaagggccttttcgggaagctcccactactttttgttaggacaagactcacccccatgccgtgtcatgccattgccacccatccttgggagctgcagctgcctatataataccaacagtgccgaagcaagaacatccaccctgcaccaccaccaccgggcaccagcgtcgtcgaagctgctcactccatcgccgctccaagctgtgagtccgagcatcagcacaagaagatgcgctatccagctcgtccgagaaatctccgcgctcttctgtccatcgctctgctgctcgcttgtgctctgcagcagcggccggc

SEQ ID NO: 77382 - DNA, 325 bp, Zea Mays
atagggcctaggacgtgaacagatccggggtccgcccctagggaaggccttatatagcactccgagcgaagccatgtaaacactgtgttatgctaccgttggaaataatagcaatttagtgatgaacaaattgatttcgataataataaatgaacaacaacatattttgcatatctataattcactagcagttcataaactagtgctagtgattgaatgaatacaaatatacacatgcatgtgcttacagtggagttgtcgacgctagagtagcgcaatagtagacgaccagtcgtgacggcgcttctcaaaaaccttatacgac

SEQ ID NO: 77383 - DNA, 516 bp, Zea Mays
atgtgaagtttgtgagctatttttggaagacattgtgggcaaagcttgggactaaacttttgttctccaccacatgccacccccaaactgatggccaaactgaagtggtgaatcgtacattgtcaatgttgctgcgaacaatggtaaagaagaacttgaaggattgggaggaatgtttgccacacgtggagtttgcttataacagggcagtacattctacaacaaatttatgccccttcgaaattgtatatgggttcaaacccattgctcccatagatttgttgccccttccattgcaggaaagaaccaatatggaagcttccaagcgtgctgcatatataaaaaagatatatgagaagaccaatgaagcaattgagctcaaagcagtgcacaaggctgcaagtatgaaccagcatagaaagaaagtgttatttgaaccgggggacttggtctggattcacttgtgcaaggagcgttttcctgatcagcgcaaatccaaattgatgccacgagggg

SEQ ID NO: 77384 - DNA, 408 bp, Zea Mays
aacatcttcggcacactatcactatccaacatcttgaactttgcaattagtctttaaagatgtagatctttgcttctttgacttctttgactgtcaaagtgccctcatatgaatccttaagcctcttccacacttaaaatgcaaactaaagatccttgattgacttaaacactttgggatcaagtgcttcatagataacattgagtgctccatgattgatgtcaagcaccacaaactctgatacaactcccaaatttttatattcatagccttgaggtccaagcacattctactcttcaactaatcatcaaagtgtagtgtcttacccacatggtttattgtggtcatatttacaccatagtcgattacaccttgaaattgataatggcttggctctgctaccacttt

SEQ ID NO: 77385 - DNA, 306 bp, Zea Mays
tcggggtcagaggttagggatgatgttgtgaccgttgatcagatattggacgactcaaattaggtcctcgtgtacccattcgcttgattgattctggatcattggatcaggatccggtggacaggaatacgtaccccttcatcattgataccaagcccctgattcgggatcctgcggccacgatatcatactgattcacgttatgatctgggccattaagtgtagatcagacggttgagatcattgaataccccttcgctgttgcaatatcgctaaagaccctgggttcttttatatgtaacctgc

SEQ ID NO: 77386 - DNA, 716 bp, Zea Mays
tctaatcgtcgccggtgaggtcgccacgacggtagacacgagttcatgcgcgccagtaactccctgcccttccgaccgccgcgcgtcccattgaaattcccggccaccgtcgttgagccctataaattgaagcccccgccagccccgcaaggtcatcacccacccagccaccgagaatcgctagcaatcgtgcatcagtgagcttgaatttcagttttctcacaattcgggtttccgccaccgtgaaaccaacctcaccgcggccagccccgttccggtcagttcatcctcccctctccctcgtttgagccttctcataactctgtgatgctcgccgacccacgcaattgagctagaaaccctctggtcgccgggaacacggttgtctcgccggaacactctcggtcaccatggccagagccaaccaggcacccatttgcgaaattaggttagggggattgatcggggaagatccaatttggcattagctgctcggggacgccagtacttgccccaatcggccggcctacgagctcaccggagctcggccgcgttcaccgtcgtcgtggacctccccctgcgaagaaatagaacatggagggtttttgcgcaaactgtcagtgacacagaaaaatagtaactgaacctatccccagttagtcaaaaccccgagggcccttctgcaagattgccaacgcgggcgtgggcgcgccccc

SEQ ID NO: 77387 - DNA, 559 bp, Zea Mays
cttgactaggctcacacgcaaacactacagtaagtacactagtataaccaagatgtccattgatgtgatagaatttgtggtgtcgtctcaagcagctgcatgatttctgtgatttttggttctgtctcaagcatctgtctgatttttgtgatgattggtgacatctcaagcagaagcagttgctcgatttttggtgccgtcttaagcatctgcctaatttttgcatgtttaaataaagggaaatagtgttctcaggatgtagattagtggtgataatcatcataacatttctgattcgattattgaagtgacaagctagctagctagtcgtcactcatcaagtggttggaattaccaattaccaaagaatgcatctttgacatgagaagatgaatgcatggcagatcggctttgactcttgcagacttgcagtggtctagctgccttcaagactgatgaggttgtgggggcatgatgacgacaccgatcatatatatagtttcattatttattttatttttggggaagctagatatagaaactattgaattgacatcaa

SEQ ID NO: 77388 - DNA, 1552 bp, Zea Mays
gacttggaggctagggttgagcgtctaactgtgaagttgtgccatggcggtagggagcgagtgcgtgctagtcgccacatcgctgagttgttaggagaagtagaacgtctgcagcaggagattgtagagcgtgatcaggctattgactgggctgtgaatttgtgatccatagcctgggattgtgaggcgactgtccaatcctgggtggaaaatccgagcctggccttggaaaacctgcaagcatataacaatatcctgcacgaggaggtgcatgtgttgtatgatcagttacactcaaacgtaccacctgaagttgcagagatgggtgctggcgtcgcgggagcaggtgaaggaggacacctttggaacccctccttctatgaacatcgcagatgactgccttcccaaagctagtagtggatctggagcgaccaaggacgtggaggactagagtagtatagtagtaggttgtttttttcctagacttaataaggaaagtggatttgtatggactgagtatgtgtaataagtaacagcttgcaataatgtaacaaagggtgtgtaactgtattgtataataataaagcatgttttcttcttcagatgccaacaaggacctgtggtcatgatggggcagggacttctcggggtagtggggacgagaccccgatcccaccacctatacctccaactttggcggaggatattgctgcactattgaacactactgctgacaatacccagtttctccaggaaatggcgggaaaccagattcaccagcaaggaggccgatgccaaaatcaagctccgagagacactacttacatggaattctcagaaactcgtccccctatcttcattaaagctgaagaacctctagaggcggattaatggacccgcgtgatggaacaaaaatttggactaattcgatgcatagagacttagaagcccctgtttgctgctcaacaaccacgaggccccgctagtacatggtgggcaaacttcatagccattcagcctgaaggtcatctcattacatgggcagagtttaagcaagcattcagggagcattacattccagatgacattcttcaaatgaagctggaagaatttgttcgtctaaagcaaggcggtgactctataatgcaataccttgctaagttcaaccacctatctcaatatgccatagaacaagtcaacacggacttaaagaagaaaaactgcttcatgcggggtttgagcgataggctacaacagaagatgtctacctgtttggaacttactttcaataggtctgtaagcacgacaatatctatggaggcaaagaattcaggacaagggaagacaaagaggtttggacatgaaggaggtgagggatcctcttatggatctgagaagcgatcaaggttagtgattcgttcgttcaatccaaatcattcttttcctcacccaccctcctttctttttaagaagtcagttttcattcgtccaactgctgcccctacccaaaccactgagtcgggtgcctctggcactcgttttccagctttac

SEQ ID NO: 77389 - DNA, 523 bp, Zea Mays
catatgaaagcgtcaatggcacaggcttctgtctctgaacgaccaccaagcagccatagaagacagtgtatgtgtggtaggccccttttttggaattctacggtgtaaatcactgcataggacagactataggtgagagtgtgcaaagcaatactaaggaaccactcaatgtgtcaagctaaaatgaagctcaccagcgcggatgggaccaaaaattttattttctctaatgtcagctatgaattcatcgactttcatatggaagacccttacaacgatatcggaacgatcgcatggctgctgaccaggctcgaagcgaagggcatcgactatctccttccatttagggttgcatgtgaaggtgacgaagagatccggtgggccgtatactctgcagatggccatcgcgtcctggtagttcatcacatggtaccttcgaccgcccgtaaaagatgcaggtacaataactcttccaccaaccgagtccgcactggtgagacccttgccaatggcgtcggttatt

SEQ ID NO: 77390 - DNA, 516 bp, Zea Mays
cagacgacaccacagaggccgcggcactaacggctttgacgactttctgaggataccacccactggagatggtgatgcaccccacttggactcttccccgctgagaagagggatgatccgatgtgctgcaacagagtgagccacgtcaaggacgtgtgggccatgcatcctgactaggttgggagaatcaccgtacagtgcatgaatgtgatgtaccgcctataggccctacaaagtgatgccatgacgcacctcactgggctcgctcaaactgcaaagaccaccctcgacgatagggatgacttcgtggtcgatctgtatttagagttggtggagaaggatctataggttgaatagatgagcaaccgcatccaagagttggagcagtaggtggaaatccaggacaacaccattgaggtcctggaaaatcagcttcatgatgtgcaagaggagcttgatgaggccaacactcacatagaaatgcatcaccaagacatgaactgatgaggacatcac

SEQ ID NO: 77391 - DNA, 290 bp, Zea Mays
ttgtggttcattgttgacatgaaagcctctctattaatctcggactcaaagacctccacatcatatgacttctcctcatctgtgaatccatccattgcttccatttccttcatacacttcctcatggaaagttctttaagagcatcaagtgtcttgttagtttggctctttttgaactccacatagtcttcgagagctgctcccacatgactctgcttacgctttctgcttttgctaccttctccctctcttgcttcatgaatagctgacacagattgagcttcacttgt

SEQ ID NO: 77392 - DNA, 332 bp, Zea Mays
caggatgctcaggatgtggaagtaggtatgtttccagtcgaatcctacctagcaaaagtactatttgatactggtgccacgcattcttttgtttctacatcttgggtagaatcacataacatccccatagaaccaatgattcacctttaagagttaattcagttgggggaaaagttcagtccgataggatttgtccgaatctaaggattgaaataagggggatagacttccccgctagcctagtagtaatggggactcaagggttagatgtcatcctagggatgaattggctatatagaaatcaagccactgtcagttgtgataagagaaca

SEQ ID NO: 77393 - DNA, 555 bp, Zea Mays
agcgatgggggtagcctagtcgaggctaggttgaatgatgagtggattgtttggtggtagctttgatatggtaactcatccattgcaacttctcaagcatctattttgttgtttttcttcgtagccattagcaatgatgcataataggctactacgacaaacatcatttacaaaacaaacatgtgttacaaacattacaataaagtcatacgagagaattgaacaagttttttggaattttgttgaaaaattataaaggtttacctgattgaaggactctatgaataaatgggttgtctctgagaacaaattttgtaattatcgatcaattgttagcattttcaactaacattagcaccacaaaatcgaggttggtaatccttgcatttgctacatatctagctaataagcccagtgcctctatgtcgtccgccccgacctgcaccaacgccttgtaccttagaagcccaggtgcctcctccatgccgctcatctcgtatcagtaaatgttgccctgtggccgtgcaactgtccaacgagcacatgtcgttgtcg

SEQ ID NO: 77394 - DNA, 333 bp, Zea Mays
gtgaggattattttgatacctattcaccagttgccagattgatcacaattcatgtgctaatagcacttgctgcgagtcatgatctactcatccatcaaatggatgtgaagacaactttccttaatggtgagcttgacgaggagatctatatgaagcagccagagggatttgtgatgcatggacaagagaacatggtgtgtagactaaggaaatccttatatggcctcaagcagacgccaaagcaatggcatgagaagttcgatagaattctgacgtcagcaggctttgtggtaaacgaagctgacacttgtgtgtactatcggtttgtttgtg

SEQ ID NO: 77395 - DNA, 733 bp, Zea Mays
gtgattatagttggtcttagcgtgggtggtttgatgctgtcgtttcggcttttgttgtactagttcggctgcgcccttaggcggcttctgcacggggtctttgcgatggacttcgggttttttcgcacttgttgtgctagtccggctgcacccttaggcgacttctgcgtcgatagtcttcgcgatagacttaggattttttcgcacttgttgtgcttagtccggctgcacccttgggcgacttctgcgcggatagtcttcgcgatagacttcggattttttcgcacttgttgtgcttagtccggctgcacacttgggcgacttctgcgcggatagtcttcgcgatagacttcggattttttcgcacttgttgtgcttagtccggctgcacccttgggcgacttctgcgcggatagtcttcgcgatagacttcggattttttcgcacttgttgtgcttagtccggctgcacccttgggcgacttctgcgcggatagtcttcgtgatagacttcggattttttcgcacttgttgtgcttagtccggctgcacccttaggcgacttctgcgcggacttgtcgcacgcgagggtggctagcgcttagcctcgcggtgacttcgaattggtcgaatgccgaagaccgttgtcgcggtcttctttcgacatgtttttgcgggggatttttctcacatatattacatggctccgcctcgttaaaaacctcaccccccgg

SEQ ID NO: 77396 - DNA, 332 bp, Zea Mays
tcgagaagcatcaagagcatgcaagagtgctaaaacaagagctaggagggcgtgatcagacatgtggagagctggccatggtgagctcactcacggtggagttttgactgatttgggggaatttcaaaattggagcgctctggtggacaatctgaggcacgggatggtccgttgggtgtgtgattacttagcgaagctcactagggcggcaatttataagttctaagagcgggggcgtccaattttgcagtggcgtgttggcggccggagagagggaccgagtcacagaggtgttctatcgtggcattcactggttgaggagctacgactat

SEQ ID NO: 77397 - DNA, 548 bp, Zea Mays
tttctggaagagatagtaggaatgccgcccgatcgagatgtagaattctccattgagttaaaacccgacaccgcacctatttctaaaaggccatataggatggacgttaaggatttaggtgagctaaagaagcaaatagcataacttctagagaaaggatttatccggcctattagttcgtcaccataaggagccccgtattttttgtggattaaaaggatggctctaggaatatgtgtattgactatagagatctaaatgaagtgaccattaagaacaagtacccattgccttggattgaagacctgtttgatcaaatgagaggagccaaagcattcttgatggtggatttgagatcaggttaccaccaaccaaagattcaaccggaggatgtctctaagatggccttcaccacaagatatggactatacgagtttctggttatgtcatttggattgactaatgcacctgcatactttatgaacctaatgaataaagttttcatggaatatctcgacaagtttgtggtcgtgttcatcgatgatata

SEQ ID NO: 77398 - DNA, 337 bp, Zea Mays
ctcatatctgttatgttataatgtcatgaataatatctgtcagtaaatctgggttttacgttttatgctgcattatcaaattaatcttaagcgttgttaattttctaacaaccactaacacttgtatgaaccggtgagaacctgcttctattccactagaacaattggctcctaagcaccgcgatcacctcttccttccacaagttgctgaacatcaaggtcatcacatattctcttcgatctatcctttgggttcctgattttcagcacctgcttgaaattggtatgtattatcctgccatatggttattcatggcaaataacctttggaaaaaaa

SEQ ID NO: 77399 - DNA, 450 bp, Zea Mays
ctctctgccttttgacgtccatcacgccatccttgagggtcttatcaataaggatacctgctccatttttgtttgtcactgttcctgagtaccaaagtttgaaaccagtgttctccatctccttcgctttttgcctcttccattttgtctcctggacacatatggtactaacacgcctcctccttgtctatgtaattagttttatggttagactatatctaatacttctaattagcatttaaacatacattgaatgggatagttagccctccaatccaaaacacctactcggtgttactaactatccgttgttttgctgctgcaggatatgccacccgaaggcaatcgtgcagttgagccctcgcactcctgatgtacatgttgatgggtctgccatgacgtgggcgagccaccttctaataagctaaagaaatgttcactctgtttcaa

SEQ ID NO: 77400 - DNA, 873 bp, Zea Mays
cgggcttgtgggggatggatatccttcgggtccacacaagtgcgaaaatacgctcagggccacacaacagtcgccctctagaggcgtcctgctatggaccggataaaaggaatcagcagaaacgagccggtctagatgcgaaagaggcccacgttcgagttagccgcagcgtaagcgcgaatatgtcgggttgggtttgttccccacacttgaaatcctgaaccaccggcgataacttgggcgcgggagcactggatttccccaggataatggaagattattcgctactaattaggggataagcaaggaggttgtaatcaacacttgggagggggagctctctctggttgtgtatataaggccaagaggcacccctaccattttcatctcatcaacagcccaccatcttagcagtcacagcgtgtaaactcatccccatacagaaaaccaccacagaaagtagggtattacgcctctcaaagcggcccgaacctgctcaagcttgtgtgtttccctccttgtgctacaacacgaaccatcgagtcacaatctgtgacgctgtgctacccaaaagcatcacgagggtaaccccgggtgtgcggtcggacacaaaacactgacagtgggccctgcggtcatcacctcgctgccaagaactcacctacacgtgggcccgtgtggtccaaagcttccctaccagtcaatcgcgaagatacgtatcccaacagctgcacaaaatctgtgtttggttacaaccaccgtgatctgatcctcatgggggctataaagcaatgatacagctgcctcccctgccatatccaccaccttgaccaactggtccgtggcgaggcatcctcacgctgaagaatggca

SEQ ID NO: 77401 - DNA, 508 bp, Zea Mays
ggctggtttgtgtcgtcgcgtcggggaagaaaggatgtgggccattgatctgtccactaacgaccacgattagttcacacttaatgattcagcttgggtggttcagggtcgtcagatcgagatcgtgcgggtggggcgcagtcgcgtggatgatgcgcctgagccatcgatttccaatcctacggttggcatcacatactgattcggtaaaacctagatctaatcccagccgtagaagtaagaccatgcggctctagtcaaatcatactccttcggccagggaattttgttaaagaaacccagccaaacattgaaatcaacccgcggatcatctctggtgtagcccgagtcttaggaaatttacaccgaaggccctagtctttctggaattcgactcgctatctagataattgataaaactagaaaaattatttagaaaatagtttttagtacacatttaattgcagaaacttgttaaattcatagaaaattcatgcttagtccaaat

SEQ ID NO: 77402 - DNA, 360 bp, Zea Mays
atctaagacacgtcagaacaatccacaacctaggccaaagtgaagacaagaacaaccatactcaagggcagtagagccactcccaatcaacagggacacaccagagttccttcagaccgccagccccaaggggcagaggaggaagaagcttcagagaaagatacaactctcaaccaaaatggctattctgcctattctgtggagaggatacagggcacacaacaagaacttgacaagtcacaattcaaaagcagaaggaaatagctgaagtcgaagcaagacaaaatcaaccgaagtaggttcttcatactgctttgtattactctccatacatcccagagtacgtacacaaccaacagc

SEQ ID NO: 77403 - DNA, 580 bp, Zea Mays
aaaatgtgtttcaatttcctctgtcaggtgttgattgaagtttctgtttcagttaacaagagcagcaggttgaggtttcggccagtttttgggagcccttttgtgttgatcccagatgttatgaattctggatcttctagtagagtcttaatggatgctttcgtgaacaatttttatgtagattgatccctctgtcactgctgggagttgtgagataagtgggggtgaacaggaggggtttagttggggttttaaaattatggttgcagagaaataagataggtctgaaccaccgtgtgcccttgctgttttggacactttgagtaagtggatagacaatgacatggagggtaaggaaagatctttatatccctgctgtgttccaacttgcgcatgagtttgagatggagttggactgggcagcaaaaaaatgagaaggccaagtctttgcagtaaatatccatgcactgggtcagttggtgtcaatccacggtgaaatgttatctgattatccctagcagagggaatccgaccaagtgatgactagttgtgtttgtgctccagcgtggagtctgtgtgt

SEQ ID NO: 77404 - DNA, 515 bp, Zea Mays
cttcggctcgctgacatcatcacctggatcgatggtccgcaagatgcattgagcctgcagcttgatcttcatgagaagcgctcagttgttgtagtttgtcttggtcagcatgtggtacgtggcgggtccaaccgacgagaccttctccacgatcctttccaccactcgctcgacgttgccaccgttccggcgtcgacgcggtggcgatcgccattgtcgacggtggggcggagtcagggaacactctcccattggagccgacatggtggatctctctttggctctggtaccacttgttggacttcaactggcgttcacctgagctggagaagaatcactcgctcacccctcagacactcactcacacacacaagcgcactggacttgattcaggcacaagtgtatttggtactactaaaaccacagtcttttctgatgcatatgtgtctccatttatcaactacaaattacatgcatgcaaatcaacgttagtaatccatcgtgcgtctcccggg

SEQ ID NO: 77405 - DNA, 535 bp, Zea Mays
ttcaatttgacatattttgacactcagttttcactattttccatagcactgcaaaccagttttcatggatctacaactctctaacctgtgcaccaatgacctcatgttctgtacaaaatttgtagagtgtagatcaaggaaaatatcttgtaccatgaccgatatccgaatccaaacagaaaacgccaaaaacatccatccgaatccaaacaggaaaatatcttgtaccatgacctatggctagcatgctctggagctcctgctctataaatggcagccaacccctctccttcccttcccccatatgccatttctcctcctctctgttccaaaacgtagcagcagcctctccttttccttccccatcacagcacgcaggcatcaagcgccgctcgactccttcccagtgcatggcacagggagctcctccagggccacgcctccatctccatgaccagccagccaaccttgatggccgagctccacaaggattccctctcccatggcgtgtcttccccaatggagaagctcaaac

SEQ ID NO: 77406 - DNA, 760 bp, Zea Mays
cgagtcgcccaactacgagactctcacagtggatgagctcttcagcaagctcaagtacactgaaattgaccaccagactcgagccaagattgagaaccctggttcacccaccatggccctagtctttggaggtggttctgcttctaactcctcacctgctatgtttgctctatcttctttgttgtctattacagaggagcaggtggagagccttggggatgaggagctggcacttgtggccagccggttcacgcagttccacaacaaacgtatgagccggcagcgtggcgggtccaaggacagatgctacaactgtgacgatcccgaccacttcgttgccagctgccccaagaagggaaaatcggagtctagcccacgtgaccatcactctggtcggtgcaagggaaagtactcctccgacaagtacaagtccaagggaggattcgacaaggaggcgctcaagaagaagtaccttcagaaggcaaagatcaaggagtgtgccttcctagcctccctcagcgacctcgaccaggactccgacgatggtgtatcttcctcgagcgacaaggagactgagaggcgggtcgagggcaagctgaaccggctgtgcttcatcgccgacaccttaggaggcttctgcaccatggcacttggtgaggacgcggtcggcaccggcgacgacaaagacatcggtgacgacactacttctaaggtactacgttccgccgatgatctcgccgatgagatagaagagctgaac

SEQ ID NO: 77407 - DNA, 622 bp, Zea Mays
gtgtaaggtgttttagggtttactagctaaatgggctttcgtattcaaacccgcaaatacaagcctgaggactggagtatggagcaaggccgtgattttgggccttttcatgcctgtgaacgggccatttcatgcctgcttaaatgagccaggttcgtgcccgcccgtgggccacgacctcagcccaagcacgacccaacataatttcgtgcttgtgccatgcttggaccatgctttttttcgtgcttcatgcccgcccattaagcttggcccaaatgtacacctatattcctaagagaatgtagagtcacattttttgttttacctttgtctttattcctttggtgaaacatgcattggtgtagcataacatacatttggataaccattcatttatcatatagacatcataacttcataacaccatgccatcatgcatagaagaactcgtaagaccttcgattgaaaggcagagtcaccaaaaagaaaagctttgtctatcagtgatgtgaaaatttctttgatgttgtatgaaaagaagggatggtattttttgccttttggctcaaaagtacttttttgatttcatccacaaagaagcatgtggacaaaacaagataac

SEQ ID NO: 77408 - DNA, 1841 bp, Zea Mays
ccttaaaaaccttctgccagatagattcctgtccagtaaatgctaaaggcaagttaattccttgaagcgccatccagtcaatttctttctcccatcttttccagtcccaccacacaaaagagtctatagaacgctaaatgaattttgtcagatagagaaaatgttggaatccacataaatagtgggaagcttcagagtcgtttctttcaaaattacaagttataaaaaatccagtaggacaaatgttagaagttggaagggacaggtcaacagagccaaaagtcataggatgaaatctgtacgattagggtgtaggagaacaaatgctgaaacattagttcttcatttgcaacagatgtactactagtagatcgttactgcatcaatagaatgtatggcaagaatcgtatttccaagaccacaccatgcccttatacttgccacacatctagaaagtaagtactgactgttacaaaggacaaggaggatgacactgaagaaatcaagaaattaatagatttggaatcaaacaaagattatgaaaacaaatgtttaaggcaagaaaggactcacaactagaagtgacgacattctgatagtaattccacggaacaggacgctcaatcttgactcccttgccctgcacccgtggcagagatccaggagaaggaatcgaagccagctgggcacccccagtcttgtcccaggagatatgtgcgccacaccagtatttcaaataccaatgtaggccagatgcaagctcaacagctgtggttccctggatcctgtttagtataaacatgaagaggtgattgcattcaccttcccaacggagccaaaacaaatgtacaattttggcagtccttgcattctcaatgctcaactaaggaaccaatgcgcaggactatcttttgaatttttaagcaaaacaatgtgccaacttagcggtcatatgagagcaaaatctagaacaagaatgagaaacttcatcaccatgtttgactatttatgcaaatcaaaatctcatcaatgcgcccaccatacagcggtaggcaagcaacagaacacagcctaagccatgggccatttccaggctatgcaaccaaagtttacagcatcatggcaagtacgaggggaaaaaaggaacatacagaatctccgctccacctttgcccgagccgtcaacgacgttgcttatcctgaagcagcttgattgaccgcagacgccgccctggagcgagcacagcaagcaaaacgggcacaagagggtcaaccaatgctgccccgaagtaactagtaagcagggggggagggggcaaccagccaactaggtactcaaaccttggagtcgatctggaagctgaagctgccagagtggaaagggagcagccggcgcagcagccccgcggccgccccttcctgctccgccggagacgcctttcggctgcccgccgccccgcggagcgccacccacgcggatgagccgcccgccgccgccgctcgaggcggcgagaggagcgtgagcagcaggaggatgaggaagggggcggcgagggataggcgccgcggcggcgatggcctcatcatggcggaattctggcccgtgttgggaccacgctcaatccaccccggttgctacttgttcggtggtgctcgcggcgcgcgtagaagtagcgatcactcagtctgcactctgcagccgctgaccgctcagcgggaacgaggaagaaggaatcagtgcgatatcgtcacggagattaattttaatcagaagggatagataatgcgagcgtggatgatggatcggagcggcggcgatttggaccgcctgccgaacggag

SEQ ID NO: 77409 - DNA, 742 bp, Zea Mays
tccctgttgccatccctagtctacatgtggactgcccacattgtgcagagaggctcaagaagaacctagatatcaccttccaggagagacaccgtcagggaggggttacaagttgctttggagtcggcaagccaccgaagagtcttaaagacgacgtagagccaaaaaaggtgaagattaaggttgggtgatctgattggagtccctaccagggaggtggcgtaggttgtagggatgagacgttgtagggcatggatgggtatggtttgaagatgtcgtggctgctagcaagagacagagcaagagatggcgctacagtaccgtcctacagtaccgtgtgtgctgatcacgggattaggctgccagcgagaggaggaagggatggcggctagggctcctagctccctgagggaagccgacaccaaataggttgcttctatttagtttctctaggtacaaactaggccattcatatagagatggtttccttctggttcataaccggatctcctatttttactccaatacttatccaatctatctctaactagatctcctatttattcttcccgatctgccttatctaattctatttttactccaatacttatccaatctatctctaactagatctcctatttcttctccctaatttgacatgccttatctaatactaaactggttccttattgggatcggttggctgggccccggccttttcgatcataacatctctccctgc

SEQ ID NO: 77410 - DNA, 502 bp, Zea Mays
gcttatttaactgtgttcagtataaacatggggattgctctaacatcaataataagagtttctactattttacttatggtacaagaattctcatgtcacagattcgcactcatcaatcatcaagcagccaagaagcgcctttccagtagctcgctcgcttcctctccgatcgcttcgaagtcgtctttctgggcctctggtcaaccacctgcctgacgacattgttattgcgtcgccgcttctggtcgtcttcttctcggtagtagcctccagggaacttgcgctttgcatcccctgtctgctcgctgcggatgcgaccgacggcgacgccgacggcgacgggagacatcttcttcttggcacacaaccattgcttcttgtctcgttgaaccggaagatcagtgtcgaccggaacgcatactgcctcttgttcttgatctatctgcgatagtttctcaaagatggctctgcatctggagattttaccattgatggatgtcgt

SEQ ID NO: 77411 - DNA, 486 bp, Zea Mays
gttgaacaattagtcatatgatcatgtaaactctaggatttactaggtgaggtggaagaaggcagcttttttgttggaggcgccacccggtcgtgggatgaagtttagcaaaacgaaaaacaaacttctggaaggtaacgtctcgtgagatagactcatctagaattcagaactaggatcaaggcacttgaagcctttatggaaagtattgaatcccaagaatacacaatatgcggaccaaaactagagtttcagtattgaataggcgaaggttaggccaacaatcgcacccaaagacacataaagactcataattagatgtttgattaaacaagtgtttcaacatttttcataattgacgaattttcttggcatatcattggtcaagtaaacaacaacaagagaagcaccatcccaaaatttaaaggcatagaggtttgtgcaaggagggaaagactaacctcatctatatggtgatgctttctt

SEQ ID NO: 77412 - DNA, 948 bp, Zea Mays
atttgcttgggtcactgacaaatgcaaataagccctcgcacttctatttcttcatagcccacagtcctcgacggcgaacggcgatgaaccgagctccggcgaacctgtaccgaccaagacacgcaatggctggtgctctaacttggccgacacctagttcaacacctaataatcgtttcccctcgctcaattgcaaaatccaagctcttaatcacgctgtcaacggtgacaacgcgagctacggatgaacgaaagtgttcccgatgatctagctcggtctagcttaattgaacgggttgaggagcatcaggagaacataagggcactgaaacgggagagcagagagcatgcacagacctaaaacgagctagccacagcgaagtcacttcacacggtgttttggaccgatttgagggaaactccaaattggggctctctggtgagtaattggaggcacgagcgggtggattggatgcttcactaccttgggaactgatgacatgctcaatttataggccccccgagtggtggcccgtgaatttgagatgtcgtggtggcggtcggagagaagggggtgcactggcgcaagcaattggtggctttcaccgtggcgagctcaccggcgatcaccggatatgcataacgcgagctactgcaacatggtgaaacaccaaggcacgtggcgcaaggtcgtgagggagccaatgccggtgaatctatccgaagcagccgtgactcaggcgggtacggtggccggagtagaatagtggccggagttcatccacgtgcgatatttcttacccttcaacgttatccaactacgctgagcacgaatcaccacggcggacgcgaatccgggcgcacagtcaccggtggtgagtcatctgaatctagtgttctgatccggacactgtaccattgtgaacatgtttagagcacctgacagac

SEQ ID NO: 77413 - DNA, 770 bp, Zea Mays
ggggaaactggtgagcaaggagggaagactacatgtggaagagggaatatcgactgcaaactaccatgagctgtcccattggattcacaggaagtataggtaggggttgttccatatattagtttgttttcgcgcattgatggcacatgaacaggtcgttgtgtagaagcaccatgagatgtggtggaagcaggcagcacagaggacatggcagatttacctttactgcgagcatccaattttatctctgtttcattatcagcattccgtttgggttcagatttccttccacctaagctagtaaaaaccagtgaatcctcaactgaaggacataatgacacctgatcttttttagcagcgggattttccaatagcacactcttaagaccattttcaggtgtctcgggattttgcatgtctggggaatttgatgctgaaactgacatagttgtagtttcaagcttagcctttgaatttccaattttttgtgaaccaactccagagccaccagaaggttgaatgttgctgcttcgtactaccagttcaacaatacgatacagcaattcagccaatgttggtgcagataacgcagctctagagtgcaagtcgtgagatagttttgctaagacagcaggaatttgctctggtacaaactgtaaagcttcatcaatagctgatttcacctgagctagttcatcttcgagggatgttgacctagtagacttcaaatttgtggtgtgctgttctgtccgagctgtctcaacattgcc

SEQ ID NO: 77414 - DNA, 341 bp, Zea Mays
ggatgatcatcaaagaattacctagccgtcttccctgtgggaagccggaacctgagttggtctgtttccccacgccgtgaacacggcgtcccgtcgtccctctcgcccagtcccttgccaaccaccagcagtacatcggtatagcttgaggaagatccacggtaggaatagaaatcatatcaacctgctatcaactatgtccagcgatcctccattcaccagacacccaccgccaccatcgccttccactgttccaggccgcccaccaccatctctccaccagcttccaccgcacctacaccaatactcacgctggaatctgtggccacagcagtccacga

SEQ ID NO: 77415 - DNA, 453 bp, Zea Mays
tttcttgagtcgcatgaattcctcctatttcatgtgcagcactccttctggaatatagtgctcacgaaacgctaatttaaattcgtcccatgtgacctgatgtccggcaggctgaatggccacataatttccccaccatgtactagcagggcctcttagctgttgagccacgaacgacagcttctgggtttcagtgcagcggatgagtccaaatttctgctcaataacccgtacccattcgtcggcttcaagagggtctttggctttaacaaaaagtgggggacgggtttccgagaaatccaggtatgaagtttcacggggtccctgtggataagcccttccgccttgttgctgaaattgatttcgcgccatttcacgcaaaaagcgggtgttgtcagcggttgcattggccaaggcagcgatagcctcggccaacgttggcggtaccggcgg

SEQ ID NO: 77416 - DNA, 795 bp, Zea Mays
ggccgataagcatctatagcacagaggggtgttgaaacgagagcgaggagggcgtgaacggacctgcggagagctagccacggcgcagcgttcacggtggcgcagaaacccgatttgggggaagagagaaattgggagactatggtggctaatcggaggcaggagcgggggctctagcttcgtgattacctaatggagctagcggtatgctcaatttatagtgtccaagggcggtggctcctaattttggaatggcgtgttggaggccggagagaaggaaggttactagcgcaggtgatatcgtggctctcaccgtggcaaggcctctggcgatggatgggcttgcaacataggtttactgcgacgtgttaaacctctcaggcatgtggcacacgatcggtaagcggccaacgccggcgaggaccatttcggccaaccgcagccctagtgggtacggcgaactcaccatcgaccgggtccgagcttatctggtgccaagatctttactccgccacgattatcttcacgccagagagcacgaatcgtaacaccggcacggatcacagcgcgagggtcaccggcggtgatgggtgatgtacctgaagatcttcttcagttcacagctcaatgggaaaccccattcaaagtgtttgacagatcattttgctaggctttgatctctgatttctgtgtgataacttgtcaatccctctgtaacaaagttattgccctataatccaactacaattcgattatagaaactctagctgtttacttattggattaagctcaaat

SEQ ID NO: 77417 - DNA, 464 bp, Zea Mays
gcgactggcaaggagcccaggcccagcgccccgccaggcgcaccttgcttaacgctggaaccgaaacggttgctgtcactttatgcggctggctgtacctgtacgtgcaccatatagtggccgggtccttgagatcgctgcacctggaccacatagagattcctaccgattccttcgtagtacaccggaacttataattagattcgacaaagaagagtgaagttttagatacagtaaaattttatactgaactgtctacatagatactctattgaacaatcagtctactcgttgtttcttttagatagcgttcaagacatcggtctacaacttattacaccacacaagtgtcttgcacatccacaagtttcgacggggataaaaaggcgcatatttgaggcgaagacagatagtagtgctctctaattaatctagcagtaaacgactactagcaagaaccatgc

SEQ ID NO: 77418 - DNA, 274 bp, Zea Mays
atcactcttcgctgttggccaatagaatcctgacctgaaaaccttcccgactagtgtcttggacgccgcatgtattccacattgcccggcatggacctcctccagaagttgcttccccgtagatgagagaatgcatttcatgagtacgcctgatgcaccccatttgtataatgtctccccaatgagtgtgtagtgagccgactatcgggcaatgcgctcggctgaatttttgtcatctggttcctcttcattctttatatacctgatgattggc

SEQ ID NO: 77419 - DNA, 472 bp, Zea Mays
cttgtatgacatgtgaggcctggcccccgtgtcataggatgggaaccctggtgcgcatcgggggagaccttgcccgtgacgcttcggggcgcgagcagggacatctgcctttaaaaaggggttcacccctcgagtagcagccatgtcttgcttctttcccactcgctgcgccctttcgcctccgagttctccgcgcccatttgccttcaaggtctctgctttccgttgtcgtagtttgccatggtcttgtgacttcatcccgagcacgcccagaccgaatgagtgctcgaaatggtataccacctacttggatggaatgcgccggcgctcggcggaaggatttgtgctggcgttatccactccgatgagcttgccgctagagagttcatgccttttgtcctccctagcgggtcggtgctaccggtcttgtcttcccctaccggaggtgcacggccttgtgggagcgacgctc

SEQ ID NO: 77420 - DNA, 649 bp, Zea Mays
tggtttggatctcctccgttttcccctgtttttttgtccggcgatctgcatcatattcgtcaagtctacatttcagtcttttccccttctacaaggaagttatcctcttccttgcttgattggtctttcttgttcttatcccaaattgtgttgtcgctctctcaaaatttcctttccacttgtttgttgaattatcgagaacgcaaaattgggtaactgtatacaatacactaaagagtatttcatttaattgattgcttgttttgttcgattttactcttgtctctggggttaatgagtgaaattgagcttaattacatttttagtccaattcgatctcttttagcttcctctgatgatctgatctgtcatgggtccaatcagaaggccagcagtccaccatatgtgatcagtcagttaaagtcgagttggaattcagtggtcgtcctgttttatatctggatttgattggtcagtgaaatcactgtccgtttccaacatgcctactttttttggtaaaatcaaactgaaatttgacgatggctcgtccctagcaaaattgcaaatcaatcctcctttgcgtggctctgcaccaatctatgcagagaattaataaagcagatgatttatcctctggccttgagatccc

SEQ ID NO: 77421 - DNA, 476 bp, Zea Mays
accattacccatggtgaaccaaacactaccctagtctctatctgtgcggatgaatcaagtggactttatgctaatccggttaattataatgctctgtagatagacagaagagaccgaagtggacagtccacgtgtgaccgatcaaggtaaaagtcttcagagtctacgtaaagttgctacggcacgtgtacgtacggacgtggttctcatcaacagaaacgttggagatagccgctagctacgcaaacaaactacaaacccaaggacgaccatcgaccaccgatgggattagattacagccaacgttcgagatagcctgtcaggcaggctaggtgaggcagagctagggataataaacaatttttccgtcagcttttctcgttcccgtgatctaaaaattttctcgcgtggatggatctccatgtatacttgtcaaggacatttctttctcatcttcattctctgtagagataaat

SEQ ID NO: 77422 - DNA, 886 bp, Zea Mays
ataccttttcccactatcgtctaggacaagtttcctatgctattctgtaatttctatcccactacgtcacttgggcggtcccttcgtgatgatggtgcccttcctaaactcctttctctgccttctgaaggggtgattgaagggtagaaaacatctatggcaatcaaagtaacatatcttgccaccagcactaagatgaaaacaatctgtatctttagcacaataaggacacgccaatctaccatgcacgctccatccagagaaaataccatacgccataaaatcatgaatcgagaacagatacgcaacacggagattgaatttctgcttcttgaagcagtcataggcttccactccttgccatatcttctttaactcttcaatcagtggttgaagcatcacattgaggcgtacaccagaatgctcagacccaggtataacaagacataggaacataaactcatatttcatgcaaagagcaggtggaaggttgtacggtatggcaatgacaggccaacatgaatatgacgcagcggtcatattgaaaggcgtgaaaccatcagttgctaagccgataggaacgtttcttgcatcgctggcaaaatctggatcaaagttgtcaagagccttccatgcatcaccatctgatgggtgcaccattaacccatcttgtctgtccgtacaatctttatgccacctcatgtgcatagcggtcttcctcgagagaaacaaacgtttcactctaggagtgagaggcatgtaccgaagctatttatgtgcaacctttgtcaccaccttctccccatcttcatttacaagctcaacgtacctcgacttcccacattttaagcatatctgctctctaccatgttcctttcaaaaaagc

SEQ ID NO: 77423 - DNA, 340 bp, Zea Mays
ctcgatatctgtgaccatctcacactttcaagcctagtggatcactctgcttcaaaggcataagaaccccatgtgagagtacaatgggttgcgaaatgagatgcaagttaggtctagccatgaaggagactttcttgttacaacccacaacaccttgttcgcctttgcgcgaccgcctacaacgatgagatgctctagctcctagcagtgatccatgccatcttccaaagcaataaggtgtatgaacgaactatagctacaatgttagacaaaaacacaagtggccttgcagccccaatgggaaggctattgtttgggccccttgaacatatcagagaac

SEQ ID NO: 77424 - DNA, 674 bp, Zea Mays
gtctcgctgctgcttgttgctggtcttttacccttatgttgtgatctggccctattacgaacaatagaggtggttcaacactaacggatgatgtggagctataatcgccttccatattgaggcaagattgcttgttcccatcattagagctagagtcattgtaccgcacacatcactttggttgatgatgaagtgcatgccacatatgctgcagcttgaattcaatttcgttgggcccactgcagaggctatccttggagcagctagccatcattcgtccgtcttggacaagtcgcaaacaagcgatagataccattgaagagtgtgaccttttggttgctcgtggaccaccaatccttgacctgcttggtggtacaatggtgaggaggcttggtggtagagttgtatgtggttgctatttggcccgaaatggaaaactctttttgtcattgccctcaacatggtcaatggagtgtattaaccacacatgcaactacaaatgtacaacctcaataattgttctctagttacaaagagtgtggaatccatatagtcatatatatacttagaagtctttcatcctccatcttagtccagtctgttgttgttggattgcgattcacaagattacacagactagttggaggcacatcattgtggctgtttggtggcac

SEQ ID NO: 77425 - DNA, 714 bp, Zea Mays
gttgaggctgaatcatttcatgtgaagttcagcaacagctaagaggacttcttggaaatacctactaattatctttattgacctcctaataaatgtgatttgtagattatctaaccattgttgttgtggctgaatcatttcatgctgaagttcagcaatagataggctgggatctatacttattaggctacgaaacactggcccataggttggataatccggagcaaaacccaagccagcgtgcaaaagaacttgagggctcgtttggtggcaagggatttggagattggtggcaagtgatttggagaggattcgtggaggaggaaattccaatgttggcaacctaacatccaaactgaacatgcgactagtacttcagagctacacggcccatatggttgctacttgctagcataccggaagaaccccagacacggagagtagtttgggggatggggtgagcgggcacgtgaagtgtcaggtctctctagtctagtcgtgactcgtgatcgatctccattcatcaacatgcattaaacacaccactagctagacaacaacaacaatggttcgggggaggtgcaagatacatgtatacatatatatatgggcatagcaacacgacgccagtcacgctcacgccaccccgaaacagcttttatcttatcttgtttccgagcacggtgacggacactggatcaaacacaggaacat

SEQ ID NO: 77426 - DNA, 510 bp, Zea Mays
gagcattttccttcttcgaaatcagaacgataaaagagccattaatacttctaagacagacatccccatggtaaaattggtcacataagtcgtagaagtcctgagaaataaccggccagcattttttgataaaattggtattaaatccatcaggccccggggatttgtctgaagggagagctgcaacaatgctatcaatttcttgccttgaaaaaggcgcatccaaccattgcaagccatcttgcaaaattaacaggcctgagagataaaaacattctccaaaaattcagaagaacccaatcgacatttaaagacattccacagaaggttagctttatgatcgtgctctgaaaagattgacccactgtcatcagagagcaacacaattgtattatgcctatgctttaccgttgcatgagcatgaaaaaaatctagagcagatatctccatcagtgacccatttgatggaagcccgttgcttccaataaattttctgaatttgaagcagac

SEQ ID NO: 77427 - DNA, 786 bp, Zea Mays
cgagcttctattccttcacaccccgaggtccacgacggggagcggtggagaaccgagctccgacgaactcataccggccatgatacttaatgaccggtgctctagacctaattcaacacttaacaagcgtttcccctcaatcaatttcactagcggagctctaaatcgtccggtccatggagacagcgcagacaatggatgaacagaagtgttcccggtgatctagggcagtctagctcaattgaatgggtcgaggagcatcaggagaaccaaaggacactgaaacgggagagcagagagcacgaacagacctggaacaagctagccacgacgagggttctttcacggtggcggaaacagatttggggagaaagaaaaattagagagctatggtggctaatcggaggcaggagcgggtgctctggctttgtgattacctaacggagctagcggtgtgcttaatttatagtgttcaagagcggtggccttcaattttggaatggcgcgctggcgttcagagaggaagaagatcactggtggcgcaatcgtggcgttcacaggtgcagtggttcagagagggtaagcctaagtgtgccacggttactaccgcgtagtgaagagtcacggcgtggcataattgaggtcgccggagtgtccacgacgacaccggcggtccggccgtgtcgcaacagctacaagcacggtgataagcttcccctgtgaccacatctgcttccccgcaagatcttttacctccccatggatatccactgcgtgcccggcacg

SEQ ID NO: 77428 - DNA, 751 bp, Zea Mays
atcagggatttttcatcgatcagatacatcattatagtatgtcattatggcacaatggggatattttgctagtaacacctaaaccttataggtttccgccatcagggctttagaggataccgtaattccacatctagtggaaaatatcatgagtaaaactcgtggaatgtacatgtgcttatttcggtgaacttaaagtcctttggtacctcatcttattttgtttcaggtctatatgggtttttatccctttataggggttatcaaactttggtgttcaacacagactttgtttcttctggaaaggttccatctgggaacgataatctcaactaggagatttatatgttgcatgtttataattcaaagatataagtcctcctaggatctcatgatggatcttcataatcctattgactgcatattttaattcatgccatttgccagacatattacatagcggaacggtggttattcagcacatatgtgggatgggtctctcacaagaccacttgaaccatcacattcaccacacattatttcaatagtgcccataaatgttcgaacttcaagctcgtgactttcattttgcgattattggttcagcctcgattgcatttatcgatgacccgataagagagcttcaagcactcgtgcctaggactttgttttggatccgtttgcaatctagagaggcaagatagatgtcgacacatttttctcccacatttaataatgatctttgtcattt

SEQ ID NO: 77429 - DNA, 565 bp, Zea Mays
tttcaatcggctagagaagtcgaaggagacattactgggtgaaacaagcacaatgccaattccttgcccctcattgcaaattgatccatcaaaatataaagtccaaggagaaacaatgaggtatgatatgtctaattcatgagtatcattaatctgatgttctacaataaaatctactacgacctggcctctcatggatttcaatggttcataggccaagtcatattctatgagtgcataagcccatttaccaattctaccactcataattgggttatgcaacatgtatttgatcacatcggcttgaccagaaaccgtgcaatgactagacagtaaataacatctacacttggtgcatgcataaaacaagcataagcataacttctcaataaaaatgtacctcgtttcagcatccaccaacctccgacttagatatgtcaccgcatgatcctttccttcagtttcttgtgtcagaacagccccaatgaccttatcttcagctgcaatgcataatcggaatggtactcctgcttgtggtgcttttaatacgggagctgaaaagaag

SEQ ID NO: 77430 - DNA, 373 bp, Zea Mays
cgggggcttgaaggtggatctgaggcggaaggggttatactggttcaggctagagccctagtccagtggagtgctgacagtagtattgtttgggacgtgttacagttgggtgcttgtgtgaagttgtgcgtgttcccggatgactttcggatgggggttttcttgccattttatagcccaatggtagacattacaatgagggctagtattatataagggcggagttcggtctcctacttctaggtcttgtagcccccttggtctcgcctgttgggtcgtgcttctaggcctcgtagcccctatgaagtcgtttgccgaggtgcaccacgtcatacccctggtatggcgtcgtgtcccatctgccttccagttg

SEQ ID NO: 77431 - DNA, 1275 bp, Zea Mays
atggggccttcccatttaggctcgagttttccttgggattctattctgctgatttggatgaggatgaggtctccctcgtcgaactctttaggagtaatagtgttgtccctctaggcctttgtttgtgcttgatatttgttcagtgcttcgagggcggcgacctgatccccatcgaggaggtcttttgttattgactcgttgatgtctggtgtggcctcggtgcttgtttggggtgatccatgcttgagctcttgcaaagtcatggcctcggatccatacattagtctgaagggggtgaatccagtggctcgagattctgttgtgttgagtgcccagatgacttcgggcagttgctcagcccacttgccctttttgtcgtctataagtctcttctttatggcactgaaattttttctgttggcgtgctctactaccccgttagattgtgggtggtagacatatgcgaacactgtctttgttctgatggattcacagaattccctaaagtattgattgtcgaattgttttccgttgtctactatcaactcggagggaactccgaagtgatagacaatgttccgccagaagaacttctggctgtctttgctgttattgttgacacagccctggcttcaatccacttagtgaagtattcgattgcgacaaaagcaaatttgaggtttccttgcgcggtgggcaatggtccgatgatttcgaggccccaacgatgcagtgggcgatgagttttgtaaattgcgaggggcacccattcgaggtgaaattttttggcacactttggaggagtggagcactctattggttgcgcatataatggctggccaatagaaaccttgtcacatgactttagcgacgagggccctaggtcccgagtgtgatccgcatgttcctctgtggacctcgcgaaggagttctatgccttcgactgttgtgatacatttgagcatcggctagcttattcccttcttgtatagctttccatctatcgtagcgaagtgatggcttctgtgtttcaacctcttggctatgctttggtcagaggggtgataatgaccttgaaggtataaggtgatggatgcatgccagtcttcggtcattatcagatgtacgattctgcggccgtcagggtcttgtgttatctgcaggccttcggggtttcttatagctggtgtgccaattgtgtggaagaacacgtcagatggcagtgggtcgcctttcgtcgctgctttcaccaacacgtcggcctcttcattcttg

SEQ ID NO: 77432 - DNA, 474 bp, Zea Mays
tcgggaactcttagagtgtgtgactgtccagcgggccgagagctcagcctctcggcttcgagaacctgcctcagagcatcgggcggggccctctcacttcgagagggaggcctcagtccagcccaaacccaccaaagagaggctccttgtggtacgagatcacttccaggataatcaccaccatccaggggtccacgaccgcctcagcgggtgtattcaccaccacgaccgacaacatgagacacgcgactaccaccctcggcggggtggctactacatcagcagggaggatcgaagcccctgccccaagccgccagatccacaggtctttagcagggccattcacagggtgccctttcctcctaggtttcgagccctaaccaccatcaccaagtattcaggggaaacaaagctgaaactctagctcgccttttaccggctagcctgtcaactcaggggaacaaatgatgacaa

SEQ ID NO: 77433 - DNA, 314 bp, Zea Mays
ttctttgctttgcttgacttgaccacctagcctttgatgactttggagtctaatttcaagaccgcccttcttacaaccattgaatccttcaaaggaagattccatccttcggaccatgtcaagatacttttctaggcctgagttatttgctttgcttgacttgtccacctggcatgtgatgacttgggagtctcatttcaagaccgcccttcttacacccattgtttttagtttcctcaatcctaggagtagagcttcgtattctgctatattgtttgaacactgaaactacatcttggcaacatatgaagttc

SEQ ID NO: 77434 - DNA, 435 bp, Zea Mays
tgttgatcaactaaattgtcacatgcacgcaaataaatagaaaatagtgagtgcaatacacataaaaactatgcaagttagaatatcacatttgttattttagaatatttcaccttaatcgtttttccattagctagccttctaacaacaaaccttcaagggcattcaatactagacttgcataaccctctaaatctttcctttgatgacttatctatgcctagatcaaactcctcattatagaaaattgactcacggccaacctaaattcatccattgatgggtacattgtgccaatatccattttggtgatccttatcatatgtagtcactatctcatttggtattgaatcactaatagtaatggcaacatcatcaatactatcatcttgctgctcacgcattgtacgaccatttgtttgagctcactttctc

SEQ ID NO: 77435 - DNA, 488 bp, Zea Mays
gccggagaagaagaggtcccgcttgccgtcgatcatgagagagcgcccatcgtaggtgacgacgctgcctttcttcgtgagattccactccgccgccgcccatcccgggaggaggagaacgagcacggcggcggccaccagcacggccgcggcccggacggtcatgtgagccggaattgcgggaaaggcgggggagggggggtacgagaggtgaagggcagtagggcacgcaggagaagggaggcgaagctagcgagggtcggaggaagaggtgaccgctttgaaggggacgggttcgcggggcgttgtggtggagcggacgcgcggaaatggaggagctgcgagtggaggtggacagcggggtgcgctgcttggtcgggcatcgcggcaaaagcttgcgagcggacgacggcgagcaccgagcagggtgggaaacggtgttcggtgcgctggttttgcgcagaagtaatgttgcaattattatttat

SEQ ID NO: 77436 - DNA, 394 bp, Zea Mays
agttggtcactaagatcctcgctaatcgtttggggccatatcttcaagacctagtggcagctaactagagtgcttttattagaggaaggtcaatacacgacaatttcatgctagtgcaacaatcgattaagttccttcataagaggaggatctctagtttgctgctgaaactggatatttccaaggcttttgactcagtctcgtgggcgtttttgttggaaattttgacacatttgggctttggtcctgtttggcgtaatctgatctccaacttgttattcacttctactcaggtgctcctgaatggctcgcctggtaatcatatttttcatcggagaggtcttcgccagggagatcctctttctcccatgttatttgtgttggttatggatgt

SEQ ID NO: 77437 - DNA, 366 bp, Zea Mays
aaataatgtactctcttattatacaaaacaatttgtactttccaattactaattcacgggatctccggtcacatagattgggttaccactgtatgataacatcacgtgggctccaatcctatctcccttgatgctccatcaatcacagcacgtgctaatccctttgtaaaagggtccgccaagtttcgagcaatattaatatactctacggcgatctcctcagtatttctcaaatgccttactgatttgatacgtcgtttcacatgtcttgagaattttgcattttcctttgcattgcctacaattgtgatcacgctttgattatcacaatgcaatagaatggctggtaccagtttatcaaccttt

SEQ ID NO: 77438 - DNA, 540 bp, Zea Mays
ggaaattacgaatcaaaggttgtctggaaggtgggagtaaacctaagacaaccaataaagaaggtggtaggcaaatgaaaagaggccctatacgatgcagaaaatgtggagagcttggtcacagacaaacaagttataagtgcccactaaacggtaccaaaaaaaagaaataggaaacagaggagtcgcaaatatgcgggtgcaaattaaccttcacagaccgacatttagtctccgaagtctacaaatgataggtacatttcacttataagtcttttgcttcaaatgtcgtcatataatgactaattaaaattttattttgtagtagccttgtacttgtgtcagttagtggcatccaaacttcaagtgcgccaagtggagaaggtggaccatccactgttttagaaacacaaggtgcatcaccaagtggagaaggtggaccatccactattttagaaacacaaggtgcagcaccaagtagagaaggtggaccaggaaaagatggaagacctcttttattattaggaccatccagtgtag

SEQ ID NO: 77439 - DNA, 674 bp, Zea Mays
atttgggggaaaagggcaattgggtggctctggtggacaattggaggcaagtgctggtgcgttggacgcgtaattacctagtggagtcgacgacacactcaatttctaggatctgggggcattggcccgtgaattagagatggcgcggtggcggctggagagaagggggtgcactggcgcaaaggattggtggctttcactgtggcgaggtccccagcggcaacgaatacacctaagaccagttactgcgacgtggtagagcacccaagtacgtggcgcactgtggataggtggctaactccggtgagtcatctgaatcggccgcgagtcaagagaacacgacgaccggggcggaatagtggcctaagttcatccacgatgtgatatttcttacccttaagagttatctgcaccccacagagcacgaatcgcaacgacgacgaggatcacggtgtaggatcaccgacggcgaggggatctgaacccaggatcttttttagctactgtaccatgggaaacttgttcagagtgcctgacagacagaattgcagtgcccagatctcggatttttgtgtgagaatttgctaattcatctgtaacaaacttgtagccctatatactagctacaattgtgctatagggatcttgcccatttgcttatctccttgcacaag

SEQ ID NO: 77440 - DNA, 571 bp, Zea Mays
gtgtaatgagatacttgaaatgtacttctacatatggacttcactatattgggtatcctgttatactcgaagggtatagtgattccaactagatctcatatgtagctgagatcaagaccacaaggggatatatattcactattggtggggctgcagtttcttggaggtctcgtaaatagactatctcaacaaagtctgctatggaggcggaacttgtagcacttgagtcagccgctattgaggctgagtggttgaaagagttcttgatggacttgccaatggttgctaaatcggtaccaaccattcttttgcattgcgataatcaaagcatgatcacaattgtaggtaatgtaaaggaaaatgcaaagttttcaagacatgtgaaacgatgaatcaattcagtaaggcatttgagaaatactagagatatcgccacaaagtatattaatactgctcgaaacttggtggacccttttacaaagggattagcatgtgctgtggttgatgaagcatcaagagaaatgggattaaatcccacactatggtaccatacaatgacaatccaatctat

SEQ ID NO: 77441 - DNA, 342 bp, Zea Mays
agatcatccgccaaggggtgatcgagatagcatctctccaaccttcgcctcaggcccccactgtaagtactctagatccatcttttaaatcttttatagaacatcgggggatcagtagttaaaacaatatatagatgaatctattaaaggttagcacttctgtatgaagaatttaccgtcccgaattttccctcatatgaacctaatacagagccagttttacctaacacattggctataaatgggtcatcactaacccagccatcatatggtatgccgatgaacacattcacaacacaaccaccatcaccactgcctaacacacaaccaacagggcatgac

SEQ ID NO: 77442 - DNA, 677 bp, Zea Mays
ctatttcacgaggcatagaggtcgccctaagacgagtaatcgtaagcgtgcttatgctggatcgagtagacgtgagcatgtcgcaccgatttaagtcactaccgacttaaaccgactgctctgttagtagggtctagtggtcaccctgggttaagtaagcgtgagcatgtcacaccgccttaggtcatcgccgacttaagtcgattgctccgttagtagggtatagtggtcaccctgagttaagtaagcatgagcatgtcacaccaccttaagtcatcgccgacttaagccgattgctccgttggtagggcatagtggtcaccctgagttaagtaagcgtgagcatgtcacaccgccttaagtcatcgccgacttaagccaattgctccgttagtagggtatagtggtcaccctgagttaagtaagcatgagcatgtcacaccgcctttagtcatcgccgacttaagctgattgctccgttagtagggtatagtggtcaccctgggttaagtaggcgtgagcatgtcacaccgccttaagtcatcgacgacttaagccgattgctccgttggtagggtatagtggtcaccctgagtcgagtaagcatgcagattgacaataaacagttcgagtgcctttgagaatgaagtctttttattgatggtgtattatccaat

SEQ ID NO: 77443 - DNA, 517 bp, Zea Mays
cttctccacaaataacactggggctgcccaaggtgaggtacttggtctgatatagcctctctctaacaactcatcaatttgcttcttgagttccaccaactctggtccggacactcgataagctctcttggaaataggagcggtgtctgggataagctctatggcaaattcaactttcctttcaggtggcatggctggtaactctttagggaatacatcagggaattctgacacaatcctaattgcctcaatcggattggactccttgtcatctactgataaatggtgacaagctcctccttctagtttagataagtatagcttggttactatcttctttccggatggggacaccaacttaactgttctcttgtcacaactgacagtggcttgattcttgtgtagccaattcatccctaggatgacatctaacccttgagttcccatgactactaggctagcggggaaggctatcccccttatttcaatccttagattcggacaaatcctatcggac

SEQ ID NO: 77444 - DNA, 615 bp, Zea Mays
gtcaaattggcttctataccggaaggtgtatcttagataaaccaaaccaccttcgctggagccaacaatagtttctttcggcatctcccagtcattcacatgaggccacaccttgtaagcaatgtgttcttgttccaaatccctggtatcgatgtaagtgcacacggtgttgaaagccattaaacacgcttgcacttcgttcccaattgcaatggacgaccttctaatgcagaagcgtgaccatatgggacgttgaataatgcacctcacatcttccctcactcagatcattcttcacatagaaccattgtttcatccaagagcccagccatttctttcgaaatgttggcacgagatatcttgcatcagagcggggcacgaagctatagcacccgaagttgttatggtactattccttcctagtttcctttgtctggtaatataattcatgaatattacagaagcacctagcacctggctctagcccttggctcctcatagcccaaataaaaactcccactttaattaaagcttcaggagtaagatgatgaaggtatatctcaaatgtctttaacacttcaatcagcatcctgtgcaaaggaaaacacaatccag

SEQ ID NO: 77445 - DNA, 1052 bp, Zea Mays
gggagagcaggtggcatcgtgtgtttttctgttggtgcagttggctgaggtcgggctcgggcgagacggagatttctctcaaggccgaggctgggttggaacactgatatgcagtcacgattggaatggttgaaacaacagttggagtggggaaatagcgcccgatattcacgccctgaccgtcgttgtgggtagtaaagagtagactaggccggggccgtgtcaccctttgttgactttggtgcccacgtcggggtagatggtcgtacagactgtattaaatgtacacattctagggtctgagaagtcggccgaggtcgggctcgtgctgggaccttgcctgagatgcgtttctcacccgagggtgtcctcgggtgagtcgcgaacccacgcaggcgtgctgttcgccgaggttgggctcgggcaaagcatagttgagcggccgacacgtgatgcctcgggtgaatcgtgattcaggtcccacatggccttggaaggctgggagcgtgtttttctatgatccctcatttcttgggtatctatgtaagttagggatggaatctgggtacccctaattatagtatctgatagtagcccccgagcggggtgccttttctggtttttgaaagttggtagattttatccgatgggtgcgcgcgagcccccacgtcgggtgtagcctcggaggagtggttactcctacgaggtcttttatgtttccttctatggacttcgttgatctgtcaattccacacaacttggccggagcctgggtgccctctgatcctctgcgttggtttgttgatgctatcaacaatttggacgcaacctaggtacaagggcagccccgagcctctacactgggcgagaggatgatcagggattgccttgacttttgatgatacgcctctctgtcgcctttccacaaggaggaagagggggaaggcaccatgctacccttagtgggcaacgagcatgttgttttctggcggggtattagcggataatccgagtggaggcccgagccccatttgataggggtcggctagcgg

SEQ ID NO: 77446 - DNA, 742 bp, Zea Mays
ctctgttgaggagtattataaggagatggaaaaggccaagattagagccaatgtgtatgaagacgaagagcaaaccattgcatgattcatggctgggttacaccgcaacatttagcgcattgttgagtttcagccgtatcgacgtcttattgatttggtacatcaagccaccaaacctgaacgccagctgcagcaagatgctaagaacaacaaacccttatcatatggtgcacgaaccatgactagaggaagctcaaggtttactgttgcacccttagcgtcaaaaggttcaactggagacatgcgatcccacattcaaagcaattatagtggaaagaacgctgatgctccaatcatgggttctaaatcagcagcatccacttctacatctgtgggctcaacatccaagagtagtggtattcagtgcttcaaatgtggaggtcatggtcatgtcattaaggagtgtccaaataatcatgtgatccttgtgactgatgatggagaatatacatcagctagtgaagagggaagctgaagcaggaaatgtagacgacactaataaatttgaagaacatacgagatgtgaatttgagcatggtaccgctcttgtggttacacaaatattgagtgttcaaaagaaagaagctaaaattggacagcgacataatctttttaaaacgagagcaaaagttcaagacaaagtagtaaaggtgatcattgatggaggtggctgtcataatct

SEQ ID NO: 77447 - DNA, 495 bp, Zea Mays
gcgcgacaaggctaaggacaaagctgttcgcgctggatggattttgatgaggaggcccagcatcgtggtgcccgacgatattgttgccgatgtcaaggctatgcctgatgcttcgagtcatccttcctcttccgtcgctcctgtgaaagacattgctaacaaagatgtttcgatgcagtgatgtcctgcaaaacattcgatgtaatatgaattctatatgtatgtgatggttatgttagaacttgaatattttgtgagcagggcgctagaacatgctcctggtgccaacaagtaaaacattcttttttcctggagtgctaattgttttgctgttagggtatagcagtcaccctgaacaattgtgaaagcaagcgtgccatgctggttttaaggcgttttctgacttaagccgatcgcctggttggtagggcatagtggtcgccctaagataagtagtcgtgagcatatcgcatcgtattaagtcattgccgactt

SEQ ID NO: 77448 - DNA, 469 bp, Zea Mays
gcgggtttgattagagtttagggcccctttgcgtggtattgggcagtccggccatggggctccgtgcttcgggcggcgttgccggagtttaccgggaggaggatgatggcggggtcccgttggatctccttttcatggccggatgtggtgactgcgtagcgtttcgaataggggtaacgggaaccgtccgatcgggatcggatgatggtcataactctgggattcattaaaccgggaccgtcagatctagatccgagggaccacgctgagtaccgattcgccagtgtccagatctaatcagatccgttgatagttgatccatcggcccagatttcaggataccctttcgccctgactattttggtaaagagccctcctggaatttgagaactaacccgctgtctagttaacaatgcgctgagtcttagagacttttacactagacccccttctgttctcagaatttgag

SEQ ID NO: 77449 - DNA, 836 bp, Zea Mays
gggcgatgggggccctcctgtaaagcccaaaatctgtgtaaaaaaactagataaataagtaaatagtaaaacattgaattttcccgcgggcgcctgacctgttcgtcgcgagatgatcgggttccgcttccgcccagggtataaaacctaagctccatggtcgccttgcccataccatggctggttgccgggcgccccttttcccctcggcactcgacgctcctccccgttgaccgcacaccctaggcgtggtaacggatcccatccatggcgccctcggatgctgggctttatcgcggctgggtatctgtgggaagaagacggtgccttggacgccaggaaagagagagcatcaaactgcttgtgttgccgccatgccacgaggtcggccttcgtcgcttcaacccggggaccaatcgccaccgcggcggggtggctactttgtcaggctccatctttttgccgccatgggccgccgtggggaaaacccaatgtgcgccatcgttcgaggtccgatccgtgcgggggtgcttcaaggtgatgtaaggaagaagagcgatagaaactactggtgctgggtcatgtgatcgacgcgaatttgccgtcgtcgtatcagctccgccgcggatccgccttgatgcgtggtctgcttcgtcggtatactaagcatcggtaaggtgtgtcttaccatgatctcctcaccgcctagcgccgttcggggtattggttgggggcagaatcacggagtcgtctcacgccggcgaagttgccgccgtgagggcttggcggcgccgcttgggcagtgtcaagggaagtggatgagagctggagcgttg

SEQ ID NO: 77450 - DNA, 436 bp, Zea Mays
cgcttgggatagcatcaattgaagaaaaacatgttcaacatcggttgagattgtttggacctttccaacaaataaagacctctagaggcgccagtgtgtagtgagctcctaaggtgcgatagtaatgagaaaagaggaagagaaagacaaaatttgatatgggaagagacagttaaaagagatttgaaaggataagatatatctaaggatttagtcttgaataggaatgcatggaaaacagtatttatgtggcctaattatggcttatgggttctattaggtttttaactctagcctatctcaacttatatggaatagaaggctttatttttgtcgtcttcgtttgtatccataaacattgttcgtatccgaagtttgcaacccgccaacaaaaaaccgatgactcagtctacctctagcaatgcacaccctttgt

SEQ ID NO: 77451 - DNA, 897 bp, Zea Mays
tggagagcatcactcaccctccaggattatggtgctcgcacgaagttgcttctgcgaaagcgcaggtggataggtcggcatagagactgcacatggcgccagtccgcggcgtcgcgaccacgttccaggcaactagcaacggtagagctcaagaactaagcatcatgagcttcactaaccttaaaaaagtatggaacaaatagtatacgagtgaggaatcccttgagcatacctgaccacggcgaggtgggcaaactgatggcgtggtcactacagaggagttggcgtgtgataaactggacagaataagcatggtggctggggagtgggtttacaccgacttgaactcaagagctatgtccttcttgtgatgaacacaagccaaactcaagggcagggagaaaagcttcattgatttaagccctaagacaaccgaatgaggaggcaggtgtccctacacttgtcaaaaactcagtgaagatatattcccagggcaccaacagcacatggacaaacctacgtggcttccatgctcaagtaccacgctagttcaaacacaaagcaaggacactgatcctggtctggaccacaacacatgatcttggtctggaccacagcacaacacaaatattcaattgcctagggataagggtaggagaaatagcagctaggtctcccactgcggacgagtaccaatgtccaaggcttgatattctaaaggggtgaaaccattagagcctttgttgtccagttttgcagctagcaaaccgaatagacatgtattctacatatggataggttcaaggtatccaaagatgatattttttgtagagggagactgaacctcaagaccctttgttgtctaccccaagacttttcttagtttgtgcacaaaat

SEQ ID NO: 77452 - DNA, 495 bp, Zea Mays
tcagtatcctagagcgagtagtgaccataccatttgctacgacgtttgacacttacttgggagtattttagaagagaaagggtgaaggaaagccggccgtgtcaagctcttttaacaaataatacgcataagagacgatgggtctttatttgcaaacgtggaactcactaagctgacggcaggttggggaacatgcatatttggtgccaacccttcaccaagtataagatatatgcatatgaatgggtacaagggaatggtacgttataagtacattcggagcacttgttggattgggtgaatcaaaagggacgtacgtggtgctcgtcgttttcgtcgttccaggagaactaaatactacatggaaatcttttgctggcttcctgaagagtatcactgcatgaaagatatgcttacgtacaagaggaatatatggcgagtattatttcgtagaaaacgtctcatggaaggaggcgatggtagctagcctcacgc

SEQ ID NO: 77453 - DNA, 423 bp, Zea Mays
cattttcctgattggaacataactttggtgggcatagaaaaacatacagatttgtgtgccatgattactccttaatgtcgtgaaaattcagtagtacagtgtggttatgtatttttcataaaagtcttgccatggccactactgttatctcctggtcaatatgattcatttttactgttttcacctacagagtgcttgtcttttcactcctgtgtaagtttgctagcaaacgctgttttcaatatgccgcggagggtttctccatgagagccggtaaaacattctctaccctaaatatagcgcacatatgtgtccggtaagcgtccagcaacaaacgctaaagcatccgctataatatagcgtctctttctcgccctctatatctggcggacacacgacactcgctatacactgttcaatcat

SEQ ID NO: 77454 - DNA, 482 bp, Zea Mays
cgcccttaaaaataatctcgtcctcgagatttaagaagatgtagggaaaagatggggaaaatctatgcgaagctcttcttctctttcccatgttgcttcatcttcgccatggtgactccattgcactttgcacatctttatcaccttatttcttgtaactcgagtcaatgtgtcaataatattgatcggatacttcgtgtaagtcaaatcaccctgaacactaagctcttccattggtaactgttcctcagggacacgaagacacttcttaagttgagacacatggaatacatcatgtacatctgatagattatcaagtaacgcctaaagatcaagaatggtccaatatagcgtggggacaatttgccctaaaccttgaatctcctcattccacgaagtggtgacaccttgaggtacacataatctccttcaaattccagtggcctccttctattatcagcataactcttttgcctggtttg

SEQ ID NO: 77455 - DNA, 971 bp, Zea Mays
ccgacccgaggtgaccctagaacaggttctaattggattaatccgaccctgcatttgcctgaccacggtgatggcgaacaccgtacacagaccaagatgttccggttgattaagtggggtcaagctcaatgggtcaagcagacgacgatcgcaagcatgtgtaggtgctaaaacacggactagaagagcgacggcggacctggaggcggctggtcacatcacgacgtctcatggtggcgcagatagatgatttgggggaagaatgaaattctccgtctatggtggctaattgaaggtgggaatgggtgctctggcttcatgataacatggcgcaatagaccgagtcatcaatatataagggcgctaagcggtggtgtccaattttgaaagggaagaccggtggccgagaggagaggtgagtcaccggcgtgaactatcttggtgttccccggggtaatgcctccgacgacgaactgacctcctacggatatctactgcgacgtggtagatcttctaagcacgtggcgtggctacgatcgacggtgaactctgacgaggacacctctgtccaatgcacgacaagtgtcacagtgaacagtccgacgataagtctctatctctttcccgagttgagatctttccttgtccacggttatccgcaagtcacggcacacgaatcacgatgatcgacgtcaatcgcggcgaagggtcaccagcggcgagatgctctgtatcaaagatatttctgctactgtaccattggaatctctgtttgaagcgcttgatagagcagaaggaagcgccaagatctttaatttttatgtgagcacttgctaatcttcttgtaagagatttgtagctctataaacccacaacaattctgctattgtgatctggcttatcttctcactcctttgaacaagaatcgagttccaagttgatcaattctcactgctaataaaaattcatgc

SEQ ID NO: 77456 - DNA, 708 bp, Zea Mays
taggcaaagcgtgaagagaggcccgggctgtcacaccgagcgagaagggtcctggtgggcggtggctagatccttcacaaacagaccaaacgggtcaaactccatagaaaaagagttgccagtagtgaactgatgaaaggaaagaagattttgaatgatgctaggggcaacaaggacgttggttaaacgaaaaggaccgggaaggactacgtcacctactgaggtgacgggtagggcatacccgttttttgacgatgatggaagaaggaagggaggggtgggggaggttgaagacagaatacctgcgtccgaagtggtgtggtaggaggcgtcggagtcagccacccagtcagagaccgaggtgggtggggccagcatcatcgtggagaaggagctagcgagagactgcacgtcccacccattggcctagggctggttcgaaggccccaagagcggcaggggcccctgctgaggctagggaggagtcaagggcaccgccggaggtgcaacggcaaagaaggcctgctgagaggtgagggggcaaggggccgaggcacccacggatggcctggaccacatgtgaatggtgccagttcatgagtttagaaggatggccactgagaaccacccggagagccaccccagtcgcccaatgtgggggccttctccttccgaaggtcctcaaaaacatacttaaccatctgtttt

SEQ ID NO: 77457 - DNA, 1062 bp, Zea Mays
cagagttttcaatccaagcctgtcattgcgcaagttttgtttcagtgtacccaagagccagatgaataccttcagtcatttgtccgaaggttcctcaggttttgggctcaggctctggcagttcaggatgacatcgtcatcaaagttatggtcaaggggcttaggccaggaccaacgcccagtattttgcaagtaagcctcctcattcccttgaaaagttattgcagaaaatggacgagtacataaggactaataataatttccatcaaaggagggaagagttccacagatacaccaaagtcgccagggaattcagaggaagaattcatccaagacatgtctgaaacatcaataacccatcatggggtgaggaaagaatgacccagtcacaaggtcattcaggacaacagacaagctctcagcagcaatcttcgcaaaacacattccgaccacctgctctgagaggaaggggaggctgaagctttattggcagatttggtgcgcctccaaggaagccattctatttgttttgtggtgaggacaagggccacactacaagaacatgccatcacaccattaacaaacagaaaaagcttgctttatcatctactcaaccttcatagctaaaagaggtgttcagtacatcctcatactgttcaccctacatcccacaatacgttcaaactcagtcataggagccaaggccaagcctgtcttcggtctcaaatgcctcaagcaacccagtgatgagtacatggtcaccagctgcctccttcgtcctaggaccgcctccctatgataaagtccccgctaatcaacccaaattcataaggcaagacctacaacaaagggatagaaggagggatccaaaacatgtactattaacagcatggtcccagagacgaagcatatatactgagtaccctaaggggctaggtaagtgacccaaagctatcaacatgctactattgtatctttgcatttactttcgcaagtcttttcatcattttacaagtcaatacaataatgatctagtatcttcgagcccaaaatgtgaataat

SEQ ID NO: 77458 - DNA, 570 bp, Zea Mays
gggggatgcaagcgcggactcactttaaatggtggatcacgaggatccaagctgggacacaggggttatactggtttaggccgaggccctagtccagtgtagtgctgattgttgtattgctcataagtgtgttacaacaagtgtgtttgtgtctagaaggaagattgtcccgcccttttatagctcaagggtggacttcatagttgggacttgtattctactcgggggtcttcggcttgttgcccctaggctgctctagccctcccggcatcgcctgtgtgggtgtgcgttatgtcctgtcctccctccatacgggtcactgtagcttgctcggtatcaacgttgcggtacccgacgggtcctgcaaagtgggcttacgacaaggtttagggttgtgtccagtacaacttaatcttctgtcataccccttgcgtcactatccagcacgcgtaggtatacacccgatatgtggtattgtctcgttcttttccgtattgtagagacttcaatggtgatgtttccatgactagagttgactgaccccgcaagttagtgagggtatatcgtggg

SEQ ID NO: 77459 - DNA, 531 bp, Zea Mays
tcagcataatatattagatcgtatttggactcaggagtcttgcattgggttgtgtttggattgaggtggcgacccacgggtgggcagtagacacaacatgtttacgctagcatgaaaaaacccatttataggcacgaaaaagcttatattcattaacctcggctcagactctcgatacctaggctacatcgtcgcatccctcacactgtcatagaccaccaccgaaagtccaacaccgtcgcaaccctcactcagagtcactccctcagcactaaccttaatccctaaatcaccaattccccattggcgcaaccttctataggcgtcgccgcagcctcctctagacgtcttcctattctccatccccagtcctcagtctctagccattcacaactcggcacggccagaggagattgtccatgcctccacacccaacgtccgccgatcgacgcccagtgcccccctccacgttcgtagcagccagagcccgtccccacctccatgcccgacacccgtcggtcaaagctcgtc

SEQ ID NO: 77460 - DNA, 476 bp, Zea Mays
tcatgatttctcaggaacaccaatagcaaagcacaggcttaggaaatggctacatgatttctcactaacattaagcacagggttggggatataaatacctaacacattgtaccagtagagattcaggcaatatgttggtactagctaacggtgcgtgaaattggctttgaggtgtccaaggaaacttgcatatgacgagaaccaccgtagaacttgtattagcctatagcactactgtctacagtgtccaaccaacttgtgattgaaaacaactacattaagaaccttagcctcgcgcccagaatagagagacctctgcatcagtgattaccctctatacctgtactctctgagagagcaccaaacgagcatgacagcgatatccggaagagcccaattattcccagtgaacagcgcgagcgaccccgggatgaagcagagcaccccatttccaatctggttccgtgcaccccccg

SEQ ID NO: 77461 - DNA, 669 bp, Zea Mays
gcgggtcttccggattgctgagtcaagaatctttattggcttctcatggtactgaagatctttctgaatctgtattgcctcttcctcgatgtgactttctggtgcttgcaggcatttgcggagctgggacacgtgaaacacattgtggatatccgacatggtttctggtaattcaagacggtacgctgcgggtcccactctgccaatgatgggataggggccgacgaaacgtggtgctagcttccctttcacctggaatcttctgacgccacgcatcagggagaccttgaggtagacgaagtctccttcctcaaatctgagttctctctacctgttgtccgtgtaactcttctgccgactctgagcttcaagtaatcttctgtggatcagggcaactttctcctcagcctctttaacaaagtcaggtccttccagtgcctttcccctacgttggaccacatgagaggggtctggcatttttgtccatacaatgcttcgaacggtgacatcttgatgctggcctgatggctgttattatacgagaactccgcataaggcaaactggattcccaacttctatcgaatgttaacacacaggctcttaatagatcttcgaggaccttgttgaccctttctgtctgcccatctgtctgagggtgataggcggtg

SEQ ID NO: 77462 - DNA, 787 bp, Zea Mays
gtccacgaagcctggcccgtggctagtctagccaagcgtgggaccggtttattggatcaggaaggaagtaattaggaggattagtagaagtgctccaaagtacaaggggcacttgatttgctgtaatcatcattgaagaaggaataaacctcccaggcgggtgggtttcttttcgactatggcgactggcgattcagccgcagccgccgtcgacgaaaccaccgcgccacttcctcgctatcctcagcgccccagttcttgatcccaattgctcttccgatctccactatgcactcctcactgccacgcagcatcacaattcacacacacattactgtgcttccaaatatccaaggccactagggtaatgagtgaattaagcccttttttcatctccttaggcacatccttgattgccggttccaccagcttgaaaatttgctagcagaaaccggactgagatggggctcaacccaatttctgaagaataacaaaccatacctgtctagcgaagatgcaagagatcaacaagtgctggatggaatctcttgtgtgatcacaaagaggacaggtcgctggatgaggaaatctctttgctagatgatcaccagtcgaacatatagttgattgcagggcaaatgaaggacttgcaattttgtgaagcccagctcttccaaattctgctcgatggagcaaagtgaatggagccaagaaagtaagcattgtaggctcatttgctagaataagtactagacctgctgagcttccatcggtgctgatcttcaat

SEQ ID NO: 77463 - DNA, 460 bp, Zea Mays
caaagtacccacaaatgactcgtgttggtccacggggatggtctgtggttttagaggacggccaagagtaagtatcgctggtctagattggacggggtgttacaaccgaaagtagttagtttgctgggacactatcctaggcactcgacactgtacaatgcacaccgaacagtccggtgcaccgcaagctggtgcaagtctagcttgcttcagctaaacttattttgcttcttttggacctgacttaactgagttcctggcacttaggcaaacatgtttatcacacaaaacaattgtctaagtgtctagaactttacctttatacttgatccgtctagatttgcattatgtcctttttccgagctcaatttgtgtcatatacctttgctcatacaccatgctagttaaacataatgtgttgtgcatctaatcaccaaaacattatagagatggcccaagg

SEQ ID NO: 77464 - DNA, 683 bp, Zea Mays
ctccggttcagtgcaattggttgggccgacgagcttcaagggcacacaggaatgctagaacaagagcgaggagaacatgatcggacctgtggagcgctgaccgcgacgagctcacacacacggtgttcttgaccgatttgggggaaatcccaaattggtgagctctggtggacgatttgaggcacgagttggtgtattgggtgcgtgactacctagcggagccaatggcacgcttaatttatagggcacgagggcgttggcccgtgaatttgagatggcgcggtggcggctagagagaggggagaacactgtcgcaaggaattggtggcctttcaccgtggcgagctcaccgacgatcaacagacatgcgtaatatgagttactgcgacatggtaaggcaccttggcacgtggcgcgcggtcgataggcggccaactccggcgaccttatctgaaccggtcgtgagtcaggcggacacgatggctggggttgaacagtggcctaagttcatcctcaaggcaatatttactaacccgagcaactatcagtactccgttgagcatgaatcgcagcgcctggcacgaatccgagcgcatggttgccgacggcgaggttcacagaaccaacagatcttttgctactgtaccatcaagaactgcttcagtcgttctgacagagcaaat

SEQ ID NO: 77465 - DNA, 580 bp, Zea Mays
catacaaagcatatgttacaatattatctaacagccccctcaatcataactttactaagttaagattgtgtctgaaattatgcagcttgtctctagtaagagccttggtgaatccatcagcaacttgatgatgtgttgatataaactgaacctgtagaagtttttgagccacacgttctctcgcaaaatgaaaatcaatttcaatatgttttgtacgagcatgaaacacaggattcgctgtgagataagtagcccccaaattatcacaccataaccttgctgcaggtgatgttggaacttttagttccttaagaagtgattgcactcagataacttatgttgttgcattggctagagcttcatattcagcttctgtacttgaccttgacacaatgacttattttcttgcactctatgatacaagattactgccaacgaaaattgcaaatcctcctgttgatcttctatcatcaatgtctcctagccagtctgcgtccgagaaggcactcacaagcatagatcggcacttgtttatgctcatgccaatatcacacgtgagttttacatatctaagaatcct

SEQ ID NO: 77466 - DNA, 685 bp, Zea Mays
cttttctacagaaaacatggtttagttcctcaaacatacagcacgacaaaaacagtgcgtgcagcccaaaacagcaattaatagaattcagcttctatttacttcaaaaattgccgcgttctagagactcgacttattctaacttatatcaaggcacacttaagcatagtcacacaatagatgacgtgatggctacgtagtcatgccatcacttcaccccacaatcccaactaacaaaataactctaaccgaacttggcatttagccgatcgattcctaacccatttttcataccaccactacacgacatgcctaatacgttaaatgacttgttcacaattcacatacatctttaccaaaacattcccacatcgcttgcaacttagcctaagcttcactacacaatttcaagacatctacttaattcatgaatatcatcgtcacacacatcgactcgattcgaattaaccacacatgtctatcacataaatggagcatttcaacaaatatcctaaaacaaactaacttcatcacacatcttgcattacaaccctacttgacttatttgaactgtctactcaaaaccgtgagcacaatcatacactatatgcgaagcataattttaatgaacgcataatacgcatcgtcacgacttgacctataaatatagagaaagcgatgacta

SEQ ID NO: 77467 - DNA, 624 bp, Zea Mays
gaaaatatgctgcgaaggggtatcgatggagatgagccattggattagatctgtacggtctcggtttactgatcatgtaacctaatcgtggccaccgattacacatcccacggcgcgaattcagatcagtcaaagaggtatcctggagccgatcaaagccacccatacccaatctgacgaccacaagagccccggccgaagcgttatccacccatcaatctaggtcgatccctactcgatcaacggcctagaagttgcccacgcatccaacaagctcgagcccccctttgatctagattctacgacctagattaaccctggtcgaaagggtaccccacttcaaatcgtggtcgcacatctggcaacagacgatcggtgccccatcttcctcctcacgcgcgcatagcgcgacggagagctctccccaaggcggcacttcacatcagagttgcgcccgactgtgctcccagattcatcaacgacacgtctagcgcggatgcaagagggaacgacggtgaacataatggggatctacttaccatgatacaagcagtgaggtgccccgcccacggcaatgcgcggcccgccacggtcatcgtggcaccggtgagaaattgatcgccc

SEQ ID NO: 77468 - DNA, 342 bp, Zea Mays
cacggatctgttatttctgcatcacggactccccccactttgaaaaaggtgtaagaagccgccgccgccgccccacccattggccttcctccctgggatagtgggatttgtgtggtctcaagttttctgaatccccaaagagtggccaaaagtttcagtctttcagtttcagaaaaccgaaaagcgactcaacatcctgtatctgcaagctgcaccggtacaccatctacagcgaggcagctagttcgtcaattaaactggtttaccgccggcgccggtcaaacactggatacatcatacacggcgtaattacacgcagtagtggcaggacgcgaaccaaag

SEQ ID NO: 77469 - DNA, 320 bp, Zea Mays
ttcccgtgaacctcaaattttagtgagacctatgcaaatgtggctatgagaatcattgatctacgctcagatttatcaatactcctaccaatgatactactgagtaaccgagagacaaaatatttcgttgacaatggaagcatgtccacaaggccacaaattttctggaaccacatgcaccaaggtttgatatacatcaataagatactactcgtttaatctctcattgacgaccagtcttaaaaaggtaaggtagactaaacactatttttgtttcatacgctagcacttttatggatctatgcacatgctctcagagt

SEQ ID NO: 77470 - DNA, 352 bp, Zea Mays
cccaaggaaatgcagctaggtcttctccatccaatggtacatcaaagatggcggcttctatagggtcattccctgcaaataggcagcgacctgctactagtacatcagacccgactgaagcttcagtcgctacttcttctacccgtacaagagaaattgggtgccataagtgccatggtcgtgggcacattgctgctcaatgtccaagtagaagaacaatgttgttgaatgaaaaaggtgaatgggaatcagaaagtgatctagaagatgatggaccgaagtttgatgaagaaattcaacctgaagagagtgtgatccaaccagaaggagatcataattgttttatctctct

SEQ ID NO: 77471 - DNA, 547 bp, Zea Mays
gtaactcttcctcgaactaaatgataatcaatctcgatatgtttcatgcgtgcacgaaagactagattagcatagaaatgcttagcccctatgttaccacacaccacaactttgctcctctaggcgcatgaactctaatttcctgcatcactatttgtatccacatcacctctacagtagcattgactttaaccttacattctatttatgtgtttgatctcgagcctcgacatagtcacttgtttcttggcacaccatgatataagaaacggtcttaggaagaccatagaaccaccagtagaccttctgtcatctgagcatctgactcaatcagcatgtgaaatggccctatccaacattggcttggacctacttaacatgacgccagcaacagctgaatgtttgatatatcttataatatacttggcggcagtccagtggtttatagtatgagcatgaagatattaatagatcttattcaccacaaagaaaatgtttggtcatgtcaatgtgaggttttgtaaagctccaacgatactactgcact

SEQ ID NO: 77472 - DNA, 688 bp, Zea Mays
gcacttaggcgtcattatctcttcaacgacaatggcaactacgaacatgttagtgagtgggagttaaaacgatgagaccaaatggcataaaaagggaatagcatgctcagtgccttatgttgcttgcctacttggttgtgtgcaagcaagcttgctaattgggtgctaccttgtgatcatatacaacaacgatcttatagccaagaaaatattgatatggaggagagaaaagagaagcaacaagctaggcatgagagtttacgttgtagtggactcagatattaagtgcatgtgaggtgaattagaaaagggagtggaacatggacaaaaaataataatagtagtaaggtttgtatagacaaataaaaaatattatattaacacttattatattgtttacatagtggagtttaaaatagggagtgacatagatgctggagatagctagagaatgtaggctcttgttttctagctatattcaaatctagtcgcctgaccaaccttaacgatatttgctaattgtttggaggaaattcaataatcaatggcactccttaacttgaccatataagaaatgcccctcattagtaaggcatgagagaaacactactctcactaccacgattctttctagattatagcacattgcctagctggcctgttttcctttttctaatcttaaattgat

SEQ ID NO: 77473 - DNA, 346 bp, Zea Mays
gccaatttaaaatcaaagttagcttcatgaactatgatagcacgaagaaacaacacgcaggtgcagaacttgaccacccaagaaattgcaaaattaaataggtattattagcacaacaacacacaagaagcaaatccacaaggaactggatggaggaaggcagcaaacgcaggagaaacattttgatttcagggctcacaatagagaaaatattacacataacatagcaagacgatgcatttgccgaagcaatctagacttcctaaccaagcaaaataggagcaagcaaaccaagccgtggctcaagaacggggcactaaaaaaccaaagcaccaggtggatcgag

SEQ ID NO: 77474 - DNA, 461 bp, Zea Mays
tttttggattctactgcatgtagatttctataatacgattattcttccaaagaagcatcaacccattttgcatcagcgctatatcaactggagtggttgtgaaggcattggcgatagagaaatgtctttagctctgagggcctgtgaaaataagaatatgaagaatatcatgaccttccactttgattggaatgatgaaataattgatcaattctacttcaccttatggataaaaaatgcagatgaggaaagtccttagaacttcccttacatgaatttctatattgaaggaagttggttcaaggtcagctataggagatttgcacatattttgggattttctgataatgacatagctggagacaaggtcaagattcattattttcgccctcctactagagctgaggcaaaagatcttcatctttctgaaaatgatgagtattggaagtccaccaatatgc

SEQ ID NO: 77475 - DNA, 496 bp, Zea Mays
ttcgcctgctatacggttcggaggccatgaccccgcaggaaatcaaacaagggtccccaagagcaagcgctttcggcctcacccgacgtagacgagctaacctccaaagatctcatcgatgcagaccgcgtcttcgccctgcaggccctcaacaaatatcaagcccaaacgaagacctggcgcgaccacgcagtcgtcccaagggaattcaacgaaggagacctcgtactcgtctgaacgacccagaccgagtcacgaggtaagctggagccgaagtgggaagggccattcatcgtcaagacgaagtcgtcccctagcacgtacaagctaacaacgcaatctggtgaagacctggagcattcctggaacatagataatctccgcaaattttttgtttgattcctcagggccatcacgcccttgtaattaaccaaacattattgttctggcccgtactcttttcctcccggggggtgaggttcttaatgaggcggag

SEQ ID NO: 77476 - DNA, 527 bp, Zea Mays
aaagaccaagaaaacttgaaatcatggcttaggccaattataaacattgaaatacactaaataagctacaataaagattatgaaagcttggccaaaatagtttattaaaaactccaaacaagccattcaagtggaggttcaatggggaaatctgaaattcagatttctgaattttcagctcttgaaccaaaatcgagtgcgttcaccttgatccttagctctaatactaatgctcccattgacaaaaacgtgtctaactaacccctctgtcacatgtcagaagatggcatcgggacgcaagccctagacacgacaaaaccaaagatttgcctcgggctcgggctgggagacagaccagacttcaaagctccaaatctttgaaaccagtaggccaaatcctatgacccccacacaagatcggtagcttatagggaggagaagaggttttgtgcactgaccaaggcaagagcaggcttggatggatgcccacacacgccagaactcgggcagaatgaacgcgcacacgt

SEQ ID NO: 77477 - DNA, 448 bp, Zea Mays
atcacccgacaaggtaagccctcggcggtagcttgggtggatgggcaaggatgtcgaatgtgtagggatacagtctgctacaaactaggagacaaacaagtagataaccatcatcgtctgtacaggataactctctttggtcgagtatataaggccgcgaggtaccccctaccatttcatctcatcctagccttctacattcagaattctcagcttgtaatcctaacctcaataccagagtcaccataggaagtagggtattacgcaactctacgcgaccctaacctgtataaatctgcgtgtcatcctgtcgtgttataacacgaaccattgagtctcattcatcgacgttgtcctaaccaaaagcatcacgagggtaaccctgtggtgtgcggtcggatcacaaacaccgacaagtggcacgccaggtagggggtgcgacgttgat

SEQ ID NO: 77478 - DNA, 557 bp, Zea Mays
ctgattataaccttctggcccatcccgcaggacgaaccaatgggaggcccatcaggcgtcccatgatatgttttagtgtttgtgaggacccggggatatctattccccacagtatgcttggctcatctactcaccatggtgcaatgcacacctctcttggtggtggcagtgagcgcaatagccgatacaattcacctactagtggctcacaccctaagtgatgaaggactagcttagtgtggcagttgcaatctccatctccatggtctagcatggtgcaacaactgctacctttcctagccccgtggaggtcgcctacttaaggtaggcagggtaaggcagtcacacccccacaaactagggtaggacagtcacgcttccacaaactcgatgaagtcgtatagggccacaatgtcgcgatcatatccattgtctgacctcacaatgacatcttagagaagtcagaagttgatgaatgctaacaatgttatatatgcagagagacgggaaaatattcaagttacacgaaaaatatgtgcatgaaagggaaaacgaac

SEQ ID NO: 77479 - DNA, 401 bp, Zea Mays
cagccctctatcttcagcgagcagaaacaaactgctaaggacgtccattattagcacaaatagcatgggggaaagaggatcaccttggcgaagccctctccgatgcctaataggaagaccaggagacccatttagcagcacttgagtggaagatgaagccagcagattcgaaatcaaatttcgccaaatatttccaaagccaaggtgagaaagcacctcaatgagaaaagcccaagaaacggagtcaaaagccttggagatgtccaattttaaaaataaacttgagactcttttattgtgaagagatttaatagcgtgttgcaccatcatgtaattatcatgaatcgatcttcctttcacaaaagcactttggttagcagccactaacttctgaagatgag

SEQ ID NO: 77480 - DNA, 282 bp, Zea Mays
tttcgtattcctaccaagagctctacatgtgccaaggagaacaattcttcaatgctcctgccttgtcattgcaacctccaatgctctgctctccatcactgcccaacaattcagccaacaatccgttcatggctagcgccttgagatgtttctcatattcacctttccattatgattcgaataacttgatgaagaccaacaccaatatttgaatttcattcttcaaccatacgatttgattaacattcatgatcaagtatattaacctctagttgacttgct

SEQ ID NO: 77481 - DNA, 403 bp, Zea Mays
aatacatcaaatcatcatatttcttggccgagccactgcagtccttttagtaaatatgcttcgactgaggcatagtgttgttgactgtgcgagcttcgaactcctcctgaaggtcgcgctgttgcagagtatgattgcgcccttctgactattgattgtggatcagtggtggtggtggtggcaaatggggccaggaagctggggaatgacttgctgaagcaacagaaaccatatgttgttggttgcctacgtattctgggatgtatggggaataacacgaagcaatgtggaggacttgcttcggctgactctgccgcgcctcagcttcgacaatttccttctgcttctgaattgtgacatggcatgttcttgttgtgtggcccttgtcctcgccacaaaaaag

SEQ ID NO: 77482 - DNA, 448 bp, Zea Mays
taagaatgccaaagagggaacatggaggggtccttcggaagctgccgtggaagagacggtaaatacaagtgaagatcaggttcttcgaaagaagcgacatataaagactgttatgaaggtcgtgtgtaagactcctccgtcggaggcaaagaagaaggttgcagtttctaaggctgataaacctgtcgatgtagcgcaaggaaccgaagatagtgggagttctcttaggactaccctatctaaaattgataggcttattgtggatgtagtacctgggaaagaagctgatgatgcgaccgcttctaggattttagcttcaaagacgaagaatattggggaaacttctttagaggaaaagaccttcgacttgaggcatctaggaggtcaagagttaattgaagaagacatatccgaactgaaggagtttgccatagagggcagttatcag

SEQ ID NO: 77483 - DNA, 279 bp, Zea Mays
tgagtccaattatgctcggttacaaaaccttcaaaatgattttcatgttcatttagtttcaaatcattaaatctcgtgagaatctctggaccactacgatgcttgggtggtcccctcatcacaatcgtgtcctttctaaaagtgttactatcgaacctgaacgggtgatcctcaggcaaaaaacatctatggcaatcgaagtaacatatctttccaccaaacttcagttggaagcataaagtgtcttcaacgcatatcggacatgttagaatcccatgg

SEQ ID NO: 77484 - DNA, 598 bp, Zea Mays
ccaaggccctggctcaatatatgcacctatggcctattatcacaggtgtgtaagtggggagaaggggcactaaaactttagaaaccatgacttaattaagtaatgatcatgatagaagggataccctagcttttcatgtatcttcaccttggaaaaggatgctcaaaccctagcacccccctcttgagccattagacccccaagcactggattaatgggaaggataagcaaatgaccatttcatgacttaaacctcatgccaaagttgaagtacatttatatatctacaagaaagagtaaggaagttattccaaaaaggtcccacaaaacccccaaattcagcccccaagtgaagagcactcaagagcaaccaaattttctctaagttaaaaatcagccctcttctaaagatcagagatgttcacttagttgctggcgccaaatccataaggtccaattgacaaaaaggagccaaattacccaaggcacaccccagaaaaatttaaaaccaaaccagaaccgtttgacacggttcgacacaagttttgtctcgggttgaatagtgccgacacccctgacttggcgccaccatatctcc

SEQ ID NO: 77485 - DNA, 350 bp, Zea Mays
ctattcaagaataccacttcgggggaattatacctttattaattttaggtactccttgaacaagtatcacttcttcgtccccattaaaaaaccttaacccccttataaggaaaaagggtgccgaagcttgagtttagatgtaatatctttgaagctcatcaacactccatgatcttgggatgtcgtttccttccatatcctttagtctctatgaacgtggtctgtttgaagctgagaccaggaaggggccttcccacttcacttgttatttgcccgctgtatctggatttgctacccttcagagcacaaggtggcctggtgatatgttcttgagtttcactttcatgtca

SEQ ID NO: 77486 - DNA, 383 bp, Zea Mays
gttgacttcgtatcagaatggactgagcagcaggtgccggataacccagaaaccgcagaagtgtggcgaatgtattttgatggctcgttgaagctgcagggagcaggcgcatgaatcctctttattgcacctggaggtgaacaactcaagtatgcttttcaattgttattcccggcatctaacaatgcagccgaatacgaagctctgattcatggactgaacattgccatatcactgggcatcaagagactgatggtatatggagattctctggtggtcataagtcagataaacaaagaatgggactgctcgaatgacgccatgggaaaatactgcactgttgtccgcaaactagaagacaaatttgaaggtttggaatttca

SEQ ID NO: 77487 - DNA, 380 bp, Zea Mays
tctcggtgagaacctccccaaccatttcgcattcttcagtaacatatgtagcaccgttcgggggagggaatcggggctttggtattgctggctgggggttcgccggtgatggtccgccgtaggggagcgtggggggctgcgtcgaccgctgtcgtgatgcaggaggtggagggtgactgttgatctattgttgaacggttgcgattaaatagagaatacggggtcgtgtctgttggatcgatagcgcgcggataggattggatctagcgattttaaaattcagacaattggatcttgatccgctggccctggtcgcgtaccgatgtgggctgggatccaatggttgagaaataagagtgtgtttggttttaggaataaag

SEQ ID NO: 77488 - DNA, 404 bp, Zea Mays
attggtctgaaccaggtgaaaggtacttcttcaggcctgacctggtaaaagaaactgaagacaaagttcagaaaataatgcataatatgaagaaagctcaaactcgtcaaaagagttatatagaccaacgacgacaacccttatgctttctggtaggcgattatgtctacttgaaggtttcaccaatgaagggtgtatcgcgtttcggggttaaagggaagcttgcacccaggtacattggtccattcctggtgcttgagcaatgtggaccagtggcataccgacttcaactacccgaaacattgtctgctgtgcataatgtgttccacgtgtcacaattgaagaagtgtcttcgggttcccgatcgaaccattgaagtaacagatgttgtccttgaaccggac

SEQ ID NO: 77489 - DNA, 391 bp, Zea Mays
gtttttagaactgaggttagacaccctccatttcctgatgtttgcggctttgcgcaaggcatgtcaaattcaaaaagaaataatgaaattgatttgggataaaaaaaacaaaactgtcgtccaactccttgtagccttcgcatagggaatacttcacccacatcttttcttgatctctttcgatcatggccgatggctgatggctgatgaccaccgtaccacaaacctgacctgcgtagagaaacccttagcacaaagacacgtaggttcagacgttgaaaaggtgtcatcacactaacagcagtccaaatccaacctgctcagcatcctaaacaaaacaccaaaagccaagcaggcatgatgcatcctcatcaacccccattaaccctgg

SEQ ID NO: 77490 - DNA, 909 bp, Zea Mays
caattttgcttaagagtgtgagcaagcttgttacggaaaatttggagataagtgagcccaaagatgggctgtcagaataaaataagctgaagattatatggtcagtgacattggatcatctttggagacaaattatgactaatctattaagaatttgcccatggctgctataacaaagatggagatggtatgttagtctacaactttactgcagagcctcggattagttgccatgtgaatttgagagaaaatgatgcccaaactttgtctgtcagacggactgaataccacttccccatggtacagtaaccaaacggatcagatcggccgcggcagaaagatctcaccgccggtgaccgctgccttccggccttgtgccgcgtgtttacccctttccaccgcatcgccgcgacttacccccgctccccgttgatcgccggaacaactgccacgccactggacacgaattcaccgcgcccgccttcttcttcatttctggccgccgtgcgtcctccccaaattcactggccaccgctttaccctcctataaattgatgaccggggctgttgcgccaagttaccacgaagccaatgcacccacgcttgcctccaattatccaccagcaaccgtgaattgttcattcccccaaatcgactctccgccaccgcaaaactcagctcgccgcggccagctcaactcaggtcagtccaagtccctctgttgcttgttctagcatccctaggccctcctaaagctcttagacccgcccaattgaactagaccgccacccatcgccgggaacacgatgatctagccaccatgctctcggtcaccgtggccagagctccttagttggtcattagtgcaattaagttaggggaaaagcttaggataggtccgatttggtg

SEQ ID NO: 77491 - DNA, 490 bp, Zea Mays
ctgatcgaattctataacctcctagcgtcatgtagagtcgtttggataagagtcttaggtcctcgcgcgctagataattgtgcacggcaatggcgccaccgtcggatcctgggggcgtcctcgccatcggtggtgggaagggagaagaaagccgctgcccgtggatccgttaatgtatgactgcgattaggtgaagggatacccattcgatcaaaagggaccgcgaccgtccgattcggatctggcactcgggactcaatctagtcgttttaaatccgatgcgtccatctcggatcgggtggccgggatcacgtattgtttcgttaaacctagatctaatctcgcacgtccaatttggatcgtgcggctcagatgccctcataccctttcacgctgagcattttacataagagaccttgccctttttagaaaacaacccacagtccataacataggaatctgagtctgagtaccttttcgtttaagccca

SEQ ID NO: 77492 - DNA, 534 bp, Zea Mays
cccatgtaattaccatctcaccctcgttgtaatgggctaggcccaattactcaagttctattaataccacacccaaccctgtttagggttatgggttcttccttcacctagcccaaacaatcagatccaataacctctttccccttctacttctctggcggctagctccctcaatccgctgcgcgtgttcacctcttgccaccatcgatgcctccacactcgcgctctacagctccaccctctagttcgctgctgacgcctccatgctccatgatccggcgactcagcgaccatcccactcctttatggcctatgggcatggtcccacgaatgtgatgtcccattgccggcgacgagcgcaaccgcggcgtgagatccccacggcgagccaaaaacgagaccgatggcacttaggtaggaggaattctctcttctgtttattatctgccttactcttggttcgttacagtatttatggtcacaaaactaggccaccccaagtatgccacaagtccatagggaaattcagccctt

SEQ ID NO: 77493 - DNA, 353 bp, Zea Mays
cctctgggatgtcagaacaaacatccatcatatcaccatcagctggctcggacagcatatcttcaggaatgacatcttcgagagcctgatcaaaatttgctatggataattcttgcagaccaacaagagcagacaaagctggagaaggaatatcgctactccctccactaactctttaacgctgactgttctttcgaactaaggggacttcctcttcttcttcctcgtcctcgtcaataatacggataatacatggcacaggatcacacccattgggatcagctctggcagggtcacacccattaggatcagctctggcagggtcacacccattgggaccagctctggcaggg

SEQ ID NO: 77494 - DNA, 788 bp, Zea Mays
attaatatagggtctcttttgcaacgacgaaggggtacggtgcattatgggctgttagatcgtccatcaagcgcccagattagatcattcatcttaaatgctcccacactcttgatcggccgttggatcataaatcgatggcaccgattaggtcttcttctaagtgaaccggtatgaaaccaggtccatccgatccccatcccacggttcacattcgactgagtgaagaggtatgcatcaccttgatccccaccatctggtgatagatcgacgggccaggaccctcatcccccccaaaccagtcagacgcggcggcgccgccgagcgcctacggtggatgcacatcgacgtcaggtgatccggcagcctggccttcccaccggatatagacgagggctaaacgaagcggggatatcaacgatgctagcgaggtagcccttaccggacatggtggtggtagtggccctgcccatgagctcttgcgaccagatggcgaatccttactctggtgagcaattactaggcggtccgaagcataattcgcccaggtgataccatggttgtgacctccaaggttcggtgaagcacccagggtatgataccgaggcacgctaggaggcgaattgaagtttttccctcccgtagtggagtttgccgcgcaatcccctatgatgacggtgatgattggatcgcgattggagagttggggggggggtttgcgatggcggacacctttatacgtcgaggtgagaggatctcggccaaaatgttggaacaaccagctagat

SEQ ID NO: 77495 - DNA, 652 bp, Zea Mays
tctctgttatattcttggaacttccgtggttggcgggttgtttcttataaatgacagggtctctttagcaatttgcacaggccgaaggggtaccttcaatcctgagcgacatgatataagtctatggtccagattagattgcctacaactgaacctgtacgcattgatggccacaggttctgagatcgatggcccgagttctatgaagattaattcaatatactccaaccgatgagcgatcaacgatccatgatacccgatcccaaaagggtgccaagttctaatctcaaccgatcatcccaaatcagatagccagcgtacatcttcctcttcccggtgttagggcacgacgccacagagccacaccacgggcgcgccattgccgcacacctcaaacccataatctctgcgctcgaactttgtccagggcagtgctacgcaaagaggggatgaaacataactattaggggagtcactcaccggcggtgatgttgtggtgaagctatttcacggtggggcggatctacggattagcgccagcgccggtgaaaaatgttgacggtctaagaccatcgatcactagccgatgacactcatgtttttgccacgctccggtgatctcacattcccctcccgaggccggacaggcggc

SEQ ID NO: 77496 - DNA, 530 bp, Zea Mays
tttgtattgaaaggtgtaaacccatctgtcgccaacccaattcgaatatttctcgcttcactagcaaattctggatcaaagtcttctagagccttccacgcatcactgttagatgggtgtgtgatcacatgagtgtcctctcgtacatgttctttgtgccatctcatgtgcctagctgtgtttctcgaaagaaacaaatgcttaacacgaggcgcaagaggcatgcaacgaagttgcttatggtctatcgttgatgtgccatttcaccatcatgattttaacctctacgtatctcgactttccacactgacacttcttatcattctcatgatccttccagaaaagcatacaattatctggacatacatcattttttgatagtccatacctagaccggagagcagtttcctacattgatacacgtctttcggcatcttgtgatttggtggaaacacttcgttgattaagatcaagagctcgttgtaacatgtgtaatacccaatttgtaaatcataagaaaaaaattattt

SEQ ID NO: 77497 - DNA, 309 bp, Zea Mays
caatcatcctatgtctctatttgtccgtcaaacgtcgttttcacggcttttgacttatcgatcgtcccatctcgtgccatatctctttgtgtatgtatttattcacatttcatatgcttatgactatgtgactaatacgtgctcacctcttctgtcatttcagtgaccttgtgtgaccgtgtgccgtctcccgtcctgcctggatcgtcacctctcgtgtgacctttccaggtagacatctcactctttgctaaatatatcggtcacttttgctctgtgtttagtctctctatctcgtttgcagacttt

SEQ ID NO: 77498 - DNA, 637 bp, Zea Mays
gccatattaatgacctccagtgcttccttcgcttctggatcggccaggagatcgagcggtactggcagcggagatagttcagctgaaaaaaggaaaaaagttaattagtccgaagctataaaaacaaatgccgaagctcaaagtcatgaaacaatacctatacgtttttcgtgctctgcagcttcttcagcttgtcttgcttttgctcgggcgtcatggatatctttttcacttttcttaataatttcatgagccatctctcggccaccatttgcccagatgtcattgtaaaatttctcgcctattaaacttgcttcaactgaggggtcctttgtatcatcgatggagaaggcagcttcgccctgggccatggtcttgatatggtcgcatcccaccttctccaagatggttgaaatccctcgcgcaccggagaacgcgcaaacatccccgtgatcacttagaatttcttcaaaggcttcggcctccccacttatccattcaataatgcctttggggttgccttgtatgaagttttcttcggaagaataggcgcccatgttggcaaaactggtttttattttcttcacacagtccaaggatttttcaaagcatctttccttggatgtgcgaagttctt

SEQ ID NO: 77499 - DNA, 585 bp, Zea Mays
attgtcctcagccaatttcttcacttgtagaagtcaaagtctgtcttaggcttctagcttcttcaggttggtctggtagcctttatcgaagtcttttgggagcaccacataccggttttttcggacagcttgcatgcaacttcttggcatatatatgaaatctaaaaagaaatagattcacgtgtatcagaaaatgggttaaaagggagaaaagtagtatgctctactagtataccaatattgaataaaggtaaagcattcccaaaacaagaaacttttaaactactacagttcatggacacaacgactggtagggacataaaactgctcatatgattgcatgcaatgcaatttaaaacttagtttgatatgataaattaaattttccttcataaccgcgacaaacaagtgaaaaaggaatctacaaatatatgcacatggtgtgtaaagggttgtttggtttccacctcctaaattttaagactaaagtttagtcaattttagccgctaaactgtcaaacaatatgactaaatgagacttcacaaataaaaaatttagagaccaaagtttagtccttaaagttt

SEQ ID NO: 77500 - DNA, 798 bp, Zea Mays
gaatagaggccttatgccgaaggttcgaaaaaataccttcccgtcgtcaaatagcgaaatttctgaaatgcggggccattttgcagtggtagtttgcttataaatagaacgaccatcgcaaaatatttatcgtgttattcagttgttttgtcgctttgagccattgagcgttgcgcttgtttttagcttcggttgcttctggtttgagctaagatagctgagggcaagaagagtgaagatcttgctctagttgggttttatgaagttatggaaaagagtaatgctatgaagattgcaagcgagatactagccgaattgtcggatgattccgaggatagtgaagattttgactttggaagtgatgctaatgatgccgaagatcggccatggagaccgagccatgttaacttcaggaagtcaaccgtgaaaaagggacatgttgaggctatgaaaggtaaatatttttcatggtgtatctatagtgaggcctggtgtaacacctctggtgttacgagaactaaaacttttgcatgacatcatatgcattagaatttcattatgtatgatacacctagaatgcatccactaggctaaaatttcaaaacaaacatgtgatgtaatgcttgcttgggtttatgatctagaaaggggattcttaaccctaggttggagtacatctctcaaaggactagaagtttgtaaccttatgtggtgaacattaaggagtgatcttgctaatttggtaaaagtgttcaagaaataatggcatagagagattgagttcttaatggaccctag

SEQ ID NO: 77501 - DNA, 886 bp, Zea Mays
gtcggatcatcggttagagtttgacagtaaggagagaggttctagagaggagatcagagtgttagtctagtcgaaagaaggctatcgtaccaaaaactacggagacacacttaatggtcaacaacagctagttctgaaatagtggccattaagagtcatcgtactatgacataatggtctgacgaccatatattgcatggtatgacaatatccatagatgactattgaagttgcgacggctatgcctaaccttcttgggggctatgaatatgacctcaaccgacatttaagagtgtggagcccaagcaatacttatgcgagttgatgcttgtctataacatctttagccatcaatgtgcttagtgaaatcacaacaggaattagaagtactcccgtcgacctgtataattcccatcaacaataaggataaccgacatgagttaaggtaactcccatccgtcaggctggtagccgatgggattaattatataacttttgtcggctatcattattatcgaattctaccatcttagagtctgtccgatgggagttatcctagggccaggcctccctacttctctccatgtgcaactctatcgctctcactctccaatgtcatctctgccctgtagacctcgcgttgcccgccagcgcgctgtcccacgctgcctccctacagctcacacccattggttcctctagcaacgcatgacgctggcatcgtagttgcgctacgacactggcccgtggtctaccaacgtcatcgctccctatgctacggtgtcgatctgtggttgtcctacagtgcatgacatcgcaccaccgccctacaatgtcactcttgctctccctcacccttcgcggtcccccacttcttcgaccccat

SEQ ID NO: 77502 - DNA, 571 bp, Zea Mays
tcttctcctgttagtattcgttaaaaccattattttgatacgtacacacacgtggtgccgagctcgtagagcaagcgatcgctgatgtcctcgtagttaagcaagagggagcttgtgcaggttgagccacgcgaggcaggcaatggaggcatcctcgaggcgagttcagtcgaggcgcagacttcgcaagctcgagttcggcggcagtagtgggcgcaacgcgtccatcgtcggtgtcggcacacatggctcaatcggatccaacgagagcatgatggtggtgctgacttggtgggatttgttgtgccatggcgtccgttggtgggagacgagtcggggatggagatgcatggtgtggtgggatgatacggaagatgaagagagatgggcaaggtgattaatttattggagttatttcgtctgtatgtagttagatatctttatcgaccacatcaaatattacttgttgttaggtgagtagcgcttcgcgcgtgatttatggtggtgcaaacaatagaaacttgtggtgctatactgggacagagaagagttataggcatatcgagttaat

SEQ ID NO: 77503 - DNA, 428 bp, Zea Mays
ggccgacttataatgagtcgatctcaattttgtaatgattcccccactgataaatgaaacctattctcgtgccaacctgttgttgcatattccgctcttgtgtctgacagttcgttagcatttagaggtaatgttcgagtgatgttattttgctacgaccaaaactctctcgagctatcggcctgtccttttgcgcccgacttagtgtgccaacccatacttttgttggcgtcctcttgacctctgaaccctagttcctatttttcctccgctgctccccaactttctaagttctcgagtccattcgcgttttgtcccagaaccgcgccgtttggaaaatcgtgatggcgcccaagaaaataaaacagagtgttgccaccctagacatccctccgatcgatcccaacagccaactccatttcgttggt

SEQ ID NO: 77504 - DNA, 495 bp, Zea Mays
cacgattcgctcatccgtcatccgcccgccatgccatcactgcctcgccgtcaccatcaccactgccggatcttcgtcactgtgacatcggtgggtctcctactctccttccatgcggctttcccctctccgtctctccttcggtccctccccaatccagaaatccctaaccctaatcacgtcattgtcggttgtcggctcgtcgcgcgtcgtcgtgcacttgacccttgtctctggctccaggctccgacttggcaggtacatccctctctggctctccctccctagtcggtaatccctaaccctaaccctaatctcctctttgctgcttgcttgtgggatttggtaggtcgtgggtcgactacgtcgtggtcgtgctaatgccggcagggccgttgaggtactgtgtcgagaagggggacatggatgacgacgatgacaacagccggtaccctagaaccatcaacgatgagctcgttgagttagggcagcttc

SEQ ID NO: 77505 - DNA, 589 bp, Zea Mays
gcaaggactaagggactcacgcacataacctttatcaagcaattcttgtacttgtcgctgaatctccttggtttcttctgggttcgtcctgtatggcgctcggtttggcacggaagcccctaggatgaggtcaatctgatgctcaattcatctgatcggtggcagcctaggtggaacttcttttggaaatacatcagcatagttctgcaaaagattagtgacagtagaaggcaaagtagatggtatgttgtgaagtgagaacaaagcatccttgcaaataaacacataacagattgaagcaacatcctttaattcaagcaaatcagatttggaagaaagaaaacaagaacttttcaattgtatttctgtcttcctcacatgagcagatttagaattgtcactcttttattttaccatgtcctttgcagcacctagatttttattatgaacagatttatttttctctttgcaagctctagcaacttcatatttcaaaatagcatcaggggacatggggtgcaatataagtttcttctcattattcataaaagagtattgatttgttttaccatgatgcacggtgtcctta

SEQ ID NO: 77506 - DNA, 516 bp, Zea Mays
gcacaacaagcgcgcaaaatcgaagtctttttcaaaagactatccgcgcaaaagtcgcctaagggtgcagccggactagctcaacaagtgcgcaaaatcgcaggcgcattacatccgtgcaaaagcctacaccaagaaactgcccgcacaaagaccaactacaggcgcagccggaccgacataataaacgtgctagaccaagtgcgcaacacccctatggacatagccggatgcgcgaaggcgcatagcctcatcatacaaactatagttacacacgtacaacgagggcatcacaccttacattggttcaaccttcggaatgattcccatctccctgtagttaaatagcattatcctaagctcctcaccctcaaaaagacttcgcaactccccctcacctacacccgccccaaccggcgaggataacaattcccgctttccagccctgcccacacgaagccgaccgccatccacttcactcactctacgcttcgccaccgcccttcgccgtctacg

SEQ ID NO: 77507 - DNA, 791 bp, Zea Mays
tgctctatgtaggttttctatcgacgatgaggttgtggaccgctgaagttatagtaggcaattatcttcctctattaggagtattcggccccaatgagcatctgcacgagaggaagagatatttgaacaacagcgacaagatgtaacagcatatgcaatgacaagatgtaacaacaaatgtaatcacaacagatgatgcatactatgtggatgcaacaggtaatggttcaacttcaattaggtcatttgtttggttttccaaatgaatttaaaagcacaagtgattattaatttgtttgtaggcatacgatagtgctagaccttagtttgacatgcctccatttctaccagcggcatccatcgttccgcaaccaaaacagtctggctagctagcggtccgctcaccttcacaagctgatgcatcacaggtaaaatcgtgaacatgaaattgattctcttgttatagggttctaggagactagtactggtttccaagaacaaatttctgctttgttttgataggaggccaagtgatgccttggggacctccccagtcaggcatgtgctgacaatcgtcgtagatgtcatgggccagttgtttaacgtgagtgacagaccttccgatgacccatctatggattggccattatttggacttatgtttggatttgtggaccaatatatatgtacttgtacgtttggccaatgtatgtgatgtactctgtaaactgttgtatgttatactttgtttgttgttatatactcatatgcctattttagaggcttcccat

SEQ ID NO: 77508 - DNA, 463 bp, Zea Mays
ttattatcttatacagcagtcagtagtgtcacaacaaactgtaatattgcatgagtgaatctatggatattgagaactccatgtcgcaaagattgatacttaacgttcataaaatgcaccacagagaacgccattttaccttgtggaccatacaaaggggagcgttgcctaaatttaagcgtgtgtttggtttaggagtgtgtttggtttaggataacgtgggatgggacgactttgttattattttttggatgagacttcggttctaatgtttggttgtggggataggttcgtccccatctgttgtttggtagcagtgattgaaatggataatgaaggcgtttttaacaccgtgaaccaccaccgttacaacttagtacaaacatatgaaacttatctaatccccatctttcgccaaactaaacacatgctaaatcgctccatgcagttatatggagccaac

SEQ ID NO: 77509 - DNA, 795 bp, Zea Mays
caagaattcattgcgccagtaacctcccctctccccggtcgccagcgcttctcctccaaattgagcgccaccgccgttgagtgctataaattgaagcctcagggaactccgctaagtaattccgcgtccaaagcaccagcacttgcctccaattgtccaccagagccgcccaattgcccatttcccccaaatcggtctaaacaccgccgcgtgagcacctcgccgtggccagcgtgctacaggtccgttcatgtcctctgctctctaattttagtgcccttatgtgcccctgatgcttcttgacccaaccgattaagctagaacccattaaattgtcgggaacactttgtgttatccgttgatcgggcggtcaccgtgagcagagaggttgggagctcgaacggtgcaattgatcgaggggaaacgtttgtttagctgttgaattaggtatcagtcaagttagagcaccggccattgcttgttctggccagtacgagctcgccggagctcggtctgtggctgttcactgtcggggatcgcgggctgtgaagaaatagaagtacgagggcctcggtgtaattgtcagtgactcatggaaatagtgatgtgaactcggttcaggttatttaaaacaataggggcctttgcacaaagtcgtcagcacaggcgcgttctgcctatactgggctggcttgggccagattgagcctagtactgttgatccttttcctttttccttttctgccagactttggaaatccatagaaaaatctagaaaaatgctaaaaatgtgag

SEQ ID NO: 77510 - DNA, 569 bp, Zea Mays
caagtactaaaagcagcatgccttctcacatgaacaatatatgtctcgagttgctctcttaacattgcacgatcaacaactgtgaaatcttgatcatataacttagcaagcttaacaagcttctccaaattgaacatagaaaatgacttctttggatcaaggaaagcaaaaccaactagcaactcacttgaaacttcactgaaccgatgacacaactctgtattgattttatcaagaataacaaaaaatatctcggtgcggtagtagtgaagatttgtgactgtgaatccatctcgccttgatcgacctctaataggtacttctgcatccatgtctaccacaggaatacccttattagcacaaaattccttcacatcttcaaaaaatgactcccaaccattatctgtcctcatcatagcgattcgggctttaacaacatcaagtaactccatggcaagaacaatatcaacactcttcctttgcaacatttgagagagctcatttgtgattgcaagcactttcaacatcaattttagaatgaaagcaaatttgaaactctccattttttc

SEQ ID NO: 77511 - DNA, 645 bp, Zea Mays
agccgagtcatccccggcaacatcctcgggggctgggcaagtgtcaacaccatccttgaggaccaagttctccgcagtagccgcctctaaggctgagggtcggtccctcaattactttcatgggagcaagacgatccaagtcagtttcctgaccctcgagaccgcgctctaaggtcgacgaggcgcgggacgttgcccgggatgattccaacccggcgtcgaacacatcagcacaaacctccatcacaccatcatccgctggctctgacagcaggtcttctggaaccatatcttcaagagtctgatcaaagtttgccagggacaactcttgtagaccaatgagggcagacagagcaggagaaggaactccactactttccccactggcgacatactgccgactgttcttccgagtcaaagggacatcatcttcttcctcaccgtcgttttcatcagcaacacagacaacacacccattggggtcagcaacaggtggagcacccccattggggtcagcaacaggtggagcacccccattggggtcagcagcaggtggagcactcccattggggtcagcagtaggtggagcacccccattgagttcagcatcagtaaattcaggaacaggcacttcttcagcagcag

SEQ ID NO: 77512 - DNA, 376 bp, Zea Mays
ccctaagggtgactctgcttgaactgttggggtgaattgcctgagaaacggggacgacttttgctctcggcttgaagtccaccaatcttgcgcttccggtcttccatctcccaacgcttcctctcatcattattgctctatcaataaggtgctaaaaggtagggaaggtatggttcatcaactggtagtgcaaggggatgaccaaacctctcaagaacctgtaccgcctcttggcatcagtgttaacatcctcaggtgcataatgagacaattgtagaaatttgtccatgtactcactaacagataaagggccttgcttcaatgctaggaattcttccttcctcactatcatcaaactttcaggaacgtggtacca

SEQ ID NO: 77513 - DNA, 498 bp, Zea Mays
ggtctatctcaaatatacctttcgatgtagaagccaatttgatgaactaaacaatcaatggctagatgctagagaggcaactagtgatgagctgcttggagcctactcgaaggctgaagataaagatatgacggtcgccttcggcgctcgagggagaaagaggctgaactgggtatttgatgttatcgggtttgtttaccttgattactgttttcctgttcggaaacaagggagaaaaaggaaaactgctacttcggcatcgtctagtgcatcgaaggcgaagaaagtgaagaaggtcttgacacgtagactgggacgcattgagacggccgatgtgccaaagcttattaaaggtgcagagactgcccatctgccccagaattaggtcatgtcatgccaatcgaaacttgtacagatccggccgaagaaccgaaatcggagaaggcagcggaacaactgaaggtactaagcccagcaactacaacagaactgccgaag

SEQ ID NO: 77514 - DNA, 366 bp, Zea Mays
gtgagacaaagttgattccattgcaaccagtagttacagtaatcaactataaaattattcatttgtgaagaaatatagaatcatgcttcatgaccggccacactcaattttgattgagaatacagagggagggatggagggagactaatactcttagcttacagatttccatattcaaaaagaaagaaaattctttggtcaacttgaatttgatgttttcctttttgacacattatgacgacaaacttgaatacaaaagtagaaggcattgagtttgtaataccacctcagaatgctctgcaaaccatagtgtaagcataatatgaacatttgaacttaagtgaaaaaactaccattcagaagcgc

SEQ ID NO: 77515 - DNA, 862 bp, Zea Mays
ttggagtagcacttgtcatgctcggttcttctgctgttcccttctccttcactccttctgccacctcctgctgtcctcagaatggtgttttcattgccttgtttgaagcaatagagaaatggagggaaactcgcaggaaagtatataggggggctcatgtctatgattaggatcagattaatcgaataattttatgcgtttggagatggattggatgataacaaaaatacttcttggtggcatgatactgcgttcggatactgctgcgttgttgtagtgttaggtacatggttcagtagcctctgtggggccttggatagcacatgaacagctaggtatgagagtgtaaaggttgggaggaggcatggacataggctggaaatgcctttggaattattgagagctcggggagacatggcccatgtggtgaatggaatgtgtgaaaggcagactggtcactcgtcattggagagagagagagagagagagagagatttgtcttgttgggttaaacagacggtattgcaatcattgtataaatgcagaacatgggggttccttactggagtttattctgtattgtgttcttgtaggcagggcacatgcatatagtcatttttgagttatgatgaatattggagctgtgtaagtgttgattaagcttgaggttacctttcttgtcctgaagatattagtttctgttaatttggtaagcttttttaaagtaaattactgtcatgaaagaaagtagttgcactgtgtcctgagtttgggaagcactgcatactggtaacaagctgcttttatcaccagttcggaagaaatcaagacctcatacaaaaacccagcctgcaatcacttc

SEQ ID NO: 77516 - DNA, 368 bp, Zea Mays
gaaagagagttaataggaaagagaagaaagttgtaacttgaggaagatactacttagatatatgatcatatgcattgaaattttaaccattcaagtggcccacatatcatactcttacatatgttagcatttaatattctatagagtattaaaaaaataatctaccatacattgggataattgtatattatgtaatttcatatgacatgttagctttggatattgtgagatgatataatagacttggaatagcctaaaggcgctctaaggctattcccaacccattgtttcctatcacgatatccgaagttgtcacatcgtatgttactatagaagatatagttgtcccattgtatattaccttgtgt

SEQ ID NO: 77517 - DNA, 699 bp, Zea Mays
cggcttttcaaatacaactggttgtgggccaagatccatctgactcatagacgattctttaggtttcagtgcacgaaaactctagggagcacaaacaccatattcacatcagccgatggcattccctcggccctctcatcggcttcctcagtggcttcctcgtttgcttcctcatcaactcttggttgtttgggacgccactccctccttcgaggccactgttctgctctccaggggtatcacaccttgaccgctaggtctgggcgagccttcctgagcacttcaaggtacttggcttcagcttcttctatgttccgcagtcgttgcaccctatgcttctgggtgtgactaaggccatatgggcaccacaatggtcaatgatacttatcttcttcatcatcaagaccccttttgcacattggcccggttctcttgtcttggtgaggcagtgaaacactaagacttcattggccacccgctttggtggtcttcattccggacagttgttgtcagtggacaaacacgtgccaatgttccagcagtgtttgaaaaaacgggcaatgccaatggtcccttgtgtcctcctgccttctcaagcgctttctagtatacgctcatactattcatccttaggttcatgttggcgacactgcctatactagtattcatatttccttagtagatgttcggacactggtt

SEQ ID NO: 77518 - DNA, 433 bp, Zea Mays
ggggatgcctgacatctggtggggcgaggaagtactcacggtgtgctatgtcctgaacaggctgccgcctcgcaaccgtgaggccacgccctatgaaggatttaaaggaaggaagccagatctttcgcatcttcggacttggggctgccttgcaaaggtgaatgtcccattgctgaagaagagaaagctaggccctaagaccgtagactgtgtcttcctgggttatgcacataacagtgcagcttatagatttctagtggtccgagcgaagtcattgtaaatgtcataatggaatcttggggtgtgacattctttgagagcatcttccctatgcgggataaggaagtagtagccccagatggtccatctcggacatattctctgccctcgagtgtcaatgaccagactccagatttggagttaaggaggagta

SEQ ID NO: 77519 - DNA, 305 bp, Zea Mays
gtggtgtaggttattcgtgaatcagttgcgatgctacatggttaacatatatcacggcagcagaagcagagcagactacgagatgtgggcctgcattccagaggaacagctgaatgtgatctgcagtgaacttgtgacatgcatttagcaaacgttggcctcggcacggaggagcatgcagatggtgtcacacagtcacacatgacatggacatgcttacccgcgtttgccctagactgcacggtagtagcagcagtggtagtagagccggtcaaacgagcagatcgatcgcacgagacaagaca

SEQ ID NO: 77520 - DNA, 873 bp, Zea Mays
ttgagctgataaacccaggaggctgcttcatataaacatcctcttccagaacaccatgaaggaacgcgttctgcacatctagttggcgaagacaccacccttgagaaacaacaaaagataacaccaatcggatagtagccggtttaaccactggactaaacgtgtcttcataatctatcccgtatcgttgcttgaatcccttggcaactaggcgggccttgtaacgatcaatggaaccatcagctttctttttgattttatagacccatttacagtcaataagattagtagcctgatcagcagggaccaagtgccaggtgcaatttcgcataagcgcagaatactcatcatgcatagcctgtgtccaccgtgcatcagacatggcttccttgactgtttctggttctccagtggcacaaaaatgaccatagcgaatcatactagggaacagcttcttaggttgcacaatattattctgaagtcgagtccgaggacgctcagccagatcaagcattggaggctctggtatagccgaagaagcaggcaatagagaattaccaacggatgttggagagaggccttcagagaccgcaggagatcccgctgctggtactgcatcgggtgcatcagtgagagcagattgctcaggatcaacagaggaaccgacatgggcaacttcctcggcaggatgatccggtgcagagggtaggagtagtgccttgtgtgcatgctcctgtacaccaagaccagagctttctgggaagcaagcagtacgtcgagagaagtcatgtacatcagaaaattcctgcacaggacaatcttcacgcaacagattagtagacttaggcattaaggacaaatctacagtatcac

SEQ ID NO: 77521 - DNA, 489 bp, Zea Mays
gcggtccaaccccaatttgactatgagtacggatagaactcagacatgaccatattttctgagttgtcccctaagccatcggacaactatagtccaaactagttcaactactctaagtagcatagaatggctccattgttggttcatactactcgacacacaacagggtgttgtccctgcctactctaagtagtatacaatggctccattgttggttcctcctactcgacgtacaacaagatgttgtctctacctactctaagtaccatacaatagctccattttttgttcttgctactcagcatacaacatgatgttgtctctgtccaccacctaggaacatacgatggatacactgttggttcctgctacctggcatacaataagatgttgtccctgcccactctacaagcctgacatacaacatgatattgtctctatccactctaagagcatacaatggctacaccattgattcccctatccaac

SEQ ID NO: 77522 - DNA, 440 bp, Zea Mays
cgtaggtcgagtttaagaatacatgaagcatgatttatgatctagaggcaatagagctagttcaacttatctggtgcacattatgttgtaatgtagcccaaacatttccaaacccaaatcaagccacaaagttggagtatcagttgactatcacatatacacatttaaggttcctctcataaaaggtatatagaccatctgttctaaaattggcagtgaagataggtgctttaaatatcaatatattcataaactatagtacccactaattttggatagtagttagcagtacactgcacgggacattgcaaaggtcaagtgaattacagtacctcttatattattttgctgttacaacaagaaatttaataaaatggtccaattcggtagcaaagtatgctctactgatcacagtgggttaattagggcatgtacggttc

SEQ ID NO: 77523 - DNA, 513 bp, Zea Mays
ctaacttcgtatttttaacaaagcagtaaaaagggtgcttcactaaccatgttttctaataaactcgtgaagttatagaatatttacccactattgccacagattacattaaaaacgatacattcttttattttgtttccttccctcctgcttgcgtacgacaccgggtctccttcgttctcatccagccgccatggattcgccgagggaagctgctgctgcacggaagaatcaagcactgggctctcaaccactaacgagtagccgcctagtggcaggtggtgttcgcctggacgcgcttagcgcgaccatggagaggcccttgccatcaatggcgacgcagaggttggtggcttgggtgttgtcccagtaggacagctcgcgtccgcatagaaccagctcgcactatcgtgaggttgattcgacggccatggcgtccatgagcgaggtcgactggattgtgggtatatcagacctttataaagaacatcttattttagtgaaactaaatcc

SEQ ID NO: 77524 - DNA, 604 bp, Zea Mays
agcactgtcaagcggtacactcctagtgtttggcaccaactcagagcccacacactttttggcaactcccctggggacagttagttgtgacctatcgaagatcgatcccaaatggccagttcaaaggatcgcaccgacgtttcccccaacaacatcgtgaagctgactctggagaacctgtcgaccgaagatcatcagaaatttgaaaactacaaaaggcagctgatcgaggaggtccaagcgaggtacctagccaatttcaagatggactgacactagaaggtcgtcaaacaaggggagatcgagatgccatctctcttaccttcgctgatccttaatgtaagtaaatccaatgacatccagtccctcaaacaatacgtagatctacaagggactcagttgcaacaacgcattgggggatagaagacacacttaagaaactcacgcgtacgatagaaaatctattgtgtctaatttcccatcgcacgaggtcgcaatagagctaaatttgccaaaagcatcggctacaaatgggccctcacaaacccagccattatacgacatgccaatgaacttgtgcatgaccggaccatctaggcctgag

SEQ ID NO: 77525 - DNA, 695 bp, Zea Mays
atttctcaaaataaaataaagactatggaaaatttagccaaattgcgtgagtgaactgtccaaacataggttaaggttgtaagacaactttttccaccatacaatagctaaaaagttggaatataaagacttcaaaacaatagatcaccttttaaacctcaaatgacgtttctatgatattgtgggcattgtattcacacgagagggtattagagtacaactagttgatgaagacgttattgggctagctaatgaccttttgtgataccaggtttcctataatcccctctattgtaggcatacctagatggtttttatgtccactcaagtaaaacatcgcacatcattatgccacatcatttctcaaaataaaataaagaccatggaaaatttagccaaattgcatgagagaactgtccaaacataggttaaggatgtaaggcacctttttccaccaaacagttgctaataagtaggaatataaagaattcaatacaatagataaccatttaaactaaaaatgacgtttccctgatgtcaagggcattgtattcgcacgagagggtattagagtacaactagtggatgaagaggttattgggctagctaatgaccatttttataccagttttcctataatcccctctattcaaggcatacctagacgttgtttatgtccactcaagaaaaacaac

SEQ ID NO: 77526 - DNA, 755 bp, Zea Mays
aaaatgatccacattgtgggtttagttcatagaggacacacgcgaaagatgagttgcaatggtgtataggataaagtacacaataaatagaaaggtttaggcagctaaatcgttgtaccatgcattctgtatggggtggttgatgctcttatatcgtgtatgtgtgagtctatttgtctgatcagagtagatcgatcatatgccctatgcatagatgctactatacttgattagacgtgatgattttcgatatcctcctatacggtgggttcctagctccctttatatatgcaggagcctaaagttataagtcatttatgaactatagacctaattggtttacaataatctgaccaaagtttatgaccaatcagaactttatcatttgcttttaaagtatttgttatcttatatatatatatatatatcaccaatcaaatgtgttttcctctgcgaacacatgaccttttagtactgactggagtcaccgggaaatcattttcttaactagttaggtgcccgtgcgtcgctatggtacacacggaagttttacgcatttgatctttcaaggaagttgtcattcatactggttgaataacatggacaaaatatgaggtacccaggaccttcatatacattattgagcgaaatttagcatcattcatcagcataccactagataaactatcttttgtttcttctcaatgacacctaggattggtgaatcctccatgacttcgaatggagcagatccc

SEQ ID NO: 77527 - DNA, 339 bp, Zea Mays
atgttggtagggaacatgtgaccaaccaactttatgggtatccgatataccatctctttagtatgcaagagtcctccgggagattgtatacaatacccagtatccaccacttccataggcaactggtgcttcaacacaaatgtccgatttatgaacgtgtgtgaggcaccagaatcaaataaaatactcgccaaatgattggcaaccggaaaagcacccatcataactggttcaccctcaggaatagctttgatttttgtataatggacctgacctagtttaagaacaatatcattcttccttgctttttgctggctacttcgagggagattcagaagc

SEQ ID NO: 77528 - DNA, 884 bp, Zea Mays
cccgcgctgtggcagcggagcacagtggtggacaagatagcgatcatgtctaagtgcagcggtatgattacacctgtgccaaatagtgcgcgcacgccgactagcaccctccaatgggacgcataatacgacaagccgagcggacaagtcttcgggcgcaacctctctgcctcgctcgacccaagctcagccctcgggcaaattctctgcctcgcccgagctcggcctcggccgctgactacgccgtgaatcccgtagatagccactccgcccgactatagcgcacgtcaagagatggctcggctggcatctcgggaaaacttctgcatcaaccaagcgagggctctgatctcgatgggtgctgtagagaatctcgatgtcatcacacgccaggacgatgacgcataccgtaagcagcctttggcccataccccggcgctattacaaccactacgacatgggcggcctctccgtcgggagctcgggcgtacggacgacccctcggtctcggcctcgcctctctacaggaagtcagcaggcgtaaatctactgcacggttcgccatcacgttagattccagggcatctctccttcaaatacaagactcagcttcaccacggacgctcccctaggtgtataaataggacagtggtccctccattgacagaaggagacacaagtagttgagttctggctctctcactttgtcttagatattgacacttgcctcaatcatctgtagggacctggggacttcccctcttccgctgtgcttttaaaccctactacaggcaccatggtgcgagaaatataaccctcatcccctctcctggaagtagggccttgagaatcccaaaccaggataatcgcttgtgtcatctcgc

SEQ ID NO: 77529 - DNA, 704 bp, Zea Mays
cttcttctcaacaaacaataccgggaaagcccaaggtgacctgctaggcctaatgaaacccttagccagaagatcgtccaattgccgcttcaattcaacctgctcctttggagccatcaaatatggggccttatgaataggctgcgtacccggaatcagtttgatttcaaaagccgtatcacgctccggtggaatgcctagaagctccgctagaaacacatcggcatattcacacaccacatggatgtcctgcacccgcaaggcagcctcactctccaccaccatggagaaaaagattcctgacttccttgaccgacgatccggaagtaattgggacaacaaagatagagtgaactttggagaacttctcaagaataccacctccctacccgacgacgcctgcaataacactgtcttccaaaaacaggatataactatgcgatactgagttaaccaatccatacccaagataacatcaaacgaccccagggaaatcaccacgagattagctgaaaagacctcatcagcaagaatgacggaacaaccctggcagactgaacaacttctaatggagccattagctgaaataaccacgattggatgacccatcctctgcaccgaaagaccagcacgcaacacaaaattctcctaaacaaacaaataactagagtcagagtcaaaaagagcatgggcaacaaacgaat

SEQ ID NO: 77530 - DNA, 324 bp, Zea Mays
ctggtcttgcatactgcctcatgctattcatcatatatccttgagtatgtgggtaaccagcaacccacgacatcggttgcttcagcaagtcattctcaagctacatgggctcagttaccaccaccaccattggcacctaccttggctcataatcagcagccagaagggcatcgccaagcgcaacaacagtgtgacactcgagaggagtccaaagctcgcatagtcaacaacactgtgcccaaatcaagacatatttactaaagcaacacaggggctcgaccagaaagtttccaagttcaatgtatttttacttttctgtcttta

SEQ ID NO: 77531 - DNA, 569 bp, Zea Mays
ctggtcataaattcttcatagactgggtctgcacggtagtaatctattcttctcatcaagcccacatggatgttttcttccatctatatggcatctatattttgctcctaaatgtcctcaatctctatgttatcattctgccccccttgtaatggcagagcagggagggctaaaacatgcccaatttgttgctcaggaccctctggaactagtaagcctcccacatttggtaaacccaccgagctgtcagaagatgggtgctggattaaatcagacacatggaagctgaactgtgcttcttctgcattaaccacttcattgacttggttctgttgtggggcctgaggaacagcgtgtgaccattcatcccacactgcatcaccctcattttcttgtgccatttctggtaagttatttgcttcaggagggggaatattgagatcaaagttgatatttggtcctacaggttgtccgagaccaaagaaatcaaaaggcagttgctgaccattgttgggataaaggggtactggttcttcatcttgcagttgggcccccagcatcgcttgttg

SEQ ID NO: 77532 - DNA, 577 bp, Zea Mays
acgaaacatatgacatggcacaaaaatggcaaacgatacaatcctgacaagatggtgcatgcatccgatggtgaagcatggaaacactttgatgccattcaccgtgagaaagctgaagaggctcatactgtatgtgttgtgctagccacagatgggttcaatccctatggaatgagtgcttccccatacacatgttgacccgtgtttgttatccccatcaatctccccccgggtgtatgctttcaaagatagaacatattcgtgtcgttgataattcctggacacccggggaataaaatgggtgtgtacatggagcctttgattgatgaattggtccatgcttgggaggaaggggtatggacgtatgaccgagctacaaagacaaacttcaaaatgcatatttggtaccagtactccatgcatgacttaccggtgtatgggttactctaagcctagtgtgttcatggtaagttcccatgcccagtttgcaaggaagctcttaggttcatttggttgaagaaatgtggcaaatattcatcgttcgataaacatcgacaatttctccctcctgaccaac

SEQ ID NO: 77533 - DNA, 592 bp, Zea Mays
aagacatccccgggacctttgatcacattgaaaatgaagttgaagcccttgacgaagttatcaccgggcacggggatttctgtgccctggtggcttcgcgcggtacaaccacaacttttatgaaggctggatgcactcacgtaaaaactgttaataagccaaatttcaatatttcgacatcagatctagttgacattccagtcgaagcccgaagcatagggaacatatttatcactcaaatctgggcaaaaggcgggcgcgaactggctgggtatgaagcgcgaaaactacttaactcggtatgaaaattttacctgtcttctttaccttggttttcctttaccatatttcctgatttcttcataccttcttctctctgtagaatggtggcgccgaaggccgttaagccgaagtttgttccgaagggctgaagattcttagaacttttgtaactatctatagaaagcttaggatatctttgcatcatttggcaaaagattgtaactgatagtttgaacaaaatattgtacttatttgtgaataccttgtaatataatttcaccttttcgctcctgtatgaactgctttgttg

SEQ ID NO: 77534 - DNA, 631 bp, Zea Mays
agtgtgtgtgtcatcattggtctagggacagacgtcgagcatccataaattaaatccagttgctggctgctgttttcctcgaatctgtttcttctccttctccttttcctttgtttgtttgattgattgattgagagctgctgcctgcagttcgtgcatggtcgtctactgggggcagggagagatatataggtagtataccactaaccactgggccagagatagtaaatggcatgagtacgacatctgtggcatggtccctttctttcccaatttggcaagtgggtcatatgaatatagtgtacgatgagaatccgaggagcaaatagtggcatgcactcgtctacacggaattctgcacgcaataaacatgcatcttctccaacttgctgataagcctgatatataacataccactaccaccaggtcaggtgatatttgttctgaaaatggcatcttctgttcggtccaaaatatgattgccaggacaccacagtaaacatggtctctcagtccaggacaccacagtaaacatggtctctcagtcctccggatctctcgttagtacagcgaagctctatagtgatgttcctagagctattttcactggcgtttttcagtgacgccagtg

SEQ ID NO: 77535 - DNA, 630 bp, Zea Mays
gtcattttggcggcaagaaaacagagcaagtgcttgctgatcatttattttggcctaaaatgagaagggatgtggagcgacatgtccttcgatgcgaatcatgtcataaagctaagtctcgtttaaaccctcatggcttatacactccactacctattcctagtgtgccttgggaagacatattcatggattttgttcttggtttaccacgaacaaagcagggaagggattccattattgttgtggttgatcaatttagcaaaatggcacattttattccatgccacaagagtgatgatgcttcacatattgctgaattgtttttcaaagaagttgttcgtttacatggaattccatgaaccattgtttctgatcgtgatactaaatttttgagttacttttggaaaactttgtggggaaaacttggaacacaacttctattctctacaacatgtcatccacaaacagatggacagactgaagttgtaaaccgaacattatcaatgctgctgcgagctatcctcaagaaaaatttaaaactttgggaagaaaggctaccacatgtcgagtttgcatacaacagagttgtacactcgactactaaattttgtccatttgacattgtatatg

SEQ ID NO: 77536 - DNA, 848 bp, Zea Mays
ctagttttcagggtttctagatgaagcccatcacttcacaggccatgtttcaatgtacacaagagcaagatgagtacctttaggcttacgtccgaaggtttcttctactccaggctcaggcactaactatataaaatgacattgtcaaagaagcaattatcaaaggacttcgtctaggcccagcgccttagtactttactaggaagccccctcattcctcggagaagctgctacagaaaatagatgagtacatcatagcggataatgattttcaccaaaggagggaagaagagcaaagatatgtagagacaaccaggggctttagaggaaggttccacccaagacacaaagtatctacaattcaagccagaatgaagataaggttggctggtctcaggggcagcaaagtcagcaccaggaatcagaaacacaacaacaatcctcacaaagcaacttccgtccaccaactccaaggggaggaggagaggttgaaactttggaggaagattcaaaacatagccaagaaagttatattatgttttctgtggggagaacaagggtcgtactacaaatacctgctagattactagacaaaagcaaaaagaacgcactgctgctgctcaaaccactcagtcgaaggaagtgttcaacacatcctcacactatttaccatatattcctcatcatgttcagcatcaagagccgaagcctcaactttcagcctctattgcctcaaccaatccttcgcctaaccattgggtgcctcccccatcatttatcctaggcccccctccatatgataaagtgcatgcgccatcctcagttcccagtataggatttgcaacaac

SEQ ID NO: 77537 - DNA, 371 bp, Zea Mays
aggaatgacaacatagaacatccgacggttgaatctaccacctgatctattctaggaagtccgaaggtatccttcggacagtgtttgttgagatctgtatagtcgacgcacatgcgccaatccactttattcttttttagtacaagaacaggatttgctaaccactcaggatgcagtacttctctaatgaatcatgctgcgactaagcgagctagctcggcacgaatagcttctctcttgtcaggcgtgaaacgacgcaacttttgttggatcggccttgcctggggatagaccttcagtttgtgctcggccagttctctcgggactcccggcatatccgcaggctgccatgtgaatacgtctcggttatc

SEQ ID NO: 77538 - DNA, 291 bp, Zea Mays
tttgttttcttgccattgtattgccacccttgcgcaatatctaccttgatgtatgaaacctttggctctctactccttgataatgctttctccctactcactttatatccttggttgtatcatttatcctcactttaatagttcatggttatcttatttcactattggccaccgataaatatgtcttgtctaactccttgataattcttacccaactcattgatattataaaatctttcttatttcaaaccttgtctcaccttttgttgaatgagtagaattagattgcgt

SEQ ID NO: 77539 - DNA, 610 bp, Zea Mays
ttgtggttgtgtttattgatgacattttgatatattcaaagaccaaagaagaacatgtagagcacttgcgagtggtgctgacaaggttaagagaacaacaattatatgctaagttcagtaaatgtgagttttggttggctacaattccgttcttggttcatatcttgtctgctgagggcgtcgcggtcgacccaagcaaagttaaggatatcctagactggaagccgcctaccacagtgcattaggttcggagtttccttgggatggcgggatattaccaccgttttattccagacttcttgtaggtatctaagcctattacagagttgctaaagaataatgtgaagttcaattggtctccggaatgcaacgaggcttttaagaagttaaagaagctgttgacaactgcacccgtgttggctcaacctgacattgacaaatcatttgatgtttattgtgatgcttcaggcatgggcattggatgcgtgttaatgcaggaaggccgagtgattgcatatgcttcacgacaacttcgatgccatgaggagcattacccaacacatgatttggagttagctgctgttgtccatgcgctcaagatttggcgcca

SEQ ID NO: 77540 - DNA, 962 bp, Zea Mays
ctcaggccccggatggtccgtagttcaaaaaagaaaactaaaatagaacttctcgagttctgtccaaacaccagtccttcaactacggacggtccaccacctgggaccagacggtctgcagtacaaaaacttcacgaaatatagaaactccgtgtttctgcccatcacctcaagttagacctgcagatggtccgccatgctggcccgaacggtctgcggtacctcaattcagcccacattcaagaaatcgcttttgaataagtttttctttcacgaaccaaagcattgttagccctcatgcaaatgcaacaactatatgagcaatgaggcactaaagacatgtcaagtaagataattgacccctcttgatagtacgactatctagcctactaacccagtcaattatcaacctctaagcaccttttgaccggtaaaacaaaaacctattgttatacctttgccttgagcattcaattccatctccttaaatgataaacaatgggcatccataagtgtatccaaccatgataccttttatcatttgtccatagcatgaagttcctccaccatcatcatcaagccacttgatcaatagcccagatcaacacatggcttgataattctataatgatatgatccactccatgttatcacatggccttcttggtttatcaatctcaacatagcttgctcttcaccgttgctttatgtccatcggtgctaagtccttgctcttgcttcaccgccacgcggtccctcacaaatgagactttgacttgcccttcacactagctactcggtccatcgaagccaagccatatctcttgatcttctccatatagccacatgacaccatgtcatgtcttcgtatgcaatgagctcctttatcacactagttgagcatctcaatatcaccaagccacatcaccaccatggctaaaataactcacactagtgtacct

SEQ ID NO: 77541 - DNA, 346 bp, Zea Mays
aggaaaacgaggacgctggtgcacaggaggaggaggagtgtgtgtgcatgacattggcggggagatggatccatgggtgtgttgctgttgcagttctcaacttgtgatcctgagcttttgcagtatgattagatgtgtagaaattttgctgtattacttgatggctcgactagttgacgagtgctggcagaaagcgtttgccgtgtctgactgacgggaaagtgtcacttatatgaagaatggacactaatatttttatgacctgtaactgtaagtaggaatatactactaatatttttatgagtggagcaataaatgtacatcacatttaatatgctcttttaag

SEQ ID NO: 77542 - DNA, 398 bp, Zea Mays
gtcggggttcggaacctgttgacactaattttggcgtaaccaaatttatgatattatttataccatattttaataaatggtatggatgataagttttatctaaacacgatataaatcaacaagaataatataatataatttccttttaaaaatgatggagcgtatatgtatataagcatgagcgtgttcatgtcatgacaaataaacaaagcacagcaacctcttcatgtgccatatatacactcgatcagccatatgtgcatgtatgctttcacgtatacatgggctaattaaatataagccgtgcaatggacgtatgtgtacaggcatatgcgattacgatgggtacggcaaagaagaaggaaatgtatacctatgtataggagtgtgctcattgc

SEQ ID NO: 77543 - DNA, 560 bp, Zea Mays
gtaagtcacaaagaatataagttatttgttgctcaccctattcaaaaattcttgctacatttgattatgcatagtcgcaggtgtatatatttgaccaataatttctgatgcaacatattcttagaatccttcaactttatgataggccgcctcgcctcgccatcgctgtcagatttcatttcgattagaattattgtcttttaattgtcgtaacgttagcatgggcaccttactatctacagtaacatacgagactcaagataagtcgtgctcatgcaccaaccttttcggctcgccttgctttacaagagactgtggatcagttttctaagtacaagagaccatacgatcttcctgtcacttcgtgaaccttttagggcatgcacaacctcgagacgtggatcagttttctaagtacaagagacacctaagaggctgcatgatataatcctgagccctttaccataaatgcagttaagagacaatttgtatagaaaatcatgaagagtatgtctcttgtatttttttcaattaaccccgtagagcccctcaagagactc

SEQ ID NO: 77544 - DNA, 370 bp, Zea Mays
tgcttgaggatttgccagaagctcttgatgattagagccatatcctcattatcactcttggaggtgtcgatttagagccccttgcttggtgtggtttcctcctccttttattttgttgccttaaatgcaacaggtggtagctcgggagtggaggtggcaccatgatccatgtccacgatgtgtttggagtctttgaccataagttcaaagctcacaaacttaccaatcacctcatcgagagacatctttttgtacctaagattttcacgaattaattgaacttgtgtagggttatgaaaaacaagtgaccttaggatgagcttgatgacttcgtggtcatcctacttggtgctttcgaggttgtggactt

SEQ ID NO: 77545 - DNA, 527 bp, Zea Mays
tgcttctgtcgttcagatgggtaatgggaaatcaaccaaattttagacagaccgatggatgcaaggcaaaactgttgtagaatgggcacctaatctagttcatttggttcctaaaggggctaaacggcagaaaaactgtgccctataaggcctacaaaatcggaagtggctttctgatatagtaggggctctaacagttattagtggaatatctacagctctaaaaccttttggataatttgcatctgcagcaagacataccaaaccagcattctcggcgtctatccaagcatgggatttattctagaaaatatgtagaaacgcatatggaagacatgggctccattgaaatgtactctcttcatctggctggctgacagttatggctaacagacttgcaaaaagaggactatctcatcttggctcttgtccgctttgtgattagaccatccaacactgcctgaccacctgcatcttccctagagagtttggttccttttgttcactaagttcgggctacaaatctt

SEQ ID NO: 77546 - DNA, 446 bp, Zea Mays
gagagcactatcgtgagagcttggtggcatctaccgtggcggcctcaccggcgacgagccagtggtataaagcggtttacagcgacgtggtgaagcttcagggcacgtggcatccgattgacgggcggccaactctggtgaacttatctgagccggccgcaaagcaacaggggtacggcggccagcccccggtgttatcctgtggcgaagatcttttacccagaagtgttatccggtcatcgatgagcacgaatcacaacaacagcgtgaatccgggcgcacggctcaccggtggcgaggggggtgaacctgtgatcttattcagttactgtacaatcagaacaccattcagtctatctgacaggctatttgcagggcattaatctctttttttgtgtggcaacttgttaatctctctgcaacaaagttatagccctataatccag

SEQ ID NO: 77547 - DNA, 294 bp, Zea Mays
gtgacacgaggttcataacgaaaggcggggttgccccatgcactaccctgaaacataccatgactctacccgtgggacccacaaacgccactacaaggacatcaacatcgaactcactacatggacctgtatactggacagacgaagtggtacgcgatgtcgggggtacgaatacgcacaaccataaagacgacgtcaaccgaggaaaacatatcacactcttaccaatagggaacatgtcctctctgtaaggtcctacccttgaactataaaatgacaggaccccctccgtcg

SEQ ID NO: 77548 - DNA, 278 bp, Zea Mays
aatcattccatgcagaggaaacctcaaccctgctttgaaaaagctcttaaaaactatcacctcatcattttctggcttcggagtgatttcttctccgccaaaacgaatcagcttcttctcggcttccccgaagtagcctagctttgtcatcatgggcatatcggcctcggagacagtagactttccaaattctaggtggctgggtttagatggcatgacggaataatctatctctttttcttccgcctcaccctcttcaatatctgcttgttcagctt

SEQ ID NO: 77549 - DNA, 548 bp, Zea Mays
cggagaagtgaattgggggaaatgcaaaattggagcacggtggtgcacgataggagctagctagggatgggttggacacgtaactaagaagcggagtagagggcatcctcaatttataggtcccgatcgaattggacaagaattttgggattgagatcatggttatccggctagaatatttcaccatggcctgctcaccgtggcgcataaagggggaactggtatgcagtcgataaccgatggcttgccatgacccttacgacgcggaggggtggttactacgtgtcacggccggaaaaacgacgagctccggtgatgccaacatgactgaccgcggcgggacagaacgaccagtccggccagcgactagattcaccccccaccagatattttcacgccaccccgacgttatctactcctcccaaggcacgaatctcctaggcgggtgcgaattgtggcggcagatcaccgacgttgagctcacggcaccggagatcttttctggccactgtaccaccaatcttcatcagaagttctaacaacacgat

SEQ ID NO: 77550 - DNA, 983 bp, Zea Mays
agattagtcgtccttcttcaggactttttccgcaacttcgtttagaagtttctcaacagcttcatctattgttgtgttcactattttgaattcctcaaaagtaccctttagggctggaccggtgttaggaacgtattgttccggggggagagttcagctgcacaaaaatataagttttggtcagatttgaagctaaaatatgacaaacacacctatatgcctttcgcgctctgcggcttcttcagcttttcttgcttcctctgaagcaagttgagattcttcttcgctcttcctgatagcttcgttttttatatctcttccaccgttcatccacactttagaataaaatttcccgtcaagggcggtaggttcggttgaaggttctctaatgtcatttgccgaaattgagaattctggctgaattacaacctttgcatgttaacaacctactttttcgagtagcgacacagcccctcgagcgcccacacaggcacaaaagtccccctctcggttaagacttcgtcaaatgctttaatctcacccacaatccatttgatcacaccctcgggatctccacggataaaatttcgctcagtcgagaatgcgccaactttagtaaaaactttgtttagtttatcagaacattgcatagcaacagagtagcattcttccttcgcttgacgaagctcttcaacattcttttgtaccctggatcattcagtgtcggatatttcacacttcgattgctcaacgttaaagtcttcagtaacttcgtcaagttgcttctcgagtcttgtcacttcacatttgtgcaattctacttgagaagataaagcatattctaggtcagctatgtgttttgcgtccgcttgtttttctttttcaagcttcgaaatcttttgatctacttcagagaatttagccaaattagcttcattcgtctttagcctttcgactaaagaaagaagaatcttgtctttctc

SEQ ID NO: 77551 - DNA, 603 bp, Zea Mays
aacagatcaaaagacaagtacgatatttgatcaagcacctgcaggtgcaaaggccaccaaaactattcctgtcccgagtgatcatagcaacgattcgatcccacagttgtgattgaggaccggatgaaatagctgatgcccatgtctgctctccataaggtcgcaggtgaacgacacgatactcttgaggtttcctcggacagcgcctggagcaagatttcttcgttaccaggaaaaaatctgctggggaggtagagtggagggtcatcttactccgcaaaggccgcgacggaggtggaggcaagcaaacaaatgacacgacgttgaacatacatgatgatctccaccgtgcgctcgaactcgtcggcgtcggccgcgccccagcagcacgctcgcaccaacacggacaaacactgtcgctcgttctccgactccgaccactgcagctcgaggggcgcggggagaggtccgtctcacctgcaccagccgcgggctcgccatcttctcttacctgcacaagattcccactccccgtttcacacacaatggttcacctgcaataatgggacatgaagtccttcgtgaatcgcctgtggtccaaac

SEQ ID NO: 77552 - DNA, 770 bp, Zea Mays
cacaggcgaaagcgcgcccgcggtgtcaagtttacacagaggaccctggttatttgaaaaacccttaaagaggccattgcactatttctctgtgtcactgacatttgcagataggcccttccctttctattccttcgcaaggtgagatccccgaccgtggacggtggagcagtggctctggcgagcttataccggccggaaaacacaaagatcggacccctagttcggctgacacctaattccactctcggtgacactaatccctcaactaattgcatgatttgagcttgaaatctttctgttcacggtgatggcgccaaccgaggacaattcaaggtgttcccggtgatcctacgtgttctagctcaattggttgggtcgagaagcatcaagagcacacaagagtgctgaaacaagagcgaggagggtgtgaacggacctgcagaaagctggccacgacgagctcactcacggcggtgcagagaacaaaattgggggaaatcccaaactggggagctgtgggggacgattggaggtgagggctggttcactgggtgcacaattacttagcggagcaggctagggcaccaatttatagtgtccaagggcggtggcacccaattttggaatggcgcgctggcggccggagagaagggaggtcactggcgcaagtgattcgtggctttcaccgtggcatgaccaccggcgatgaacggacatgctaaggcgattcactgcgacgtggtagagcacctaggcacgtggcaccc

SEQ ID NO: 77553 - DNA, 649 bp, Zea Mays
ttcgctagattttaatctttacactaaagagagtaggatcttatccttctcaagagcttcgtttcttaatgtaatgacctccgaacaaaggtttccaagcgctattcgacagctctaatgctcttcatctttctgggccttcagagccttgcttagaatcaagccctggaaaatgaagagtggacatataacgacgataagaaatatcacaaaaatagtttatcgtaacacaaattgtaaaatgacaaaccaaagtatacaaaccttcaggctgttgtaggcaacgctatctgcaagctgatccttagtcatcgcagacaagccgagttcaagcttcggatacccccatgttatccatcatttcacgacaaacattgatctccttaccgtcaggtggatagtagaggaaatcatcatcgttatctcctccgtataccaaggatccctgggggtacttcagctccttagcataatgttcagtttcgacgacttgctctgacgatagctattttcccgtatcatgtcgaacaattcaaatcactcctggaaggtgcttcgggagcaggtgtcgagggtttttctggaaggctctcttccacaagattttctagcgtagtttccaaaggtcccgcctcagcatgagcagaag

SEQ ID NO: 77554 - DNA, 311 bp, Zea Mays
gtgaaaccctagggtacagtgcttaaccctagattgggcttaatagagcaaacaaggcctaataagagaaaacttcaaaactcaattgaaatagtcataaaatttcaccatgaataaacttaaatggcatccaaaccctagaagtactaaaaaccctaaatggacacctgagaaaccctggactgaaaccctaggggggttgtatgcaaaatgtgcccatttttggacctaagtgcaaaaaccatgaaattagggtatcttaactcatatgattcacatgtatgtggatttgcaacttaaaccctaagttt

SEQ ID NO: 77555 - DNA, 713 bp, Zea Mays
tgattattcaaatggtgcgtgaacttatatgatgccatgcaattttagtagatgtaaattagagtaaacatttaagagtgaatgatatatgaatctgttttgacaacaaatatattgccacaggttttataattaatatttaccatatttatggcaccgagtaaggcatggatgaatctagttgatgagcgtcttagtactgaatgtttggatggcctgacttcaaaaaaaatctttatttagatggagtcgccaagttcttggattatgcattcagtaggtcaggtgatgggggtaaaattaggtgttcctgcatcaagtgttgtaatacatacaacatgtcccgtgatgtagtctattcgcatctgacagcctatggaataataagaagctataccttttggtatcatcatggagaagttcttggataaactgagaatgagttggaagtggaagatgatgatgaatcacatgatggaatgcaggagctgatggaggatttgttcccttcggctaaccatcctggccacgatacaatgacagaaccaacccctagtgatttttttgaagatcaaccaattggtgaagttgttaagttctacaacttgcttaatgatttgaacctgcctctttatcatggctccaatagtactaagttatatgcactagttagattgctcaatgttaagaatatgggaaagtggagtaacaag

SEQ ID NO: 77556 - DNA, 436 bp, Zea Mays
aagaatttcccaggatttttagactcatgtaatttgtaaagtatatttagtgttgtaataaagaagtgacccccacaccacccctgccttgtaccagaaataaaggaataaagatgtgacacatttccttttccattactcaccctaggactttaaatctcgggacgagattctcttatggggggaagaatgtaacacccctggtgttactgtaactaaaacttgagcatgacatcataagcattggcattgcatatgtttgacacacctagagtgcatttactaggtaaaaatttcaaacaagttgtattgttatagcattttgcaaatagaaccctggataggaaacctgaccctaaataaggctcaaaggggcaaaacttaacccaaatgaagaaaacctaaaagctttaagggaagggtcacaaaatgatcc

SEQ ID NO: 77557 - DNA, 563 bp, Zea Mays
tgtctctagaaaatttatgtcaaatacacagattcagaaaatccacccactccaccaagttgcactaaacctaaaccccaaaccagacaactcgagaggaatgaaaagaaaaccaatttctaaaaacaagtaggaaaggtgtgcttacttgccgtagatctccttatgtatgcacttctcctccatggccttcgtttgtagtgccatactcatccatcttgcctatgtaaatagggctacaaccccagagccagcagcacacctgcgcacacgaccatcgaattgaatccccgtcggatgggaaataggaaaggaagagaagaaacaaatgagaataattagggacgtgaagatgttccagagatgagggacattattgacgaatagaaggctaggaatctcatcggaaggacgagccaccatatgcgtaggcgaagacagttgaaatgacgtagtggaaggtggggggatcgcggtctgcggttggggcaagcatcgcacgccgtatcgggcaagcgggccagtgttttccttcatggggaggggcggagtccgtgttggtg

SEQ ID NO: 77558 - DNA, 891 bp, Zea Mays
cttgaacagagttggagaagacagaaggagcgggttggctgaggtaaggacaattggccttgtagtgtccggcttcacggcagtggaaacaagtcctcacattggtcaactgacttccaccagactgctgggtgcggaagttactctgggtcttcataactggagctgactgagatggcttctgaaaagaaccggggtgcgccttaaatgagaaggcaccttggctcctctgtccagggtggggtggaaactgagtcttctgaaacttttctgcctgttggggcttcttgctctcaaaccgacgtttgcgctcactaagttctaccttcctatttctctcagtggtgataaccctgtaaccatggtattaaagtcactatgggtggtgacttcaaccatggttctgatttctgggttaagacccccaagaaaagcttcttgcttcttatcgtcgtcattgatgtcctcaagtgcataacgtgacaactccatgaacttatgcagatactcagttacggtcatgccaccctgacgaagcttcctaaactcatccttcttcaacttcatcacactgctggggatgtgctgctctctaaagatcctgacaaattcagcccataccatctcattgtcattcccattgatctcacgatagctgtgccaccaagcaagggctggtccccttagttgctgcactgcaagcaagacattgtctctgtcatccgcatgaactacttcaagcttcatctctatttcacgcagccaatcatctgcctcaattggattgtctgaacatccaaacttgggtggctgcatgcggttgaaatctgcaatcttgctcccattgccattgtgatgcactgcaggtctattgttgccaaggtttccttg

SEQ ID NO: 77559 - DNA, 942 bp, Zea Mays
cgagggggaggaatggctagattgaatgaacattgtatccgttgtcgggtgatgtgcgcaaggacgacattcaggccttgcaggggtgagatcgacacagggggtgttcactattgaacaatgaacacgagcaggaggtcagggatgacacgtaggctccacactctagagggagagagggcgtgcattcatggattgcaactgaccagccggtcccacgtattagcaagcgtgggcatgggggactggcgttcggatgataaatgcggacctcgcccacgaccccctccctccgtgctcacatctagcgatcgtacgcattgaaacctcgaagatcggtgggtaggagattggtgagcgccaccacgacagatttgggcggtctgcactgtcgggacgctgttgttggggcagagaggatcactggtgcaagctgcttgcgatagaaacctcccgaggccggatcgtgagcagggcagcttctaattgctcgccatagtacgctttccaccgtcacccatgaccagaggtcgtcgccgcacaatccacggtaaattcgcccttaatatgttcgcattagcaccaggcttgaatagtaggattcagatgtgggttttgaggcttctcggcgccgtcatgggtcgcgccggcgatgagccgccgtgggtgcgggcggcgccaccgccttggctgtgcggagattagtggggcgaagtctgaccaccgattaacacgagaacgactaggatcaagtcgcgccgtatcggttcggctgcgggtgtgtcgtgcgttagatctgaatccaaggggcacgatcggatctcagataattgaatctcatccgtagatctgcccatcaatgatcggtgagcgtataccaattcataaccccgccgaccgaatcatgaccgtccactcatgatctagcggccagggtttcta

SEQ ID NO: 77560 - DNA, 480 bp, Zea Mays
ctctgctcgtcgcgtcgttctcctctcgaccgcatcgcgcccgtggcggggaacgagccatcgacgccgcgtcgcgtgcctttcttcttcgtcccccccctgcctgcctagctgtctcaggctgccgcccgcccagccccaaaacattcggcagccgagtcaaccgagaacacgagccatccacccaccctgtcccttccccggctttcccccgtcctcggctccaccaattgctctcgcgtcagtggaaggaaaaaccaagggcgagggagggaggagcgcatctccgccccgcccgcgttcccgtaccccgatccgccacatgatctgacaccgcattgccgccgaggtgacccctcccgcccccagaatggaggcgctcaacgagctctgcgacctggtggccgcgcacccggatctcctcctcgccgacaagcttgcatggctctcctcccgctgcgccgccgccccgggtgccgc

SEQ ID NO: 77561 - DNA, 1281 bp, Zea Mays
tgctaatagaggaatcaccaatgtggctaattttcatacatgtactaatggtggtgtggatctgatcttccccgtcgtacttatctcgaatggatagtttctctattcactggtaatttgatcagtagctccgctatcaatatactagtttgtgtctattgtgtaagagcttaccacagcagcagcatggcgttctttagggacatagttttcattgtatcgatgccaacagttgacaactgtgtgtcctttcttgaagcagacttggcatggttcactacttggattggagcgtcggttactttagcgacgctgcctccccgtcactattatgttgtactctccgcttgcagcactatagctacaggcagaggagctgctcatgcctgtatagttgttgtggctgtgagcaggtggccgggcacgcccacgaccacgactcggtcctcgagaacagcctccacatcctgcaaggttagctgatgcaaactgctcttcttcctggattaaatccattcatgtttcatagtttagcatctaagaatataattcttcaaagatattgccctcacctttgcaatgaggacagagacaagcgaggtaaactcacggtccaactcagtaatgatatatttgactaattcgtcgtcttcgagggggtgtcccgtggcttccatatcatcagcgtaccccatcatttttgcaaagtattcagcaacattcatgttacccttcttggtcatcgagagagcaatgcagagattcacaacttgggctcaggtctacgaggcgaacattgcctgaattttttccacgcatcggctgccgtctcagatcttgagacatggaccaggatttccttggagatggatgaaagcaggtacttgaggacctattggtcccgagcatcccactcctcgaacgccggatttggcttcttcttgccaccagcgtcgacgatctcagatactggatgggcaatgaggcgacagtaagatactggtgtggtaccggtaagatgacctatgaggcgacaaccacacatggctgcacgaacatgagcttcccatatagcatgatttgctcgggtatgcttctcaaatactggatgggcaatgagaggattggaggaggaattcgacatgattgttgtagggtttatgtggctctgaataccatgtaaatattcagagggcaggtgaagcgtcttaccctgttagggggccgcgtgcatgtttatatgggcacccagtgcacatggctatagaacagatagacttg

SEQ ID NO: 77562 - DNA, 475 bp, Zea Mays
ataataaatggggacaaagtacataagagagttatctcttctacatggtttacaactttgggtattacactcaaggagcgcatggaggtcactatggacacgattgtacgcccccatgtacggtcttatgtgtatccccactgacatgtggggtcagtcaaccttagtcatggaaggagatcaacactggagtctctacagtgacccttatgccgggaaggacgggacgacacaccatatcgagtgtatgcctacgcatgctagaaggtgacacagggctcatgacgataggcgaagccacaccacgcatgaccgcgccacgagattgatccacggggcccaccacacactactacgaagacatcaacacagacttgctacagggaccttcatgacgaacgagcggtgcagtacaccatattgggagtatagctacataggaccctacagacgaccatagggataccacgtcaac

SEQ ID NO: 77563 - DNA, 492 bp, Zea Mays
ggaggtctccgcctcgcgtgagcccacctcggttaagcaagacaaacctagggcgagacttagctgaagtccaccggggacaacaacattcaatgtgcatacctaccccatgcagggttgcaggtgtacaggagcaacaagatcgcaatcctgtcaagcttcaccaactatgattacgcatgcgaccactgtttgcatgtcgtctaccaactcccgatgggacgtacaatacgacaagagtacatgcctcacagtattgagccaactccagtactccaggcagcccctgataaggctataaataggatagtttgcggcatcaggagggcgagcgaacacttcacggttttctgctccattacgatattggcactagcttcaatcaaccctagagacttgggattcttccatctccccctcagcttgtattccctactgcaagcacttaggtgcaagtaatataagtctcatccctcttctgctagaagtagg

SEQ ID NO: 77564 - DNA, 581 bp, Zea Mays
ataattttaggttaattgttatgaattttatgattatttaaaagtgtatttcaaaatttaaaaaagtagaaaaaaaccacaaaacacatacgcacacacgatcggccgtttggcccaagccagccctcccccacgtcactcactcacctctctctcccattagtctcttgcttgtgggccctatttgccataatagtgttttaagctatagccgttctattctttggatagtgaataccgttgctgattcctttgaccacgatgctgcttgcattctctcgcgtcggatcgtttgcccactcgtgctcagcagtggagcgtcatgtcggacgttccatttctccttgcctctttcccttctttcccactcagcagtgcggctgctgtttctcggcaccattaatggtacgtttacagccgcatacgcattcaatcggcataaactctagcgtgattctctctcctttattgcctataaatcaagtccagcaacaaccgtgctactcatccctgctgtcgcacctcactcgcgctcactgccactgcattgcgccaccgctcgccagaccgtccgcatccgt

SEQ ID NO: 77565 - DNA, 510 bp, Zea Mays
aaaaatctagtttcaatcccttaatattgaattccaagattccctaaaaatatggtctattggactattcgatgatccaactgactgtccactacaacacttctatagcaaaatcaatttttatgagttgacctttgttgactctagcttctacttgtcagctcaaagtggagacttctagaagcatggactagatcatttaatatctcactatcactctcatctctccccctttatctgcacggtgaagatagaaagaacaagagagagaaagtgttgtggttttggacccacgacaagtaaatttgtcggtcagtgagggatatcatgggctactgttctggtggctttgctctagtaagctctgaatggggatttatattggttcgggaaaatccctacgtctagtatggtgttgaagtctttgttgcttgctttgatagtattaaaaggtggagaccaagagctctcatacttgcgtgtctacttggttggttgctaagatgtttt

SEQ ID NO: 77566 - DNA, 520 bp, Zea Mays
tcccccaataatgcgaaggcaaatatggtggagtgcaggtggtggttcgaaccaacaaacattcctagtggttttccatacagattagtcttatctgttgtgtcaaaggtaaccgcatcaccaaaatccatgtagtccccttgctggattgcatgtgaccaaaatctgctccaaatatttccctctttatccaactagaagtcagagaaaaattgtgtattatcctttttgcacaatgcaaaaagagagagtagcttagccacatcattggcatttctctctcgttgccttgctttttcctgtaattattgtcaatttttcagcattgtgcgatatcaacacatatgcaaatttcagtccacaattagaagctaaaaattacaacttacagattatacatgtcctatgctgttacggggacgctctcaggaccaccatgcatttctgaaacataatccataatacaatgttgtgggattctactttcctacattgcactgatgaactccatgtattcagg

SEQ ID NO: 77567 - DNA, 392 bp, Zea Mays
gtgtcccgtgtaaggccagtcggccagagagtcagggagtggtacacgggcctgccggccagggagtcagggagtggcccacctgagtgcttgactgcggcccgcggggtgccttggcctggcctgagtgggttagggcgttactgcgttataccgtttgcctattgggctgggccaaatctatgagtgattgctgtaattttgggtaaaatagggaaaatcgggtaccaggatgggtaacccgaattacccaaactaaaaacgggttttgtgacttgctatccgaaatagtgatcgggtaattcgggtacgggtaattcgggtccgggttcgggtaaatcggatttaggtaatgggtaacgggttttttgctcagtcctagtccaaatcat

SEQ ID NO: 77568 - DNA, 660 bp, Zea Mays
cttttcaagatgcctaacaaagtggatccatcatatgtcggaggatcactatgtgttgtaatgataatgggtgcagggaggtgacatgtcaattagcttccctaggatgagactaggctaggaagagtgatctacaatggtaaagaatgtttgcaccatagcttagctattcctatgatacttctctggaccttgttgctatgctccgcgtgggagccaattgttagtcaccaccactacatgtccggatgttgaagcattggaagcggccacatcacacatctcttctttcgatgatgcacctgatgctttgggctcagagtttgtggttatgaagaaaaagggaaataacaaaagagaaaatcgtagggaaatttattgtaggtctacagaggcctctagacagggcgcctttccaaaaacacacttgataaaaccagttcatcatgcatgtcaagaattctgtgcatgctaactgcattgtttggtagtcgaagcactatgcaaccatcatatcacacgtctcatgaattgtgtgggtcgtgcgatgcttcaggttttacacctggcaattaatagagagagtcataacaagagctttaagtacaggtgtgtggttttcatgttcgtgcttccttgcgacccatcacacttacctag

SEQ ID NO: 77569 - DNA, 1126 bp, Zea Mays
gcgcccgcgcgtgcccgcagtgtcagattttcacagggaccctggtgatttgaaaaacccgtaaagagtcttgcgcactatttacttgtgtcactgacatttacaccgagacccttgcctttcgttttctttacaacgccgggtccacgacggtggacggcgacaagtcgagctccgacgagccaagaccggccagaaagcgcaatgactagggtttcggtgtggctgacacccaattctacccataacgaccctttcccctcaatcattttcaaggttctagctcctaatttctctgcccacagtgacagcacgatcaacggacaaaccgaggcgttcctggtgatctagcgcgatctagttcaattagccgggcagctaagcatcaacagcacacagggatgctaaaacaggagtgaggagggcatgatcggacctttggagaactggccacggcgagctcacacattgcggcgttcttgacagatttgggggaagtcccaaattagagctctctggtggacaatccgagacacgagtgggtgcgctggatgcttgactacctagcagagctgatggcacgctcaatttatagggcccgagggcggtggctcttgaatttggcatggagcgctggcggccggagagaggggagagcacaggcgcaaaggattcgtggttttcaccgtggcaaggtcaccggcgacaaacatacatgcttaagacgagttactgcgatgtggtagagcacctaggcacgtggcgcacggtcgataggcggccaactccggcaaggaccactttgcctgaccgcaacccaagtgggtacgacgagctcaccatcgaccgggtctgagcctatccggtgccaagatttttaccctgctgtgataatctcctcgcatctttgtcaggtactgtaccattgggatcctattcagagcgcctgactgtaatgcccaaaaattggtagaataataataataataaataaataaataaatttataataagaatttagatttttttacctttcgaaattattagggcctttcttttataatcaattaagaattttataaattagagattagatttcttaaaacacctattctctatgttagtg

SEQ ID NO: 77570 - DNA, 529 bp, Zea Mays
gttaggttggccgcaggacgtaacccttagccttgatccaaaagtttttgagtcaaaactattttcttaaaaaaattcttgctctcatccctttatttcaaaaatgttttcccctttccttctctcaaaagtcagatggaggttcgctgccaaaccagcttttgccagaatgaagatggtttccccaagttgttgagagcatgcacagttcgcctcggaatcaggagccagctagagtatgatagtcatgaattcgtcgagcatggcacagagaagtgtgtcgtggctgtatacattggatccagtccgcaccatgtggaatggagtgtaactgctgcggggcacagattcaaagacacctgccaagtcgtcgctcgcaaggcattgagggctttgtgacaaatctatgaagaagaggtggccgataccccgctcagattctttccgccctttcaaagagaccgtccagtttggatgtccatgatgcgtgcattggaagggcagcagctgcttgaggacaaccccacag

SEQ ID NO: 77571 - DNA, 780 bp, Zea Mays
ctcttactgtgacccaagggcatgggaaggattgtgacccctgagcccattcgacgactatagtcttagcatcgttgtttaggtcatcctcctcctcttgcgcttggacataggagatcctattttgtaccaatcctataaggcttccgagtcgtgcatctcaaatgataatgcctaagccaacaactcgttgatggatttgaatttcgccattgtatatgtgtcataagtgggatagagcaagcctataaaggccagctccatgagagtattctccgataggtggaggagtaacatttgtttcacacatcctagaacctctagatgaaccgattcgccgtcttgcaccatttttgtcggagcgcgataaggtccaagatggtcatctcaccggtgatggagtagaagtgagagtggaaacactcctccatctgtttccataaagttatggactcaggctagagagaggtgtaccagccgaaagagagtccagacactcacagagaaaataccaaactttcatgtgtttggccaatcctactaagttgatctaagtcgtgtatcggctcacatgctcaacggtgttcacgccatcgttactagtaactttgtagaattatggtaccttgaacttgggtggtagcggcatcttgtcgaattctttagggtacaacttggcgtaggtgatcaccttttgcttagttaggatgtcgaactggtccttcatgaaatccgccagttgttcttgtgtgtcggtggtgctcgtccctctaaacatcg

SEQ ID NO: 77572 - DNA, 1106 bp, Zea Mays
taaagaccttacattggtgaacaaacttcttacaagcagttggatctagtgttgtgtgatttatggagagaaaaaaggcttccaaacttggtctgtcagacaagccaaaatggtgttcaggcatgaatagtaactgaagaagatcatattcatcccacctcgccaccgtctctccttaccgtgccatgcaagtgcatgttcaccacgtcacagtaagtgtggccgatggtgaaacacgtcccagagccctttgattacccgcgcgccatgaagaccaagcaccagtgaaatatcccgccatcgccccaaatagtatcatccaaaattcgtggcccgtgtaatcggtctatttaaattgagtgcactccctgcaccgctcctttgttacgcgctcagtatgccctcaaccacctcccaccattcaccatagctcccagtcaccggaattcaccgagaacggtcaccggcgccgtcatgaggagctccgtggacatcactcctccagttagttcatactcttcttgttcctgttttagtacccctctaacccctggttgctcactgccttgggtattttaacgctaccgcagtgaaactccgagaacgtcaccttgccgccactggacactgcctcagactgtcctgcatgtcgacgggctctcccttgcttcctccatccaaattcgtgcgagcacctcaaccctggtgagccatttgtacttcccaagtcggttaatcaaactctaccacatggcattgctcggaacaagctggccgggcctcggtgtccgccattgccacgtacagaggtgttctagggttggaccgttccgtttttctttagagacatgctcggttagcagcgaggatgatgtccgagtactcgctaccgccagggagggttgccggtgatgattcctcgcgcccagagccaagtgctcgactggagtgcatcggggacctaggtttgtgaaggtcagagaagggaggggtttaagtgtaactgttagaggcacatgtaatagtgtcagtaaccttttaccagttatttgaatcatcgaggacccttttgcaaaattaccaaagcgggcgcgggcaccagtttt

SEQ ID NO: 77573 - DNA, 451 bp, Zea Mays
gtggcactgtggctgccggtgcgctgccgatgctttgtgtgccagggtttgggcagcaggcggaaggttgacgacggcgcgtccgccgtcggatccggaacgagtatgcgagattcatccaagtggggcgatgatcgttggccgttagatgacaatcgtagagccacgatcgtgcaacaggtgtaccgattcggggttgtgctctcgctgtagatctgggatccttcggtacagattaggattggcggcattaaatcgcgatcgttagtttctgatctggcgggcaacatcgcccatcgattcaattggggaaaatctaatcttggcggccgacagctgatcgaacagccaggatggctgcgtaccccttcaccctggcgtttttacataagaaaccctctggaattagataatgaacccgtcgtcctgcgcagtgtggctcagtgtcttg

SEQ ID NO: 77574 - DNA, 355 bp, Zea Mays
ttaatttgtacttcaataaacaaattatttagcatgcaaatttactattttactcaacacaatatgtacaaacctgtatgttcccactgtttgcactcgcatgtatactccccagcttctatgtccgctgttatcttgaattgatgttgtccccacacaattttattagaccgttttgtatgttgtacgatccaatctttatcacaaccgtctgtgtcctttaatattttgtatgcagtggcgtatttcattgattcctcaaatctattcataacagctctggtgtatgctctagacactcttacttcgaacctatacaatgtatctgttgtccttggtccctataagacgttat

SEQ ID NO: 77575 - DNA, 812 bp, Zea Mays
caatttcgaccgcacgatgaggattctatgacctagattagatctagccttatgcgaatcggtacgaagttatggccgtcggattggagatccatggctcccattaaaatactcgatcatcccatcaggtccatccgtagttaatccaacggcacagatttgatcaccaaagggtatgcacgctatctaatctggatcatttgttccggaatcaacgaccaccacctcatctcctccctcccgctagtgactagtggtggcgcccaattctaccgtggcgccctccccgacgatcccaatctgcatgctctggtgatcattccccaattcgacatagccacacagagcggaggagacgaggaatacgagggtaagcttattaccatggatcgtgcagtgtgttgacccggccccgcagcatgtgccccctgtaaacccgcaacccaacgtcgtcgagggattctggctaccgcactcacctggtgaaaccttgagcacacgtagagcctcctagacagtccctcatgagccgcctgaaggtagcatggacctagccccagatcgacgatggctgcgctccaacttttctgttcgctcaacgaggtgctctgatctcccttccttctagcgtcgatggggggtcaggtgcacaatttggtccaggaggagctcggggctcaaccgcgaggatttgggatgaagatcttgtccctgaaacgcggttgaggttgttgcacggtcgcggacccagctattccatcggacttgagctagcagagacccctgaagaactggcctgcacgacagccaca

SEQ ID NO: 77576 - DNA, 816 bp, Zea Mays
gaaatgttggaaccgggtatcttgcattgggacgagcaatgaaaccataacaaccgaagttgttgtgatactgttctttgctagtggccttcgtttcgtacaatagttcatgcatattgcaaaaacactttgcactcagttccatcccttggcttcttacagcccaaacaaacatccccatcctaattatagcttcgggagtaattttatgaagaaagatctggaatatcttcaacacttcaaccacaaatttgcttaatgggaaccgaaggcctgccttcataaagcttcggtaaacaacaacttcattttattcaggagcaggggcggtgctgtctcctccaaccctcacaatagacatatcacgaaagtaccttcccctcatggcgtcaacctgactttgtttaatggtcgactttccaaagatagtatggcttggccgccagggtcgatcttcggaatcttcatctccactttccacatcaaaatcatcactatcatcagaatcttcagataaatccgccattatctccttggtaatcttctctgtatttgtttttgccatagattcataaaacccatcaataaaagggtccacaaccttcttctccttggccaccttcgtcacctcagacaccttcttctcctcagacatttcttcaaaactccagtatatcacaaagattgaaaatcaagcaagaactgatggcaagagaattaaaattttgagaaaataacgcaagcaacagaaatggcgtagcaaatgtcgctgttgtgcgtttctatttatatgcctagtgcattgcaacttagcgg

SEQ ID NO: 77577 - DNA, 567 bp, Zea Mays
gtgacttgtttgcttaaactagtctataaacaccattgatctgtgcacctctgtaattgttttgctcccaacttgtttccgtgttgttcctagatccttgtcacctcctttgtgctttgatccaactgttctaatacattctctaggccatcagctagaacgggtacttgaaacacttattcaacattggtatatattattgacttgtgtgccatagatatatatttactgagccttctcaaagctccacctttctcttgagcagaacaagtactcattttcaatcacacccatgctcattgggctgtcacaccagccaccctttgccacctgcagtgctggtaagaaccttataagatcagggtaagacgctctgcaacttgtgttccaccaccacccttgagagtagttgtagggttcacactttttgcttgtcgctttgtttctattttgtactaacaatgacatgaacatcccatctggagctccacaacatgatgagagctatgtgagatgcactcaacatgaacactgaaatgttgaagagagttttagaacttgtcgaat

SEQ ID NO: 77578 - DNA, 644 bp, Zea Mays
tccccacctcgatccatcgacgacatccactagagggtagtagagtgtagagactggagtctcaccgagtcaattagctagaccttttaggttacctctggaaaccatctttcctttatcgcctccacagctgctgccactaactaaaacgctctccaaagctctagttctagttccccctagacttcgtaacatgtgggcccaagttcgtttcagagaaaacgtaacagtctctactctctagagtatgtaacatttggttggttggtgatggtgatgcccaaaaagatcctcggatatccagtgcaggggtgtatcaaggtgttcgcaaaagatcgtgtaaaatagagagtttgtcctgtaaattacaccgtttacatagcgcatcggttttctcccctcatacgcaactcaattttccaatacgaagagaagtaatagtaccactaagggcaagtacaaatccaatgaatatgccatgtcttaagtttattttaggggcttgagtgaaagatacaccaaggaacaccactttcttcttttgtactgtttttttttcttaagtgcaaggaacatcatcttgagatgcattgattatggataggttttacatacggttcatcatgtcacactatgttttattc

SEQ ID NO: 77579 - DNA, 401 bp, Zea Mays
ctaatattctgttccaaactgtgtgttcaattttttgaatctttgttgcaatcttttttatatatatagctcaatgagttctgtaaacaaggaccaagggttaatgcccgaccacatgaacaagggtgtttctcaagaacattcaagtgatgaaggatatgaaacgcctatcgacccttgtcctagcatagatcgggccgctcggcgtcaactgcatcgtgacccggattatcatccataagagtgtgaggtaaagtacacatctttagtttcgtatgtgtatacctaattagttgatttcacaatgtctattacacatgaataggaggtcttgtctcaatatcatgcgatacttgatgaagccgtggcacattaccaagacgcaccggggctgaaccaag

SEQ ID NO: 77580 - DNA, 929 bp, Zea Mays
taggggggcattctatttgctgtatttatggttcacagtggcagcatgggccaatgctaatgaatgaaactgaaatcctcggtgcccccatttattttgatgttggcttgatgttcatggtcttgaagtttgatacattaggtagaagtaatgcactctaaatcatcagaattttattaccttgagacattattgaaccaaaatctatagtttcggggccgatcctcctctttgttggccctacgcttaagttctggctttctggttctttgctttaatttgctagttccaacaagagactacatttcgttctgaaggaggctttggacccgaagtgtccacgcactctgcataatacaaatatagacagtgggggtctatactctatagtactaagggtacgtttgattcagctttttgaacctgcgcttctgcttctgctcttctcctcactaaccgcactagagtagatcaggtcttattttggtttgtgggggcaaggatgtagcagcgaatgttattttacatgccggcctcatcctcttttatttacgcagggggccgaaactagtaagttattgcactcgatcaggacgtgagagatagagtcagactcgttcctctaacattttttcccctcatatttccaagagaaatagaggttcttattgctagctggaggagtcattatgctatactatcttatcatttcctggctgactaaatagaactgcatagttgatctttgcatgcatgtgaactgtctgaattcttgtcacagtgcaacaaccggcgttctgtattcatatatcactgtgtatgttaatcattgctctggttgctggataagttaagttttgtcataaaccacccgtctcagtcttccatttataaatcatttgtatgcacatggcgcttcttcccccccc

SEQ ID NO: 77581 - DNA, 633 bp, Zea Mays
aactttaaccttttttgaccttgacgcactagaagtcgccgaggtagcagctttcctcttcttcccttgctttcgcgaaggataatagtagtctggatacacaaacctgatcacatcaaataccctattcaacctctttttgccccgagctccgaaggcagttgtcatggcttcatcttcggcctttgaatatgctccaagcaactcatcactagtcgcctctatgacatctagccagtcatcattcggttcatcaaactggctcctatatcgaaaggtacacttcagatacaccaaatcattttggctggagccagcggcagcctccttcggcatctcccatccatgagcaaatggccacactctgtaagcaatatgctcttggaccaagtctcttgtgccaatgtaagtacacactgtattaaaagctgtctggcatgcttgcacgtcgtttccaactgcaatggccggtctcctgatgccgaagtgagaccatatagggcgctgaatgacccctttttatatcttccctctcacttagatcaaccttcacataaaaccattcttgcatctaggagcctggccactttttccgaaatgtcagcacaagatagctggcctcggcgcgatgta

SEQ ID NO: 77582 - DNA, 640 bp, Zea Mays
cgacgattttggtattggttttttacttcgatttttcggtaaaaaccaaacaccaaacctgcttgcagtcaggtatgctggtagacaaattcaggttatatgccaaattacaaatctaaagaaagtaaaaattaaatagtggtaagaatttagaaatacttcttgcatcacataagtaataattaataagttcattgcaacacacacgtatagttcatagaatcaaagaggtaaaactcaaaacatgcaagtaacagattagcacttaacaacactcgggcttctaggtaggcggtagcacaagtgaaacaaaaacaaaccaaaaacgacttccagctcccaggaaacatgcaggcacgccgtcgaccgttgttgtcttgcaggtttgctggagaagggtcgctgctgcctgttgtctcaagcccactagagtctagacgcctgcctctgcctgagcttgatgccaccaccgtcactagactgtgtcctaggggctagggttcaacgttgaggagtgaggacttgaagctgggagcgactgctggatactgcctggcctgggcctggatgtagtcgtcagggagggagagtgagaccgtgagggtgcagccgttttgggctagtcaccggcccatttgaa

SEQ ID NO: 77583 - DNA, 441 bp, Zea Mays
gcgttcttcttttccccgacacagggcacggccgcacaggggacccctcccacggcggcgccatcgctggcgattggcaaagccggcgccccgtgcccaaactcaaaacccctcgtgcagtaagcgccctacggaagatggtgagtgtcagggacgaattcataccggagtctagggcgcgatggaacccgaccacactaggcataaattcacggcggtggaaaatccacggtgagaaatccccatgggtttgaagcttctcccgccaaattgaggtgcttcgaagccacaccacgccatcgcacatcaccccaaccatctactgatgtccgaacggtgcccggcacgcagggcatcgccggcggcattctttctctcctctgcgctttctttttctctccatgggcgcgcttggtctttcggtgccggcttaggatggag

SEQ ID NO: 77584 - DNA, 342 bp, Zea Mays
ccgaggttgtagcaggtaaccaagggcataattgtacttagaagggcactcccacccatctggttacctataaatacccctacattgtacattgatggtacacgcttaacaagacgctacagttctctgcctaccgttttcttgagcacttgaatactcccgtgcaagggtggaagacgcagtgccctgcggactattggagggacatagggcatggagtactagagggtagaggtagtagattgatgcctaccagagcctatatgatgaaggcgcgactgtggtgcctcacgtgggcgtgaacgcgtgagtaggggtgggggcgtgagacaccaaaaccgg

SEQ ID NO: 77585 - DNA, 539 bp, Zea Mays
gaagaactccctcgctctcgggtccaaagtcctcaacggtggcccatcttcactctttcctctccccggcagcccacttccctccctttgtttttttctttttcccttttctcggatttcgcttatggctgggtcccactctccaggggggaaggacttcttcctcaacagaacggcggtgctgcccggggattccgagctcgcgcatgcgcctacgaaaccgaagccgaaatttgtggaacactacctgcccgggctcggctccctttctcccaggttataaaactgtgccgcatctctcctctcatccctttgtcgcgaaccaggtgagacttgcgccaccatgagcgaatcggacagcaccatagcggcaatggagggccaccaccctcgatctcgcggagggccatggctgggtcgtggcgtgcctctccgatgggcgcaaggtctggtagaagcctccaagatatctacatgtttggaaactgccgcggggtcgtcctgattcctcgctacgcccacctcatcgccgtgaatct

SEQ ID NO: 77586 - DNA, 555 bp, Zea Mays
gttgaatccctaaaaacataggggctcttttaaaaagtgactcgacgactttatgtgatctgctctgggccattcatccggcgatcaacatcattgattaaatggcgaagcggtacacgctcacccccacggatcacagatcaatagctaaaaatcatccacaccttgatcccattcgatccgtccgttactgaactgagggcacgaatctaatcaaatgaaccggtatttaggatttagtctaggtcaaccattatcaaatcgatagatgttctaatctcttccccacttgacatccgagagcaacggtgtcggggtttatccaatcagacgctactccgtcttaaatgtcaatcttcttggtgctacacgatgctacgaacctcgtgaacttatctaaggcctttccagaggcgggtacagcttctggatggttgcacacatcgcgtagcgacacagaggctgcaattcctcgatgacgaagaattctcggcctctcgggcacccttctctactggcgaaagcatggtccaactctctctctctctctctctc

SEQ ID NO: 77587 - DNA, 570 bp, Zea Mays
aagtaaacgagagcctgtcagagaaagtatcattgtcgatacctgaagcggtgtcgcccggagatcttgaattcattatccgccatgcttcgggaaaacaactaacatggaagcaaattgttgaagctcagcattacgctaaagatctgaagtatcctcgaggatccctagtgtacgaaggtgatgaagaagatgatttcctatactgccttcctgataacaaggaaattgacgtctgccgagaaatgatggataacatgggttacccgaagcttgagctcaggctgtccttaatgccgaaggaccatctggcagactgcttggcatacaatagtttgaaggtttatgcttacactttccttcgagcacttgataatcattttgattaaattatttgcttattttatttttttgttattagggtcttatattaagtaaagctttgaaggcgcaaaaagaatgtgaggatgagagcactaaaatagccttcaaaaatctgcgctcagaagttataacacttcggaacgaggccctagaaaaagacaagattcttctttctttagtcgaaag

SEQ ID NO: 77588 - DNA, 626 bp, Zea Mays
cacaagtattcaataagcaattcaaatcgtctagaaacaagtcaggcgacagacgccgtttcacgtaacacgacaccatttgcactgaggtcaactgcttggaagatatgattacaccccgcggtcacgtcaagttactactcaagggcagtttgctaaacactcggcgtaccaagccgtcccttggttacacccattagggaggggacatctaggaattttaaatagatttttcccaagcagtcacatccatacagtatacgcaatgaatgtatcaagacagaagaaagatatcgatggagatcaaaggaaagccaaatatagctaatgaagtacaagtctaatcaacagaagcattgaagcacaaagcgaaatgaagaccaaccaagagccatctaccagatgtccaatctgtcgccgatcaaataaatttcaaacctaacaggacatgggtagatcgcgctgttattctctaaaaataggaaatgaagacaacatgccgatttctaaagcataagctgatgatataaggctgagttctaaggcatgagacgaagataagataataacttctgaaagcatgagatgaagacctttgagtggattattttcagtaatccactcaa

SEQ ID NO: 77589 - DNA, 980 bp, Zea Mays
acggcttgtactttggatacttgagtttgatcttgagatgtctttagtaataaacttctgattcaagttagtttatgtttatattgttcatttggttcacgattcttttgagtactttattcctgctcatgagggagtagagtagtatcgtaggtgtaagcgtggtgcttagacttaggttactcgtgaatgcaccctgcattccggatcggtggtagatcacgattgtgacattcgttctatatagcttgtactatatggcatcgttgatcctctgtagtctacctcccgtttgtaggactagtaggggttttgttactggggaaaagcttacccaagtcagaattagtgcaccttatctacgctcctattatctgcatccttaattgctatcgagttaaaccttaccttaacctagtctctatcttatcattgttcctagtttctatcctcgcttattgccgcctctagttaagttagagcgtagttgatctcgcatgtttccctgtggatacgatatatacttaggaagctacaacggtatccatgcgcttgcggatttatctgtgtgcgttaataaataccaacaatgggaaggaggacattgttgctgcgttgcttgctcatgatcaaaggaggaagaacaatgcaacggaggagccttttggtgatgctttcctagtcaagggtgatcgtagtgtggaagataagaagagcaacaagaagaaggggttgcgatgctataagtgctagggttgtggacatgtaaagaggaactatctaggactgaagaatagaggatggagaatccataagtgttgtgattgccaataagaaagatgacttggatagtgatggtgacgttctcacggtgtcaagtaaaaagtctggtgaagtgtggttgttggattcagctagctcgttccatgcaacatcgaaggagttattctcgtcatacattgagaaggacaatggtttcg

SEQ ID NO: 77590 - DNA, 392 bp, Zea Mays
gtcacgtccctgaggatgtagctgtgggagctcgctggccaccggtttcctgcccgtggtggatggtggcaaggtagatagcagggagatgagataacagagaaaggaagtgaaaatgggattggctgtaattgcttgtttattgctgaaccagacattcctgattgatcccaaatacccctccttttgcctaattagcccctgttacgagcgcctataaatgttcccgaccgtaacaatagctcaaggttacacctggaaactggggagataaggaagatgtaattcagtctgagttttataatatgttatttaggtgatcattaagatagatggaaatcacaacttgcttgtcagatcatttcaaattcaaatgtgcattttcaaattca

SEQ ID NO: 77591 - DNA, 564 bp, Zea Mays
taaaagatttcattctcaaaggcattcaaactgttggttatcaattgacttcgatttgattagacttggaatcaacacacttagtcgatttagggtgaccactataccctactaacggagcaatcggcttaagtcggcgacgacttaagacggtgcaacatgctcgcgcttacttgactgagggtgaccactataccctactaatggagcaatcggcttaagtcggcgacgacttaagacggtgcaacatgctcgcgcttactcgacttagggtgaccactataccctactaacggagcaatcggcttaagtcagcgacgacttaagacggtgcaacatgctcgcacttactcgatttagggtgaccactataccctactaatggagcaatcggcttaagtcggtgacgacttaagacggtgcaacatgctcgcgcttactcgacttagggtgaccactataccctactaacggagcaatcggcttaagtcggcgacaacttaagacggtgcaacatgctcacacctactcatcttagggcgatcactatgccttaccagccaa

SEQ ID NO: 77592 - DNA, 565 bp, Zea Mays
gcatcaacagtactaaaaccaaggtatatgtaatgaagcctgtaccattctagtctataaattacatggcccggttgcctccttgctccaactcccacaccctccctttcactccaatgccagcaacatgtgtaattcgactgttctgtagcactgcaatcttggtttaggaggccttaggaattccaccgtccgtttcttctgtgtttcttgtggattccgtttgtggctcacatccatcactccaccaagtccctggtgtatactcctgtggttcacttcacatccatcactcatgtgcataaatatgtgacaaccattattttcatatttttttagtaatttaaatgtagcttctcctttactcgaagtggttaacatgtccctacaaaatcaaagaactaaaatgatgtgttctcgtccttttgggggtgtgcgtagggaagaatagagcaataaaaaggattgtgggggagaacacaataaaggttcggatccctttgttggttgcactaatgtgagactcaccgagggtgctgaaggaattgctcctatagaaaattct

SEQ ID NO: 77593 - DNA, 626 bp, Zea Mays
cgatgagacacgctaagacccaagctacgaaggacaggggtcagcatggcatagagacaataatgatgaaaccagagctcctcgtcacccacacacccgatcttaaagagcacgggtagagaagcttagaagaccgaggcacatgccgacaagcacgactttaccaaagtagaacgtctcgttttaccacagcgcaatagctccttccctgagaagctaccagtaactgaccccaccttgttttataaaagggggagggtcgaccaagaacggagacacaaagagatgcacgcataggcaaatggaggactatggaggccgaagccaaggggcataccatcgtggcacccaaagcttagcttggtagcgagcactagattcgtagtccttaggcctcaccacgcataagagacttgggagcctcttccctctctcacccaattgtaacccctactacaatcgttaagcaacaaggtgccggtagagcaagccactgaagagtagatgtatggacgctctgcgcgaactagtataaatcttacacccactaaacacaccatccggactcggaacccacacaaacaaattcacttgttggagttggttcaaaacaccgacaaccggat

SEQ ID NO: 77594 - DNA, 349 bp, Zea Mays
gttgttgtcattatctttttaagttgttatcttggtattgggattatttatattgtgtttttttcagtggattcgatggtctcaagaagaagcttgcagggcggtttctgtccaaacgtcgtcgtgcagacgattcaggctgtaaccctgccacagactttgaagcccaatcatcagctagggcagtgtttcattggatactgaagatgctccccattctcatctagactaccccattgacattataggatggactgatcccaagatgcgtttttcaatggctgagtattcctctaggaggactgtggatcaattctctctgcccagtgacacaaacatccagtacttc

SEQ ID NO: 77595 - DNA, 480 bp, Zea Mays
gactagggtggcatcattgcaatgtattgtgctgttgggcctgaacgaaaccccttaaccattgcttcaatgccaatatcatcgggtacacttggtgcttgagcataaaggcgtaaaaatctttgaatatatgcttggaggtattcatctgggtcttgggcacatttgaagagggcatgtgcagttatgggcttcgtttggaaaccttggaagctggtagaataagatctttaagcctttaccatgatgaaatagatcctggccaaagagagcaatactaactttgtgccacactttgactgccatgacaaatgattttccattactattgagttgcctccatacggagatatgatagctttgtaactcattaagaattgcttttgttctaacaaaccatcatataccgagacttgaggtcacctatacaatgttggccatggtgtagttgtagatctcctgctaggggagaagtgctat

SEQ ID NO: 77596 - DNA, 849 bp, Zea Mays
gtataggccactacggcttccctatcttgaaattcaagcaatgcgtgtccaatgtaggtggcgaatcttgcttcaaaatccttcttcatatcttgcgtaagcttctcaacttcttcatttgactttccttttaattcttcgttgtcatttctgattctgaaactacgactttcctcagatatcatcttcccaacccttttactggcactagcattgggattggtaccgtaacggatgccctgctaatcatgttgcattatgcaaggcacacacgtgaatgtgagatattgaaaatttataaaactgaccataatccctgactctaaccctaacccaaactcaacaacctaactctaacccttaaaaccctagacccttaaccaaaaacctaatccctgactctaaacctaacacctaaccctaactctaacccttaaccataatcgtaaacccaaaaccctaaaccctgactctaaccctaaccctaatgcctagctctaacccttaaccataacccaaaacccaaaacccttaccctaaccctaatccctgactctaacccgaacccgaaccctaaaccctaaactctaaaccctaaacccttaaccataaccctaatcctatagggagagagggagagtcatataagacatatagagagggagagtcgtatagaacgtatagtgaggaaaagagggatagtagtacagatattattgagttgtgttgatatgaatattatcgagttcggatcgaatacgtatattatcgagttcggatcgaatacggatattatctagttcgaatcagatcggatacagattggattgcataaaaataaaatagata

SEQ ID NO: 77597 - DNA, 2125 bp, Zea Mays
cttcaacgaagacacgtctgagcaaaattcgcctaagggtgtagccgaacaaaagcacaacaagtgcgtggcaccacccacatggtgcgaagtcttctacaaagacagcttcagagcagaagtcgcccaagggtgcagccagaaaaccaaagaacacaacactcgcggtatgcgatctccactacataaacaacctaccgaacagatgtcgtctaggggtgcaactggataagtgaaaaggctgtgcagtcacctatcaaaagcgaagtcccctatggcatgtacgtgattacaaatcgaagccaactcgcaataggcacaacataattacatagcgcaatcacaaataaacaacaagcgaagggctcaacggcaccatcgcacaatagggcacatcacagtattcaccctcgcaactctattgcgaagagggggagggcaacgttttcactcaatatcacaacagagcagcgagggcaacaaaaatgtcacataggctcctccttcggaataagacccacctcccgaaaattgaacaacatcatcctcaactcttccccctcaaacaggtcccgcaagtccccctctccaatgcacatcccagacgtcgatgaaagtaactcgcgctgagcaccccgatccaatcgcagaccaccccgaagacgagacctttccatacccattcagcgacgtcttctcccacttcgtgacgactcaacgatgctctgtttcaacacacccattcttcgcctccgtgagtcttcagctctcgcatcagccttggttgccagcgccttgcgagggacagatcgtgacggagactctgacgcagccaaatccaacgcagcaaaataatctaggtcatccttagaggattcctcaacccgcgagaaaggactcccaaattactcttcacctccgtgagtctttgtgaacttattatattgtgaactattaatttgtgatctttgatgtattgcacttttttattgagatatttttatattgatatgtgttggggcgaaggcgaacatgccccctcgctcgaagatacccattcgacgacatcttctcccacttcgtgatgactcaacgatgcaatgtttcaacacacccattcttcgcctccgtgagtctttagctctcacatcagctaaggtcgccagcgccttgcgagggacagatcgcgacgaagactctgacgcagccaaatatagcgcagcaaaataatctaggtcatccttagaggattcctcaacccacgagaaaagactcccaaattactcttcattcgaagaccacgacccaagctcagacgcctcagacacatttccaccaagaaacgttgcatttgcagccatcgaaacatcattaatatcaacatcatcagggtttgcttgcgcaggcccggacgtcgaaacctacgcagcaaccgaccttcagtatcgcaaaaagtaaaaccaccaaccctaagcccctagcgcatctcttcaacctgcgcaggagcagacaccgccgcatggtcttcgccggagccatcctgaggtgctgagagcccttcacctctcgcctcctccgcgccatccatccgagtcatcgagctttcaagaccggtgagatcgtcaacttcttcttcattcatcatctatgaagacaacacaacatttcacagctaagcaaaaaaaataaaaataaatacctgcgccagtgctcgatcggccctctctcggacggtgccacgaccatgaggaccccacatcctatcataaagtgccccaacggaccgcttcaacacatcatcttcaacctcgaaaattccgcggtcaaagtcctcgctcgcccgatcgaatacttcgaagtgcctacatccttctcgagacaaggcattcgccgccctctcgcaggtaacaagagatgcgtaggacatgaggcccgtcacgatggatgagagtgactccagctcctccttcagccacccaagaaagcgaagacccacctcctccacagatttatcaaaaggagaagtctgtgtgccgagctcgcggtaggcttccacaaatagcgtgtgcgtccgctcaacctcggcacgggtggaggcctctgtcttctcacaatagctgcggac

SEQ ID NO: 77598 - DNA, 681 bp, Zea Mays
agatctcaaacatgaagattttgtgtgtaaccgcacctgatctaaagttttgcgggtgcggatgtgagtttctaatttaactcgtgggtgactcatacccgactcgaaatttgtttattctttattttgcccgaaaacagcctcgcgtgagcactgacgcagcagatacacgggcacaaagctagacaacacatacgaagagccatggtatggaggtacacgcaaacaatcacacagatagatgatgcactggcgcactgatgatgccgtgtacactgtgcctgaataactaaaaagacgaccccgggtgttagaaaaaagaggcagaaacctaggagtagttccttctgggcatccctttcaaaaaaaaaaagttccttctgggcattagttgacaacaataagcaaagaatgctaactttctgccacaaaatccgtgcgatggcagcatcaagcatttgacctcacacacaattaattcatgggcaaggtatgatccctccctgtgccggccgggaattcctctcgtcagtggcgtgaaatgtttttttttccattcgacatcaaagtagcatgacgcgtggacaaggaaagaaacaatttggtacacgtatcccaaatagagtcaaaaccaaatcaaatgcgaacatatgtactacggattccaaatacaggtagttg

SEQ ID NO: 77599 - DNA, 749 bp, Zea Mays
atggatttgcatatgcctccatgccatgttgcttcaagaagagcacgcagagcaagcttattgattgaaatattgatcccaatatttgggttcatgtcactcgtattgctggtgcacattttactcctagagaagaggcagtcaagaagactatggatcgaagcaatcatttggtgagcattttgagaaagttacttataatgacttagctcaatcaacatgtaacttctcagaatctaacttaattggtagaggaagatatggttcggtgtaccgagggaagctgaaggaaatggaagtggcagtaaaggtttttgacctggagatgagaggagcagaaagaagcttcttgtcagagtgtgaagcattgagaagcattcaacaccggaatcttatccccatcataactgcttgctcaatagtaggtactttcaaagctttaatttttgagttcatgtctaatggcaacctggacacatggctacgtcacaaaggagacgaggaggctacaaggtgtcttggcttaactcaaagaataaacatagttgttaatatagctgatgcattggattatttgcaccatggttgtgggcggccaactgttcactgtgacttgaaacccagcaatatacttctagatgatgacatgaatgctctcttgggagattttggaattgcaagtttctattatgattttgagacaaaatggacatgttcaagtagttcaattggtataaagggaacaattg

SEQ ID NO: 77600 - DNA, 542 bp, Zea Mays
caaattgatgcttgcaacttatcatgtggatgtacaaggattccaaaaggtaaacgctcaagttgaagacctaagtaaaatatggttttacctaaatccttcatctcaaactctgtcgtcagatgatgacccgcttcatcaatatcaagtttatttcctatgattttgagatcatcaacataaactgatatgatacaatatctcactttggaccttttgatgaagacacactggcatgcatcatttttcgtgtatcccttccgcaaaaagaattcactcaatcggttgtaccacattctgcccaattgttttaagccatacaaagacttctgcaatgcaatacatgttttgatttgccttgggatccggtacatttattccatctgaaactttcatgtacatatctgaatctagtgacccatagagatatgttgtcactatgtccatcaactacatagataaatgattttgtactatcaatgatattaaatatcaaaaagttattgcactcataactagtaaaaaggttttgttgaaatcaa

SEQ ID NO: 77601 - DNA, 1357 bp, Zea Mays
cgtttcattactaaggactggacttgggaggctttgccccatagtgaggaatccttcttggtggttttcccttcggttgaggaattacagagaatggttgatgtggacttcactcttaaaaatcatggtgtgactctcactatctcgaaatggaaagatgctagtgatgctgatcctagttaccagcttgacgaggtatgggtccatatcaaggggccccccatgcttggagacactacctaggattttgggctctaggctcggtaattggagcgaccttggatgtggatatgtatacatatagaaaaatgggagtgattagagtgcttgttggaatgatgaacatagatcctcttccccttaccactgacattgtctttggcactaaaggatatgagatcacttttgttttggaagatgagaaattcacccctgcagaccctgtggtgttcacagatgtcccacgctaggatggtgatggtggtggggatattggagatgaccaatatgacaaaaacccaggtcatgcaaagaagaaacaaagaaatggatggagtgttggtgggtctggtgcttcatcaagtggaggagatagggagggggaaatgatgtacctatgcttgatgctgctgctcttcccctcacaacgactctacatagacctacaccattcatccaaattgttggttcatcgagtcaaatgggtgctctttcccctttaggttctcccaggctggctcggccatgggggccccctttgcagcaggcccttggagctttggttgcatcagggtatggccctttctgtagtttgatcaactctgatggctcaactgacgctgcagatcactcgttagaattgtcaaaatattcaggggttcagaacccggtttgtgaggtgggagcaggtacattgctgacacctgttaccactcagattgacttgtgcgtgactatgggaaatgctacttcgaataacgctgatctgagaaaggtaactaatgacatctcatatgaacctatctctttgtctccatccatgcagaataaaatgataatgcctattgtttctcagggaatgtatggttccctggtgcaggacactcaggaagcaagggaggcatgtgatgatgacttagttggttcactgtgttcttctggaacaggttcaaaattttatccccttcataatggtctgttcattagaagaagtactcattccaatgttttagatgctaatggtcttccccgggcatatgaggatgcaactctaaaggctatgagaagggcttctaggcgcaatttggatggggatttatgtggaaaacagctagctgatcgttttttgctaccagat

SEQ ID NO: 77602 - DNA, 570 bp, Zea Mays
gcccggacctactgggatgtgttgtctctccttgccacgtggcgccctttggcctgcccatgcggtggggtcaggcgccgtctcctgtgtggctaggagacgttgcatgggtgcggcgtcttcatgctgtagaagagggtacccctgatttaggataccgacaatagtgtttcctgccatgccaacacgcatgggtgggaaaatttggtggccaaatcgacggccaatgcagcgaccaaatctgggcacaaaaatgtaattggcgtgggagtactggcaggcaaatcctagacttgactgaaataagtggcatatgctcgatcaaagcccaaactctggcatagccgacagcaaccacgtcataaagttgtcccaaaaagcaagattaacaagcgtgtctgcccaaataactctaccacctacaactaaagtctaatgagatttcaacatatgtataaccaaaccaaaaccagtggcaagttataagatttgctgtcgtggatcggcaacatatttcgaacaggccaaaccaatgaacctaccaaaaggcaactcaccagcaccttttat

SEQ ID NO: 77603 - DNA, 488 bp, Zea Mays
acaagatccagtgtgagcatactcatgctctgctatggccatagtcttttggatcacttggagtgcatatacaattgctgagatgtatgtgtcgacacttgtagcttttaaataacataattctccagttgacataaagtcattttttatgtacccttatgattcctcgtgaaatccgaaaacgagaatcaagggcttccgataacctagcctcattagtgcgcattgagctaggttgtgaatgtcttccattcacatgataatcaatatcctttaggtgtccaccaacactaggttggttaccaacgaatagatggtatgcatttactatctcagaaggcctagccttcagctgcttgcaagcatcttaatcccagtttgtgtccatacttctccccctcttatttacaatgtcgttgcaatagggagttaagtggttttccatgtaaccactctttctggcacttccacataggattaatttgagt

SEQ ID NO: 77604 - DNA, 536 bp, Zea Mays
gataatttcgattggtggaggaggtgattctcgcgatccaactacaaacgaataggtcattgtgccttagcaatcttagaaccaactccaaatggttattgaccttgctggtgacaagatcaacctaaacatgagttatattcctgcgagcaatcaaagaaacaagcaagaacaagatgtaggcaaaactgaatatcaatcactcacgaattggggttcacgatggctgtccacaggtggccgttgagcacaactgcagtacagatgtttgcacgatggctaaacttatcaaggaaaacccactctaggagggggcgcagcccctagttaaatagggaggaggtgggcgtccaccttcccacaaggcaggaaattagacgtccaatcagccacacaatctcctgcccacaaggcagggaataggaacccaattagccatgccatctctttgatcctcattccttatttaggtggtacaacaccttcttgattatttcttttcaaactaaaagatagataggtggcataacacctag

SEQ ID NO: 77605 - DNA, 418 bp, Zea Mays
cgggagatggaggcgagccagaaggagaagaggctggccaagaaggaggaggccttgaaccagagggaggaggtcgtcacagagctccaggccaaactgagtgccttcaacaaaatcctggaggagcaacgggtccagcagaccatggctgtggagagtctgcaaaggctgcagtgagagctcgagggcaaggcccgcgacaccgccctcgccgaggagaagcttaaagcaaaaggagagtccttggacaggcgggaggcagacctcgccaggcaggagaaggaccttgccttcaaggaggaaatgcttgaaaggcgagaaaagttgttggccgagcatgagctcgaggcggaggagaaggagcggacgctggaggagcgggtccgctagttccaggcgacgcaggaagcaccgggcc

SEQ ID NO: 77606 - DNA, 510 bp, Zea Mays
gggatggttacatggtttatatagatgggcatatatgtctaactttaatggttgagaaaaaggtaaaggtgtgtcacatccatgggcgtgccgcctccgtcgaggtgaggtgtggcgttgcaaggtgaggcatggtgtggcgcaacacgattgtagtcatggttgtggtgttgtgtagcgttgttgtggacaaatatacaaactaccgttgcacttagagcgcataagtttttgatggaacagtaggagtttcagaatttaatttaagaagttatatcttgatgacaaagttatctaacctataatctctcatgcccttttagctctctcgttctctggccactcaatgactgttcaagtctattgactcacctatataaaacccatcctatatttgctctcggatcacttctctatcgctgctcaactatcagatgagtattgatccgctctagcacttgtgcacacaagttctgggagagcaggcctttgaaacaactattgtcgaag

SEQ ID NO: 77607 - DNA, 941 bp, Zea Mays
atctgcagcaaaagatctccctccactagagcttctagccatttccaggcaggctgtggtagaaataaagttacctcacatgaaaaacctatctaaagtttcacctgccatagctccaacacaccgaagataaagtgagaacatgaaaaacctatctaaaggtgactcagctgcttaactgtttgaggtgctatccaacatgcagtgaagtagtatttattggttcactatgtttcacctcgacgtggtgaccatgtaggagataagtggagcatgttggctctcttttatcctctgtatatggccccaaagaagccccaacttggttgcaacaactattccttgttatggcatatgaaagcacaaactgaactccaccgagctctagctgattccatgctttctccaccgcgccaccccactcacatacatctaggttaagtcctcaatcctcctccacccctctatgtccctgtgaaagcgtgaacgcaagatgagcccaagcagtggtgaccacacccactgaaacacccacctccctgtggtgagccttccctaggaggtaatatgttcaaattgttcatgtttcataacccatgtgtgatggtgatgctgacggtgttgcccttttgaatgctaccatggtatcccggccagaacgctgttaggtttgtctacagttcgtcaaaattcccttaaacacgaactcggcaggggtttaggagtttcttctcagattaagatttagtaggaaggggatcaatatggatacctttgatcttgttgataggttccaaccattctaccatgaagcataattgaccatacactagatcagtagaagctcagaccaatgcccacatctctagcatcaatgaaatgctgccaaaaagcagaactaccaaaagcttcatgatgtatattggattacttggattagt

SEQ ID NO: 77608 - DNA, 907 bp, Zea Mays
acgagatatggattaaatagtttctaggtattttattattaaatttatacctaaataatacttccaggggttcatttgctaattccagggacttaattgtgaaatactcatactattgagggatggcgggttagttattaagttctgcgaggtttcttttgcaaataaggctcgacgaaggggtatgctttgctaggatctaagttgctggattagaaaccaagggttaggattagatcggccaaaatactgaaccggtacgccacgagatccatcagatctaaatctaatggtactaactcattacgcggtgatctaatcttggccattggctaaagatccagtggcttggattaagtgaccgaagaggtatgctccccgcctaatccccgccacacatctggcaaccgacgacagaagccctatcttccccccatcggtacccaggcacggcggaagagggtgatgtcacgacggcgctttcgtcgagataggtggcctggcggtaaggtcttcactcctacagaactatccggacccacgcgaagaggagagcaaggcgaatcgatctaagggtaactcaccgtggaataagtagcaggtcgctatgccgacgatgaagggcggtccgaggcaatttcttgaaattcggtgagcaattgccggcactccggccaattcccccgtcagaggaggtcaccaggatgcgtggttggcgcgaccgattcttcccatactatatttaggtggacaacgacgctgcacactgattccatgcacggtggcgcccacccccgcgctggtcgtcgacgtgatgctctgcagagtcgttttggtgccccggttcgaggaggaaggtggtcgccagggcttgcttttatagcccggaggcgttgacgagttggtc

SEQ ID NO: 77609 - DNA, 526 bp, Zea Mays
agattttttcgtttatgccgctgatttgtccgtcaaaatttatttctcatatagatttttttttgcttcatacggtaatacttagatttttttttgcttcatacgattttttgactgacgagcaggtagtagtctaagactagctaggtcttggaaggaagggacggagcttcatacgacgaaagcaaatatacagatgatactacttcaatcttttagcacctctttagctcttcactttacggtaatacttgcacctaaaaccatccctaatttcctctccatactcccacgttagatccggcatctcacctataacactgcaaataatactaccacatattttttataacaactatcatgtcagtaattataacaactaccatctaatacagttaaaaaaattcataaattaatcaatgcacttacgtctaacattaccgtcaagtaaataattaggcaaataatattgatacaaccatctaaataattatgtaaacaatactaccatgtaatcctaacatct

SEQ ID NO: 77610 - DNA, 499 bp, Zea Mays
catgattcggcttactctattcacactggaagcacaaagatgtaccaggatctaaaggaaaagtattggtggtacggtttgaaaagagatgttgctactcatgttgcactatgtaacatgtgtcagcgagttaaagccgaacaccaaagactagcaggattactacaacctctcaaggtacctgaatggaaatgggaggaaattggtatggatttcatagttggactaccccgtactagggatggctatgattcaatatgggtcatagtagacaggttgactaaagttgcacactttatacctatgaagacaacttactcaggagcccagttagcagagttatacatgtcgaggattgtttgtctgcatggagtaccaaagaagatcgtatcagatcgaggaactcaatttacctcgcgcttttggaaaagactacatgagtccatggataccaagctaaactttagttcagcttatcatccgcaaacgaatgggcaaa

SEQ ID NO: 77611 - DNA, 517 bp, Zea Mays
tcgagatccacttaaggagcagctaaaccttatcaaatatctcctggttcagaacatgcatgctcaatgatgaatatagcatgcaaggagcaaccatagcgatggactaaactagtggatatgaacgttgtggttgcttgaggatagaagaaagaggttgtgctcgattgatgagtgtaagggaatgtgcgaactacatcacctaccaactatgccgtacttagcgacatgaactcacgtattagctattgcatgacaacatgttcaccactatgacacttacgaagcgtgtaccacttacgaatcaacaaatgcgacaagatagtagtagataagtctatgcaagatggggcccaccattctcgaataaatataacgctccacttccttatgctataaagggaggggaaaacaatattggaagcggttagggggactaaatgacttttgggttttctaagttgacctcttttaggctgaatttttccacttgttttttcacacccccatacatcta

SEQ ID NO: 77612 - DNA, 539 bp, Zea Mays
ttctacatgacctttataggatgttggagctcataaatcgcaaacaagataaagtcatggcgacttggagttttggagttcaacatcgacctcaaacaggccaaaaggagcaaaacgatgaagaatgttaagtatgtaggtttgagagttcaaatatgttgcatacaccttctactacgcatatggcactttggttttgctctctaaccatgtttatagagaaagtgtcgtctagagctctgtttgaggtgaaatagaaaagttgggagaagatttgaaaagagttaattctaggactgagtgaattcatgtgtactctaactatgtttgtctaaataacaggaagaccctcccaagatttgaatggagaagaaaaggaggaaaagcacataagagtgttgctgtctgggtagcactagatagtctggtgcacctcaccagacagtccagtgtgcaccggatagtccaatgtcctgggcgaccaactgcccaactcgggtatctcagctaaaaacaccggatagtacgggaccatgcac

SEQ ID NO: 77613 - DNA, 428 bp, Zea Mays
agaagattgaggccatcatgagaatggaagcgctacggtcgcagaaaaaggtgcaaaggcttactggatgcatgacagctctgagcaggttcatatcaaggttaggtaagaaaggaatgccattttgtaaattgctcaagaaggtggacaagtttcagtggaccacagaggcacaagaggctctagaggcactgaagaagttcttgaccacaccaccagtactcaagccgtcgcgccgagctatgcctggtcagccggcagaagatctgctcctgtatatctcctgcacgactcatgtggtaagcaccacgttagtagtcgagtgggcggaggaaggacatgcatacctggtgcagcatccagtttacttcatcagcgaagtcctcggaccctcaaaaataaggtatcctcaagtccagaagttgttg

SEQ ID NO: 77614 - DNA, 1537 bp, Zea Mays
caataagcatggcaaagtcaaccaagggagtttacctcatgcgccaccctttcagagtcaagctgagcactaagggaggaattcaaagaacgtgcgccatccaaagaagtagagacttgggccaagttggcttgactttgagaatacttctcctcaagatcagagcaccattgggttaagttggcttgatttcgaagatacttctcatcaaggtcaaagcaccgctgggccatatccgacaacacagctgaaaggggatgcatgactaagaacaagttgactaataaaaataaacagggaagctgtaagatcactaccactgggtcgaagcctgcgctagccaccagagccggatcactatcggcaacaccctcgggggctaggtaactgccggcgtcaccctcggggggtgggtcttctgtagtagccacctctaaggctgggggctcctcaaccacctccatgggagtcgggtgactcggatcgatgtctcgacatgaaagactgccctccaaagtcgacgacgcgtgagacatcactcgggttacctcttgcccagcgaaatcaagcaaggaaagcccaccgtctgggacctctgaacaaacaaccgggatatcatcggcagcgggctctgacagcatatctttggggatgacttcctccagtacttgatcaaagtccgatattgaaagtccctaaagactgacaagagccgacagagctggagtgcggatgtcgctactcccctcacttcctctatagtgtcggctgttcttacggatcagcgggacttcttcctcttcttcctcttcatcattgtcaagcatgcatgcaacatcctgtgcacccttggcatcaacctctgaaatggcctttgtcgggacatcatcaggaactggcacggaagggccagcatcctgacccaagcatgacagtcgccggagccgccttctcttcctcttctcctcgacaggtgtagttgggcgtctcactcgcgcgcgaacgctttgggcgagcaccttcaagcttccgagtttccacctcttcaccaaattcctccccagttgtgatagccattggctcggtgcaggtagagtcggatgattcccccgccagcaggctaagcacaacatctatctcagcgtcatcagtgctagctggcatctcgaagtgagtctgcctctcatcttcgggaatgttctgaattgaagtaatcaaggctttgatatctgctggagaaggtcgcactctaagacccaggttaccatcacgagcaggagggttggacacaaactcagaaaatggcctgattggcagcaagttccaagcagaatatgccacaggagcactagcatttgaaattctacccctcaagatcatgtccagtcggctcatcaaatcttcagtgggaatcttcttgttcgtgacccgggtagaatcgttaaaaccactatacaaataagcagggtacgccctatccttcaggggttggatgttcttgaaaatgaaatcagcaaccacgacctcagcagtcaga

SEQ ID NO: 77615 - DNA, 1028 bp, Zea Mays
gaaaaggcagcaaaaaactcaccagcattagcagactttaggtcatctatttgcttctgaagagagagaggattccaccatgacaaggaagatatttactcaggtactgaaactccatgagcttctagtggagcaaccaccaggtccaagacaccctatgaaagcaaaagttagcaaacggaaaacccattggtaaatgcaaggtagcgcaagatacaagtacctgtaaatttgacaagaagaacggaaagcccaaagctggaatcgctgaggcgctcccagaggcaatgacattagtagaagccacagtttcagcagggacaagcgttgaaggatccggatcccccagactaagcatgacacccattggaatttcaacaccagatacacccattgggaattctatgccataaacactcattgggattttagcgccagaaccactaacctccaaggtggttgggttgggtggaccaatgggcacaatagaatttgttactacaacatcaccagtccagggcatcgacgaaccaacatggatatccattgaaacaatagaaagaaagccaaacgaagaaccctgaggggctggagcaccctcggggcctagagtaccctcaggggctagagcatcctcgggggctggtggaccctcagaacctgaagcaccatggcagactgacaggcttacctctagcccgaccaacaaactagcggaagatacttcatccgggcaatctatacggacgtcgataactctactcaatatattcaagcataagtcctcagaaatggtgtcctcgagcacaccatcaacaaccgacatagttaaacctcatatattcatcatctatgcggcaacaaggttcgaggtgttactgcaaaccttggatcgccgctcacgccgaaccgggggaagcacttcttcttcctccacatcatctccttcctccaccacgtatcaagccgtcctaacaccactcccacctaccacaacatcctccaaaccagcacccactagattatca

SEQ ID NO: 77616 - DNA, 883 bp, Zea Mays
cggggttatatggctctggtggaggtgaaagttcagctacattataaaaaatgtttgttaatttcgaagctgaaaatgaattccgaagctaaacctcagtaaaggtacctataagccttacacgctcgatagcttcttcagctcgcttggcttcttgagcatcgtgagatttttttcatttttctaatcacttcattagctatctcacgaccgcccttcatccacacatcagagtaaaatctcccgcctagcacagaagcttcagccgaagggtctttgatgtcatccgccgagaaaacaaatcctggctgagctacagccttagcacgttcgcaaccagctttctctaagatcgacgcggcccctcatgtgccagcgaatgcacagaagtctcctcggtcccttaaaatttcatcaaaggcttcgacttctccgctgatccactagatgactccatcagggtcgtcacggatgaattttttctcagaggaaaatgcaccaactctagcaaagttgtcttttagtttcctggcgcattccaaagatatttcataacatttatcttttgaagcacgaagctcatcacagtttttgagctctagacctttcgatcttgcaaatttcatgtttcactgcttcgacttcaaatttttcatcagcttcagcaacttccttttttagctcctcaactttcactttatgtgctttggcttgcgcaacaagactagcctcgctagatttcagcttctccactaaggaaagtaatatcttgtccttctcaagaccttcgtttctcaaagatatgacttctgaacgaaggttttcaagggctattttgcagctcccatcctctgcatctttttgagcttttaaagccttgctt

SEQ ID NO: 77617 - DNA, 533 bp, Zea Mays
cgcggccggtgggtcagaaccttcatcttcttgcccttcggctcggctgtgatgatcggagcggcagtcttcctcttttttccttgccctcatagtggttagcgataatcagggtatacgaagccaatagcatcaaataccctgttcaatcttttcttctttcgacccccaaaagctgcagacaatgcattatcctcggccttggagtatgccccaagtagctcatcgctagtagcttcaatacacttcagtcagtcatcgttcggctcatcaaacttctccctgaatctgaaggtatattttaatcggaccaaaccaccttcactagagtcgacagtggtctcttttggcatctcccagctctccacaagtggccataccctgaaggctatgtgctcttgaattaaatctcttgtgccaatgaaggagcaaacagtgttgaaggccttctgacacgcttcagcggcgtcatcaatttcgaccttaagcctacggaggccgaagcgggaccagatggggtgcatgatgactta

SEQ ID NO: 77618 - DNA, 340 bp, Zea Mays
ttgccttaatagtgtccaaccaatcatcatttggctcatcaaattggttcctgaactaagtttgcaggaggtttcctttggcatttcccactcgtttgcaagaggccatactttgtaagcgatatgctcttgaactaagtctcttgtgccgatataggtgcacactgtgttgaaagcagcttggcacgcttgcacgtcatttccatgtgcgtcgggcggccttctgatgccgaagcatgaccatataggacgttggataatgcccttcacatcctccctctggttcaggtcatttttcacataaaaccattccttcatccaagaacctggccacttcttc

SEQ ID NO: 77619 - DNA, 732 bp, Zea Mays
cgcgaatcagcacgcgacaatatgcgaaacagctcgtgcgacacgcaataactaccaaatggatgtcgtgtttatactgagtattattttgaaatatttgagttagtatgaatcatgttaacgtatatttatagaagcacaaattaaatctataaattagttctaattaaattgtgactttgataaccgtcgagcaggcaaataattaattagttaaaacatgtgtcacgacaatgtaatatttctaacacataggcgatgttgttctgaagttaacgaaaacgtgaatggtacaaaacggattcataacgcaaaatataacgtgtacttaataattcttgagcctatgcgtaattaaatgtatacttcgagtgctatcaaatgatttacgtacaactcaagaaatagtatattagttttaaagaactgtcggagggatcttatgcaaaaagggtctgctacggttcggcaaaatctgattgaccaaaggcttgccgcataaaatactacatgaagaacaaccataaaaaaatcctggaagcaaacaaaaatatcagaaggctatgtgagtgggggacaaacgtttctctggtcgcatgtacatgcagtcaagggacgggagggtattatggcatgcatgtgggtcctactagtggtcgttcctagcttttgctgcatgtctacatgcagattgcgagtgggagggggagacagtttcttcttcagttcttc

SEQ ID NO: 77620 - DNA, 1042 bp, Zea Mays
aggtgagtcagatctagttggtaaattgaaatcctgtattcgacttcctcttttgctgaataatgtagtgagttcttctatcagctgattttttagggcctcatcactcatttgataggttggatgatttagtatttgtctcgcgttgtactgaatatcatcagccagtaacgtccagactttttcaaagaaagtaaattcatcacctacttcacaaaaaagaagcattgtgacaaatagatcacgaagttgactggacgttgcccacgaagcggcctcatcaaaggcattataccactcttggtcatcctcaaggagcccatgagctctacacgtctctttgaagctggggtataaaacattattgtatgttcgcaatgattcaaaattctgggctccttttgcaaccattagaagcattctaagatagtatctttcccctgcagatgggtgcacaaagtgtatgcggcctatgttaccttgtctatgtctttgttcccatgatctttttttttcgtcccacctccactcggatggaaaatcagggtaagttagggacctagcactttcatgtaattggttagctacaaaccactctgttagcattgttcggcgtaggaattcttgtgacaagatttgtgacatgttggcgctggcatgatatgtaatgtaattctcattaggcaaatgaactggcaatctagtaacaggaggaaagtgtcgatggatttcgtaaccaagaattctccaacatgaatcatatgggcatatgaatctagcatctaagtattctttgacctcattccttgtgtttgtttcctcgtcaataggagtgtcttgaccatctaaaactcgttgtaggtatagtttgctccggtccggaccttttgtcacgtacttgaacagatatatgatgaatatgcttttgttacaccattctacattgatgtgtgcttgatatttcttgagcaatgtcaagttatatggaacaatccatctgttatctagtttgatgttagacttcataacaaatctattattg

SEQ ID NO: 77621 - DNA, 1265 bp, Zea Mays
acaactttgcttaagagtgcaagccatgttgtggagaaaatattggagataattatgctcaaagtttgactgtcaggctagtttcattctgaaattcagcttttcagtgtaacagggtcgactttgagtgtgaattaaaccttgatccagtgcccaaatgagttcaatctctatagtcgaattgtagctggtatgtagcactacaactttgatgcagagctttgggtgagttgccatgaaacatttggagaaaacctgccctaaatattgactgtcaggtgcacagaatagaaattctgatggtacagtgcccaccggatcataccgccagcgcggctgtcttcaccgccgacgaccgatcttcgccgcgattcgcgccatcgccgttgtgattcacgtcgacgatgacccgataaggccgccaagtaaaagccatgcacttggggataactccggtgactcaccgccgtacccctcgtactccgcggctatggaggataagttcaccgacgagagccaccttccggccttgtgccacgtgcctgagtacctccaccgcaccgccgtaagccttagtaactctccgttgatcgccggaacgaccgccacggtagaagccacgaatccattgcgccagtgctttcttccacctccggccgccgcgcgtcctcctcaaaattcacgaccaccgtcttaccccccctataaattgagcccgtgactagctccgtgaggtcgtcagctaactagccaccgctaatcagccagaatcatctaccagcgagcttgaatttccaatttcccccaaactggtctccgccaccgcgaagaacacctcaccgcggccagcgcaaatcaggtcctatattgccatcctcagtctagttctaacattctcatgtgcccttgatgctctccaaaccatccaattgaactatactgccatgaatcgacgggaacacattcatctgcccgcaaggtccacggtcactgcggccagagctacgtagttggtcttagttgcaattaggttggggaaatggtcagggtagccccgatttcatgtctgccgctcggagaacccagccgttgccccgttcggccggtataggtgctcgccggagcacggccgcgcgtgaacggcgtcggggacctagccgtgcgaagaaataggagtcggaggggtcttctgtaaaccgtcagtggcccagtgaaacagtaaacaaacctgattcgagttagctattaaaccaagggcctctgtg

SEQ ID NO: 77622 - DNA, 551 bp, Zea Mays
gatcatcatatcgtagtatgtgtcgtctatggcagtatgggctccaagcatgccgatctagaccagttgcagcagccgagctactcctgcagattgcttaaagctaggagtagtagtcagctagctatctagaccatcgattgggatcgaggcgaggtcaaggccaaggacgcatgcatagaaaaaacccaacctttcgtagccgttgacatgggagctcgagccgctgtctgctctgtcgagctgagctccattccatccctctgtcgccgtctctcggatgctcggagctttcgggggtgaatgaaaagcagtgcacatgtgctagctgatgtgcctgtgcaatgcatgcatctccctccctctctctccccggactagtttagtttagtgtgaggctagctgacgacggctgtgcctaatcgtcgttgacagtgtttcctctttggatcggagtatgtactcgatcgtcgacgcagtttctttcttttctctctccaatgtttgtttggtaacctcgtgtagtcgtgtgtcgaattgtcgggtcagcg

SEQ ID NO: 77623 - DNA, 347 bp, Zea Mays
gaacaaatgggcatctcgacctggacacaggaggtaagttgtcacaaccaaccaagttattgggcccacgtacatcaatccttgccctcaaggccttggatggatatgtaggtgaatcagataacttactcggggtgccgagtttcgatgaactcattctttcccaaggatcattcaccatagttgcaagtaatacaataatcccataagaacataaactttaaatacaggagttgagcggaagactttacaataagataatatacattaacggacttttaaagtatccaaccaagtattaggtattattattacatgcgtgaggtagagtcaagtgctaacttatt

SEQ ID NO: 77624 - DNA, 760 bp, Zea Mays
aggacatttgtagcttgctttcctgtgacccaatcccccataatttggacacttgaactttccccgaatgcttttcttcccattgtcattgttgcttgtctttgttccattgcctccctcaaggcaccctttgatcctttgtttcctctgtcgactcacaccatgtttcccaattggagcacccacttcctttgcaaaagggactactggccaaaaagagttgtcacctatcgggtccaccaccctagagtacgttgttgtgaacatagctaccgagtagtgctcgaccacaaaatcctccatccagacatccctaaattcctgagttgttatcaagcatagtgcatggtgacaagttttgtcagtatgttgccacccctttgcatgatcattcccttagttgggcatttaaaatgtgcttcgaatggacattattgttgtccctaacctctgcaatgtagttgtcaactttctttacagctaagtgacctaggcctcttgtcctttcatggaggatatgcagaaccgaaggtaaaatacacccttgcaacctttgtccaatccttttcctcctatgaaacagctccataatttcctccctaatcttgtctgccaggtcacaaactggtagatccttccaatccttaattcaattgtttaaaaccttagctatgttgttggttacatagtcacacttgaaacagctccataaaatacacccttgcaacatttgtccaatccttctcctcctgtgaaacaa

SEQ ID NO: 77625 - DNA, 343 bp, Zea Mays
tatggctagtagtcctcaaaggaaccatgcttttatttatgataggaaaattgccagtcgtttcaattataataagagttatgttcatgctgcttattatgattcaaatgctatgtttgcctctagctccactcatgattatggtagaagtagacctaggaaaaatcatgatatgtctcatgctcctagaaaaatgtgcaataaaccctctaccatttatcatgctttcaatacttcttttgttcttacatgcaaaaatacaaaagtagtagctagaaaattgggattcaaatgcaagggagacaagacttgtatttgggttccaaaagttattgtgactaac

SEQ ID NO: 77626 - DNA, 578 bp, Zea Mays
gaatatccaatgatggtgcatcatctagtgaaaacagcatatgagagcatacaagcacatagcaaggcaaattattagcacgtacgtcatcaaaatcagatttagtggcaagaaaaataggagcttttagtttaatttcatttggtatgggcggttgctggtgttgttgtttagctctagctatattagattttacaatctgttcaggggtcactggatgaagaattattttcttgcccttaaacattaaagagtaatggtttgtgcgaccatgatgtaagctatatgtatcatattgcgaaggcctgccgagcagaagtgaacaagcttccattggaacaacatcgcaatcagcataatcatgataggaccccatagagaaatgaacacgtaccaagcgtgttaccttgagtttaccgccctggttaagccattgaatatggtaggggtgtgggtgtggacgtgtggggagagacaacttctccaccagctccatgcttgccaagttgttgcagctgccaccataaaaaatgatgctaatggaacgttcttgcacaacacctttggtatggaacaag

SEQ ID NO: 77627 - DNA, 427 bp, Zea Mays
ttgggaatgtctggtctagattagatctcgaaacataaccgaaccggtacacaaggcctagttaaatccccatccaacgctcacactttattaggtttgatcaagttccatccgtcagattccgaatcaacgatccagacctgacctacgaaccggtatgcgatctcctaaccatacccgctgatgtatggttctatgactacaagtgctagaaaccaaatgcaagtgctataaacattgtaataggtctatacaacatgtctaagagtgcaaacctcacagatttaccattctactccaagttgcatttctagacccctatttcagctcttttggacttaaaaccttcaaattgcctttaaatggatatgtgctcatattcatattgaattgttagtccatgtttgtgcattggacacataatcac

SEQ ID NO: 77628 - DNA, 574 bp, Zea Mays
gagaccctcgttaggttgtggccagcaaatcacatatatgtctatgcaaaacaatgttttgaactgatttgcactatagactatactagtcacaaagtgaagttttaaataggggtgggatgagtaacactgctagagacaaccttagtgcataaggtagtagcaagtgtgcactcattgttctcattaggcttgctcaggtcaagtgagggtttgttcttattacttttggtgatcgacatcacctagacaacttggtggcgatcagggctttggttatcattcagtggagatcatgggtggcccaactcatgatgtaaataggtgtgggtgattcagcatgcaagagttgcaaagaattaatccatataaagtatttgttccttttatggatcaaggagtaaccacaccttgcatgggtagtgctacgaggactagtgggaagtggttgagtctttgttacctcaaaaaacaccattatgttttaacccttctttactttaagcatttacttttgggcaacatatctagtgtaaaaaacattaagatgctaacatgctaacatcaaatcttg

SEQ ID NO: 77629 - DNA, 1209 bp, Zea Mays
gacatggtctccgtcgatgagatctttggaggtcatctcgtcgacgtcgggtactgctgaagcgcttgtccgcggggacccatgtttcatttcctgcggggtcatggcctccgatccatatagcaggagaaagggagtgaatctggtcgcccgacactcggtcatgttcagtgcccagaatgcttcaggtagcaggccagcccatttacattcttgacgtcgaggagcattttcttgattgccgtgaaaatcttgccgttggcgcgctctacgacgccattggattgtgggtggtacactgaggcgaaggcaagcttggtgccgatggagaagtagaagtccctgaagtcttggctatcgaattgtttgccattgtcaactgtgagctcagacgggactccgaatcggcagacaatgttttgccagaagaatttctgggcggtcttcgctattatcgtggatactgctcttgcctcgatccacttggtgaaatactcgacggcgacgaaggtgaacttgaggttcccttgagccatgggaagcgggccgacaatgtctaggccccagcgctaaagaggccatgtgtgggcgatgagttttgtgaactgcgaagggtttcccgagcgtggagaaaatttctggcaggctttgcaggatctcgtcacccgattcgctgcgcaaatcatagcgggccagtagaagccttgtcggatcaccttggcggctagggccctaggccctgcgtgagagccgcaagttccgctgtggacttcgcgcaggatctggacgccttcggtctcggtgacgcatttaagcatgggttgaatgaccccctttttgtaaagttgtccctcaatgagtgtgaagtcccggcttcggtgtttgaggcgcttggcctcgttgatatcgctcggatggtagtatccctgcagaaacagggtcattggtgcccgcaagtcttcggtcatgatgaggttgactatgcggtggccctcggtgtcgttggtaatttggaggccctctgggatgtggacggttggcgtgccgatgacatggtagaacacgtcggagggcagggcctcgcctctggcggctaccttggccaatgcgtcggcctcctcattcttggctcgatccacgtgctgcaaggtgaagctcttgaattgtctctcgaggctgcggacagccgcgagatactgcataagtgtg

SEQ ID NO: 77630 - DNA, 498 bp, Zea Mays
ctgaacaacccaccacaatccacgcgagtacaagctctagcgtctggtgtcaacgcgtgtgcggccatcagggctacgacaccacaacaagccttcgtaataagcgcaacaggcacaattatgacttggtaattggggtacacgataagtccacgcaacgtgcgcaacaggcgcaattgtggctcaatgatcacggcagacagatagtgcctacagggcatgcgaaaaatacgcgactcagcgatggcggtctgactcaataggagtggtccgattaagtgagagtgcaacatagcaatcacatgacgcagccaagttcgtacgacacaaatactgtgtcgtgttgccagggcgcagtcaatattcagctaatgccataactcagccaataataacatagcctgatcagtgtgtccgagtacccactatacaaattaatcgttcgtcgtgagtctgatagctcaacgcaacacaaatatttaaagcggtaaaaaatac

SEQ ID NO: 77631 - DNA, 358 bp, Zea Mays
ggaaaaaatattttgcgctagttcaaaagaattctaattttgaaacctgtagctctgttagccctcatgcacatgctaccgtttatgctctacgaggcactaagttttacaccattcaagttcattgatccctcttaatagtacaattgtctatcctattaatccgatcagtttcttctctgaacacctgctgatcggcaaaagcaaaaacctatgtgtttacctttgccttcacttaatccacattcaatggttatgagtctctaaggactttactgtatcctgtggttcagtcctgcattcttatcactccaagaattgttagtccacaatcagttgttcattaattatcaaaaca

SEQ ID NO: 77632 - DNA, 558 bp, Zea Mays
ggtgatcaattcggccgagccgtgctggcggccggagatgaagaagaacactagcgcagcaaatacgtgttcaacgtcgtggcagctattccggtgagcaacggggagctaaagcgagtcgtggcggtgcgatggcaaggctcggacacgcggcacaagaccgtgcgacggtggttcaccggcgagcttatctgcgcaagccacaaggcacatggggtacggcggtgagtcaccggaattatcctccggcgaagggttactatctagcaagcttatctgaccgctggcattgtaaatctcaacggcggtggcgcgaatcacggcggggatcggtcgtcggcggtgagagtcctgcgctggcgatgtaatctgatcctggtactgtaccatgggatatgttcagtcagatgaacctgacagccaaacttggagctaaactttctctcaattctcaatgataactcacaccatgctctacagcaaaattgtagagctacaaaccagcaatacttcgactatagggattgaactcatttgagcactggatcaaggttgaat

SEQ ID NO: 77633 - DNA, 435 bp, Zea Mays
gtcggctccgcgattcgtactcggcggagtgcagataactacacagggtaagaaatatcgcattgaggatgaacttaggccactgtttcgccctgttgccgtgcccacttgcccggtgacgtggccacgcgaccatcgccatcgtgtcgccgttcctcgtggttatgccatgctgttagccatcttaccacgtcgcaattaatcaccatagacaacccatctatcgcatgaggccttgccacagtaagagccacaaatcacttgcgctagtgaccacccttctctccggtcgccgcgtgtcttctcaaaattagccgccaccgccgatggaacctataaatttccgccccagtgagctccgctaagtaatcacacacccaacgcaacagcccgtgcctcggattgtccaccagagagctctaatttagagtttcc

SEQ ID NO: 77634 - DNA, 327 bp, Zea Mays
tgcattaagacacaccctaagccttgcttggaagcatcacaaaagatgacaaaatcctggtgtatgtctggcagagtcaggactggtgcggttgtaagcctctccttgatgatttggaaacttccttcacatttgggagtccacacaaacttattgtcctttttgagaagttcggtcatgggctttgctatgctggagaatcccttgataaagcggcgataataccctgccattcccagaaagcttcgtacttcactgacgttggatggttgcttccaatttgaaacagcttctaccttagatgggtccacttctatcccttctgca

SEQ ID NO: 77635 - DNA, 703 bp, Zea Mays
caggatcctagcttcgacaacgcgtctgctgctgtgttgcggtctctttccacatgatggaattccaacccttcaaacttgtcttctaatttttgaacggttgtacagtacttgcccatagaatcagccgagcaatcccaatctttattaatctggcttatgaccactagtgaatctccgtataccatcaacctcttaacgcccagtgatatggcgatgttcaacccatggatcaatgcctcgtattctgttgcattatttgatgctgggaattagctgaagcgcgtacttgagttgttcacctctaggggcaatgaagaggatccctgcgtctgctccctgcagcttcagcgagccatcgaaatacattcgccatacttcagtagtctctgggttgtcaggaacttgttgcttagtccactatgatacgaagtcaactagtgcttgagtctttactgttgtgcgaggccgaaactctatgtcatgagctcccagctcgcaggcccacttggctattcttccgatggcttctttgttgtgaaggatatcccctattggaaacccggtgactactatgactttgtggtcgtcaaagtagtgacggagcttgcgagcgattagaagtaccacgtacagtagtttttgaacttggggatacttctttttagagggtcccaaaacttcgttgatgaagtagaccaga

SEQ ID NO: 77636 - DNA, 362 bp, Zea Mays
agagttaagattacgaaatacctcctttttaactgggatttgctttcattcctcgccttcaatatcctattttggccccttccaaagattatcctcattcttctcctccactttgtgctgagatttttcccaaggagatggtgagatctgatgttgaggttcatcctcatccatattttcatcaacatatttttgatccgctccttcattgattctgcgctagacatttttccatggacctccgcgagcgcctccacgacaaccaacacccctctgttgcagcttcacaaataccactagtgcacaattggatctcgccacactgacaaaggattttcatggtcggccctagaagtggctag

SEQ ID NO: 77637 - DNA, 407 bp, Zea Mays
cctcaactgtccgcgtgtacgcaactcgccacggttgtcggacgcagccgagccctcgatgccatttccccgctctccttgcttgctgagccaagcatcgcccaacatacttgtcgtagtttctcgtgcttcataccgcgaacctcatcggagttcactgcctcgacgtcgacagagcctctatgcctagctcgtcacgccgaacaccgtcatcatcgctaggaagattagtccctgcgaccatctcgtccacaccgctgaaaccgtcgatctgctccatgtgtcaaggccacgtgctgaaggtacaagacgaggtctatttttttgttagctacccttcgatttctatagttaatatcgcttagatccctgcgacgtttgtattttctttaactgaataattataa

SEQ ID NO: 77638 - DNA, 425 bp, Zea Mays
cgctgactaccctcgcgtgcgacactccgcgcaaaagtcgcctaagggtgcagccggaacagcacaacaagtgcgataatcgaagtcttttccaaaaagactctccgtgcaaaagtcgccttagggtgcagccagaacaacataacaagtgtgataatcgaagtattttccaaaagactctccgagcaaaagtcacctaagggtgcagccggaatagcacaacaagtgcgcaaaatcgaagtctttttcaaaaagactctccgtgcaaaagtcgcctaagggtgcagctagaataataagtgcgcaaaatcgacatcttttccaaacaaagctctccgtgcaaaagtcggctaagggtgcagccggaacaacacaataactacgtcaagatcgaagtctttcacaacagactcatatcaacgaag

SEQ ID NO: 77639 - DNA, 390 bp, Zea Mays
agttggagtgtaggagtcgtcttgtaggttggtgaagagttgcgcgcttgacgtagattggatggccacgtttgccaccacttcctctttctcggagctagaactctcttcatcggagttccattcttcaccaatatgggcttgaccatatttcttcttcttgaagtatcccttggtcttgcctccctttttaaacttgtccttcttgtattccttcttggcttcttgttcctttttgttaggacaatccgctatgaaatgaccggtttggccacattcatagcatgccctcttctttcctttcctttggaacttgtcattcttccttacaaatttcttgaatgttttgatgaacatagttgtgtcttcatcacttgagctatcttcatc

SEQ ID NO: 77640 - DNA, 903 bp, Zea Mays
tgagaggcaagttcattttgagatgccagctagtccggatgatgcagaaatagatgttgtgctcaatatgttggctggagaatcttctgactcggcccctactgaaacaatggctgttacggttaatacgagagcttgacaaaacagtggacatccgaaagcctgagggtattcgcccaaagcgtcctcgccaagtcagccgcccaactgcgcctgttgaggagaagaagaagaaaaggcggcttcggtgactgttatgcttggaccaggatgctggcccttctgctcctgtttgtgaagaagtatcagtagaggtctttactgaggttgatcccaatggtggtgtaccagttgaagctaaacccaatgggtgtaaccttgcaccagctgaccccaatgggtgtgaccttgttgaaactgaacccaatggatgtaaccgtgcagaaactgaaaccaatgggtgtgattgtgcaccagctgttgttcgtatttttgacgaggacgaagaagaggaagaagaaattcgctaattcgtaagaatagccgtcgttatagaggtagtagggggatagcgatattccttctctagctctatctgctcttgttagccttcaagaattatccataacaaattttgatcaggcccttgaggatgtcattcctgaagatatgctgtcggaaccaactgatggtgatatgatggatgtttgctctaacatttcagacgtgggattagaggtatcccgggcagtatctcgcgcatcgtcgaccttggaaggcagtcttcggtgtcaagaggttagttaggattgcccgactcccatggtggttactgaggatccttcagcctaagaggtggctgttgcagcaaacccagcctccaagggtggtgctggcggttac

SEQ ID NO: 77641 - DNA, 319 bp, Zea Mays
aaagagacaacttaaccaaaacatcacattaaatgaattggtcataataataggaaatgtggtatgcagaaatcatgtacgcagattcacaaaagaagaacgtcataccatctaaagttcacatttaagcttaaccaaagtatcagaacatctaatgttcacaaaagaaagcatcgtaacagcctaaccaaagtatcagaacatctgatgttcacaaaagtaagcggcataacagcctaactaaagtatcatagcatctggtgttaacatcccatctaaggaagcgtcctaacatcgttaactacgctgcaggaccaaa

SEQ ID NO: 77642 - DNA, 448 bp, Zea Mays
gtccgcggaccatctggccttcatggctagactgtccgcgcttatccctgactgtccggccttagtggctgtaccatttgacgtactcaggacaggtgaccatgatcgggtatctgatcgttcctgccccccgagcatccaacctaccctttggatggggacataaacttagcatgatgattagtaagttttcatcggccatatcagccactgagaacaattatgtttattgaactatagaactcactcacatggaagaaacacataatagccaactcaatgatgtataagcttgagtattggttgtttctaataaatgaaccatttacttgaaactatttggcaacactgattatgtagtttgcaattaaacaataactgaatagtcaagcaaatattataagcatgttcatcccatgaataaatatgaccgaagcaaattatagca

SEQ ID NO: 77643 - DNA, 578 bp, Zea Mays
ctttaaaattgtaaattcatattgtatgatatagatacaaaccacgttgttttagcaagtaacaacacatgtccctcatgcatcttgacagttacctattcattgaagcttattattatccgctttatatgatcctgtcctaggttacactaagaaagccttatcgtaaaattgtttagttacttgagataccggaaaaggacatattgctccatttcggaaagaacataggatatctctccataaagaaaaggtactactatcatttgctcaacataaatactggtactatattactactttcaattttcgtcaagttctacaactatgacacagttctgtctgtttctcctggtttactgaccaaatacaaaatcctgagtttagtgaaatcacaaactaagcatttggattttcattttcacataaatttgtatactatccgcaagagaagaggcctcttatcgtctttttcgttcgttcggtgcgtacctatataaatgatttgcatgggagaaattcatagttgatgcctctagctaaattaaaatgtgatttaacttaattacaatcatgaa

SEQ ID NO: 77644 - DNA, 715 bp, Zea Mays
cggatcactaaaatgtcagtaccgcaactgcatgtattgctattccattcaatatgttgctattccattcactaaaattgcatgtcgttgcagtgtcatttgtaacctataataggttgtcaccatttttcttagtggatcaggcaagtaaatgttaggtctatggagcccagcagtcatagactttttttgggaaaaggaagatatattaatttcaagtgcattacaacgagatgaagcaaactcttgaaacaaacatctcccgacctctgttccatacagaacacacaacacaacaaaatgagatatccttaagccaatcatactctagtgactatcaatccttagactagatccccacccataatcccgggagaaaaactccacgaacaaatgtgtcaaatgaagagaagcctccatagcaaggtcatgtgcatccgaacgttgcagggacacccatgagcgcatccagtgcactgccgtgaagataacctgcacaggggaatatcattttttcttctcaaaaatattaatatttctacttaactaaattgaccagcacacagctactgcccctagcagagcaatggaatgcattgattcagaataaccctcaagtcacaacccaaacatatggattgcactagtaggttgcggaatgttagatgcacaatgaaaaaggaccatactgctctgatgaatctgcattcgaaaa

SEQ ID NO: 77645 - DNA, 735 bp, Zea Mays
ctggattcaggtttcatccaacagatgaagagcttgtcaggttttaccttaaaagaaaaatccagcagaagtctctccccattgagctcatcaggcagctagacatctacaaatatgatccatgggatctcccaagtaagcttctgtgcacctcttccccttgttaactatattctatttctctgcacaaatctgtaaagagctaataaagaaaattgtttgttttaagataagcttagttcgctacatgatgctccttttctgtacaagtaacgtgggacatgttttgatactatgaatcttagtaaatcttcaaaaacttttacatgcatgctcgtctgtatctataaggttttgtctacttgcaatactgagcattatacaacaggtaaaactggtcatagagttaaatatcattaacatgaatagtaaggtatgcacaaaccaacataatataagcttgctgtcctaatgtatttataatgttttgtctcggtgttaacgaaattttatgtgatcacataaccagctctgagcctatacgaacctgtaagttcttgctgagcttatgctttcaattgtatgctgttgtgttgtatagctgattcaggcttcggctatcaaagtttgagtgcatgtaggttggacatagattatatttgcacacatgaatgtgtaatgcatcttatcagttaaacaccttggcttcaatattgaaccctaaatttgggatct

SEQ ID NO: 77646 - DNA, 542 bp, Zea Mays
ctctggtccagataccctgtaggcgcttttaaaaatggtagtggttccaggaataatctctatggcaaactcaactttctgctcaggtggcatacctggtaaatctttcaggaacatgtcctgaaactctgacacaaccttgatagtctcgagtggatctgcctccttatcaatagccatctggtgaaaacctcctttccttggctcgggtgagactagctcagtcaccacttcttctcctaatggggacaccaacttaattgtcctcttatcacagctgataactgcttggtacttatctagccaatttatccctaggataacatctattccctgagtacccattactatgaggttagagggaaactcgatcccccttatttccacacttacattcaagcagacactatcggctcgaactttaccaccagctgaatcattttgaatgggtgttgacatggtagttattgaagattatgcgattctacccatgatgcagtaatgaatgaatgcgttgatccaatatcaaataacacttctgc

SEQ ID NO: 77647 - DNA, 742 bp, Zea Mays
cgaggccgaggcagcggatctcacccgccatttacgcgttcggtttgggaggttgaagaagatggtggagctgaccagcgggtcccaacgaacagcgacgcgcgcgcaattggaaggagtggacagaggctgacaagtaggacccgcgcgtaagtgacactggtaaaaagaaaaggaggtagcgtgggctgagaaggggggaaggaaccgcgggtggtgggctggcgagtggagaaagtgggccggccagggaaaaatggcccaagcgcaggcttcctttattcttttccatttagttttcttatttcagatttctaatatccaattcaaatttgaatccctgtttgaattttctgatttcaactctcaaggatagctctaatgtaaagctaaatcctcttttcattattatgtatttttctccctattatttaattatggaggtaataaatggcttttattacaattttcgttttatattttccatttatcatttgaggtcaaattaaatcttgattcctttattcaaacaaaatgtatcacaacaaaatcatcggcatgaggtgcatatttatttattcatttatttgttagttgaataatttaataccactaactgagtatgcacaaagaaaagaaagtcaaacaattgccagaacactaacatataagtatacttatttatctttttttctttctcttatacaaatttcgggctttacaaatcctaccccccttaaca

SEQ ID NO: 77648 - DNA, 442 bp, Zea Mays
ctctaaagtgccgatgatgccctcaatcgctctaactcggctgttatttctaaaacaccgatgttgtcctcagtcgctcggcatttacctctaaagtgccgacgatgccctcagtcgctcggcgtttatctctaaagcgccgacgatgccctcagtcgctcggcatttacctctaaagtgccgatgatgccctcagtcgctcggcgtttatctctaaagcgccgatgatgtccccaagtcgctcggcggctatctctaaagcgcctacgttgtcatccgtcgctcggcggctatctctaaaaaacgctggcaacgccacaagacactcggctgtcaactctaagagcgcagacgtggtcatcagtcgttccgacaaagacatagtttagtcatcactcggactctatttcaaatgcgtaaagtattgacaacaatagctcgg

SEQ ID NO: 77649 - DNA, 757 bp, Zea Mays
agaacttggatttagccaatacttcaaataaatcaaaagaaaggctacaaatatgaaacagtgagcaaaccaatttttacccaattacttatgatgtaagacactagagaaaaatataaaactaagataaaaatttgatataatacacctcactccctaccccatgaaaaaggccacatattccaaggaattctacccccctttcctttgagcaaaattagccaacttctagaatgattgctcttgcgcaaagaagaagatagaaaaattaggaaatctgttgtttgacatttttcaaatatagtagtagtataaagcaccactaggccctgaaactttagaaaatcacaataaaatgaccagtaggtatcattggctaaaatttggtacaaagtcttattattacccctagatgccagcaaaaacaaacctgagggaaaatccactgttagaagagagttgtagttcaaagcaccccctctgccctaaattttaatatttttgtacagagaaaaccattatcatttaagcctaaattcttgagactgagctatgcaaaccagtgagaagccagtgtaattttttcagaattgttggaaactttaaagctatgttgtagttcaaacctaatccaagaagcatgaataaaaagtactaagttaagttataaaagcttcagccaagaaccttatttaatcatcactaagacatagaaggattattgagtacaaccttaatccaacttcattgattgacc

SEQ ID NO: 77650 - DNA, 639 bp, Zea Mays
cacctctaccgcctgggaacctggagccgcctgtgccgtttgggctacctgcgcctacgtcgcctggaaccggcggacccgctcctctagtgtttgctctttctcctccagtttcttctcctcctccgcctcgagctcgtgctcggccagcaacttttcctgccttttccacatcttctccctccaggcaaggtccttctcctgtcgggtgagatctgtcgcccgctcctctagggaggcatccttcgccttgagattttcctcggtgagagagatgttgctagccctatcatcaagatcctgctgtagcttttgcagtgctgcttcagtcacggcctgctcatcccgctgcttctccagcatcgcattataggctttcaacttctcatggaattccgtgatgaccgcctcccgctggtccaagtgctctttcttcttgaccagcctcttctcctcctaggtcacctcccgctcccgctcgagcaccttcttcaggtcctccttgaggtcctcacgcccctgctcaagcttagaccgctccaaagcaaattggcaggacgcggccttggtacattcctccagctgggtgcgctaatcgctaaggcgctggtgctcagtctcgagcgcctcccactcccg

SEQ ID NO: 77651 - DNA, 442 bp, Zea Mays
aaaaattcgcactatgtcccccaaggtatctttgtatttaatacattgatggagagtagatggaacaaccttattttcatgcaaccatggacgactgatcaatgcattgtacgaggtagccgcatcaatcacatggaaattcacaaatgtcacaagcttttctaactttagcactagggaaattgttcccaatgcttcctggccagactggtgaaaaccatgaataaacgttagactggcttagatcaccggcggagtaccctattcttttaagagtacgtagaggtaacaaattaatagctgaaccaccatcaatcatgatacggttaatgactaagtcatcaatctcaccaagcatgagaaggggtctattatgtttcttgatccccaataacaaatctttatcagcaaaagtcatgttttgagtttgagctaatttcgc

SEQ ID NO: 77652 - DNA, 675 bp, Zea Mays
cagcgctatcctctccaacgaacaccgaggatggcggatcgtagctggggcgcgcggtcaggtggccctgggatggtgcaccagcacaccgagatccacaggggcgtaagcttataagttctgtggactccgccattggcgcaggcgcttaaccctgaaaccaacccgtgcgagtaagagcaccgacggcgagagagagagagagaaaaggagaagggagaaggtacgcgtggtcttgtatgccatcctgggctccataccgtcgcgctgggggatctacgacaccttacacgtggaccggagccgtggccgtggtcagggactggcagaatcactcaccggcgttcattggcgccgcttctccgccccgcgtcgaggactgtcctcatcaccacaaatcctctggtatggttgctttcgttggggtcgttagctaattccggtggtgtagaatcacgcgggggaggaaattactcgtcattggggcgagaattgcacaccggtgttcacctagcttcggtcgccgtgactcaccatggatgtgaagctaggcatgtcaatcggttacctgctgtcggtcttcgagttcaggggggtcgggtggttgtgcgcgggcaagtaatcatgggattcgggctcgggggcgtcgaacgatgggcatcggcgaccagctcc

SEQ ID NO: 77653 - DNA, 515 bp, Zea Mays
gtcacccacttctgagtgcttgggcccatggtttcccattccaacaagcattatgatgatctgatacataaccaacatatttatagcccacaaaagtttggtcctgattcttcagggaaaatagtccaagatcttgagtgcctttgaggtatgaggtatcttagtataatattatcacttgtccaatatcttttggttgagttagtattgtgtctagctagaaaacttactacgaatatgcaatattaggcctggtgcgatcggcaagatgcaccagtgctccaatgacgctaaagaaactccatgtcctagtgatacgtcatcatcgctcttatctactactttaaagtacaagtttcgtgcgtcgtgcgtcatgtactaagtgtgtaggtctattcttctccccccgcttctcacctatagatgggccgttacaccatagatgggtcgtgagaaactatccaagcccgctaaagggggacgaacgattgagccgctgagcgagctataaaaaa

SEQ ID NO: 77654 - DNA, 321 bp, Zea Mays
gttctattacattttctaggccagcaactaggacgagtacttggaacacttattcagcgttgctatctgttactgacttgtgtgccacatatatatatttagtcagccttcccagagctctagctttctctcgagcagaacaggtactcctttgcaatcacacacacgctcgttggacagtcacaccggtcaccgtttgccacctgcagtgctggtaagaaccttgtaagagcggggtaagacacttcataatttgtattccaccaccaccaccctgagagatagttgtagggttcacattgtttgttgcctttttgtctc

SEQ ID NO: 77655 - DNA, 474 bp, Zea Mays
cttaccattgtcttacttgtcctttagaaattggagcagtgtaccaaaaaaaatggtgttccccaacacatgttttatttgtcgaatccatccaacccatccatcattaagacccacttttgccaccaaccccacacaccaagacgtgcgagcgttggcgtagttacgcgcaaggtgacaaggtgcgcgaacagtcctggtgtggctggagatggggtccaagtacatgcgagggtgctgtgattgaccgatgactctaagtgcggcttatgccaggctttgagttcgattttctgcatatccagcaggccggtataatacgttgagcggtataatacatgatgacatgtactagacagtaattttactagtacgtgatacaaagcgctcacctgctcaactgactggccgcagcagctgatttgatcggccgatacgtgggccctgggtccgtccggtccatctcactccctg

SEQ ID NO: 77656 - DNA, 415 bp, Zea Mays
cagtgttggaatcgtcaggactagaacgctagacccaggatgaaaggccttaggaatagtgaaaaaaataggtggctaaataagtaggccatataggccagtcttagaatagtagggatgccctagaagcatccctctgatcggtgagaaggcgttctttccagcatgcatgcattataaaacatgaagaaattagaaactaaggaaaagtgcatctaatcatgaacttaacaggcattgttaataatgaataatgaaagtggttggaatagacaaatctaaattaacccacctccttttaacaaaccgggcacatgtttttcctttccactgccataacacttacatctaatcctctttcacatatgacttcacccacccccatcaatggaggagacactcgtttcagtttcga

SEQ ID NO: 77657 - DNA, 848 bp, Zea Mays
ttctgtgtaacgctcggcttggctgggttcgtaggctccagattacatgtggtagttccctgatctattttcttgcgagcttattgctcttgtcaaacacctttttcctgagggcgtcgagtatcatcccgttggatctttttacctgcccattagctcttaggtgtgccgctgatgcatacttgatctggatgctcctctacttgcagaagtcaaagaactctgagctagtgaagttagatcctaggtctgtaatgatgctgctaggtaatccaaacctaaacattatttcttgaatgaactccactgccttttctgaggtcaaagaggcgatgggtttgtattctatccactttgtgactttatcaatgtcaaccagtatgcatgtatatcccccttgagctttcttgaagggcccaatcatgtccagcccccagcatgcaaacggccaggtcacaggaatagtctgcaactgttgcgtgggtagatgctgctgcttcgataagaattggcacaccacttctgaactaactcggctgcattattcttcgatgttggccagtagaacccggacctgaaagctttccctaccagagtctgtgacgctgcatgcacgccacattgcccagcatggatctcgtccaacagccgctttccagtagtcgagtgaatacacttcatgaggactcctcctgcacctcttatatatagtaagcccccaataatggtgtagtgggccgactgtctcgcgatgcgctccgccgcagccttgtcatctggttcttccttgtttcttatgtatctgatgattggctccctccactcattgggatctgcttctgcctgac

SEQ ID NO: 77658 - DNA, 864 bp, Zea Mays
actcatgtagtcttttccaaaagcgcgaggtaaattgggttcctcgatctgatacgatcttctttggtactccgtgcagacaaacaattcttgacatgtataactctgctaactgggctcctgagtaggttgtcttcataggtataaagtgtgccactttagtcaacctgtccactataacccatattgaatcatagccattccgagtacggggtagtccaactatgaaatccatactgatttcttcccatttccattccggtactttgagaggttgtaacaatcctgctggtctttgatgttcggctttaactcgttgacacacgtcacatagggcaacatgagtagccacatctcttttcaaactgtaccactaatacttttccttgagatcctggtacatcttagtgcttccagggtgaatagaataagatgaatcatgggcttctcttaagataagttggcgtaggtgctcgatttcaggtacacaaattctctttttaaaccataccgtgccttgatcatcttctatgaaatctagggcttttcccaaactaatttgtgccttaatctcttgtcctttacgaatctcttcttctaaagtagattcaacttccataactgttgcttccatattattgagcattccaaggttgagttgttccatctcccaacacaattcctgtgacatcaaatgagtagtgatgctgttcacttgacctttacggctcaaagcatcatccactacatttgcttttcctgggtgatattgtatttccaaatcatagtccttgattaactcaagccatcttctttgtcttaggttgagttatttcagtgtgaagatatatttcaagcttttct

SEQ ID NO: 77659 - DNA, 729 bp, Zea Mays
ttttaaaaaaaggcctccagcccgaccatcgagccagagacctccacttctcattttctctctggctcctctctgctcccttggcgacttcccctctccggcgacctgctctcgccggcgaccgagctccggtgaaacagtgacctcttcactcctctctggtgagaagcctcagctctctctactcttctcctttccctctgtttcaggcagcagtgcagcttatgttccacctctattgctcccatttcaaattcctatcaaatccagtgaatggagtgaatcccagtgcatggttgtgtgccctagttctccattgaatcccttgcaggttcttagctccttcgggagggtttccccaccaccaatagccatttcattcaaaacctaaatccccgcacatcacatgttcgatgaaatgcaccaaccactcaaaattggtccgattgaacccaaacttttcaggcaccttcacaacacctccagtaacacattcgcgcaattttacaccaatccgatataccaggcttcaatttcacacaattccccgtttcgagcgatcaattccgagccgagtgcccaaattccattttctttgcctcaaaacaaaccaagtgcacacttcactcatatttacccatataaacctattcgtgaagtatcggctcaattccccatcatttcatgcctcaatttgaatttcaaacctcatatggcactatttctcgt

SEQ ID NO: 77660 - DNA, 1056 bp, Zea Mays
gggtggtatatagtctccaagttcaaaactagctattgaaagtgatgcagaaattttatgtacaccgatgcatgtctacgtcagctagctattagaaccagttgttgccgaccaattaagcaagggcatatgatgctttgactagtgttacaccaaacacgtctagggttaaagacattctcgagttgttgtgcaacctttctaagtatcttatctggtggggtatctggtagcacaccggacaaatctggtaccttgtggatattcctaaacacaccgtagacttctttgagtgttgtttttggtgccccatatgatatgatatctggtgcatacctatatgtcaatgtactctttctctatatccctttctttgttatagtgcaacttctatccgatgttttatttggtggttcaccggacatgcccgatgttgttgagcaacatgtttttctttgtttctttgcgtctctctccgtttatgattatgtcatcttatgtattggacacatgcatgatcttgtaggtcttcaataaatcttctaatgtcatttttaagacattgatcatcttaattcccactttgtcgttgtccatgtccacgttgtattgtttgaactataacaaaaacactaacaaataatattagtccaaatgattatgttgatcattaaacactaaaacttaattatcaaatgagtctcagcccattccttataaccatgttgatcattaaacacatcaactagatgttgttggccgttggaggcaattttcttcgatgccctctaatatcttttacagatcttttggatgccacataaaaccatgctcggtccttggtatcacaacagttatccgatgaatgaaggtgttggttcttcgtatgcgccagagttatcatgtgactggtggactcttttacacaaccactaccagaggctatgttctagtgctccatagagagcaccgcttgcgatttccgatgagtgattgactgattgcataagttctagtgctctatagatagcacaacttgggatttcaagtgagcga

SEQ ID NO: 77661 - DNA, 674 bp, Zea Mays
gagaattctgcatagggcgaactcttatcccagcttctaccatgctttaaagcacaagctcttaacataacttctaacacttgatttgttctttccgtttgtccatctgtttgcggatggtaggctgagctgaaatttagctttgtatccatggactcatgtaaccttttccaaaagcacgaggtaaattaggttcctcgatctaatacgattttctttggtactccatgcagacaaacaatccttgacatgtacagttgtgctaactgagctcctgagtaagttgtcttcacaggtataaagtgtgcaactttagtcaacctgtctacaataacccatatggaatcatagccatcacgagtatggggtaatccaactatgaaatccataccgatttcttcccatttccattccggtacttcaaggggttgtagcaaaccttctggtctttgatgttctgctttaacttgttgacacacttcacatagtgtaacataagtagcaacatctcttttcaaaccgtaccaccaatatttttccttttgatcctagttcatctttgtacttccagggtgaatagaataagccgaatcatgagcttctcttaaaataagttggcatatgtgctcgatttctagtacatagattctctgttcaaaccatactgcaccttg

SEQ ID NO: 77662 - DNA, 515 bp, Zea Mays
caccgcaaaaacgacacactacgtgaacgccggtagctgcctgtcatcattgcggaggtagaaccaccgactctgccaccccttattttatgaagtaatggtggtagggatgtatagttgcgcccggtccaagcgcagcaggagcgtgtagccatcggcccagactgcatggcacaccttcttcatgttgcttgggagggagaatgcctctgcccggaagaggtggagccacaaattccagtggggctcgatccctaggtacccctcacagatgttggtgaagatggccgtctgagcgatggagttcgggttgaagttgtggagctccaccccatagtaatgctaaagcgaccacatgaagcagctcaccagcgccccgaacccctactcatctaatgaagtgaagcttaccacgtagctcgttagtggtgccgtctcttgttcgtcgcccgatgcataccactcaggccgcggcctgtgggagcgagggcaaagcagcccggcatccaccaacg

SEQ ID NO: 77663 - DNA, 323 bp, Zea Mays
gtcggccagataccagcagaccttgaggcgctatcacgataaagccatacgacaccgatcctttgtggtgggagacctggtccttcgccgaattctaacgggggaaggacggcacaagttgtcaccactatgggaagggccattcattgtatcagaggtcacccggccaggatcataccgacttactcaaatggatggaacagaagtggggaattcatggaatatagagcatcttagaaagttttacccttagcaaggcctcaaaagctatcggagcaacgttgtactctgtaattggagaatacgtcatcaataaaagattt

SEQ ID NO: 77664 - DNA, 958 bp, Zea Mays
tctgaggacagaattgcagtctcaggtcatgactcacatgccaaagaccgtggacaaagccatgaaactggttaagatgtaccaggagatagctgagaagaacaggatgaagcatcaaaaaggaatagtagggaacaaaactcaggtggtggaagaggtgacaatagaataggaattttgtatcctgagttgaacaaggaaagccagctgagagattacaggagggccaatggactttgtttcatatgtggagacaagtctgaaccaggtcatcaagccaagtgtccaaagagggtggtgactcagttgcataatttgacagtggaagatataagctcagtgttgagtgatgaggtgctgcaaaaattggagcaggagaagatagctggggaactgtatcacctgtcttagaatgctattaagggaacagagtgtgatgggtgtatgagggtgcagtctctgatccaggatcaagtgttggtgatgttgatagattcaggcagttccactacttttatcagccaaaggatggtgggaaagttgggtttgagaactggagattgtcctgcagttaaggtgaaggtggctaatggggcagtaatgctaagtgactagtgtgtcgaggaagtggaatggaaggctggagggcatgtctataggactgccatgagggtgttggggttggaggcatatggtgtaatcttggggtatgattggctgaagaatcacagtcctatgcattgtgactggaacaacaaggtgttaaccttcagtgatcagggagtgatggtcagactgcaaggggatgcagaccatctgagggaagtgcagcaggtatctgtgctgcagttggagaagtagatgaaaactgataaggtgtgggtgatggtgatgctggagcaagtgccagaagggataaatggagaagagtgtgaagcattcaaggagatattagggt

SEQ ID NO: 77665 - DNA, 290 bp, Zea Mays
aaccgctgatgggtgggcccgccatgtcggattcatcatgtccgtggagatccttgcgagcaccatagaacccgccaacaacccctcatcgatctccgaccattgcaggcggatcttgtgccgaagccgtgggttttcggttgctatcgatcggaatttgcctgcccttttctccgtgctacataatcccagagcttcccccaacagcctctcccatggctgggcgggcgtcgttcatccacggtgggggctccctgccagggctgcacgaccagctctccctgttcccc

SEQ ID NO: 77666 - DNA, 1123 bp, Zea Mays
cgggggagccggcatagaagacgcgaggggagccaagacgtttgggcgtcgggtgcgaaggctctgggaagatgaagacctaaggaaagcataaactccataaggttgcccatgttttatgggctgcctcactaggccagtgtatcattgtagcaactaggtaggtatttggtgtgcttgacctcgagacgttatgacactataattacccagttgcacaacatattcctaggatgtagttggtaaccaagggtacgactgtattttaggccattgtccaccggttgtcctataaatacccatgtcatgtagttagacgggacacgcttgataagacatttgcgctctcagtcatccgttttattgtgccacttgtcacccagttctcgagtgcttgggctcactgctctcagtccacaacaattgcctatctgtacgtgtgaacggtgatgaccttatatgatgtgatggtggatgaattagattagatggtatacaaattaaactttgcatgaatcatatgtggtgcagatttttggatttttagtgatgtttcattgtgtttctgatttatctaaatgtctctttttctttgattttttctgaattttttgaagtattttgctcaagaggggtatttagttcccttgactcccaaatgtgccagggaaatttcctccactcgctgccaaaccaatcctgagaattgaataacagctaatttcctcttcatcaaccccctccaattcccttgttaccaaaccattatgtatgcaacgctatatgaggagcagggtaacagagactaggttgctggctcaggttggggtgtcaaccatggatgggtgctagaatgaaggggtgtcagccaaggatggacggctagcccagggagggtgtcgaccggggaggagcgaaggccagggaggcaccacagtggaggtcaccgaccaaggtgaggtacgttggctggatagggtagagcatgctaggtgctagccaaaaagagggcagcccgcagcccaggcaccaaccaagaagggcaacgatgggtgttggccaacaaccatggaacattaggcaacaggggcacacagccacacacggtgccaacaaaggtggc

SEQ ID NO: 77667 - DNA, 453 bp, Zea Mays
gtttctttaagtcttgatacatcttagtacttcgaggatgaatgggatatcgactaagatgagcttcatccaagatttgttggtggacctcagcatctttaggcacaactatgcgatcattgaaccatagtattcctcggtcatcttttctgaagcaattagctttgccggcttctattttctcatgaatgtgtttcatacccttgtcagttctttgagcatcaataattctctatagaagaactgactcaagctttaattgtgtcaaagtttcgtgttgtatcatacccaggtttaagttttccatttgttgacatagtgtggtgttaggggcccttgcggtaagacaatgacaagaaactttgcgactcagtgcatctgccaccacattggcttttcctgggtgatagtggatttctaagtcataatctttaatcagctcaagccatcttc

SEQ ID NO: 77668 - DNA, 809 bp, Zea Mays
ccgcctgagaccatatccacgggtagaaattcatatccatgaccacgtccattgggtttcagatggatttctgctgtcgtacattatagagacaatcattttcaacaatttaatagcacaatcaatcagatttcttcccaattcaccatcatacacaattaaaacttaataaaagaatttacaaatagacatgtcttttaacaagcaatattctcaacatgaccaaatggaaggggcgtcggactagaaggggtggggagttgaggaccgctagggaagtggcggaggaggctctacagcaccggactagaagcacgaaggggcgacgatggcatgggctaaagaggcaggggcgactgagcgggcagatggcataagcaagaaggggcagccacgatgctagaaggggtggtgacagtgtggattgaagagccaggagcggtagggttggtggatggcgtaggattaaggcccaagcaagaaggggcagccacgtgcacaaaaaggggtgacctgcaagacacgggttgtggccaagggcattggagcctaaaagggtagacatcggtcagccgccagcggtgcaggtgttgtggcatgtgagacttggaaggggcatagggtgcaatgcaggaagccagcaaggttattagtggtgtccagcagtgggaaattaggaggcattaagcgtgaggttcagggagtttgagttttctctttgttgtgtaatatgggctagatcaaaacaataatctattggcctattttggatatctaataggcaacccacaggtggaaggtaatatcct

SEQ ID NO: 77669 - DNA, 321 bp, Zea Mays
atctgtgtccacttgatcgatagcatattgggagagatgatcaaacttgttgagatactgcattactgagtctcccccttacttcaaacatatgaactcctccagctcaatctgtagaaccccttctggaacataatgttccctgaatgcctgtttgaattccgcccacgtgaccagatgtccagcaggctgaatagctaaaaaatttgcccaccaagtgctggcaggacctctcaactgttgggcggagaataggggcttctgtgtttcagtacatcggaatagtccgaatttttgctccataacccgtacccattcatc

SEQ ID NO: 77670 - DNA, 424 bp, Zea Mays
ctttgagtaaattactgaaaataatctactcaaaggtcttcatctcgtgctgtttttaggaatcatcctttcatcttcgccgaatgccttagaaaccagcattatatcatcaactttatgctttagaggtcagcatacacttttgcctttgagatcgagcatgcaatctgcccatgtcctgttaggtttgaaatttatttgatctacgacagattggacgttcggtagatggctcttggctggtcttcatatcactttgtgcttcaatgcctctgttgattagacttgtacctcctcggctatttttggcttttctctgatctccgtcaatatcttccttctgccttgatacatttattgtgtataccgtatggatgtgactgcttgggaaaatctattgaaaattcctggacgtcccccccaa

SEQ ID NO: 77671 - DNA, 783 bp, Zea Mays
cagacctcctcgtggctccaatcatcggtatgagcccctctgtgagaatcgccctcatcttaatctcgtctgacgcctcccgcggtgggttttgtcgctaccattagccgggaatttctcaccgtggccttggcaccgccgttgtgccgctgctctacgtgggcaagactcccatcggtgtaatccgtagtggatgtgtgcctctcggtttccccgcggcacctacattatgtatttcctggtggatgtgggaatcgagcttcagggctggggattcgtgcacgccggcgatgccgccgccgtgtataaacaaggcgttgccgcagcttagtgtcctggtgacgacgcttccagtgccctaggatcgatcacggacgggcgtgatggaatggatcgcttcccccttcgtgtcgggtcatcgtggccctcggatccgttgggtacgacacagattagtgaatggctggggcaaacctcgactgcatatctaaaatccaacggtagtgagcccgtactggtccacttattgggcaatttaatcagggcagtcggtgattgatcccacggccgagatcggcccgtaccccttcgtcgagcctgttttgtaaaagaacccctgacattattgattatcaacccaccgtccgtaatgggttcgcctgggtcttagtaataattgcgccagagcccctgcattttccagaaattggcgcccagtctagagagtagtaaaaatagtgaaataattatagaaattgatttttaatacaaaaataattctag

SEQ ID NO: 77672 - DNA, 1778 bp, Zea Mays
aacaaattgagctcgatcgggaggctctctagagagctcaccatagactccggcagctcctggcccagtgagggagtgttccggtgaacaccgtatggtagagctagaattgagcgctcgggaggcatcaggaactcacggggaaacgattttgtgcgctggttcagctggagaagctcgaagataacgggtcgacgtagaaccgagatgcggcggtgatctccggtggcgcgacgacgttccaacgtaaccactgtggtagagttcaatcaacaatgtgtataagcaataggaggtgttaaggagctaagaacaatgaacaggatgtagagaaaagaatcacggtcgcctgtccacgggagacctgcccacggcggtgctctgcccgaccgtgaagacgacgacgacgtcgggagctctggtggatgaaacaagacgaggattggtttgtctgatgcgcaaagaatagacagaacgagtgcacactccaatttatagagagaaacaaggaggttggctaattttggccagaaagagagacgacgccgtcggccctagaagatccccgaagccgagcatggcatctctgttaacccaaacgtaagcactcatgtaattcgacaccttcactgcggcgtattccagtaaagcagctacgtgccaatgtagagacgcgagaagaacggcccatttgagtggctcgttcggttgaaattctgaagtggctgttggtttttagtcctacattgctggtttaagtggtacagaccaatttatatagttacgatcgttcttatgtttaaatagataaagtaatatgagaggaaaagagcatggtctatttcgcgtgtgcgcaaccgtggcgtgtcatttgagtggcttcgttaatttgtttttttactgtccgttgagattttaatatagattttactgccattaacttagttaattagcctgttgtcaatttatgggtgtattatggaaaaacggttccttgagagcagccacgtctattttaagacactgaatgcgttcgggttgtgatatacgaaaatcctattccatttcttcttcttcttcgtgcttggaaagttgtgctgtggcgattgagttgttgtatctcaccaaccctttttcttggcgtgcagtaaggaggagagcgagtgatatctttgaacccttgtcgttatgaagcttgcacgaggggcggcaataaagtttttgggcagcgcaactgtgcgaccgctcgaaaccatttgacgatgatcttcgctgcctaacggacgaatcgacgcgtctatattatcgacctgcttcgtctacttttgtgcttgatcaacctaagcaccgacaaactcgacgtgagtaaatatgttaattcagttgtttaatgtgctgatctatatattgctatgcgtagtgcgcatataagtttgaatatctataaaatttgcctcgatttaaaatctggacttagaatattacgcagtataccaacaatccaaaaacccttatttctgcattattctattattctagcaatggctggtgctttagatgcaatgaaacctgagaggtttggaggtggtgaaaattttcgtagatgatagactaaagtcaaattctggcttatgtcgttggggctgtagtgggtgatccgttcaataatgtcattcacggttgagcagaccaactcttatgcaacaacgcgtgattccgcggttagctgcatcttgactttattggcttataatctctacgatgtgtatatgaattac

SEQ ID NO: 77673 - DNA, 363 bp, Zea Mays
tcctctcctccataccgacataccacctatctatattcccgttggtggcgtgggcaaggaaacatatagacaaaattcatcggtcattcctttggaagggagaggagcatgtaaatgggggccattgcctagtcaactagcccacagtactgtagacgaaaggatttggggcctgagagttcttgatcttgacaggtttaatcgcgcgctttgcctccattggctctggcaagagtggaacaatgatgaaaagccatgggctaggatgcaagtgccttgcaacaatatggacaacctcctgtttcaggcctccactagaattacacatggaaatgacataaaggtaaaattttggcaccatat

SEQ ID NO: 77674 - DNA, 295 bp, Zea Mays
gaggagacgacgcggctcttcatgccaagattcagtgctatgcgcgctcagctaagaaggcacagaagctgttcaagaaggtcaacaagaagactgcctccgacatcaaaggatgcagggtgatcagcctggtcgctgaagcgagggaagttgccctatcgatcctcgagtcgacactgcatctcctggcgaagcagattgcggtcccaagtcccagcaagtggtcacttgtatccaaatcgttccagaagaagagaatcatgtgtgaggcggagcagttgcaagggttggagcc

SEQ ID NO: 77675 - DNA, 818 bp, Zea Mays
gcaaagggaaggccaacaaatgtcatcctcaaaccgttcaccagatacctctcaatttcataaatttggttagctcttttagtttctctttctggtatttcatgttacctttaatgtttaggcatctccagatatatttgttttttctattagctcaaaaagtttcattgattggattctcatgtttacttgctaagaggacctgaccctttttttgccactttcctttatcgaagaaatgttattgtgctgttcatcatggcgaactttaatatgatctgtaagttattttatcatggaatagataagaaaacacagaacttaaaagtggatagttctgctctaagtagagtgccgtagcaggctgtgtgcagccatcagaatccatttgtctgatgagtgatgtcatcctatgctctgtcatgttgattttctatttatgctgattgttcttgcaaatcgggtggatttagtgcagcgcatagctgaacagattgggttctgtttcagaaaaaagaaccgagactacatctggacagtgaattcagaatcattgtgtactgatattatatcagacaggaggtttgtttttttataaagtttgcattcacaaattgtgtagaatctttttattagattttcaaggtcttcaatgagtgtttattgcagttgaatagtttgcaaatcatggctgaagcattgctagtcggcgacacagaactttttgcagcaaggagagaggggttccaattccaattcagaggcacgtagtagaggaaggaacgaacgagcctgcctgctggctactggctactggc

SEQ ID NO: 77676 - DNA, 990 bp, Zea Mays
gtcgagcgcggaatgtcaacactgaaacattcttgacttgactcaatgattaaacgcttcggattggttgggggtcgatcaaccttccacattattgaagcagcagcctgcaaaggaacaatgtaaaccatatgtgctttattgagttacatcaacatatacaccaatgattatacgaactaattgaacactcaacacagtcatacacattataattcatcaattgtgttatatgaccctaacaacataaatgtcaacacagtcaaacatcaaaaaaattgtatcattgcattatagaaattgccatatacatatatgcaaaccaacagactgttaatctaaaatagtatttactcagaaaaatatatatttatgtagtagtagtagttaataaacagcaacataaacatttatacatgactaaaacaaaacatgcaactagaagttcaaaaatttattgttgcaatttggacatgattgatgaccatatttatgtgaaaaatatgatccagtaagtatataaaaagtgaattgcatttcagtttatctgaataatatatagtagcacgaagtcatgagcagcacacttgtttccacatcaaaatatcaaccactacttcataaaggtatgtataattcacatcaattgtgttatatgtccctaccaacatagatggtaagtgaacaaaacatcaaaaaagtcgtatcattgcattgtagaaattgccatacacatctatacataccaacagaatgttcatctaaaacagtatttaaccagcaaaataaacaattatgcagtagtagtagtgactaagcaacaaaataaacatttatacagtactagaataaacattcatatcctgacaaacaaaaatatatatttatgcagtaaacaaaaaaaccaatttagcgtaagtagatcaccaatttagcgtgagtagatcttaacgtgcctgctaagacgccagtaagaaaacatgctatccc

SEQ ID NO: 77677 - DNA, 369 bp, Zea Mays
cctaaggaaacctccacgtgagggggactgttcgaatctagtgaattatcgatctcttcccattagctgaagcttttgggtttaattggtcggtatggtgaatgtcaacacgtacaagtaacaaacatcccacgcagactaacatccaacaaggcagcacaaggtcttctagacgatgcgtgcatgaaggaactaatgttgatcgtcgtcgtcacttgctcagaaacactaggcatagtttacacagaagaaccctgttggattattgtgtatctgtgtatatctctagtgtaattgggctaagggccccaacccatatactcttgtataaatacataagcctaccctaatatagggttagggttttcc

SEQ ID NO: 77678 - DNA, 754 bp, Zea Mays
ctggtgttactgttactaaaacttgagcataacatcataagcatagcatatcatgtgtttgtcacacctagaatgcattcactaggcaaaaagttcaaacaagttgtgttgatatgacattttgtgaataaaaccctagagtagggtactcaaccctggattgggtttaatagagcaaacaaggcctaaataagagaaaacttcaaaattcaattgaaaaagtcataaagtgtaaccatggatgaacttaagtgggatccaaaccctaagagtgcaagaaaccctaaatagaaccctggaaaaccctagagttaaaccctagggggctaaatgcaaaattagtgcacttttaggctgaagtgcaaaaaccatgaaagtaaggtgtcttaagttatatggttcacaattatgaagatttgcaacctaaatcttgagttttggacttatttgcaaaagagccccactcatattccaattgcttaagtctgaaattagtgatattagctcaactttggggccttgtaactttcaaaccataagggttttgccctaggtcaccacatcaattctgtagatctattaaaggagaacaactttgttttagggatgcaacactgttgttatgaaaaatgtgaagaaaaatacacccaaagatgggctgtcaagctgtctggagactgaacctggtctgacagtgtaatgaggcaatctttgaacccagatttgaacatgatccagcgcaagtttgggcatg

SEQ ID NO: 77679 - DNA, 1713 bp, Zea Mays
gtttcctatcgatttccttgggtcgcattcctttccccatctcgcttcgcgtctttctcgcttctggtcgcttccgtgttcgtcgcgagaaagtttctgtggagggtggatctcctctccgtttcgcccgccttcgcttggtgaggagtggcctcttccgggccgctctggtgtgtcggctctgatggatgcgaaaaatcgaaaccctaactgggatcgatggggtccgaaggaggcgccgcaaggatctcagtcgtggggaaagaatcggaacctcagctggcgattgaagactggatctggaaaatctgagatcaaagatgatgttcccgtccccactcccggtgatgccggtctgccaggtattctcaaaaccccccgccccccattctaaaatctgagaatgatttggtgcgtagggttttttgccagaaatgtggtttagatggtcatcatgctagggagtgctttaaatctttgtggtgcgaaatctgtcgcaaagaaacccacaatactgctcggtgtgttcttcccaaacagaataagccaagtatgccgattgttgggatggcggctgatgggctagggttttattcctctcatttcgccaaacccttatccaacaaaccgaaacgcagttttatcggcttggttaaaatcgttgagggtttgatcaccgccgatgatttggagaaggattttggttttcactttccttggggccgtacttggaaagctactaaatgccattctggttttctcatgcaattcccctctcaagagagattggatgaaatgattaacttccctgaattgaaaatgaaattgtctggagccaaaatctctgtctcttcttggagttctcaggctaagcctaaatctaaactgcattctgtgtggattgtggctgagaatgtgccagaagagttacaaaattatcaggccatttgtgaattgggatccactattggagcaatggaagaagtggatattaactctttaaactctaaagagattgtgaggtttaaagttcatgtgaagagtgttgctatgatccctcctatcattgaagttggtgtcaaacctttcttgtatgacattttcttcaaaattgacaacattactgatgaaggttggaatgatgattctgttaatctgggcaagagggcttcggttgatagacaagggtttggtgagatctctcttggcaaatatgctaaaaaggccaagagtggtgatgaggactctggcaaagatatcaagggaaaatctcccttaaagatatcctcaagtcaggtcaatgttgctggttctctgtctgaacaatctgaaagcatgaaaatggggaagggttctgaagatcctaaaggctaccttgatagtcagggaaatgaggatgaagaattcaatgatagtgaagatgatttgttggattctcaggagttggatgaatccatcaaggatgatgattatattccttcccccgcccaagataaaaagaaattacatatgagtattgttgaggatgctagcaagattgctggtggtaaaaaatgtggtcctatggaaggtgaagctgctgaaggtgtgagaaggagtagcagattggaatcttctgaggaagtgaaaattgctgataaggctgctgcaagagctatggctaaagatgctttcatcaataaaggtatgtcctataatcctttttcggtcttg

SEQ ID NO: 77680 - DNA, 414 bp, Zea Mays
cttgggtcccaagtgattcttgcagcttctcccaaaagcgtgccacaaacagtgctcctctatcggatataatggtctttggaataccatgcaatcgcactatttgatcaacataaatttctgcatacttctctgtcttgtgggtggtgtgcactggcaagaaatgagcggtcttggtcaacctgtccacaataacccaaacggaatcatggtgcctggacgtattgggaaatcctacgataaaatccatgcaaatgtcctcccatttccaagatggtatgggaaggggttgcaaagggcctgatgccttcaagtgactagcttttatcctctggcaagtgtcacactcggatatgtacttggcaatttccctcttcaccctggtccaccagtataaagatctgagatcatggt

SEQ ID NO: 77681 - DNA, 941 bp, Zea Mays
tgcatggttacacccattgggctcagcttcaacaaggtcacacccattgggttcagctttaacaaggtcacacccattggggtcagcttcaacaaggttacacccattggagtcagctagtgcacggtcacacccattggggtcagcttcaacagatacacccccattgggatcagcctcagtaaggacctccgctggtacttcttcacaaacaggagcagaagggctagcatcctggttcaagcatgacagtcgtcgaagccgcctctttttcttcttcttctcctcaacaggcgcagttgggcggctaacttggcaaggacgctttgggcgaataccctcaggctttcgggtgtccactgatttgttaagctcttgtacaaccgtaatagccattggttcagcatgggccaagtcagaagattctccagccaacatattgagtacatcatctatttctgcatcatctggactcgtcgacatctcaaaatgaacttgcctctcatcattgggaagatcacaaagaggagcaaccagagtcttaatgtcttcaggagagggtcacactctaagacccagaccactatcaccagcaggagggttggacacaaaattgaaaaaggacttaggaggtggcagattccaagcagagtaggcaacaagagcaccaacatttgatactttgcccctcaatatcatgtctagtcgagtcactagatcctcaataggaattttcctgttggtaactcgagtcgagtcagtaatgccactgtacaagtaagctgggtatgccctgtccttcaagggctgaatattcttaaaaacaaagtcagcaaccacagcctcggcagtccgacctctctccttcagcagacagatttcagcaagcagaaccctagcttttgttacctctaaggcagtaggagactcaacccaactca

SEQ ID NO: 77682 - DNA, 334 bp, Zea Mays
caggcagaatacggctgtggtacaaggttcagaatctcagttcttgaagcaaggaaactggagtagaagacttgcactcttgctctactaatgagaaaatcgagcaaaagatctgccccattcttgactgagagtaatgttgagcaagaaaacagttgttgcgacaggaacattttgctcaaatttccttcagatgaagcatggcagaaataaaaagttggtccgctgatgacagaaacgagcaagatatctgtcccttccaaaattgacatcaatgttgagcaagaaacggttgtggtggcagaaacttttttgaactaatttccttaatggc

SEQ ID NO: 77683 - DNA, 316 bp, Zea Mays
caggagtatgggttcggttggctgttaaccgtgcgccccctctctgctccctctccgcgtcgtcgacctcgccgggtgtatgctccagccatgaacttcccctgctgcgcgccgaagcggtgttcttggaattacctgtcagtgaccgtcgtcgccgcggatccagaccttagcgtggctggcttgcgtcccgtcgtcaccattggtgagtcccctgcccaattgagcaccattatcactgtgacgagtagtgctattaggatcaaaggttagaacccttgtgcaaggatgggttgcccagcggtggcgccgtcgc

SEQ ID NO: 77684 - DNA, 397 bp, Zea Mays
ggcaggtgggacatgcttcgcaattagctttggcaagggacttactgcataagctagaaattgctcaagatgacagggctcttactccggctgaaacctggcttaaaaacaggctcaagaaacattccttgatgacggcgtcctttaaaagaacaatggcaaggttgagatctaggatttcacagctgaaggagggatatgccaataccaaatactttcaaatgcatgccagacaccgaaagaaaaagaatctgctgacaaagctgatggatggagatcgtatttttacaaattaccttgagaaggcagccctggtgaatcagttctacactaagctcattggtcagtctagggacagagagaacaattgatctggaggcccttggtctagtaaggc

SEQ ID NO: 77685 - DNA, 280 bp, Zea Mays
gtctcgccgtggctagctcgattcaggtccgatcttgccctttgctttcttgtttcagcatccttaggttctcctgatactccccgaccctgccaattggaataggaccccttagatcgtcgggaacgcgtttgattgcccgtggtgcccgctgtcaccgtggacagagcgtgttagtgcgccattagtgaaattagttgaggggaaactctcgttaggacttgaattcggtctctgccaaagaagaacgccggtcatcgagtaaatcggccggtacaag

SEQ ID NO: 77686 - DNA, 530 bp, Zea Mays
ggccaatgtggtggcagacgcattaagccgtaaggcttcctgccactgccttatggtaaaaacctctgacaatactttatgtcaagagatggaaaagttaaacctgggaataatccaacaagggactctaaatcagctaaagcttgagtcaatcattctgcaaaagataattgatgctcaaaaggataatctgggtatgaagcacatacgagagaagataagggctggaacagccaaatgttttaaggaagatgatcaaggtgtgttatggtttaacaaccgcatagtagtgccaaagaatgaagaactccgccagcaaatcttagatgaagcgcatcttagtcgctattctatttatccgggaagcactaagatgtatcacgatctaaaacagcactactggtggacgaagatgaaaattgaaattgcacgctatgtggctaagtgtgacacttgcagacgtgtcaaagccatacacatgagaactgccggtccattgcagtcattaccaataccaacatggaaatggg

SEQ ID NO: 77687 - DNA, 678 bp, Zea Mays
gggcgacctaattgcattatgtggcttcgggaccgtgtaagtctcaattatgtgtctccgagacctaattttagttaactaatattacataatttgctaatgctttgtggcataattgacagtttggggaggaaatgaatttgaatgatgacttacgttagttatctattggaagcgtaactgccaaaagctatggacattacgacgtcaatggatatcgcttttgttcaagcattttcgaatctagtcatcctatggctgccactcaaaatagtggagtcataactagggcaaccgacatggaaggacacgaagcctgctattacggaaaaaatcaaaaatataatcgagattacatttgctggaaataagcctttagcgctagttttctttgagtgtaaatggtatgacccgaagtattataggaccgaatttgggatgacacagatccaacctgaaaaattgcttcaaggacatgacacgtataaccttgcccatcaagcagaccaagtttatttctcgacatatccatggaaaaagttgtctacatggagggttgtgtacaatgtaaatccccgcgaacgcctatacactcctggtgaggatgaatataaatttggtcaccttgagcatgttgatgaggtgtttcaagaagaagagttgccaactagttttctt

SEQ ID NO: 77688 - DNA, 550 bp, Zea Mays
tagcaacgcacgggcaccctactagtaatgaattaaagaaacaaaaggacatctctcgccttggccgtttggctagaaacccacatatgtgtttttcctcccttactcacttccttgtgggcccttccctctccctctcatttctatgccagatggagcccacactgccaagcctccttcaccaagggaaagtcacgcacacaattactcgacgccaccatttcaaaaaaaagggagaacggacagcgccgccgctggtttctcctctgcagtgcctctttgccttctgccgatacggatgcctactgttgtcatggctgcccgcctcctcttccccacactcaagcgcgcatgtctgcctcttctccattaaacaatgatagcatcgtctactctccctcttcgtcgtcgtgggctaagccattaatggtcgcggctgtttcttcgagtaggtaacgttgttcttcaatctgcatcaatggagtattaaatctggccacaaaccactctcctccatcgcctataaagctcgaatcatgcttgtttccta

SEQ ID NO: 77689 - DNA, 660 bp, Zea Mays
aaaaaatctgttggtagcaccaagtacactctttgagggagccttgatatcttctacgaccatgttgaagtcattttccttaaggcgttaacatgttcgcagctagctttatcaagtatattggccatgccacgagatccaatcattgcacaataatcgcttcgggcgttgataatgttttcaacatcacttaattccttttcaagccaaccaagtgcccctttggtgtcaccggtaacgaaggagttgtccctcgaagtcacgccaactgaggaaaagattttcttcataatatcatagcatcgggaggcaagatcgaggcaattaccccgaagcaagtttagagtcttcaataattttgattttcttcgactttgccagcaatattcctttctgtcccctcaaggctagtacaaagttctttgatagaattctcatgttcttttatctttgttgccacttgcctttcacttcatcaacctcgactaatttttcttttaaagatgcaatctcgctctccttctcttgcaaagaattttggagtgtcgtagcttcgtcttgtagatttgatagctcatcatcttctttttcttgttgaattcttagatatttgctcaacattagccctgcatcatgaagataaacactttaagttaaaaa

SEQ ID NO: 77690 - DNA, 615 bp, Zea Mays
caccgcggttgcgccacgcctcaggccagttaccacgtcgttgcaagccatagtgactgcccagtgaccgtcgtagctcattgcccagtgatcgccacggcagaccaccatggtgactcactctctttctcggccactgcgcgtcttctccaaaattaaccgccaccgccgatggaacctataaattaccgccccagtgagctccgctaggtagttgtgcatccagtgaaccagccctcacctccaatcgttccccatagctccccaatttgggatttcccccaaatctgtccagaacaccgcagtgtgtgagctcgccgtggccagcgctctacaggtccgatcatgccctcctcattcttgtttcagctctcttatgttctcttgatgcttctcgacccgaccaattgaattagaccacgttagatcgccaggaatgcctcggttcatccgtagtttgcgctatcaacgtggacagagagattaggagctagaactttgcaattgattgaggggaaatagtcgttaggggtagaattaagtgtcagccacaccggagaaccggtcgttgcattttccggccagtataggctcgccggagccgctgctccgccg

SEQ ID NO: 77691 - DNA, 318 bp, Zea Mays
agtcctttcagtgtgtccatcagtctgaggtaggccgaactaaaattcaacttcgcttccatatcctcatgaaaacttttccaaaatctgggggtaaactgtgatcctctatccaaaatgatcttctttggtacaccgtgtggagacacaatccgagctatatataactcatactcagccaattaagatcccttataggtagtcttgaccggaatgaaatgagccactttagtcaatctatccaaaatcacccatatagcatcatattctttctgggtgcgaggcaatccagtaatgaaatccataccaatatcttcc

SEQ ID NO: 77692 - DNA, 475 bp, Zea Mays
aacgatggcgttaggggtcagctgatgaataaaaatctcaaaattatccaaaacatccccaatcatctggttcaagggaaaccacaatcctgctctaaaaagcttttgaaaaccactacttcgtcatctttcgactttggagtagtttcttctccggcaaagcgaataagcttcttttcagcttctccgaagtaacccagcttcatcatcatgggcacgtcagcctcagacacagtagatttttcaaaatccaagtggctgggttttgttgggatcagagtgctatagtcttcctcttcttcatcagcattttcttcctcaatatcagcttgttcagcttcggcactaggtgcaccttcttcaatggctccctccgtcacaactaagcccgattgtctcatgacttcggagatcggagttgtctcggtggcttcagtctcctctccttcacgggtcaccctcgcagtcgagcgta

SEQ ID NO: 77693 - DNA, 1548 bp, Zea Mays
caaatagttgagcttttagtatgatacctcctatttcaacgctcgtcggactatagtctccatggtttgatgccctttagacagttccccaagagcttccatacatcatcggactggtccgatgactacctttggactatagtctaaggtctagtgcctcaccatccatcacactgactagtgggccatccaatgaacaatgtctatgtttggtccaattttacctaggtcaatagtatggtagtcatgtatgatgccctatccttagctagtttggcccagtgtctccaccattaagtctggtgccattggtgaacaatataggtctgatgccttgacactagggtccaacgccagggtacaatgccttataatgccttttgttctttgtttattcatgatcattacatctgacttggttctatcttatgtcttggactctttgcatgtggttgtacatctttaatggatgttataatgtctttcttgaggtgttgatcttttcgatcatcactttaccttcgtccaagttcattttgtatcttgtgaactatatccataagcactagtaaataatgttagtctaaatggtcatattgatcatcaaacaccaaaacataactatcaaatgggcatcagtccattttccttacatgtataaatttgagtctttgtgggtgttgctagccaatgttacatgatgtagagtgtgtgtgccagtcatccttgttgcaaaaaaggagtgaagtaccttagagcaaaaggtcaacctacaaatcaatatgagtaggtgaccctaacaaatgagaatcaatcaaaggtcaacctagtaaagttggaaaccctccctatctgacctagcaacacactgttcaccataatgtatgtaatgtcaatctcccatgcacatgaatgtgaaacacctactgtcctttcttctctctaccaaagctttagagccaccacaaatgcacctctagatccacagatctccaagaactcatacatgaaggaggacaagagaactaatgctatgagatacaagaaggaatgtgacgaggctccaaaggtcattcctccacctatccaaagtgctcaacaagttccatggtccttagatacatgcaatggcgaataatgagacatcgttgtcatcgtcatcttctactgtcactttttctctctaagtgcatacaatcccagatccactccttcacatatatccaccgtcatagttgttcacagatgaatatgtcatgcgtgcccctagcaatgaacgcaatgggtaagacatgccataaggagagtcttgccggaagtgcgatatgcaagacacactaatgatatctcttgaaatcctacaccccacgctccaagaattatgcaacctaggttccagtcttattaactaccctataactaagatagaaaggtaaagcacataaccaaagtaaaaaatataaatgtggaagcttaaatgtaatagagatacatactcatggtgttgtgcttgtatttttaccgaggtttcgagaagaacgcaagctt

SEQ ID NO: 77694 - DNA, 343 bp, Zea Mays
cccaaaccatatttgtatccaccataaaccctctgatgtctgaacaccactaggagtagcatttaatttgactacgagtagcttgccccaaacccgctgcctacaaaggcatatagcggtggatagtcatgataaaagttcgaggtgcttgtcgctgggaaaggccgatgtcctctaggatggtgtggaagaatctaggtgaaggaggcagagacgaaggaagagatgagaagttagggattaatatatgatagaaacaacaaggaggaagaggaatcactcatggtggttgtatggttgaatgcgcataccagttgtaagacttatcttatctagttgttac

SEQ ID NO: 77695 - DNA, 446 bp, Zea Mays
gcaaggtgagtctatgttattcaatattcggttgttgtctagtgagttagttgctatagctagggaggagctacattgtgatgcaaatgaagatgatatcttagttgaggaggcgagcacttcaatgggttcgaaagtcttaattataagacgaatgaccttaattgcctttgaggatcaatggtagaattatgtgaggtcggtgataaggactcaattctattgtttgggcatgcttatatgcaaggtgtcgattgatcctacccttcatgggtatttagttatttactagagctggacaatccaacactacacaaccctccattacccgaccatgaaaaatgtgaaagatgttgttgtggtcctcgatgctcaattttccctaacaaggttggagttcctcaacctatctaatttgaacatcgtacgtatgatgtggcaacccc

SEQ ID NO: 77696 - DNA, 402 bp, Zea Mays
ggggtctttaggagataataaggggggggttaggagtttagggtttctaacctcagtaatcaaaattgggatgttatagggggagagtactttccggccccgcctagaaggccggaaaggaacggtcaatcctatgaccatatagggcaaatagtaatgcaccacataactcaaaccaatggggggagataacaaactagtgtccaaacaacctcacctatgatgggacaaagagtcgattgtctcccaccagctgctattgacatagtaagagaagaaatagccggggcattccgagatgagctcggagtaagcatggtccctgggggctgtcatatcagaggccttatgacagccgatttgatcaccacctatatccacagggaaccaggatacacgaat

SEQ ID NO: 77697 - DNA, 400 bp, Zea Mays
tcagccttcgttttggccgggtgccgaaggcaacggtcattaattgatcctctttcttcgtgtaattgccaagaatcctgttgcacatagtctcgatcatctctagccattccgtgcacggtttcttgaattgtttctcaaatttaaaacgataggggagccgaacaagctcatatttctttctccgttctttcttctttggcattccccagccgctagaggtcggaaaagtcttgtttgccaagtactcttgtaccaaatctctggtgctgatttcggcagccaccactctgaattcaacctcggctagctggcacggggagccgagttgcatatggcacaatggccttgtcattctgaagcttagccacataggactcataaccatggtcatcatctt

SEQ ID NO: 77698 - DNA, 397 bp, Zea Mays
tgaggattgaacttgatattataatcacactaatcccctctgtcctcaccttttctctctgcaggtatgtgaggattgaacttgatattataatcacactaatcccctctgtcctcaccttttctctctgcaggtatgtgaggattgaacttgatattataatcacactaatcccctctgtcctcaccttttctctctgcaggtctatgaggattgaacttgatattataatcacactaatcccctctgtcctcaccttttctctctgcaggtatgtgaggattgaacttgaaattataatcacactaatcccctctgtcctcaccttttctctctgcaggtctgtgaggtagtgtcgcaggcatctccatcgtctcaggtcagctccccttccaat

SEQ ID NO: 77699 - DNA, 431 bp, Zea Mays
tcgtgtgatacttgatgaaactgcggcacgataccaagacgcaccagagctgacccaagatgaagacgcaccagaaccgaccgatacaaccactgagaggtcaaggaaatggaagcatagcgatcgaaaaagaggtgacaggggactgaacaagtttgctaacaaaacatataaaatctcatatgtgagcccgaaaggtcagcccctagctctagaagaggcactccttaagttccggaatgcacttaggttcttagttagagataatcttgacatcacaatccgacattggagagatgtgtcatttgatgtcaagaatcaaatatggaataaggtattaacgaggtttgttctgtctcggggttcagaagaacttgtgaaggaatacacgatgaagcagcttgcaatcaatttccgaaactggaggtctg

SEQ ID NO: 77700 - DNA, 750 bp, Zea Mays
ggctcgggctgtctcttacctttgcgcgcgccgagaaaaccctaaacttttgaaaccgctcgcccgctcgcctgccctccttgttcctctgcatcggagatctggcccgcgtcaagcaaaccacgcgccaccgccgactgtacgtagcaatgtcgtcttcttcctcatctgctgcgaatgcaccgtcggccgattcatcgtccgaagataccttgagcaatttggcggcagtggagttacagttgggccacacagtggagttcggcgtttccaggatttcctcggttcgcgtgcaggttatgcagcagttagggtactttgggaacggtgttgggcatgtcccaagggcggaagagattctcgagcctgagggcgagttagtcgtgtttgaggcattcttcatcgccggccttcgcctacctgcacatcgttttgtggcggaggtcttgcagaggtttgatgtccaggttcaccaggtgacacctaatgccatggtggccctggtgaagtatgtctgggcggtgacttcgtatggcagtcagccttccatagaggtcttcgccaagaattattgtctgcactggcaaaagagaaaaaatggaagtaagattgcacagtttggatcgtgcaccttcacgccgaggactggaaagacttcggcggaagtcgtggaattagttccctgtgctcgcaacaagtggggcaactggtgggattattggttttatgttttgggaggcgaagtcgaag

SEQ ID NO: 77701 - DNA, 1239 bp, Zea Mays
atttatcaaataaaataaatccggaaatcagattaaatcccggaatatgctttccttaagggaaaacgtattttcctcctacagagagccggtttacgctttcacctaatgaaaacatatttttccggatgccttggaccgcgggttaaaacctagaaactttgggggctctttatgaagaaaactagggggttatatgaaaactgtcttacgaaccgatatcatccattctaggtcgttgatccgcgatcgtgtggctcgggtgttttaggaacgtcatccctttcaatgacggtgaggaaacggtggtgcccatcgtcagcggtggtgaacccgccagaaaaatcctgatctaccgctgccgctcactaatcaatgtcggatcttgactaggagcgagaggaaggctagggctctttacctgactagataagcacgacgcggaagacttgttgacagctgaagacggcatacggcggaaatccggcactgtaaactggaagaggaccaaccagtgcccaaaatttctgattacccgagggaaaaactccctgagattcttgtgcaactcgcgaactggctcacaagagtaccaatgctctgatctcgacgaattagattcggtggcgggcaaaactcgtggtagctcgcggattcgacgaacatggcacggaaacaagagctagcactagatacgagttgcgtaaggttctgcggggggcctggttgttagcggtactacatcttctgctactgggaccattgtggcgcaacggattagcaggccgaccaagaaatctacaaaggtgtatgggccggattgggtgaatgggctgcagctgtgctcgctttgcgaataagtagaacgagggttgcctcgtgaagggcatgtaagaattattcactacaacttcttctccaagttctactgctcgttcgccgccactcttcttcctccttaccctctgctactcttaatcgtcctctgctactctttattgctgttctcttctactgctaccttgtatccataccgagttgctaacagtggtatcagattcaacgatccttggccgatcctcgcgttctcgcgctggatccttctggtgttcattcccatttcactcgttttcgccgtcagcaagttctcatgaatccatatactcagatcatcttggacgagatcgctcgccgattcgctgatcatgatgccaaatgggatcagcgcgcgtcggagca

SEQ ID NO: 77702 - DNA, 472 bp, Zea Mays
gctctcatcatgtcacagagcaccagatgaaatggtcatgtcattattagtacaaaacagtaacaaagcaacaagcaaaatgtgtgaatcctacaactactcacaaggatggtggtggaacacaagttataaagcgttttaccccactcttacaaggatcttatcaacactgcaggtggaaaatggtggccgatgtgacaacccaaagagcgtgggtgtgattgcaaaggagtatctgttctgatcgagagaaaggtggagctttgggaaggctcattaatatatatttgtggaacacaagtcagtaacagatagcaatgctgaataagtgtccaaagtactcgtcctaactgcaggcctagagaatgtattagaacagttggaggaagacacaaaggaggtaacaaagatctaggtacaacaaggaaacaagatggaaataagatgaatcatagagctgcacagatcaatg

SEQ ID NO: 77703 - DNA, 708 bp, Zea Mays
ctcgactaaagtgaggccaatcagctcctggaaactgcagcttatacacatgccaccatttctcagcattgccttccatatgtaatgctgctgcccggacccacaagacctcaggaacctcataaatgaggaagtaatcaatgcatttggccacccaaatttttggagaagaaccatcgaactttggaaaagaccacttgggaagcatgtgtctagaccagtgcccgtcatgctgaggaggacgcattggctcccgacgaccatggttgtggtgaatatgaggagagtgcccacccatcccgtcggaaccaaatgagttattagatccatcatcgtccaactgtccccccatctgatgaagatttagattagccaccactcgacttgtttcatccaattgcttagccatgacttgttggtccttagtaagctgaccaatcacaccagaattgagatctaactagaccatcatgtgttgctggttcgcaaacatcatgtcaatattatccaacacccgctgccaattgttttcctctttctcaaatcccgctgccataacatccaatacaaaccgggattgcacggaaggctttggaggcgccgtgtctgttggttgatgaagcaatcaaagagaagaacacactcagacctttcgtcgaacaggtcatgagcgctccgtctaccgccgccacacttcgccgaaatcca

SEQ ID NO: 77704 - DNA, 486 bp, Zea Mays
tggtagatgaggtggcttgtgcaatggtgtccatgacatggcatgtagttctatggccaaaggagaagcatcatcatacatgaaatcatcctagttataggctttgtgtcgaagctcatcatgattgtgaccctcatgctgaaggtccctctggtggtattgatactctggtttgatcagtgtgctgcacaatattgcgcatttgttcggatgatgcatcgatatgtttttgaagctcaaaaagttgaagcacttttccttgcacttttcaacttgctaatggatggactcgaggttatggatcttctaatcaagttcgtcgtcttatggtggagggtcaacaaccttcctcttctagtttcgtgcttctcaaagaagcttctcaccttggttgggatctagtggagcgagaacaacaccaactactttttttctttagaggcatagtgaagctccttgtggtagttgtgtgttcaccgaaggtgg

SEQ ID NO: 77705 - DNA, 307 bp, Zea Mays
ctacaacccatatagcatccctgcctcgaggagaccgaggtaagccaaccacgaaatccatagtgatatgctcccacttccactctggaatttccaatggcttcaataaacctgcaggcctcttatgttcggccttcacgcgctggcacacctcacaagctaccacatacttagaaatatcaaccttcattctcttccactagaagttttgcttcaaatccctgtacattttggtttcaccagggtggacagtgtaaggcattttatgagcttctctcaagatatccatcttcacctctgattcctg

SEQ ID NO: 77706 - DNA, 534 bp, Zea Mays
gatagggaggtgttggaaatagccttctatagcattaccggttgacgacggcagcgaccaaccaattgtttcccccgctatatatatcctcttgtgaaattacatctaagattgagtcgttgacaccatccacaagtatgaaggctgcccatccatgcatcatgcaggtcaacactcaacactgcagcagataacaagcatataacaatagtgtgcacgcaggcagcatctgcaactttatatatatgctcctggattaattagcgggcggtcatgcatcacgaattcattacgccctgctggagacaggagacctgcacgtacgcctgattgaacagggcactgttgatatactccttgccatgcctgccatgccacaccgcgcatatggtggccataccacaccattgcatgcagacagcgagagctgacagcgtcgtccaacgtcacgcacaaacctatctgcagctagctgcctatatcctcatcctctccgtctccatttggccgccgtccagtgtccatgtgtcgcgc

SEQ ID NO: 77707 - DNA, 353 bp, Zea Mays
cacaaatttgtcaatgggagcctatgggtttgaattcgaaatcttcatgaatgcgggcgatatttgcaagaggggctgaaattgagttaggaaaaacactgattttccttggggcccttggcttgagtgacttatttagggattttgcaaaatatttttgagccaactttcttactatcttttgtagtttattagttgtattacaacttttataattggcccaagtcatgacaatgtgatcttcttggtctttttgttgagtttctttttagtgttccattgctctaaagagagaacttttagggttttggcacttcccttcttccttaaacttcatatggtcagggtatgat

SEQ ID NO: 77708 - DNA, 624 bp, Zea Mays
caggcttctgagtatctaaggtcgtaccagcctctgggaggggcgccaccaccgatgtcccagcaggagcagcatcagaagaatcctcagccagcaaatcaagcatagcacttatctctgcatcgctgggattcaggggcacctcaaaatggacctgtcgttcatcatcaggaatctccccgagcgaggcaaccaagacactaacttcttcagcagagggtcgcactctaaggcccaaactgccgtcagtgacaggtggattcgacacaaaaagggtgaaggctttgggaggaggtaggttccaggccgagtatgccactggggcaccaacatttgacaccttgcctctaaggatcatctcaagtcggttcaccaagtctgcagagggaattctcctgttggtaacccgagttgagtcggctaggcctcgatacagataagctgggtacgccctgtctttcaacggctgaatattcttgaagacaaaatcagcaacaacagcttcagcagtcagacccctctccttcagcaatccaacttcagccagcaaagcacctacctcagctacctcctgatctgtgggggactcggtccagcttggggtgcgaacatccggctgccttc

SEQ ID NO: 77709 - DNA, 733 bp, Zea Mays
cataaattatacaaacgaaactatcatgtcatttttctcactcacttccactgagacgatcaacaagattccccaatatctgtttttcggctctagccgcctcccattcccttgtatcctgtgctttcttctcatttgtcgccttcaatttgctatgctctgcacgcatcgggctatcaaaactcattgattttgcgaacctacacatgtcctgtatgcgatcgttaatgtacgaatcgacgagctgagatccacaacgcatcttctgtcccattagtatcttggactttattgtacacatcacctcttctttgtcgtcgactcgtcgtaactctcccaaccgcatttcctcgtttcctacaaaaaagagtaagtacgggtgcaacattgcagctgatgcaaacaaaaaataaataccaacctcatcgtaatctaccatatgtccacaaaaatagccaacaccatgctcggaaggaactaatccatacttagcttcaataccacatttgcatagtactggatcaaacttcaactctttcgcccactcatttttttcttttcctttgcctctggctctgaccaatgggacataggaccatacaaccactctatgaaatgacacttacaccacttgtatgactgctggagaataatttagtaaatttgtgcaaaaaataacaaaagtttggacatttgttatgcgctcacataatcaacgttaggacacacgaag

SEQ ID NO: 77710 - DNA, 628 bp, Zea Mays
tactgggttgattcctccaacccagctgctcgtacgaagcgggctccctcacggtctggaggccctgcctcctccactgagccacctcgccagcctccccttcatccatcctcctctccccccgctgctgcctcgcgtccctctcctggccgcggatctcccatgccacgtgctcgtggtcgtggtcgaggtcgtggccgcgggatgggtgctcggttggtccatgggtttgcagcatttttctccatgtgccgcaacatttctgctgatgtccatgaggtggcacgacgtcagcgggagactgacgacaatcttcgtcgtcaagcttcctccatgggcatgccttttgtccctcgttcgcctgatgtgcctctctatcctcctcccccagagatcaatgagtggcaccagcaggcctacggggtgccttttatgtctgcagatgatgaagatgaagaagtctatgttgatgatcgcgaggagtttgccccgcctccctaccatggggatccgggtcaatcatcctcccaccctccgcctccttacccgggtccgggacccattcctagtgaccctaggccatccggctctggttaccaccaccaccctcctcctcctcctgatcatc

SEQ ID NO: 77711 - DNA, 1003 bp, Zea Mays
ccgaattgtttatgattgtgtctcgagcgtatctctaacatggctttctactcatgaaaaagagaatttttgcggtgagcccccacaacacaaccatagaacaaaaggtggaagtaggtggataattggctcctttgtgtgcgccaccatgtttcctggtagagtacgcacttgtgctatacacctacacatatacccaggtaatggttggtgtctggaccaaatgataggattgttgagcaccaccatgcaattagcatgaagaggcccacccactagctaaactattcatctctgttgtgccagtgcctttgtccactcactcaccacaaactctcttatgctaagctcttgctcgcatgccaccatatatgcagggtatgggtatctctctcttctctacgcacatatgaatgagcactcagtttcatcgtcgtcgtccttcgtctctccatagaaaacacaccagctgcttctcgttcttccgcgtcgtacgtaccagtaccaccctcctggattaccacctccatagctttgatatctctcatccatcgattccctcctagaatccaatccgatgcggcggccaccacccccgccccaagtggcgtcctcgtgagaggttggcagcgagctacatcagcgagaagcctagggcgcgcagtatatctcggaatgtgctggctcccaacagccgcgaagcgattctcccctcaccctcgaccacgagccgcctatataaccatctccatggctccccctcccaacccccaccagagctagcggcatcactgtcatcgagctcgaccgacgaccgtcgatcggtacccgtcgtcgtcgcggcgtcgtcgacgacggcataataatataataaccaggccagggcagggaagatggtgaagttctccaagcagtttgaggggcagcttgtccccgagtggaagcatgccttcctggactactgcctgctcaaaaaggatctcaagaggatgcagcacgcccg

SEQ ID NO: 77712 - DNA, 446 bp, Zea Mays
caagaagttgctctatggtctcggtatggactataaaaagatcgatgtatgtggcaataactgtatgcttttctggaaggagaccgcaagtgagaagaagtgtacagtatgtggtgagcgtagattcgtagaggttgaagacgatggtttgaccgtgacgaccgagatagcacgtaagcaacttcgttacatgcctcttatacctcggttgaaatgtttgttcatctccaagaaaaaagccagacacatgaggtggcacaaagaaggggtacatgagaatccagatgtcatggcgcacccagctgatacagatgcatggaaggcactagatgcctttgattccagctttgctaatgaagtgcacaatgtccacttcagtttggcaacatatggtttctcgcctttcaatctaactgcacggtcctactcatgctggttcgcctttg

SEQ ID NO: 77713 - DNA, 551 bp, Zea Mays
ggcgtgtaagggaggtgtgcaaaaggtggagaaggtgtaccaaaaccctggctggaaaaagtggcgtccaagatggcttcccaaaatgtctgggcacaccaaatccctaaacgaggaaacatggtttgctttccaaaatcgaatggcctgaattggaaagcttgggcgcaccaaatatggaggtgccgcttaccaaaaataaaaagtgttggccaaggaaatgggcgcacccgaatccctgaataaggaaaggagggggcgtgtaaggtaaagtgggttgcttgccaaaaacaaagatggtaggcgcccaaatctgattgcaggttcggcttgccaaccacaacaatgctgattaaggaaatggggcgcgctaatttctggttgccttcttttactttccttctttcttcttcttattttttgtaccttgcctttttttgatgtcctttgttgtttctttccttcctttttttggcaaccagatccgacgcccaaagcgttccaatcagcaaggctgagaacgtgccaacgaaaccagcatagaggaaaaa

SEQ ID NO: 77714 - DNA, 333 bp, Zea Mays
catccatggtcatctacgtggttcccgaggcacgcaatggtagtaggagtagacgggaggatgtcctgtggctgacacagcgttatcgcatccacatccatgtccatgtatgtcgccgcccggccgttccaccgtggagagttgggagtaacgcaattggttgggaacaagcagcgcgtgcatgcatctccttgtccgctcttgctgcctggtcactatactcgctacagagctctttgctttctctttttatgcacctctagggtaggctgagatggtgccattttgcgtaggccatggttttgaccgtgattaccctcattagcaacacgg

SEQ ID NO: 77715 - DNA, 1298 bp, Zea Mays
ctgaaatagctaaacagagttgaccattcataggggactcaatatctgtggcttctgacagttgttcctcatccccttggtaaagctcctagatctcttgcaatgcatgtagctaaaccgttgcaggacactgatgatccttggtccaattttcagcacacgctgacacaacccacgagagcgatggtaagctctcagcgcagcgaacttatcttcgacgcgaggatggttgtagtctccacgtttcacttcctctgctacgacgccaaactgctccatcttaggtggtaagggcagcggcaaggcacctcttgctggccctttggcaaccatcggaaacgatggtcgaacgccttccggccgccgcaatggcctggagacctcctcctgtaacaaagccaacacacacgcagtatcgaaggacgaggaatgattaacaaacacagctgcgcgaatatcagcacgtaacccatccacaaaatgctgaacaaagtacaaaggatccatggaacgaccatacgccacaaaattatcacgcaacccagaaaatttctcaacatagtcggcaactgatgtggtttgttgtatgctaaacatctggcaaataaacatcacgtgctcatctctaccaaacctttccagcaaagcttgacagaacactgaccagctagccaattgggatgactcctctatggatgacaaccagtgagcagcagctcccacaaaatgcatggttgacacacgcacccacaacctcacttctactgcgtacacgtcaaaataatctctactgcgcttaatacacaacttggggttttctccatcaaatttaggaaaatctagcttaggaaatgacctctaatctctcccccagaagcaccgacccaaggtaaatcccccgtgacatgagcaggatccgataattgaaattcaggacccgtgcacaagtgatgccgaggtgctgtaggagacgtacctttgaccggggggatggagtagggtggtgactgacccaaatccatcctcctcggtgaacaattcgatgtgatgcccatggggcggttcggctgtaaaccgggcagctgggcgctcgacaaccggaggtgaaggcgcgagaactcccgccatggaagtcgatttgtccaccacggcgcgttcccaatttttggagaccttgccgacctccaagcgaagatcgtcgaccaccccttccatggaagagcgccagtccgcgattagacttgtattctgctccaacgcttgaacgcgtcgctcctgacctttggtgaagtcagaga

SEQ ID NO: 77716 - DNA, 532 bp, Zea Mays
cttgatcaggtcttattcaccctataaatcacatcttgaccatatgaagcttaaagaagaaggtgaaataccaaaaccctaaaaatcctctcttaggggcaaaggaacactaaaaagaaactcaacaaaaagaccaagaagatcacattgtcatgacttgggtcaattataaaagttgtgatacactaaataatctacaaaaaattgtaagaaagtttgcccaaaagagttttgcaaaatcctcaaacaagccactcaagtggggcttcaaataaaaatcaggatttcagaattatgaaatccaaccctctcacaaagatcaaacgcgttcaccatgttctaaaactcaaattcacttgacccaaataacaaagtggcgccaaaggacccctagaacaccctggtgaaatttgaagacaaacccaagccggttgacatgacttggcatgagttttgcctcgggacgaagcagccagacaaacccacgttggtgacatgacaactccccacacagacccgaaaacccctaggc

SEQ ID NO: 77717 - DNA, 686 bp, Zea Mays
gcgtgtcgaaacaaagcatcagtgagtcttcacgaagtgtaagaagccatcgccaaatcggtatggaaaggtcccatcttcgaagtgggtcgcgactggatcggggtacccgtcgcgagctacttgcgtcgacatctgggtcatgcattggagaaggggacctgtgggacctttttgagggggaagagttgaggttgatgttgtttaattttcgagaggcaggtcttattccgaaggaggagccgatgtgatagtatgttgccctcgccgttctgttgcgatattgagtgaaaacgctgccctcccctcttcgcaatagaactgcgatggccatgctcgtgaggggtaaatattgtgtatagtgtatactatgatgtgttgtgtgatggtgtctttgagcccttctcttgttgttcatttgtgattgtgctacgtaatttgttttgcctattgcgagtttgctgcaatcttaggcaattttggtgtggctaggtgtgtacgtgtcataggtgactccgcgcttggtaagtgatcgtgcatctgttgtgcttatctagctgcacccttaggtgacttttgctcggatgatgtcttatgtaggagacgtcgcaccctatgagtggtgtcacatacttttgtttttccggctgcacccttaggcgacttttgctcggatgatgtctttg

SEQ ID NO: 77718 - DNA, 590 bp, Zea Mays
tagtatggtttattatatactatgcttcgtttcttaatctagaaaatgctctgaagatctggcaagatcacataagatctccatgtacgtagctctgagtctctgacaaacaaacaatgtgcatggctccatgcatgtacgttttaggagagggcatggaggttagcggcgagacccggatttaccgtggaggagatttactttactcgatcggggtcaagtcaaatgctttcgccagctataaatggaggggtgatgtgcaggtgaaggccatgtgtggaaggccctgctgagctcaagattgctgatgcgatacggacatacggtcagatcaggtggtctggtctggttcattcaagccctcactcggtgaccccgtactggaaagatggagatatgtttgtttggtttccgatccgcacgacgagttttctgttgtttcgttccatctttttcttcttcatagccgcctatcccctagctagcttaggtttcttttgtacgaccttgagagaattgatgtaatctatcaagttcttcaatctatctatttagctagctacctgctacgcagtaacaagctaggatta

SEQ ID NO: 77719 - DNA, 478 bp, Zea Mays
ggagaaggaacttcactactttccccactggctacatattgccgactgttcttctgagtcaaagggacctcatcttcttcctccccctcgttttcatcagcaacacagacagcacacccattgggatcaacgacagatggatcacacccattgggatcaccgacagatggatcacacccattgggatcagcgacagatggatcacacctattgggatcagcgacagatgaatcacacccattggggtcagcgtcggtaaattcaggcacagacacttcctcagcagcaggaaccgaaggaccaacatcccgatccaagctagatactcaccgaagacgtctctttttctttttctgctcatcagcaggagaatcaagttgattggctcggcaaggatgtttcgggtgaacactgacaggcctctgaatatccaaggttgtaccagcttccgggagaggcgccaccaccaatgtcccag

SEQ ID NO: 77720 - DNA, 780 bp, Zea Mays
gttaatatgaattttatgcaaccagaatggatccatttggagctataatgaatttaatatgatttatcaaagtttctggaattgtttttatactaaaaacatattttctttactatttctgaaattcctaagagttctggaccacagacataattaacagagagttcggggcttaaactgcaaattccagggcacggttgtaattatttaacactgtgcgcgggtggcgggttcatttgaaaagagtctgagggctcttaagtaaaatctccaggccgaaggggtattcacagatatgggccatcagatccccactggacagcccggattacattcatcctagatcgaaacagtgcgctgcatcaaacgtcggatcgaacaccaacgcaccagattgaaataagcatgacttaatcccgcccgctcaaatcgcatcgaacggtcaccgtcgaatgcctcgctacgctactcccagattggatctgcgccgttcatcagcgattccacggcaccggtgtcgtcctcctccccgctcagttctccccgtctgccgcgacccgaccacggcgaaaaatccaattccggcaagacggatcaccggcgataacgcacctaaacctaattagaccagttctacacgtaatggtgatgcaagcgggcataggcgaggagttcataccaacaatcgtgggcgcaggagagctgtccatggtgaccgcggattcttggtgagatgcgagcgacggcgagaaattgcgtacgccaagccactggatccaa

SEQ ID NO: 77721 - DNA, 421 bp, Zea Mays
cggagatggagatcgtcggtgctaccagggtcggtgacatcactaccgatgtcgcgtcatcatatcttgacccctccacagacaggccagcgatggcctggataggtgtttgcgacggcatcaaatctgacacctgaggcattacgggggacgccacgacgacctcggcagcatcatcccctcgcacagtctaccctcccagggcaagccacgcttcctcggcccccattggagagcatcctgtgcggcatcaacctaaggaatcgagtgagtcgtagcttcggttgatgaactcatgcccgtcttcatggccttcaagggggtcaggatcagcgcacctgctttgtgcttcaggctaaagtatgcaggagcagaaattcacacaaaatactcaaggaaaaatccaagttttggatatctc

SEQ ID NO: 77722 - DNA, 1008 bp, Zea Mays
gttcctgagcgttttgggggaaatcacgaattgaagctttctggtggatgattgtggccgattagcggtggttagctggctgactacctcacggagctagacacgggctcaatttatagagtccgcgggcggtggtgctcaatttggccgagccgtgttggcggccggagataaagaagaagcttgcgcggtgaattcgtgtccgccgccgtggcaacctccccgtcgacgatgggacgggtatagggagtcatggcgacgcggtggaaaggtttggacacgcggcacacagccgggaagcggcggtcaccggcgagcacatccgttccaaccgtgaggaggaaaagagagacacggggaggtcaccggagtgatttccagctcaccgtcgacgaagatcttttaccgtgtgcccttatttgcccatcccgtgcacaagtcaggccggcaacggcacgaatcacggcggaggtgtcgtcgacggtgggagttccgcgctggcagcctgatccattccagtctactgtaccatggtgaacccccattcagagcgactgacagagccttttggagcatggttttctcttaattttgaatgacaactcatcacaaaatctgcatcaaagttgtaaagcaacataccatctacaattcgactatagggatgaaacttatttgagcactggatccaaatcaaaatcgagctcaaagttcaccccatagcactataactctgaaattcaacttcaagcagtctgacagcccatctttgattgagtttttctccaaatttcacataagaccatggcttgaatccttaaacaaagttgttcccctatgattggtcttcaactttgatgtggtcacctaccatgaattcccactattttgaaagctacacagcctcaaagtcgggcctacaaccctgttttcagacttagcataggaatcaaaatcaaggtcctttttgcaaatgagtccaaatctcagggtttagcttgtaaattc

SEQ ID NO: 77723 - DNA, 305 bp, Zea Mays
aacactagcagacgcattagttcacgggctctgtagatcatcaaacacaaaaatcaattagtcaaatgggtcgaggtcaattttccttaccggttaggttaacctaattcgcccaccagcaaaccaatagtcgcacccctctcgctcttcccaagttcccgtcgtgaacctagcagttcagtacgggcgcttcctccctgtatgtgtggatatcttgtaggtgctgcatctagagcactaggacaaaccacgtaagtacgtgaaggacgtcggtgaatacacgacactgcttgacgtgttcgtct

SEQ ID NO: 77724 - DNA, 562 bp, Zea Mays
caaagcatgccaccatccatgtagctatgacaaagggcaacatgtgtatctgaggccactatgtggcatatgtcaccatccttgtagccatgtctaaacatgctaatgtattgacaagcattataaagtacaaggagttgcatcgtttaccaaacatcatagttgatggtgtggtctctataaccttccactacaacaagatgtatctacccctatgtcatgaacaagctcaacattatgacaatcaagatatgcactacatatgactctatgattgagacaatataggagtagttgatcctctgctaggcgaggcctactgcccaacagggatgtatcactctcccctccttagttataaaagtgagggataaagcagcatagaggagccttggagcctattagtatttggctttttggacttggacttctattagattatagataggataaacaaaggtgaagcaggtatcagttaatctaaaactgtcatcagagccaaaaggtaagggagagctagacgatcatggggctcagttgatatataagatgtagtcttctt

SEQ ID NO: 77725 - DNA, 435 bp, Zea Mays
gatgagatcaaaagaacaacatatgcatgagataagcttaaaacaggagaattcattacatatgctactttagtaatgaaagcaacaatcctttataaagatgacattactttaacaagaaggattgattaagtagcatacttcatgagaaatttattcttatgtaagagactatatgagattatttaagataaagcgatagtctcaacaaaatcaagatatagaaagatgctccccctaaagatatacatcaagtatttgaatgaattgaatggatgtatttactttaaagacaaatagggagaagcattatacatcttgatcaaggcttataagatttgcaataaacaacttaagcctggatttctcacaatgaaaaaaggtttagaatactcacaactaccccattgaccgttttgaggatcttattatcca

SEQ ID NO: 77726 - DNA, 478 bp, Zea Mays
gctttcaagtcacaatttatctatctctatgcttcgtgggcaagggtacgatggtgcttctaatatgagaggcgagtttaatggggtgcagaaaatgattcgtgatgaaaatccttatgctttctatgtgcattgttttgcccatcaattgcaactagtagttgtcacaatttcgacttctagtgcagacattgcagatttctttaactatattcctttaatagtcaacaccgtgggggcatcttgtatgagaaaggatgccttacttgcaaagcatcatgatgtgttgctagaaaagattgagaatggtgagattatgactggaagaggtttaaaccaagaaagtagcctagcaaggcctggagatactagatggggttcacatctaaaaactttgcttcgcattttggtgatgtttgaggcaatcatagatgtccttgaaatagtgaagaaagattctattaaaccagcatgtaat
